(19) United States
(12) Patent Application Publication
(10) Pub. No.: US 2002/0048763 A1
(43) Pub. Date: Apr. 25, 2002

(54) Human genome-derived single exon nucleic acid probes useful for gene expression analysis

(76) Inventors: Sharron Gaynor Penn, San Mateo, CA (US); David Russell Rank, Fremont, CA (US); Wensheng Chen, Mountain View, CA (US); David Kagen Hanzel, Palo Alto, CA (US)

Correspondence Address: FISH & NEAVE, 1251 AVENUE OF THE AMERICAS, 50TH FLOOR, NEW YORK, NY, 10020-1105, US

(21) Appl. No.: 09/864,761

(22) Filed: May 23, 2001

Related U.S. Application Data
(63) Continuation-in-part of application No. 09/774,203, filed on Jan. 29, 2001.
(63) Continuation-in-part of application No. 09/632,366, filed on Aug. 3, 2000.
(63) Continuation-in-part of application No. 09/608,408, filed on Jun. 30, 2000.
(63) Continuation-in-part of application No. PCT/US01/00666, filed on Jan. 30, 2001.
(63) Continuation-in-part of application No. PCT/US01/00667, filed on Jan. 30, 2001.
(63) Continuation-in-part of application No. PCT/US01/00664, filed on Jan. 30, 2001.
(63) Continuation-in-part of application No. PCT/US01/00669, filed on Jan. 30, 2001.
(63) Continuation-in-part of application No. PCT/US01/00665, filed on Jan. 30, 2001.
(63) Continuation-in-part of application No. PCT/US01/00668, filed on Jan. 30, 2001.
(63) Continuation-in-part of application No. PCT/US01/00663, filed on Jan. 30, 2001.
(63) Continuation-in-part of application No. PCT/US01/00662, filed on Jan. 30, 2001.
(63) Continuation-in-part of application No. PCT/US01/00661, filed on Jan. 30, 2001.
(63) Continuation-in-part of application No. PCT/US01/00670, filed on Jan. 30, 2001.
(60) Provisional application No. 60/180,312, filed on Feb. 4, 2000.
(60) Provisional application No. 60/207,456, filed on May 26, 2000.
(60) Provisional application No. 60/234,687, filed on Sep. 21, 2000.
(60) Provisional application No. 60/236,359, filed on Sep. 27, 2000.

(30) Foreign Application Priority Data
Oct. 4, 2000 (GB) 00242636

(51) Int. Cl. C12Q 1/68; C07H 21/04

(52) U.S. Cl. 435/6; 536/24.3

(57) ABSTRACT

Methods and apparatus for predicting, confirming and displaying functional regions from genomic sequence data are used to identify 16,834 unique human genome-derived single exon probes useful for gene expression analysis, particularly gene expression analysis by microarray. Also presented are genome-derived single exon microarrays that include such probes, peptides encoded by the exons, and antibodies thereto.

### CROSS REFERENCE TO RELATED APPLICATIONS

[0001] This application claims priority under 35 U.S.C. § 365(c) to international patent application nos. PCT/US01/00666, PCT/US01/00667, PCT/US01/00664, PCT/US01/00669, PCT/US01/00665, PCT/US01/00668, PCT/US01/00663, PCT/US01/00662, PCT/US01/00661, PCT/US01/00670, all filed Jan. 30, 2001; claims priority under 35 U.S.C. § 119(e) to provisional applications for U.S. Pat. Ser. No. 60/180,312, filed Feb. 4, 2000, No. 60/207,456, filed May 26, 2000, No. 60/234,687, filed Sep. 21, 2000, and No. 60/236,359, filed Sep. 27, 2000; claims priority under 35 U.S.C. § 119(a) to GB 24263.6, filed Oct. 4, 2000; and is a continuation-in-part of U.S. patent application Ser. No. 09/608,408, filed Jun. 30, 2000, Ser. No. 09/632,366, filed Aug. 3, 2000, and Ser. No. 09/774,203, filed Jan. 29, 2001, the disclosures of which are incorporated herein by reference in their entireties.

### INCORPORATION-BY-REFERENCE OF MATERIALS FILED ON COMPACT DISC

[0002] The present application includes a Sequence Listing and ten (10) tables filed herewith on a single (CD-R) compact disc, filed herewith in duplicate, having volume label AEOMICAR52.

[0003] The Sequence Listing is presented in a single file named Sequence.txt, last modified May 22, 2001 09:30a, and having 48,662,849 bytes.

[0004] Table 4 is presented in a single file named table4.txt, last modified May 21, 2001 04:52p, and having 6,690,357 bytes.

[0005] Table 5 is presented in a single file named table5.txt, last modified May 21, 2001 04:52p, and having 5,155,245 bytes.

[0006] Table 6 is presented in a single file named table 6.txt, last modified May 21, 2001 04:52p, and having 6,815,259 bytes.

[0007] Table 7 is presented in a single file named table7.txt, last modified May 21, 2001 04:52p, and having 6,579,954 bytes.

[0008] Table 8 is presented in a single file named presented in a single file named table8.txt, last modified May 21, 2001 04:52p, and having 6,877,305 bytes.

[0009] Table 9 is presented in a single file named table9.txt, last modified May 21, 2001 04:52p, and having 6,545,772 bytes.

[0010] Table 10 is presented in a single file named table10.txt, last modified May 21, 2001 04:52p, and having 6,822,063 bytes.

[0011] Table 11 is presented in a single file named table 11.txt, last modified May 21, 2001 04:52p, and having 4,773,006 bytes.

[0012] Table 12 is presented in a single file named table12.txt, last modified May 21, 2001 04:52p, and having 2,675,997 bytes.

[0013] Table 13 is presented in a single file named table 13.txt, last modified May 21, 2001 04:52p, and having 2,609,253 bytes.

[0014] The disclosure of each of the aforesaid files is incorporated herein by reference in its entirety.

### FIELD OF THE INVENTION

[0015] The present invention is in the fields of molecular biology and bioinformatics. In particular, the invention relates to 16,834 genome-derived single exon nucleic acid probes expressed in one or more of ten tested human tissues, which are useful for gene expression analysis as by microarray hybridization. The invention further relates to single exon nucleic acid microarrays that include such probes.

### BACKGROUND OF THE INVENTION

[0016] For almost two decades following the invention of general techniques for nucleic acid sequencing, Sanger et al., Proc. Natl. Acad. Sci. USA 70(4):1209-13 (1973); Gilbert et al., Proc. Natl. Acad. Sci. USA 70(12):3581-4 (1973), these techniques were used principally as tools to further the understanding of proteins—known or suspected—about which a basic foundation of biologic knowledge had already been built. In many cases, the cloning effort that preceded sequence identification had been both informed and directed by that antecedent biological understanding.

[0017] For example, the cloning of the T cell receptor for antigen was predicated upon its known or suspected cell type-specific expression, by its suspected membrane association, and by the predicted assembly of its gene via T cell-specific somatic recombination. Hedrick et al., Nature 308(5955):149-53 (1984). Subsequent sequencing efforts at once confirmed and extended understanding of this family of proteins. Hedrick et al., Nature 308(5955):153-8 (1984).

[0018] More recently, however, the development of high throughput sequencing methods and devices, in concert with large public and private undertakings to sequence the human and other genomes, has altered this investigational paradigm: today, sequence information often precedes understanding of the basic biology of the encoded protein product.

[0019] One of the approaches to large-scale sequencing is predicated upon the proposition that expressed sequences—that is, those accessible through isolation of mRNA—are of greatest initial interest. This “expressed sequence tag” (“EST”) approach has already yielded vast amounts of sequence data. Adams et al., Science 252:1651 (1991); Williamson, Drug Discov. Today 4:115 (1999); Strausberg et al., Nature Genet. 15:415 (1997); Adams et al., Nature 377(suppl.):3 (1995); Marra et al., Nature Genet. 21:191 (1999). For nucleic acids sequenced by this approach, often the only biologic information that is known a priori with any certainty is the likelihood of biologic expression itself. By virtue of the species and tissue from which the mRNA had originally been obtained, most such sequences are also annotated with the identity of the species and at least one tissue in which expression appears likely.

[0020] More recently, the pace of genomic sequencing has accelerated dramatically. When genomic DNA serves as the initial substrate for sequencing efforts, expression cannot be presumed; often the only a priori biologic information about the sequence includes the species and chromosome (and perhaps chromosomal map location) of origin.

[0021] With the ever-accelerating pace of sequence accumulation by directed, EST, and genomic sequencing approaches—and in particular, with the accumulation of sequence information from multiple genera, from multiple species within genera, and from multiple individuals within a species—there is an increasing need for methods that rapidly and effectively permit the functions of nucleic sequences to be elucidated. And as such functional information accumulates, there is a further need for methods of storing such functional information in meaningful and useful relationship to the sequence itself; that is, there is an increasing need for means and apparatus for annotating raw sequence data with known or predicted functional information.

[0022] Although the increase in the pace of genomic sequencing is due in large part to technological changes in sequencing strategies and instrumentation, Service, Science 280:995 (1998); Pennisi, Science 283: 1822-1823 (1999), there is an important functional motivation as well.

[0023] While it was understood that the EST approach would rarely be able to yield sequence information about the noncoding portions of the genome, it now also appears the EST approach is capable of capturing only a fraction of a genome's actual expression complexity.

[0024] For example, when the C. elegans genome was fully sequenced, gene prediction algorithms identified over 19,000 potential genes, of which only 7,000 had been found by EST sequencing. C. elegans Sequencing Consortium, Science 282:2012 (1998). Analogously, the recently completed sequence of chromosome 2 of Arabidopsis predicts over 4000 genes, Lin et al., Nature, 402:761 (1999), of which only about 6% had previously been identified via EST sequencing efforts. Although the human genome has the greatest depth of EST coverage, it is still woefully short of surrendering all of its genes. One recent estimate suggests that the human genome contains more than 146,000 genes, which would at this point leave greater than half of the genes undiscovered. It is now predicted that many genes, perhaps 20 to 50%, will only be found by genomic sequencing.

[0025] There is, therefore, a need for methods that permit the functional regions of genomic sequence—and most importantly, but not exclusively, regions that function to encode genes—to be identified.

[0026] Much of the coding sequence of the human genome is not homologous to known genes, making detection of open reading frames (“ORFs”) and predictions of gene function difficult. Computational methods exist for predicting coding regions in eukaryotic genomes. Gene prediction programs such as GRAIL and GRAIL II, Uberbacher et al., Proc. Natl. Acad. Sci. USA 88(24):11261-5 (1991); Xu et al., Genet. Eng. 16:241-53 (1994); Uberbacher et al., Methods Enzymol. 266:259-81 (1996); GENEFINDER, Solovyev et al., Nucl. Acids. Res. 22:5156-63 (1994); Solovyev et al., Ismb 5:294-302 (1997); and GENSCAN, Burge et al., J. Mol. Biol. 268:78-94 (1997), predict many putative genes without known homology or function. Such programs are known, however, to give high false positive rates. Burset et al., Genomics 34:353-367 (1996). Using a consensus obtained by a plurality of such programs is known to increase the reliability of calling exons from genomic sequence. Ansari-Lari et al., Genome Res. 8(l):29-40 (1998)

[0027] Identification of functional genes from genomic data remains, however, an imperfect art. For example, in reporting the full sequence of human chromosome 21, the Chromosome 21 Mapping and Sequencing Consortium reports that prior bioinformatic estimates of human gene number may need to be revised substantially downwards. Nature 405:311-199 (2000); Reeves, Nature 405:283-284 (2000).

[0028] Thus, there is a need for methods and apparatus that permit the functions of the regions identified bioinformatically—and specifically, that permit the expression of regions predicted to encode protein—readily to be confirmed experimentally.

[0029] Recently, the development of nucleic acid microarrays has made possible the automated and highly parallel measurement of gene expression. Reviewed in Schena (ed.), DNA Microarrays: A Practical Approach (Practical Approach Series), Oxford University Press (1999) (ISBN: 0199637768); Nature Genet. 21(1)(suppl):1-60 (1999); Schena (ed.), Microarray Biochip: Tools and Technology, Eaton Publishing Company/BioTechniques Books Division (2000) (ISBN: 1881299376), the disclosures of which are incorporated herein by reference in their entireties.

[0030] It is common for microarrays to be derived from cDNA/EST libraries, either from those previously described in the literature, such as those from the I.M.A.G.E. consortium, Lennon et al., “The I.M.A.G.E. Consortium: an Integrated Molecular Analysis of Genomes and Their Expression, Genomics 33(1):151-2 (1996), or from the construction of “problem specific” libraries targeted at a particular biological question, R. S. Thomas et al., Cancer Res. (in press). Such microarrays by definition can measure expression only of those genes found in EST libraries, and thus have not been useful as probes for genes discovered solely by genomic sequencing.

[0031] The utility of using whole genome nucleic acid microarrays to answer certain biologic questions has been demonstrated for the yeast Saccharomyces cerevisiae. De Risi et al., Science 278:680 (1997). The vast majority of yeast nuclear genes, approximately 95% however, are single exon genes, i.e., lack introns, Lopez et al., RNA 5:1135-1137 (1999); Goffeau et al., Science 274:563-67 (1996), permitting coding regions more readily to be identified. Whole genome nucleic acid microarrays have not generally been used to probe gene expression from more complex eukaryotic genomes, and in particular from those averaging more than one intron per gene.

### SUMMARY OF THE INVENTION

[0032] The present invention solves these and other problems in the art by providing, in a first aspect, human genome-derived single exon nucleic acid probes. The probes are useful, inter alia, for gene expression analysis, and particularly for gene expression analysis by microarray.

[0033] In preferred embodiments, the invention provides genome-derived single-exon probes known to be expressed in one or more human tissues or cell types, particularly human brain, heart, liver, fetal liver, placenta, lung, bone marrow, BT 474 and other human mammary epithelial cells, HeLa and other human cervical epithelial cells, HBL 100 and other human mammary epithelial cells. In particular embodiments, the invention provides human single-exon probes that comprise a nucleotide sequence as set forth in any one of SEQ ID NOs: 16,835-33,299, the complement thereof, or a fragment of the referenced SEQ ID NO: or complement thereof, wherein the probe hybridizes at high stringency (i.e., under high stringency conditions) to a nucleic acid expressed in human cells, and wherein the probe includes portions of no more than one human exon. In certain embodiments, the single exon nucleic acid probe comprises any one of SEQ ID NOs. 1-16,834 or the complement thereof.

[0034] In a second aspect, the invention provides an amplifiable nucleic acid composition, comprising a single exon nucleic acid probe of the present invention and at least one nucleic acid primer, wherein the at least one primer is sufficient to prime enzymatic amplification of the probe.

[0035] In a third aspect, the invention provides a spatially-addressable set of single exon nucleic acid probes, comprising: a plurality of single exon nucleic acid probes of the present invention, wherein each of the plurality of probes is separately and addressably isolatable and/or amplifiable from the plurality.

[0036] In a fourth aspect, the invention provides a single exon nucleic acid probe attached to a substrate. The substrate can, e.g., be a filter membrane, such as nitrocellulose or nylon, or can be a solid, such as glass, amorphous silicon, crystalline silicon, or plastic.

[0037] In a fifth aspect, the invention provides a single exon nucleic acid microarray, comprising: a plurality of nucleic acid probes addressably disposed upon a substrate, wherein at least 50% of the nucleic acid probes include a fragment of no more than one exon of a eukaryotic genome, the fragment being selectively hybridizable at high stringency (under high stringency conditions) to an expressed gene, wherein the plurality of nucleic acid probes averages at least 50 bp, 75 bp, or 100 bp in length, and wherein the eukaryotic genome averages at least one intron per gene.

[0038] In certain embodiments of the nucleic acid microarrays of the present invention, at least 50% of the exon-including nucleic acid probes further comprise, contiguous to a first end of the fragment, a first intronic and/or intergenic sequence that is identically contiguous to the fragment in the human genome. In certain embodiments, at least 50% of the exon-including nucleic acid probes further comprise, contiguous to a second end of the fragment, a second intronic and/or intergenic sequence that is identically contiguous to the fragment in the human genome.

[0039] In preferred embodiments, the microarray includes genome-derived single-exon probes known to be expressed in one or more human tissues or cell types, including human brain, heart, liver, fetal liver, placenta, lung, bone marrow, BT 474 and other human mammary epithelial cells, HeLa and other human cervical epithelial cells, HBL 100 and other human mammary epithelial cells.

[0040] In particular embodiments, the microarrays of the present invention include a plurality of human single-exon probes that comprise a nucleotide sequence as set forth in any one of SEQ ID NOs: 16,835-33,299, the complement thereof, or a fragment of the referenced SEQ ID NO: or complement thereof, wherein the probe hybridizes at high stringency (i.e., under high stringency conditions) to a nucleic acid expressed in human cells, and wherein the probe includes portions of no more than one human exon. In certain embodiments, the single exon nucleic acid probe comprises any one of SEQ ID NOs. 1-16,834 or the complement thereof.

[0041] In a sixth aspect, the invention provides a method of measuring eukaryotic gene expression, comprising: contacting the single exon microarray of the invention with a first collection of detectably labeled nucleic acids, the first collection of nucleic acids derived from mRNA of at least one eukaryotic tissue or cell type; and then measuring the label detectably bound to each probe of the microarray. In certain embodiments the method further comprises comparing the measurement to a second measurement, the second measurement identically obtained using a second, control, collection of nucleic acids.

[0042] In certain embodiments of this aspect of the invention, the first and second collections of detectably labeled nucleic acids are distinguishably labeled, often by fluorophores, and are contacted simultaneously to the microarray.

[0043] In a seventh aspect, the invention provides a method of selling and/or licensing genome-derived single-exon microarrays to a customer desiring to measure gene expression, comprising: making available for computerized query a database having a record corresponding to each genome-derived single exon microarray available for sale and/or license; responding to a customer query of the database by returning to the customer at least one record, or an identifier of that record, that best meets the customer query criteria; and offering for sale or license to the querying customer the genome-derived single exon microarray identified in that at least one record. In certain embodiments, the single exon microarrays includes the probes of the present invention.

[0044] In an eighth aspect, the invention provides a method of designing and/or manufacturing a genome-derived single exon microarray that has genome-derived single exon probes that have at least one common attribute desired by a customer, the method comprising: receiving from a customer at least one criterion for common probe attribute; using the at least one criterion to identify, within a database having records corresponding to available genome-derived single exon probes, those that meet the criterion; and then disposing such identified probes on a substrate capable of functioning in microarray hybridization experiments. In typical embodiments, the common attribute is common expression in a tissue and/or cell type. In presently preferred embodiments, the tissue and/or cell type is selected from the group consisting of: human brain, heart, liver, fetal liver, placenta, lung, bone marrow, HeLa cells, BT 474 cells, and HBL 100 cells.

[0045] In a ninth aspect, the invention provides a method for making available by subscription expression data obtained from use of the genome-derived single exon probes and genome-derived single exon microarrays of the present invention to customers that desire such information, comprising making available to a subscription client for computerized query a database, the database having records containing expression data generated using single exon probes disposed upon microarrays; and then responding to a customer query of the database by returning to the customer at least one record, or an identifier of the at least one record, that best meets the customer query criteria.

[0046] In a tenth aspect, the invention provides a method of attracting investment to a company that makes and sells microarrays or expression data obtained from microarrays, comprising: advertising the availability for distribution, sale, or license of genome-derived single exon probes, microarrays, and/or data therefrom; and then selling stock in the company.

[0047] In an eleventh aspect, the invention provides a protein, polypeptide, or peptide comprising: at least 8 amino acids of the sequence set forth in any one of SEQ ID NOs: 33,300-49,117. In typical embodiments, the protein, polypeptide, or peptide comprises at least 15 amino acids of the sequence set forth in any one of SEQ ID NOs: 33,300-49,117. In certain embodiments, the protein, polypeptide or peptide is detectably labeled.

[0048] In a twelfth aspect, the invention provides an isolated nucleic acid that encodes the protein, polypeptide, or peptide of the present invention.

[0049] In a thirteenth aspect, the invention provides an antibody, wherein the antibody is specific for the protein, polypeptide, or peptide of the present invention.

[0050] Various further aspects and embodiments of the present invention are set forth in the following numbered paragraphs:

[0051] 1. A single exon nucleic acid probe for measuring human gene expression, comprising:

[0052] a nucleotide sequence as set forth in any one of SEQ ID NOs: 16,835-33,299, the complement thereof, or a fragment of said SEQ ID NO: or said complement,

[0053] wherein said probe hybridizes at high stringency to a nucleic acid expressed in human cells and includes portions of no more than one human exon.

[0054] 2. A single exon nucleic acid probe for measuring gene expression in human brain, comprising:

[0055] a nucleotide sequence as set forth in any one of the exon SEQ ID NOs: set forth in Table 4, the complement thereof, or a fragment of said SEQ ID NO: or said complement,

[0056] wherein said probe hybridizes at high stringency to a nucleic acid expressed in human brain and includes portions of no more than one human exon.

[0057] 3. A single exon nucleic acid probe for measuring gene expression in human heart, comprising:

[0058] a nucleotide sequence as set forth in any one of the exon SEQ ID NOs: set forth in Table 5, the complement thereof, or a fragment of said SEQ ID NO: or said complement,

[0059] wherein said probe hybridizes at high stringency to a nucleic acid expressed in human heart and includes portions of no more than one human exon.

[0060] 4. A single exon nucleic acid probe for measuring gene expression in human liver, comprising:

[0061] a nucleotide sequence as set forth in any one of the exon SEQ ID NOs: set forth in Table 6, the complement thereof, or a fragment of said SEQ ID NO: or said complement,

[0062] wherein said probe hybridizes at high stringency to a gene expressed in human liver and includes portions of no more than one human exon.

[0063] 5. A single exon nucleic acid probe for measuring gene expression in human fetal liver, comprising:

[0064] a nucleotide sequence as set forth in any one of the exon SEQ ID NOs: set forth in Table 7, the complement thereof, or a fragment of said SEQ ID NO: or said complement,

[0065] wherein said probe hybridizes at high stringency to a gene expressed in human fetal liver and includes portions of no more than one human exon.

[0066] 6. A single exon nucleic acid probe for measuring gene expression in human placenta, comprising:

[0067] a nucleotide sequence as set forth in any one of the exon SEQ ID NOs: set forth in Table 8, the complement thereof, or a fragment of said SEQ ID NO: or said complement,

[0068] wherein said probe hybridizes at high stringency to a gene expressed in human placenta and includes portions of no more than one human exon.

[0069] 7. A single exon nucleic acid probe for measuring gene expression in human lung, comprising:

[0070] a nucleotide sequence as set forth in any one of the exon SEQ ID NOs: set forth in Table 9, the complement thereof, or a fragment of said SEQ ID NO: or said complement,

[0071] wherein said probe hybridizes at high stringency to a gene expressed in human lung and includes portions of no more than one human exon.

[0072] 8. A single exon nucleic acid probe for measuring gene expression in human bone marrow, comprising:

[0073] a nucleotide sequence as set forth in any one of the exon SEQ ID NOs: set forth in Table 10, the complement thereof, or a fragment of said SEQ ID NO: or said complement,

[0074] wherein said probe hybridizes at high stringency to a gene expressed in human bone marrow and includes portions of no more than one human exon.

[0075] 9. A single exon nucleic acid probe for measuring gene expression in HeLa or other human cervical epithelial cells, comprising:

[0076] a nucleotide sequence as set forth in any one of the exon SEQ ID NOs: set forth in Table 11, the complement thereof, or a fragment of said SEQ ID NO: or said complement,

[0077] wherein said nucleic acid hybridizes at high stringency to a gene expressed in HeLa cells and includes portions of no more than one human exon.

[0078] 10. A single exon nucleic acid probe for measuring gene expression in BT 474 or other human mammary epithelial cells, comprising:

[0079] a nucleotide sequence as set forth in any one of the exon SEQ ID NOs: set forth in Table 12, the complement thereof, or a fragment of said SEQ ID NO: or said complement,

[0080] wherein said probe hybridizes at high stringency to a gene expressed in BT 474 cells and includes portions of no more than one human exon.

[0081] 11. A single exon nucleic acid probe for measuring gene expression in HBL 100 or other human mammary epithelial cells, comprising:

[0082] a nucleotide sequence as set forth in any one of the exon SEQ ID NOs: set forth in Table 13, the complement thereof, or a fragment of said SEQ ID NO: or said complement,

[0083] wherein said probe hybridizes at high stringency to a gene expressed in HBL 100 cells and includes portions of no more than one human exon.

[0084] 12. The single exon nucleic acid probe of any one of paragraphs 1-11, wherein said fragment includes at least 20 contiguous nucleotides of said SEQ ID NO: or the complement thereof.

[0085] 13. The single exon nucleic acid probe of any one of paragraphs 1-11, wherein said fragment includes at least 25 contiguous nucleotides of said SEQ ID NO: or the complement thereof.

[0086] 14. The single exon nucleic acid probe of any one of paragraphs 1-11, wherein said fragment includes at least 50 contiguous nucleotides of said SEQ ID NO: or the complement thereof.

[0087] 15. The single exon nucleic acid probe of any one of paragraphs 1-11, wherein said fragment includes the entirety of said SEQ ID NO: or the complement thereof.

[0088] 16. The single exon nucleic acid probe of paragraph 1, comprising any one of SEQ ID NOs. 1-16,834 or the complement thereof.

[0089] 17. The single exon nucleic acid probe of paragraph 2, comprising any one of the probe SEQ ID NOs: set forth in Table 4, or the complement thereof.

[0090] 18. The single exon nucleic acid probe of paragraph 3, comprising any one of the probe SEQ ID NOs: set forth in Table 5, or the complement thereof.

[0091] 19. The single exon nucleic acid probe of paragraph 4, comprising any one of the probe SEQ ID NOs: set forth in Table 6, or the complement thereof.

[0092] 20. The single exon nucleic acid probe of paragraph 5, comprising any one of the probe SEQ ID NOs: set forth in Table 7, or the complement thereof.

[0093] 21. The single exon nucleic acid probe of paragraph 6, comprising any one of the probe SEQ ID NOs: set forth in Table 8, or the complement thereof.

[0094] 22. The single exon nucleic acid probe of paragraph 7, comprising any one of the probe SEQ ID NOs: set forth in Table 9, or the complement thereof.

[0095] 23. The single exon nucleic acid probe of paragraph 8, comprising any one of the probe SEQ ID NOs: set forth in Table 10, or the complement thereof.

[0096] 24. The single exon nucleic acid probe of paragraph 9, comprising any one of the probe SEQ ID NOs: set forth in Table 11, or the complement thereof.

[0097] 25. The single exon nucleic acid probe of paragraph 10, comprising any one of the probe SEQ ID NOs: set forth in Table 12, or the complement thereof.

[0098] 26. The single exon nucleic acid probe of paragraph 11, comprising any one of the probe SEQ ID NOs: set forth in Table 13, or the complement thereof.

[0099] 27. The single exon nucleic acid probe of any one of paragraphs 1-26, wherein said probe further comprises, contiguous to a first end of said fragment, a first intronic and/or intergenic sequence that is identically contiguous to said fragment in the human genome.

[0100] 28. The single exon nucleic acid probe of paragraph 27, wherein said probe comprises, contiguous to a first end of said fragment, a first intronic and/or intergenic sequence that is identically contiguous to said fragment in the human genome, and wherein said probe further comprises, contiguous to a second end of said fragment, a second intronic and/or intergenic sequence that is identically contiguous to said fragment in the human genome.

[0101] 29. The single exon nucleic acid probe of any one of paragraphs 1-28, wherein said probe further includes at least a first priming sequence not found in contiguity with the rest of said probe sequence in the human genome.

[0102] 30. The single exon nucleic acid probe of paragraph 29, wherein said first priming sequence is at the 5′ or 3′ end of said probe.

[0103] 31. The single exon nucleic acid probe of paragraph 29, wherein said probe includes a first priming sequence and a second priming sequence, neither of which priming sequences is found in contiguity with the rest of said probe sequence in the human genome.

[0104] 32. The single exon nucleic acid probe of paragraph 31, wherein said first and second priming sequences are respectively at the 5′ and 3′ ends of said probe.

[0105] 33. The single exon nucleic acid probe of either of paragraphs 31 or 32, wherein said first priming sequence is nonidentical to said second priming sequence.

[0106] 34. The single exon nucleic acid probe of any of paragraphs 29-33, wherein said priming sequences are at least 15 nt in length.

[0107] 35. The single exon nucleic acid probe of any one of paragraphs 1-34, wherein said probe is no more than 25 kb in length.

[0108] 36. The single exon nucleic acid probe of any one of paragraphs 1-34, wherein said probe is no more than 20 kb in length.

[0109] 37. The single exon nucleic acid probe of any one of paragraphs 1-34, wherein said probe is no more than 15 kb in length.

[0110] 38. The single exon nucleic acid probe of any one of paragraphs 1-34, wherein said probe is no more than 10 kb in length.

[0111] 39. The single exon nucleic acid probe of any one of paragraphs 1-34, wherein said probe is no more than 5 kb in length.

[0112] 40. The single exon nucleic acid probe of any one of paragraphs 1-34, wherein said probe is no more than 3 kb in length.

[0113] 41. The single exon nucleic acid probe of any one of paragraphs 1-40, wherein said probe is DNA.

[0114] 42. The single exon nucleic acid probe of paragraph 41, wherein said DNA is single-stranded.

[0115] 43. The single exon nucleic acid probe of any one of paragraphs 1-40, wherein said probe is RNA.

[0116] 44. The single exon nucleic acid probe of any one of paragraphs 1-40, wherein said probe is PNA.

[0117] 45. The single exon nucleic acid probe of any one of paragraphs 1-44, wherein said probe is detectably labeled.

[0118] 46. The single exon nucleic acid probe of paragraph 45, wherein said probe is labeled with a radionuclide.

[0119] 47. The single exon nucleic acid probe of paragraph 45, wherein said probe is labeled with a fluorophore.

[0120] 48. The single exon nucleic acid probe of paragraph 45, wherein said probe is labeled with a first member of a specific binding pair.

[0121] 49. The single exon nucleic acid probe of any one of paragraphs 1-48, wherein said probe lacks prokaryotic and bacteriophage vector sequence.

[0122] 50. The single exon nucleic acid probe of any one of paragraphs 1-49, wherein said probe lacks homopolymeric stretches of A or T.

[0123] 51. An amplifiable nucleic acid composition, comprising:

[0124] the single exon nucleic acid probe of any one of paragraphs 1-50; and

[0125] at least one nucleic acid primer,

[0126] wherein said at least one primer is sufficient to prime enzymatic amplification of said probe.

[0127] 52. The amplifiable nucleic acid composition of paragraph 51, wherein said composition comprises a first nucleic acid primer and a second nucleic acid primer, and wherein said first and second nucleic acid primers are sufficient to prime enzymatic amplification of said probe.

[0128] 53. The amplifiable nucleic acid composition of paragraph 52, wherein said enzymatic amplification is a polymerase chain reaction.

[0129] 54. A single exon nucleic acid probe kit, comprising:

[0130] the single exon nucleic acid probe of any one of paragraphs 1-50; and

[0131] at least one nucleic acid primer,

[0132] wherein said at least one primer is sufficient to prime enzymatic amplification of said probe.

[0133] 55. The single exon nucleic acid probe kit of paragraph 54, wherein said kit comprises a first nucleic acid primer and a second nucleic acid primer, and wherein said first and second nucleic acid primers are sufficient to prime enzymatic amplification of said probe.

[0134] 56. The single exon nucleic acid probe kit of paragraph 55, wherein said enzymatic amplification is a polymerase chain reaction.

[0135] 57. A spatially-addressable set of single exon nucleic acid probes, comprising:

[0136] a plurality of single exon nucleic acid probes according to any one of paragraphs 1-50,

[0137] wherein each of said plurality of probes is separately and addressably isolatable from said plurality.

[0138] 58. A spatially-addressable set of single exon nucleic acid probes, comprising:

[0139] a plurality of single exon nucleic acid probes according to any one of paragraphs 1-50,

[0140] wherein each of said plurality of probes is separately and addressably amplifiable.

[0141] 59. A spatially-addressable set of single exon nucleic acid probes for measuring gene expression in human brain, comprising:

[0142] a plurality of single exon nucleic acid probes according to any one of paragraphs 2, 12-15 as dependent from paragraph 2, 17, and 27-50 as dependent from paragraph 2,

[0143] wherein each of said plurality of probes is separately and addressably amplifiable.

[0144] 60. A spatially-addressable set of single exon nucleic acid probes for measuring gene expression in human brain, comprising:

[0145] a plurality of single exon nucleic acid probes according to any one of paragraphs 2, 12-15 as dependent from paragraph 2, 17, and 27-50 as dependent from paragraph 2,

[0146] wherein each of said plurality of probes is separately and addressably isolatable from said plurality.

[0147] 61. A spatially-addressable set of single exon nucleic acid probes for measuring gene expression in human heart, comprising:

[0148] a plurality of single exon nucleic acid probes according to any one of paragraphs 3, 12-15 as dependent from paragraph 3, 18, and 27-50 as dependent from paragraph 3,

[0149] wherein each of said plurality of probes is separately and addressably amplifiable.

[0150] 62. A spatially-addressable set of single exon nucleic acid probes for measuring gene expression in human heart, comprising:

[0151] a plurality of single exon nucleic acid probes according to any one of paragraphs 3, 12-15 as dependent from paragraph 3, 18, and 27-50 as dependent from paragraph 3,

[0152] wherein each of said plurality of probes is separately and addressably isolatable from said plurality.

[0153] 63. A spatially-addressable set of single exon nucleic acid probes for measuring gene expression in human liver, comprising:

[0154] a plurality of single exon nucleic acid probes according to any one of paragraphs 4, 12-15 as dependent from paragraph 4, 19, and 27-50 as dependent from paragraph 4,

[0155] wherein each of said plurality of probes is separately and addressably amplifiable.

[0156] 64. A spatially-addressable set of single exon nucleic acid probes for measuring gene expression in human liver, comprising:

[0157] a plurality of single exon nucleic acid probes according to any one of paragraphs 4, 12-15 as dependent from paragraph 4, 19, and 27-50 as dependent from paragraph 4,

[0158] wherein each of said plurality of probes is separately and addressably isolatable from said plurality.

[0159] 65. A spatially-addressable set of single exon nucleic acid probes for measuring gene expression in human fetal liver, comprising:

[0160] a plurality of single exon nucleic acid probes according to any one of paragraphs 5, 12-15 as dependent from paragraph 5, 20, and 27-50 as dependent from paragraph 5,

[0161] wherein each of said plurality of probes is separately and addressably amplifiable.

[0162] 66. A spatially-addressable set of single exon nucleic acid probes for measuring gene expression in human fetal liver, comprising:

[0163] a plurality of single exon nucleic acid probes according to any one of paragraphs 5, 12-15 as dependent from paragraph 5, 20, and 27-50 as dependent from paragraph 5,

[0164] wherein each of said plurality of probes is separately and addressably isolatable from said plurality.

[0165] 67. A spatially-addressable set of single exon nucleic acid probes for measuring gene expression in human placenta, comprising:

[0166] a plurality of single exon nucleic acid probes according to any one of paragraphs 6, 12-15 as dependent from paragraph 6, 21, and 27-50 as dependent from paragraph 6,

[0167] wherein each of said plurality of probes is separately and addressably amplifiable.

[0168] 68. A spatially-addressable set of single exon nucleic acid probes for measuring gene expression in human placenta, comprising:

[0169] a plurality of single exon nucleic acid probes according to any one of paragraphs 6, 12-15 as dependent from paragraph 6, 21, and 27-50 as dependent from paragraph 6,

[0170] wherein each of said plurality of probes is separately and addressably isolatable from said plurality.

[0171] 69. A spatially-addressable set of single exon nucleic acid probes for measuring gene expression in human lung, comprising:

[0172] a plurality of single exon nucleic acid probes according to any one of paragraphs 7, 12-15 as dependent from paragraph 7, 22, and 27-50 as dependent from paragraph 7,

[0173] wherein each of said plurality of probes is separately and addressably amplifiable.

[0174] 70. A spatially-addressable set of single exon nucleic acid probes for measuring gene expression in human lung, comprising:

[0175] a plurality of single exon nucleic acid probes according to any one of paragraphs 7, 12-15 as dependent from paragraph 7, 22, and 27-50 as dependent from paragraph 7,

[0176] wherein each of said plurality of probes is separately and addressably isolatable from said plurality.

[0177] 71. A spatially-addressable set of single exon nucleic acid probes for measuring gene expression in human bone marrow, comprising:

[0178] a plurality of single exon nucleic acid probes according to any one of paragraphs 8, 12-15 as dependent from paragraph 8, 23, and 27-50 as dependent from paragraph 8,

[0179] wherein each of said plurality of probes is separately and addressably amplifiable.

[0180] 72. A spatially-addressable set of single exon nucleic acid probes for measuring gene expression in human bone marrow, comprising:

[0181] a plurality of single exon nucleic acid probes according to any one of paragraphs 8, 12-15 as dependent from paragraph 8, 23, and 27-50 as dependent from paragraph 8,

[0182] wherein each of said plurality of probes is separately and addressably isolatable from said plurality.

[0183] 73. A spatially-addressable set of single exon nucleic acid probes for measuring gene expression in HeLa or other human cervical epithelial cells, comprising:

[0184] a plurality of single exon nucleic acid probes according to any one of paragraphs 9, 12-15 as dependent from paragraph 9, 24, and 27-50 as dependent from paragraph 9,

[0185] wherein each of said plurality of probes is separately and addressably amplifiable.

[0186] 74. A spatially-addressable set of single exon nucleic acid probes for measuring gene expression in HeLa or other human cervical epithelial cells, comprising:

[0187] a plurality of single exon nucleic acid probes according to any one of paragraphs 9, 12-15 as dependent from paragraph 9, 24, and 27-50 as dependent from paragraph 9,

[0188] wherein each of said plurality of probes is separately and addressably isolatable from said plurality.

[0189] 75. A spatially-addressable set of single exon nucleic acid probes for measuring gene expression in BT 474 or other human mammary epithelial cells, comprising:

[0190] a plurality of single exon nucleic acid probes according to any one of paragraphs 10, 12-15 as dependent from paragraph 10, 24, and 27 -50 as dependent from paragraph 10,

[0191] wherein each of said plurality of probes is separately and addressably amplifiable.

[0192] 76. A spatially-addressable set of single exon nucleic acid probes for measuring gene expression in BT 474 or other human mammary epithelial cells, comprising:

[0193] a plurality of single exon nucleic acid probes according to any one of paragraphs 10, 12-15 as dependent from paragraph 10, 24, and 27 -50 as dependent from paragraph 10,

[0194] wherein each of said plurality of probes is separately and addressably isolatable from said plurality.

[0195] 77. A spatially-addressable set of single exon nucleic acid probes for measuring gene expression in HBL 100 or other human mammary epithelial cells,

[0196] a plurality of single exon nucleic acid probes according to any one of paragraphs 11, 12-15 as dependent from paragraph 11, 25, and 27 -50 as dependent from paragraph 11,

[0197] wherein each of said plurality of probes is separately and addressably amplifiable.

[0198] 78. A spatially-addressable set of single exon nucleic acid probes for measuring gene expression in HBL 100 or other human mammary epithelial cells, comprising:

[0199] a plurality of single exon nucleic acid probes according to any one of paragraphs 11, 12-15 as dependent from paragraph 11, 25, and 27 -50 as dependent from paragraph 11,

[0200] wherein each of said plurality of probes is separately and addressably isolatable from said plurality.

[0201] 79. The spatially-addressable set of single exon nucleic acid probes of any one of paragraphs 57-78, wherein each of said plurality of probes is amplifiable using at least one common primer.

[0202] 80. The spatially-addressable set of single exon nucleic acid probes of any one of paragraphs 57-78, wherein each of said plurality of probes is amplifiable using a first and a second common primer.

[0203] 81. A kit for measuring human gene expression, comprising:

[0204] the spatially-addressable set of single exon nucleic acid probes of paragraph 79 or paragraph 80; and

[0205] at least one primer sufficient commonly to amplify each of said plurality of probes.

[0206] 82. The kit of paragraph 81, comprising a first primer and a second primer, wherein said first and second primers are together sufficient commonly to amplify each of said plurality of probes.

[0207] 83. The single exon nucleic acid probe of any one of paragraphs 1-50, wherein said probe is attached to a substrate.

[0208] 84. The substrate-bound single exon nucleic acid probe of paragraph 83, wherein said substrate is a filter membrane.

[0209] 85. The substrate-bound single exon nucleic acid probe of paragraph 84, wherein said filter membrane is nitrocellulose.

[0210] 86. The substrate-bound single exon nucleic acid probe of paragraph 84, wherein said filter membrane is nylon.

[0211] 87. The substrate-bound single exon nucleic acid probe of paragraph 84, wherein said filter membrane is positively-charged nylon.

[0212] 88. The substrate-bound single exon nucleic acid probe of paragraph 83, wherein said substrate is selected from the group consisting of glass, amorphous silicon, crystalline silicon, and plastic.

[0213] 89. The substrate-bound single exon nucleic acid probe of paragraph 88, wherein said substrate is glass.

[0214] 90. The substrate-bound single exon nucleic acid probe of paragraph 88, wherein said substrate is amorphous or crystalline silicon.

[0215] 91. The substrate-bound single exon nucleic acid probe of paragraph 88, wherein said substrate is a plastic.

[0216] 92. The substrate-bound single exon nucleic acid probe of paragraph 91, wherein said plastic is selected from the group consisting of polymethylacrylic, polyethylene, polypropylene, polyacrylate, polymethylmethacrylate, polyvinylchloride, polytetrafluoroethylene, polystyrene, polycarbonate, polyacetal, polysulfone, celluloseacetate, cellulosenitrate, nitrocellulose, and mixtures thereof.

[0217] 93. A single exon nucleic acid microarray, comprising:

[0218] a plurality of nucleic acid probes addressably disposed upon a substrate,

[0219] wherein at least 50% of said nucleic acid probes include a fragment of no more than one exon of a eukaryotic genome, said fragment selectively hybridizable at high stringency to an expressed gene, wherein said plurality of nucleic acid probes averages at least 100 bp in length, and wherein said eukaryotic genome averages at least one intron per gene.

[0220] 94. The single exon nucleic acid microarray of paragraph 93, wherein at least 60% of said nucleic acid probes include a fragment of no more than one exon of said eukaryotic genome, said fragment selectively hybridizable at high stringency to an expressed gene.

[0221] 95. The single exon nucleic acid microarray of paragraph 93, wherein at least 70% of said nucleic acid probes include a fragment of no more than one exon of said eukaryotic genome, said fragment selectively hybridizable at high stringency to an expressed gene.

[0222] 96. The single exon nucleic acid microarray of paragraph 93, wherein at least 75% of said nucleic acid probes include a fragment of no more than one exon of said eukaryotic genome, said fragment selectively hybridizable at high stringency to an expressed gene.

[0223] 97. The single exon nucleic acid microarray of paragraph 93, wherein at least 80% of said nucleic acid probes include a fragment of no more than one exon of said eukaryotic genome, said fragment selectively hybridizable at high stringency to an expressed gene.

[0224] 98. The single exon nucleic acid microarray of paragraph 93, wherein at least 85% of said nucleic acid probes include a fragment of no more than one exon of said eukaryotic genome, said fragment selectively hybridizable at high stringency to an expressed gene.

[0225] 99. The single exon nucleic acid microarray of paragraph 93, wherein at least 95% of said nucleic acid probes include a fragment of no more than one exon of said eukaryotic genome, said fragment selectively hybridizable at high stringency to an expressed gene.

[0226] 100. The single exon nucleic acid microarray of paragraph 93, wherein at least 99% of said nucleic acid probes include a fragment of no more than one exon of said eukaryotic genome, said fragment selectively hybridizable at high stringency to an expressed gene.

[0227] 101. The single exon nucleic acid microarray of any one of paragraphs 93-100, wherein said fragment includes at least 20 contiguous nucleotides of said exon.

[0228] 102. The single exon nucleic acid microarray of any one of paragraphs 93-100, wherein said fragment includes at least 25 contiguous nucleotides of said exon.

[0229] 103. The single exon nucleic acid microarray of any one of paragraphs 93-100, wherein said fragment includes at least 50 contiguous nucleotides of said exon.

[0230] 104. The single exon nucleic acid microarray of any one of paragraphs 93-100, wherein said fragment includes the entirety of said exon.

[0231] 105. The single exon nucleic acid microarray of any one of paragraphs 93-104, wherein at least 50% of said exon-including nucleic acid probes further comprise, contiguous to a first end of said fragment, a first intronic and/or intergenic sequence that is identically contiguous to said fragment in the human genome.

[0232] 106. The single exon nucleic acid microarray of any one of paragraphs 93-104, wherein at least 60% of said exon-including nucleic acid probes further comprise, contiguous to a first end of said fragment, a first intronic and/or intergenic sequence that is identically contiguous to said fragment in the human genome.

[0233] 107. The single exon nucleic acid microarray of any one of paragraphs 93-104, wherein at least 70% of said exon-including nucleic acid probes further comprise, contiguous to a first end of said fragment, a first intronic and/or intergenic sequence that is identically contiguous to said fragment in the human genome.

[0234] 108. The single exon nucleic acid microarray of any one of paragraphs 93-104, wherein at least 75% of said exon-including nucleic acid probes further comprise, contiguous to a first end of said fragment, a first intronic and/or intergenic sequence that is identically contiguous to said fragment in the human genome.

[0235] 109. The single exon nucleic acid microarray of any one of paragraphs 93-104, wherein at least 80% of said exon-including nucleic acid probes further comprise, contiguous to a first end of said fragment, a first intronic and/or intergenic sequence that is identically contiguous to said fragment in the human genome.

[0236] 110. The single exon nucleic acid microarray of any one of paragraphs 93-104, wherein at least 85% of said exon-including nucleic acid probes further comprise, contiguous to a first end of said fragment, a first intronic and/or intergenic sequence that is identically contiguous to said fragment in the human genome.

[0237] 111. The single exon nucleic acid microarray of any one of paragraphs 93-104, wherein at least 90% of said exon-including nucleic acid probes further comprise, contiguous to a first end of said fragment, a first intronic and/or intergenic sequence that is identically contiguous to said fragment in the human genome.

[0238] 112. The single exon nucleic acid microarray of any one of paragraphs 93-104, wherein at least 95% of said exon-including nucleic acid probes further comprise, contiguous to a first end of said fragment, a first intronic and/or intergenic sequence that is identically contiguous to said fragment in the human genome.

[0239] 113. The single exon nucleic acid microarray of any one of paragraphs 93-104, wherein at least 99% of said exon-including nucleic acid probes further comprise, contiguous to a first end of said fragment, a first intronic and/or intergenic sequence that is identically contiguous to said fragment in the human genome.

[0240] 114. The single exon nucleic acid microarray of any one of paragraphs 93-104, wherein at least 50% of said exon-including nucleic acid probes comprise, contiguous to a first end of said fragment, a first intronic and/or intergenic sequence that is identically contiguous to said fragment in the human genome, and further comprise, contiguous to a second end of said fragment, a second intronic and/or intergenic sequence that is identically contiguous to said fragment in the human genome.

[0241] 115. The single exon nucleic acid microarray of any one of paragraphs 93-104, wherein at least 60% of said exon-including nucleic acid probes comprise, contiguous to a first end of said fragment, a first intronic and/or intergenic sequence that is identically contiguous to said fragment in the human genome, and further comprise, contiguous to a second end of said fragment, a second intronic and/or intergenic sequence that is identically contiguous to said fragment in the human genome.

[0242] 116. The single exon nucleic acid microarray of any one of paragraphs 93-104, wherein at least 70% of said exon-including nucleic acid probes comprise, contiguous to a first end of said fragment, a first intronic and/or intergenic sequence that is identically contiguous to said fragment in the human genome, and further comprise, contiguous to a second end of said fragment, a second intronic and/or intergenic sequence that is identically contiguous to said fragment in the human genome.

[0243] 117. The single exon nucleic acid microarray of any one of paragraphs 93-104, wherein at least 75% of said exon-including nucleic acid probes comprise, contiguous to a first end of said fragment, a first intronic and/or intergenic sequence that is identically contiguous to said fragment in the human genome, and further comprise, contiguous to a second end of said fragment, a second intronic and/or intergenic sequence that is identically contiguous to said fragment in the human genome.

[0244] 118. The single exon nucleic acid microarray of any one of paragraphs 93-104, wherein at least 80% of said exon-including nucleic acid probes comprise, contiguous to a first end of said fragment, a first intronic and/or intergenic sequence that is identically contiguous to said fragment in the human genome, and further comprise, contiguous to a second end of said fragment, a second intronic and/or intergenic sequence that is identically contiguous to said fragment in the human genome.

[0245] 119. The single exon nucleic acid microarray of any one of paragraphs 93-104, wherein at least 85% of said exon-including nucleic acid probes comprise, contiguous to a first end of said fragment, a first intronic and/or intergenic sequence that is identically contiguous to said fragment in the human genome, and further comprise, contiguous to a second end of said fragment, a second intronic and/or intergenic sequence that is identically contiguous to said fragment in the human genome.

[0246] 120. The single exon nucleic acid microarray of any one of paragraphs 93-104, wherein at least 90% of said exon-including nucleic acid probes comprise, contiguous to a first end of said fragment, a first intronic and/or intergenic sequence that is identically contiguous to said fragment in the human genome, and further comprise, contiguous to a second end of said fragment, a second intronic and/or intergenic sequence that is identically contiguous to said fragment in the human genome.

[0247] 121. The single exon nucleic acid microarray of any one of paragraphs 93-104, wherein at least 95% of said exon-including nucleic acid probes comprise, contiguous to a first end of said fragment, a first intronic and/or intergenic sequence that is identically contiguous to said fragment in the human genome, and further comprise, contiguous to a second end of said fragment, a second intronic and/or intergenic sequence that is identically contiguous to said fragment in the human genome.

[0248] 122. The single exon nucleic acid microarray of any one of paragraphs 93-104, wherein at least 99% of said exon-including nucleic acid probes comprise, contiguous to a first end of said fragment, a first intronic and/or intergenic sequence that is identically contiguous to said fragment in the human genome, and further comprise, contiguous to a second end of said fragment, a second intronic and/or intergenic sequence that is identically contiguous to said fragment in the human genome.

[0249] 123. The single exon nucleic acid microarray of any one of paragraphs 93-122, wherein at least 50% of said exon-including nucleic acid probes comprise at least a first priming sequence not found in contiguity with the rest of said probe sequence in the human genome.

[0250] 124. The single exon nucleic acid microarray of any one of paragraphs 93-122, wherein at least 50% of said exon-including nucleic acid probes comprise at least a first priming sequence not found in contiguity with the rest of said probe sequence in the human genome.

[0251] 125. The single exon nucleic acid microarray of any one of paragraphs 93-122, wherein at least 60% of said exon-including nucleic acid probes comprise at least a first priming sequence not found in contiguity with the rest of said probe sequence in the human genome.

[0252] 126. The single exon nucleic acid microarray of any one of paragraphs 93-122, wherein at least 70% of said exon-including nucleic acid probes comprise at least a first priming sequence not found in contiguity with the rest of said probe sequence in the human genome.

[0253] 127. The single exon nucleic acid microarray of any one of paragraphs 93-122, wherein at least 75% of said exon-including nucleic acid probes comprise at least a first priming sequence not found in contiguity with the rest of said probe sequence in the human genome.

[0254] 128. The single exon nucleic acid microarray of any one of paragraphs 93-122, wherein at least 80% of said exon-including nucleic acid probes comprise at least a first priming sequence not found in contiguity with the rest of said probe sequence in the human genome.

[0255] 129. The single exon nucleic acid microarray of any one of paragraphs 93-122, wherein at least 85% of said exon-including nucleic acid probes comprise at least a first priming sequence not found in contiguity with the rest of said probe sequence in the human genome.

[0256] 130. The single exon nucleic acid microarray of any one of paragraphs 93-122, wherein at least 90% of said exon-including nucleic acid probes comprise at least a first priming sequence not found in contiguity with the rest of said probe sequence in the human genome.

[0257] 131. The single exon nucleic acid microarray of any one of paragraphs 93-122, wherein at least 95% of said exon-including nucleic acid probes comprise at least a first priming sequence not found in contiguity with the rest of said probe sequence in the human genome.

[0258] 132. The single exon nucleic acid microarray of any one of paragraphs 93-122, wherein at least 99% of said exon-including nucleic acid probes comprise at least a first priming sequence not found in contiguity with the rest of said probe sequence in the human genome.

[0259] 133. The single exon nucleic acid microarray of any one of paragraphs 123-132, wherein said first priming sequence is identical among said primer-including single exon probes.

[0260] 134. The single exon nucleic acid microarray of any one of paragraphs 93-122, wherein at least 50% of said exon-including nucleic acid probes comprise a first priming sequence and a second priming sequence, neither of which priming sequences is found in contiguity with the rest of said probe sequence in the human genome.

[0261] 135. The single exon nucleic acid microarray of any one of paragraphs 93-122, wherein at least 60% of said exon-including nucleic acid probes comprise a first priming sequence and a second priming sequence, neither of which priming sequences is found in contiguity with the rest of said probe sequence in the human genome.

[0262] 136. The single exon nucleic acid microarray of any one of paragraphs 93-122, wherein at least 70% of said exon-including nucleic acid probes comprise a first priming sequence and a second priming sequence, neither of which priming sequences is found in contiguity with the rest of said probe sequence in the human genome.

[0263] 137. The single exon nucleic acid microarray of any one of paragraphs 93-122, wherein at least 75% of said exon-including nucleic acid probes comprise a first priming sequence and a second priming sequence, neither of which priming sequences is found in contiguity with the rest of said probe sequence in the human genome.

[0264] 138. The single exon nucleic acid microarray of any one of paragraphs 93-122, wherein at least 80% of said exon-including nucleic acid probes comprise a first priming sequence and a second priming sequence, neither of which priming sequences is found in contiguity with the rest of said probe sequence in the human genome.

[0265] 139. The single exon nucleic acid microarray of any one of paragraphs 93-122, wherein at least 85% of said exon-including nucleic acid probes comprise a first priming sequence and a second priming sequence, neither of which priming sequences is found in contiguity with the rest of said probe sequence in the human genome.

[0266] 140. The single exon nucleic acid microarray of any one of paragraphs 93-122, wherein at least 90% of said exon-including nucleic acid probes comprise a first priming sequence and a second priming sequence, neither of which priming sequences is found in contiguity with the rest of said probe sequence in the human genome.

[0267] 141. The single exon nucleic acid microarray of any one of paragraphs 93-122, wherein at least 95% of said exon-including nucleic acid probes comprise a first priming sequence and a second priming sequence, neither of which priming sequences is found in contiguity with the rest of said probe sequence in the human genome.

[0268] 142. The single exon nucleic acid microarray of any one of paragraphs 93-122, wherein at least 99% of said exon-including nucleic acid probes comprise a first priming sequence and a second priming sequence, neither of which priming sequences is found in contiguity with the rest of said probe sequence in the human genome.

[0269] 143. The single exon nucleic acid microarray of any one of paragraphs 134-142, wherein said first priming sequence is identical among said primer-including single exon probes, and wherein said second priming sequence is identical among said primer-including single exon probes.

[0270] 144. The single exon nucleic acid microarray of any one of paragraphs 93-143, wherein said plurality of nucleic acid probes averages at least 200 bp in length.

[0271] 145. The single exon nucleic acid microarray of any one of paragraphs 93-143, wherein said plurality of nucleic acid probes averages at least 250 bp in length.

[0272] 146. The single exon nucleic acid microarray of any one of paragraphs 93-143, wherein said plurality of nucleic acid probes averages at least 300 bp in length.

[0273] 147. The single exon nucleic acid microarray of any one of paragraphs 93-143, wherein said plurality of nucleic acid probes averages at least 400 bp in length.

[0274] 148. The single exon nucleic acid microarray of any one of paragraphs 93-143, wherein said plurality of nucleic acid probes averages at least 500 bp in length.

[0275] 149. The single exon nucleic acid microarray of any one of paragraphs 93-148, wherein said plurality of addressably disposed nucleic acid probes consist essentially of DNA.

[0276] 150. The single exon nucleic acid microarray of paragraph 149, wherein said DNA is single-stranded.

[0277] 151. The single exon nucleic acid microarray of paragraph 149, wherein said DNA is double-stranded.

[0278] 152. The single exon nucleic acid microarray of any one of paragraphs 93-148, wherein said plurality of addressably disposed nucleic acid probes consist essentially of RNA.

[0279] 153. The single exon nucleic acid microarray of any one of paragraphs 93-148, wherein said plurality of addressably disposed nucleic acid probes consist essentially of PNA.

[0280] 154. The single exon nucleic acid microarray of any one of paragraphs 93-153, wherein at least 50% of said exon-including nucleic acid probes lack prokaryotic and bacteriophage vector sequence.

[0281] 155. The single exon nucleic acid microarray of any one of paragraphs 93-153, wherein at least 60% of said exon-including nucleic acid probes lack prokaryotic and bacteriophage vector sequence.

[0282] 156. The single exon nucleic acid microarray of any one of paragraphs 93-153, wherein at least 70% of said exon-including nucleic acid probes lack prokaryotic and bacteriophage vector sequence.

[0283] 157. The single exon nucleic acid microarray of any one of paragraphs 93-153, wherein at least 75% of said exon-including nucleic acid probes lack prokaryotic and bacteriophage vector sequence.

[0284] 158. The single exon nucleic acid microarray of any one of paragraphs 93-153, wherein at least 80% of said exon-including nucleic acid probes lack prokaryotic and bacteriophage vector sequence.

[0285] 159. The single exon nucleic acid microarray of any one of paragraphs 93-153, wherein at least 85% of said exon-including nucleic acid probes lack prokaryotic and bacteriophage vector sequence.

[0286] 160. The single exon nucleic acid microarray of any one of paragraphs 93-153, wherein at least 90% of said exon-including nucleic acid probes lack prokaryotic and bacteriophage vector sequence.

[0287] 161. The single exon nucleic acid microarray of any one of paragraphs 93-153, wherein at least 95% of said exon-including nucleic acid probes lack prokaryotic and bacteriophage vector sequence.

[0288] 162. The single exon nucleic acid microarray of any one of paragraphs 93-153, wherein at least 99% of said exon-including nucleic acid probes lack prokaryotic and bacteriophage vector sequence.

[0289] 163. The single exon nucleic acid microarray of any one of paragraphs 93-162, wherein at least 50% of said exon-including nucleic acid probes lack homopolymeric stretches of A or T.

[0290] 164. The single exon nucleic acid microarray of any one of paragraphs 93-162, wherein at least 60% of said exon-including nucleic acid probes lack homopolymeric stretches of A or T.

[0291] 165. The single exon nucleic acid microarray of any one of paragraphs 93-162, wherein at least 70% of said exon-including nucleic acid probes lack homopolymeric stretches of A or T.

[0292] 166. The single exon nucleic acid microarray of any one of paragraphs 93-162, wherein at least 75% of said exon-including nucleic acid probes lack homopolymeric stretches of A or T.

[0293] 167. The single exon nucleic acid microarray of any one of paragraphs 93-162, wherein at least 80% of said exon-including nucleic acid probes lack homopolymeric stretches of A or T.

[0294] 168. The single exon nucleic acid microarray of any one of paragraphs 93-162, wherein at least 85% of said exon-including nucleic acid probes lack homopolymeric stretches of A or T.

[0295] 169. The single exon nucleic acid microarray of any one of paragraphs 93-162, wherein at least 90% of said exon-including nucleic acid probes lacks homopolymeric stretches of A or T.

[0296] 170. The single exon nucleic acid microarray of any one of paragraphs 93-162, wherein at least 95% of said exon-including nucleic acid probes lacks homopolymeric stretches of A or T.

[0297] 171. The single exon nucleic acid microarray of any one of paragraphs 93-162, wherein at least 99% of said exon-including nucleic acid probes lacks homopolymeric stretches of A or T.

[0298] 172. The single exon nucleic acid microarray of any one of paragraphs 93-171, wherein said plurality of addressably disposed nucleic acid probes are noncovalently bound to said substrate.

[0299] 173. The single exon nucleic acid microarray of any one of paragraphs 93-171, wherein said plurality of addressably disposed nucleic acid probes are covalently bound to said substrate.

[0300] 174. The single exon nucleic acid microarray of any one of paragraphs 93-173, wherein said substrate is selected from the group consisting of glass, amorphous silicon, crystalline silicon, and plastic.

[0301] 175. The single exon nucleic acid microarray of paragraph 174, wherein said substrate is glass.

[0302] 176. The single exon nucleic acid microarray of paragraph 174, wherein said substrate is amorphous or crystalline silicon.

[0303] 177. The single exon nucleic acid microarray of paragraph 174, wherein said substrate is a plastic.

[0304] 178. The single exon nucleic acid microarray of paragraph 177, wherein said plastic is selected from the group consisting of polymethylacrylic, polyethylene, polypropylene, polyacrylate, polymethylmethacrylate, polyvinylchloride, polytetrafluoroethylene, polystyrene, polycarbonate, polyacetal, polysulfone, celluloseacetate, cellulosenitrate, nitrocellulose, and mixtures thereof.

[0305] 179. The single exon nucleic acid microarray of any one of paragraphs 93-178, wherein said eukaryotic genome averages at least two introns per gene.

[0306] 180. The single exon nucleic acid microarray of any one of paragraphs 93-178, wherein said eukaryotic genome averages at least three introns per gene.

[0307] 181. The single exon nucleic acid microarray of any one of paragraphs 93-178, wherein said eukaryotic genome averages at least four introns per gene.

[0308] 182. The single exon nucleic acid microarray of any one of paragraphs 93-178, wherein said eukaryotic genome averages at least five introns per gene.

[0309] 183. The single exon nucleic acid microarray of any one of paragraphs 93-178, wherein said genome is a human genome.

[0310] 184. A single exon nucleic acid microarray for measuring human gene expression, comprising:

[0311] a plurality of single exon nucleic acid probes according to any one of paragraphs 1-50,

[0312] wherein said plurality of probes is addressably disposed upon a substrate.

[0313] 185. A single exon nucleic acid microarray for measuring gene expression in human brain, comprising:

[0314] a plurality of single exon nucleic acid probes according to any one of paragraphs 2, 12-15 as dependent from paragraph 2, 17, and 27-50 as dependent from paragraph 2,

[0315] wherein said plurality of probes is addressably disposed upon a substrate.

[0316] 186. A single exon nucleic acid microarray for measuring gene expression in human heart, comprising:

[0317] a plurality of single exon nucleic acid probes according to any one of paragraphs 3, 12-15 as dependent from paragraph 3, 18, and 27-50 as dependent from paragraph 3,

[0318] wherein said plurality of probes is addressably disposed upon a substrate.

[0319] 187. A single exon nucleic acid microarray for measuring gene expression in human liver, comprising:

[0320] a plurality of single exon nucleic acid probes according to any one of paragraphs 4, 12-15 as dependent from paragraph 4, 19, and 27-50 as dependent from paragraph 4,

[0321] wherein said plurality of probes is addressably disposed upon a substrate.

[0322] 188. A single exon nucleic acid microarray for measuring gene expression in human fetal liver, comprising:

[0323] a plurality of single exon nucleic acid probes according to any one of paragraphs 5, 12-15 as dependent from paragraph 5, 20, and 27-50 as dependent from paragraph 5,

[0324] wherein said plurality of probes is addressably disposed upon a substrate.

[0325] 189. A single exon nucleic acid microarray for measuring gene expression in human placenta, comprising:

[0326] a plurality of single exon nucleic acid probes according to any one of paragraphs 6, 12-15 as dependent from paragraph 6, 21, and 27-50 as dependent from paragraph 6,

[0327] wherein said plurality of probes is addressably disposed upon a substrate.

[0328] 190. A single exon nucleic acid microarray for measuring gene expression in human lung, comprising:

[0329] a plurality of single exon nucleic acid probes according to any one of paragraphs 7, 12-15 as dependent from paragraph 7, 22, and 27-50 as dependent from paragraph 7,

[0330] wherein said plurality of probes is addressably disposed upon a substrate.

[0331] 191. A single exon nucleic acid microarray for measuring gene expression in human bone marrow, comprising:

[0332] a plurality of single exon nucleic acid probes according to any one of paragraphs 8, 12-15 as dependent from paragraph 8, 23, and 27-50 as dependent from paragraph 8,

[0333] wherein said plurality of probes is addressably disposed upon a substrate.

[0334] 192. A single exon nucleic acid microarray for measuring gene expression in HeLa or other human cervical epithelial cells, comprising:

[0335] a plurality of single exon nucleic acid probes according to any one of paragraphs 9, 12-15 as dependent from paragraph 9, 24, and 27-50 as dependent from paragraph 9,

[0336] wherein said plurality of probes is addressably disposed upon a substrate.

[0337] 193. A single exon nucleic acid microarray for measuring gene expression in BT 474 or other human mammary epithelial cells, comprising:

[0338] a plurality of single exon nucleic acid probes according to any one of paragraphs 10, 12-15 as dependent from paragraph 10, 24, and 27 -50 as dependent from paragraph 10,

[0339] wherein said plurality of probes is addressably disposed upon a substrate.

[0340] 194. A single exon nucleic acid microarray for measuring gene expression in HBL 100 or other human mammary epithelial cells,

[0341] a plurality of single exon nucleic acid probes according to any one of paragraphs 11, 12-15 as dependent from paragraph 11, 25, and 27 -50 as dependent from paragraph 11,

[0342] wherein said plurality of probes is addressably disposed upon a substrate.

[0343] 195. The single exon nucleic acid microarray for measuring human gene expression of any one of paragraphs 184-194, wherein said plurality of single exon nucleic acid probes averages at least 200 bp in length.

[0344] 196. The single exon nucleic acid microarray for measuring human gene expression of any one of paragraphs 184-194, wherein said plurality of single exon nucleic acid probes averages at least 250 bp in length.

[0345] 197. The single exon nucleic acid microarray for measuring human gene expression of any one of paragraphs 184-194, wherein said plurality of single exon nucleic acid probes averages at least 300 bp in length.

[0346] 198. The single exon nucleic acid microarray for measuring human gene expression of any one of paragraphs 184-194, wherein said plurality of single exon nucleic acid probes averages at least 400 bp in length.

[0347] 199. The single exon nucleic acid microarray for measuring human gene expression of any one of paragraphs 184-194, wherein said plurality of single exon nucleic acid probes averages at least 500 bp in length.

[0348] 200. The single exon nucleic acid microarray for measuring human gene expression of any one of paragraphs 184-199, wherein said plurality of addressably disposed nucleic acid probes are noncovalently bound to said substrate.

[0349] 201. The single exon nucleic acid microarray for measuring human gene expression of any one of paragraphs 184-199, wherein said plurality of addressably disposed nucleic acid probes are covalently bound to said substrate.

[0350] 202. The single exon nucleic acid microarray for measuring human gene expression of any one of paragraphs 184-199, wherein said substrate is selected from the group consisting of glass, amorphous silicon, crystalline silicon, and plastic.

[0351] 203. The single exon nucleic acid microarray of paragraph 202, wherein said substrate is glass.

[0352] 204. The single exon nucleic acid microarray of paragraph 202, wherein said substrate is amorphous or crystalline silicon.

[0353] 205. The single exon nucleic acid microarray of paragraph 202, wherein said substrate is a plastic.

[0354] 206. The single exon nucleic acid microarray of paragraph 205, wherein said plastic is selected from the group consisting of polymethylacrylic, polyethylene, polypropylene, polyacrylate, polymethylmethacrylate, polyvinylchloride, polytetrafluoroethylene, polystyrene, polycarbonate, polyacetal, polysulfone, celluloseacetate, cellulosenitrate, nitrocellulose, and mixtures thereof.

[0355] 207. A method of measuring eukaryotic gene expression, comprising:

[0356] contacting the single exon microarray of any one of paragraphs 93-206 with a first collection of detectably labeled nucleic acids, said first collection nucleic acids derived from mRNA of at least one eukaryotic tissue or cell type; and then

[0357] measuring the label detectably bound to each probe of said microarray.

[0358] 208. A method of measuring gene expression in human brain, comprising:

[0359] contacting the single exon microarray of any one of paragraphs 93-183, 185, and 195-206 as dependent from paragraph 185, with a first collection of detectably labeled nucleic acids, said first collection nucleic acids derived from mRNA of human brain; and then

[0360] measuring the label detectably bound to each probe of said microarray.

[0361] 209. A method of measuring gene expression in human heart, comprising:

[0362] contacting the single exon microarray of any one of paragraphs 93-183, 186, and 195-206 as dependent from paragraph 186, with a first collection of detectably labeled nucleic acids, said first collection nucleic acids derived from mRNA of human heart; and then

[0363] measuring the label detectably bound to each probe of said microarray.

[0364] 210. A method of measuring gene expression in human liver, comprising:

[0365] contacting the single exon microarray of any one of paragraphs 93-183, 187, and 195-206 as dependent from paragraph 187, with a first collection of detectably labeled nucleic acids, said first collection nucleic acids derived from mRNA of human liver; and then

[0366] measuring the label detectably bound to each probe of said microarray.

[0367] 211. A method of measuring gene expression in human fetal liver, comprising:

[0368] contacting the single exon microarray of any one of paragraphs 93-183, 188, and 195-206 as dependent from paragraph 188, with a first collection of detectably labeled nucleic acids, said first collection nucleic acids derived from mRNA of human fetal liver; and then

[0369] measuring the label detectably bound to each probe of said microarray.

[0370] 212. A method of measuring gene expression in human placenta, comprising:

[0371] contacting the single exon microarray of any one of paragraphs 93-183, 189, and 195-206 as dependent from paragraph 189, with a first collection of detectably labeled nucleic acids, said first collection nucleic acids derived from mRNA of human placenta; and then

[0372] measuring the label detectably bound to each probe of said microarray.

[0373] 213. A method of measuring gene expression in human lung, comprising:

[0374] contacting the single exon microarray of any one of paragraphs 93-183, 190, and 195-206 as dependent from paragraph 190, with a first collection of detectably labeled nucleic acids, said first collection nucleic acids derived from mRNA of human lung; and then

[0375] measuring the label detectably bound to each probe of said microarray.

[0376] 214. A method of measuring gene expression in human bone marrow, comprising:

[0377] contacting the single exon microarray of any one of paragraphs 93-183, 191, and 195-206 as dependent from paragraph 191, with a first collection of detectably labeled nucleic acids, said first collection nucleic acids derived from mRNA of human bone marrow; and then

[0378] measuring the label detectably bound to each probe of said microarray.

[0379] 215. A method of measuring gene expression in HeLa or other human cervical epithelial cells, comprising:

[0380] contacting the single exon microarray of any one of paragraphs 93-183, 192, and 195-206 as dependent from paragraph 192, with a first collection of detectably labeled nucleic acids, said first collection nucleic acids derived from mRNA of human cervical epithelial cells; and then

[0381] measuring the label detectably bound to each probe of said microarray.

[0382] 216. A method of measuring gene expression in BT474 or other human mammary epithelial cells, comprising:

[0383] contacting the single exon microarray of any one of paragraphs 93-183, 193, and 195-206 as dependent from paragraph 193, with a first collection of detectably labeled nucleic acids, said first collection nucleic acids derived from mRNA of human mammary epithelial cells; and then

[0384] measuring the label detectably bound to each probe of said microarray.

[0385] 217. A method of measuring gene expression in HBL 100 or other human mammary epithelial cells, comprising:

[0386] contacting the single exon microarray of any one of paragraphs 93-183, 194, and 195-206 as dependent from paragraph 194, with a first collection of detectably labeled nucleic acids, said first collection nucleic acids derived from mRNA of human mammary epithelial cells; and then

[0387] measuring the label detectably bound to each probe of said microarray.

[0388] 218. The method of any one of paragraphs 207-217, further comprising comparing said measurement to a second measurement, said second measurement identically obtained using a second, control, collection of nucleic acids.

[0389] 219. The method of paragraph 218, wherein said control nucleic acids are derived from a plurality of human tissues and/or cell types.

[0390] 220. The method of paragraph 218 or 219, wherein said microarray is contacted simultaneously with said first and second collections of detectably labeled nucleic acids, wherein said first and second collection nucleic acids are distinguishably labeled.

[0391] 221. The method of any one of paragraphs 207-220, wherein said detectable label is a fluorescent label.

[0392] 222. The method of paragraph 221, wherein said fluorescent label is a cyanine dye.

[0393] 223. The method of paragraph 222, wherein said cyanine dye is CY3 or CY5.

[0394] 224. A method of identifying exons in a eukaryotic genome, comprising:

[0395] algorithmically predicting at least one exon from genomic sequence of said eukaryote; and then

[0396] detecting specific hybridization of detectably labeled nucleic acids to a single exon probe,

[0397] wherein said detectably labeled nucleic acids are derived from mRNA of said eukaryote, said probe is a single exon probe having a fragment identical in sequence to, or complementary in sequence to, said predicted exon, said probe is included within a single exon microarray according to any one of paragraphs 93-183, and said fragment is selectively hybridizable at high stringency.

[0398] 225. The method of paragraph 224, wherein said algorithmic predicting includes use of at least one gene prediction algorithm.

[0399] 226. The method of paragraph 225, wherein said at least one gene prediction algorithm is that embodied in software selected from the group consisting of: GRAIL, GRAIL II, GENEFINDER, GENSCAN and DICTION.

[0400] 227. The method of paragraph 226, wherein said software is GRAIL or GRAIL II.

[0401] 228. The method of paragraph 226, wherein said software is GENEFINDER.

[0402] 229. The method of paragraph 226, wherein said software is DICTION.

[0403] 230. The method of paragraph 225, wherein said algorithmic predicting includes finding consensus among at least two of said algorithms.

[0404] 231. The method of paragraph 224, wherein said algorithmic predicting includes use of comparative sequence analysis algorithms.

[0405] 232. The method of any one of paragraphs 224-231, wherein said mRNA-derived nucleic acids derive from mRNA from a plurality of tissues and/or cell types.

[0406] 233. The method of paragraph 232, wherein said eukaryote is a human, and said plurality of tissues and/or cell types is selected from the group consisting of: brain, heart, liver, fetal liver, placenta, lung, bone marrow, HeLa cells, BT 474 cells, or HBL 100 cells.

[0407] 234. The method of any one of paragraphs 224-233, wherein said detecting involves simultaneous detection of two fluorophores having distinguishable emission spectra.

[0408] 235. The method of paragraph 234, wherein one of said fluorophores is Cy3.

[0409] 236. The method of paragraph 234, wherein one of said fluorophores is Cy5.

[0410] 237. The method of paragraph 234, wherein one of said fluorophores is Cy3 and the other is Cy5.

[0411] 238. A method of assigning exons to a single gene, comprising:

[0412] identifying a plurality of exons from genomic sequence according to the method of any one of paragraphs 224-237; and then

[0413] measuring the expression of each of said exons in a plurality of tissues and/or cell types using hybridization to single exon microarrays having a probe with said exon,

[0414] wherein a common pattern of expression of said exons in said plurality of tissues and/or cell types indicates that the exons should be assigned to a single gene.

[0415] 239. A visual display of eukaryotic genomic sequence annotated with information about a predetermined biologic function, comprising:

[0416] a first visual element, each point along the length of which first visual element maps linearly and uniquely to a nucleotide of said genomic sequence;

[0417] a second visual element, first and second boundaries of which second visual element map linearly to a first and second nucleotide of said genomic sequence, wherein said first and second nucleotides delimit a region of said genomic sequence predicted to have said predetermined function; and

[0418] a third visual element, first and second boundaries of which third visual element map linearly to a first and second nucleotide of said genomic sequence, wherein said first and second nucleotides delimit a region of said genomic sequence experimentally confirmed to have said predetermined function.

[0419] 240. The visual display of paragraph 239, wherein said display is electronic.

[0420] 241. A method of selling and/or licensing genome-derived single-exon microarrays to a customer desiring to measure gene expression, comprising:

[0421] making available for computerized query a database having a record corresponding to each genome-derived single exon microarray available for sale and/or license;

[0422] responding to a customer query of the database by returning to the customer at least one record, or an identifier of that record, that best meets the customer query criteria; and

[0423] offering for sale or license to the querying customer the genome-derived single exon microarray identified in that at least one record.

[0424] 242. The method of paragraph 241, wherein said database is resident on a server computer and is available for query by a remotely located client.

[0425] 243. The method of paragraph 242, wherein said client and said server communicate over the Internet.

[0426] 244. The method of paragraph 242, wherein said client and said server communicate over an intranet.

[0427] 245. The method of paragraph 242, wherein said client and said server communicate over a LAN.

[0428] 246. The method of paragraph 242, wherein said client and said server communicate over a WAN.

[0429] 247. The method of any one of paragraphs 241-246, further comprising a later step of permitting the customer to place an order for the identified microarray.

[0430] 248. The method of any one of paragraphs 241-247, wherein said at least one of said genome-derived single exon microarrays available for sale and/or license is a single exon microarray according to any one of paragraphs 93-206.

[0431] 249. A method of designing and/or manufacturing a genome-derived single exon microarray that has genome-derived single exon probes that have at least one common attribute desired by a customer, the method comprising:

[0432] receiving from a customer at least one criterion for common probe attribute;

[0433] using the at least one criterion to identify, within a database having records corresponding to available genome-derived single exon probes, those that meet the criterion; and then

[0434] disposing such identified probes on a substrate capable of functioning in microarray hybridization experiments.

[0435] 250. The method of paragraph 249, wherein said common attribute is common expression in a tissue and/or cell type.

[0436] 251. The method of paragraph 250, wherein said tissue and/or cell type is selected from the group consisting of: human brain, heart, liver, fetal liver, placenta, lung, bone marrow, HeLa cells, BT 474 cells, or HBL 100 cells.

[0437] 252. The method of paragraph 251, wherein said tissue is human brain, and said single exon probes are selected from single exon nucleic acid probes according to any one of paragraphs 2, 12-15 as dependent from paragraph 2, 17, and 27-50 as dependent from paragraph 2.

[0438] 253. The method of paragraph 251, wherein said tissue is human heart, and said single exon probes are selected from single exon nucleic acid probes according to any one of paragraphs 3, 12-15 as dependent from paragraph 3, 18, and 27-50 as dependent from paragraph 3.

[0439] 254. The method of paragraph 251, wherein said tissue is human liver, and said single exon probes are selected from single exon nucleic acid probes according to any one of paragraphs 4, 12-15 as dependent from paragraph 4, 19, and 27-50 as dependent from paragraph 4.

[0440] 255. The method of paragraph 251, wherein said tissue is human fetal liver, and said single exon probes are selected from single exon nucleic acid probes according to any one of paragraphs 5, 12-15 as dependent from paragraph 5, 20, and 27-50 as dependent from paragraph 5.

[0441] 256. The method of paragraph 251, wherein said tissue is human placenta, and said single exon probes are selected from single exon nucleic acid probes according to any one of paragraphs 6, 12-15 as dependent from paragraph 6, 21, and 27-50 as dependent from paragraph 6.

[0442] 257. The method of paragraph 251, wherein said tissue is human lung, and said single exon probes are selected from single exon nucleic acid probes according to any one of paragraphs 7, 12-15 as dependent from paragraph 7, 22, and 27-50 as dependent from paragraph 7.

[0443] 258. The method of paragraph 251, wherein said tissue is human bone marrow, and said single exon probes are selected from single exon nucleic acid probes according to any one of paragraphs 8, 12-15 as dependent from paragraph 8, 23, and 27-50 as dependent from paragraph 8.

[0444] 259. The method of paragraph 251, wherein said cell type is HeLa or other human cervical epithelial cells, and said single exon probes are selected from single exon nucleic acid probes according to any one of paragraphs 9, 12-15 as dependent from paragraph 9, 24, and 27-50 as dependent from paragraph 9.

[0445] 260. The method of paragraph 251, wherein said cell type is BT 474 or other human mammary epithelial cells, and said single exon probes are selected from single exon nucleic acid probes according to any one of paragraphs 10, 12-15 as dependent from paragraph 10, 24, and 27-50 as dependent from paragraph 10.

[0446] 261. The method of paragraph 251, wherein said cell type is HBL 100 or other human mammary epithelial cells, and said single exon probes are selected from single exon nucleic acid probes according to any one of paragraphs 11, 12-15 as dependent from paragraph 11, 25, and 27-50 as dependent from paragraph 11.

[0447] 262. The method of any one of paragraphs 249-261, wherein said customer communicates said attribute electronically.

[0448] 263. A method for making available by subscription expression data obtained from use of the genome-derived single exon probes and genome-derived single exon microarrays customers that desire such information, comprising:

[0449] making available to a subscription client for computerized query a database, said database having records containing expression data generated using single exon probes disposed upon microarrays; and then

[0450] responding to a customer query of the database by returning to the customer at least one record, or an identifier of the at least one record, that best meets the customer query criteria.

[0451] 264. The method of paragraph 263, wherein at least one record of said database contains expression data from a single exon probe selected from single exon probes of any one of paragraphs 1-50.

[0452] 265. The method of paragraph 263 or 264, wherein said customer query of said database is communicated over the Internet.

[0453] 266. The method of paragraph 263 or 264, wherein said customer query of said database is communicated over an intranet.

[0454] 267. The method of paragraph 263 or 264, wherein said customer query of said database is communicated over a LAN.

[0455] 268. The method of paragraph 263 or 264, wherein said customer query of said database is communicated over a WAN.

[0456] 269. A method of attracting investment to a company that makes and sells microarrays or expression data obtained from microarrays, comprising:

[0457] advertising the availability for distribution, sale, or license of genome-derived single exon probes, microarrays, and/or data therefrom; and then

[0458] selling stock in the company.

[0459] 270. The method of paragraph 269, wherein said advertising is performed on an Internet web page, in an Internet chat room, and/or a Usenet newsgroup, and wherein the stock sale is consummated through an electronic brokerage.

[0460] 271. A nucleic acid microarray, the improvement comprising: disposing upon said microarray genome-derived single exon probes.

[0461] 272. A protein, polypeptide, or peptide comprising: at least 8 amino acids of the sequence set forth in any one of SEQ ID NOs: 33,300-49,117.

[0462] 273. A protein, polypeptide, or peptide comprising: at least 15 amino acids of the sequence set forth in any one of SEQ ID NOs: 33,300-49,117.

[0463] 274. A protein, polypeptide, or peptide comprising: the sequence set forth in any one of SEQ ID NOs: 33,300-49,117.

[0464] 275. The protein, polypeptide, or peptide of any one of paragraphs 272-274, wherein said protein, polypeptide or peptide is detectably labeled.

[0465] 276. The protein, polypeptide, or peptide of any one of paragraphs 272-274, fused to a detectable moiety.

[0466] 277. The protein, polypeptide or peptide of paragraph 276, wherein said detectable moiety is green or blue fluorescent protein.

[0467] 278. An isolated nucleic acid that encodes the protein, polypeptide, or peptide of any one of paragraphs 272-274.

[0468] 279. An antibody, wherein said antibody is specific for the protein, polypeptide, or peptide of any one of paragraphs 272-274.

### BRIEF DESCRIPTION OF THE DRAWINGS

[0469] The above and other objects and advantages of the present invention will be apparent upon consideration of the following detailed description taken in conjunction with the accompanying drawings, in which like characters refer to like parts throughout, and in which:

[0470] FIG. 1 illustrates a process for predicting functional regions from genomic sequence, confirming the functional activity of such regions experimentally, and associating and displaying the data so obtained in meaningful and useful relationship to the original sequence data, according to the present invention;

[0471] FIG. 2 further elaborates that portion of the process schematized in FIG. 1 for predicting functional regions from genomic sequence, according to the present invention;

[0472] FIG. 3 illustrates a visual display according to the present invention, herein denominated a “Mondrian”, in which a single genomic sequence is annotated with predicted and experimentally confirmed functional information;

[0473] FIG. 4 presents a Mondrian of a hypothetical annotated genomic sequence, further identifying typical color conventions when the Mondrian is used to annotate genomic sequence with exon-specific expression data, as in FIGS. 9 and 10;

[0474] FIG. 5 is a chart that summarizes data from experimental Example 1, showing the size distributions of predicted exon length (dashed line) and actual PCR products (amplicons) (solid line) as obtained from human genomic sequence according to the methods of the present invention;

[0475] FIG. 6 is a histogram that summarizes data from experimental Examples 1 and 2, showing the number of tissues in which predicted exons could be shown to be expressed using simultaneous two color hybridization to a genome-derived single exon microarray of the present invention. The graph shows the number of sequence-verified products that were either not expressed in any of the ten tested tissues/cell types (“0”), expressed in one or more but not all tested tissues (“1”-“9”), or expressed in all tissues tested (“10”);

[0476] FIG. 7 is a pictorial representation of data from experimental Examples 1 and 2, showing the expression (ratio relative to control) of probes having verified sequences that were expressed with signal intensity greater than 3 in at least one tissue, with:

[0477] FIG. 7A showing the expression as measured by microarray hybridization in each of the 10 measured tissues, and the expression as measured “bioinformatically” by query of EST, NR and SwissProt databases; with

[0478] FIG. 7B showing the legend for display of physical expression (ratio) in FIG. 7A; and with

[0479] FIG. 7C showing the legend for scoring EST hits as depicted in FIG. 7A;

[0480] FIG. 8 is a chart of data from experimental Examples 1 and 2, showing a comparison of normalized CY3 signal intensity for arrayed sequences that were identical to sequences in existing EST, NR and SwissProt databases (known) (solid line) or that were dissimilar (unknown) (dashed line), where “known” is defined as having a BLAST expect (“E”) value of less than 1e−30 (1×10⁻³⁰) and “unknown” is defined as having a BLAST expect (“E”) value of greater than 1e−30 (1×10⁻³⁰) (“unknown”);

[0481] FIG. 9 presents a visual display, herein termed a “Mondrian”, of BAC AC008172 (bases 25,000 to 130,000), containing the carbamyl phosphate synthetase gene (AF154830.1); and

[0482] FIG. 10 is a Mondrian of BAC A049839.

### DETAILED DESCRIPTION OF THE INVENTION

[0483] Definitions

[0484] As used herein, “nucleic acid” includes polynucleotides having natural nucleotides in native 5′-3′ phosphodiester linkage—e.g., DNA or RNA—as well as polynucleotides that have nonnatural nucleotide analogues, nonnative internucleoside bonds, or both, so long as the nonnatural polynucleotide is capable of sequence-discriminating basepairing under experimentally desired conditions. Unless otherwise specified, the term “nucleic acid” includes any topological conformation; the term thus explicitly comprehends single-stranded, double-stranded, partially duplexed, triplexed, hairpinned, circular, and padlocked conformations.

[0485] As used herein, an “isolated nucleic acid” is a nucleic acid molecule that exists in a physical form that is nonidentical to any nucleic acid molecule of identical sequence as found in nature; “isolated” does not require, although it does not prohibit, that the nucleic acid so described has itself been physically removed from its native environment.

[0486] For example, a nucleic acid can be said to be “isolated” when it includes nucleotides and/or internucleoside bonds not found in nature. When instead composed of natural nucleosides in phosphodiester linkage, a nucleic acid can be said to be “isolated” when it exists at a purity not found in nature, where purity can be adjudged with respect to the presence of nucleic acids of other sequence, with respect to the presence of proteins, with respect to the presence of lipids, or with respect the presence of any other component of a biological cell, or when the nucleic acid lacks sequence that flanks an otherwise identical sequence in an organism's genome, or when the nucleic acid possesses sequence not identically present in nature.

[0487] As so defined, “isolated nucleic acid” includes nucleic acids integrated into a host cell chromosome at a heterologous site, recombinant fusions of a native fragment to a heterologous sequence, recombinant vectors present as episomes or as integrated into a host cell chromosome.

[0488] As used herein, an isolated nucleic acid “encodes” a reference polypeptide when at least a portion of the nucleic acid, or its complement, can be directly translated to provide the amino acid sequence of the reference polypeptide, or when the isolated nucleic acid can be used, alone or as part of an expression vector, to express the reference polypeptide in vitro, in a prokaryotic host cell, or in a eukaryotic host cell.

[0489] As used herein, the term “exon” refers to a nucleic acid sequence found in genomic DNA that is bioinformatically predicted and/or experimentally confirmed to contribute contiguous sequence to a mature mRNA transcript.

[0490] As used herein, the phrase “open reading frame” and the equivalent acronym “ORF” refer to that portion of an exon that can be translated in its entirety into a sequence of contiguous amino acids. As so defined, an ORF is wholly contained within its respective exon and has length, measured in nucleotides, exactly divisible by 3. As so defined, an ORF need not encode the entirety of a natural protein.

[0491] As used herein, the phrase “ORF-encoded peptide” refers to the predicted or actual translation of an ORF.

[0492] As used herein, the phrase “degenerate variant” of a reference nucleic acid sequence intends all nucleic acid sequences that can be directly translated, using the standard genetic code, to provide an amino acid sequence identical to that translated from the reference nucleic acid sequence.

[0493] As used herein, the term “microarray” and the equivalent phrase “nucleic acid microarray” refer to a substrate-bound collection of plural nucleic acids, hybridization to each of the plurality of bound nucleic acids being separately detectable. The substrate can be solid or porous, planar or non-planar, unitary or distributed.

[0494] As so defined, the term “microarray” and phrase “nucleic acid microarray” include all the devices so called in Schena (ed.), DNA Microarrays: A Practical Approach (Practical Approach Series), Oxford University Press (1999) (ISBN: 0199637768); Nature Genet. 21(1)(suppl):l -60 (1999); and Schena (ed.), Microarray Biochip: Tools and Technology, Eaton Publishing Company/BioTechniques Books Division (2000) (ISBN: 1881299376), the disclosures of which are incorporated herein by reference in their entireties.

[0495] As so defined, the term “microarray” and phrase “nucleic acid microarray” include substrate-bound collections of plural nucleic acids in which the plurality of nucleic acids are distributably disposed on a plurality of beads, rather than on a unitary planar substrate, as is described, inter alia, in Brenner et al., Proc. Natl. Acad. Sci. USA 97(4):166501670 (2000), the disclosure of which is incorporated herein by reference in its entirety; in such case, the term “microarray” and phrase “nucleic acid microarray” refer to the plurality of beads in aggregate.

[0496] As used herein with respect to solution phase hybridization, the term “probe”, or equivalently, “nucleic acid probe” or “hybridization probe”, refers to an isolated nucleic acid of known sequence that is, or is intended to be, detectably labeled. As used herein with respect to a nucleic acid microarray, the term “probe” (or equivalently “nucleic acid probe” or “hybridization probe”) refers to the isolated nucleic acid that is, or is intended to be, bound to the substrate. In either such context, the term “target” refers to nucleic acid intended to be bound to probe by sequence complementarity.

[0497] As used herein, the expression “probe comprising SEQ ID NO:X”, and variants thereof, intends a nucleic acid probe, at least a portion of which probe has either (i) the sequence directly as given in the referenced SEQ ID NO:X, or (ii) a sequence complementary to the sequence as given in the referenced SEQ ID NO:X, the choice as between sequence directly as given and complement thereof dictated by the requirement that the probe be complementary to the desired target.

[0498] As used herein, the phrases “expression of a probe” and “expression of an isolated nucleic acid” and their linguistic equivalents intend that the probe or, respectively, the isolated nucleic acid, can hybridize detectably under high stringency conditions to a sample of nucleic acids that derive from mRNA transcripts from a given source. For example, and by way of illustration only, expression of a probe in “liver” means that the probe can hybridize detectably under high stringency conditions to a sample of nucleic acids that derive from mRNA obtained from liver.

[0499] As used herein, “a single exon probe” comprises at least part of an exon (“reference exon”) and can hybridize detectably under high stringency conditions to transcript-derived nucleic acids that include the reference exon. The single exon probe will not, however, hybridize detectably under high stringency conditions to nucleic acids that lack the reference exon but include one or more exons that are found adjacent to the reference exon in the genome.

[0500] For purposes herein, “high stringency conditions” are defined for solution phase hybridization as aqueous hybridization (i.e., free of formamide) in 6× SSC (where 20× SSC contains 3.0 M NaCl and 0.3 M sodium citrate), 1% SDS at 65° C. for at least 8 hours, followed by one or more washes in 0.2× SSC, 0.1% SDS at 65° C. “Moderate stringency conditions” are defined for solution phase hybridization as aqueous hybridization (i.e., free of formamide) in 6× SSC, 1% SDS at 65° C. for at least 8 hours, followed by one or more washes in 2× SSC, 0.1% SDS at room temperature.

[0501] For microarray-based hybridization, standard “high stringency conditions” are defined as hybridization in 50% formamide, 5× SSC, 0.2 μg/μl poly(dA), 0.2 μg/μl human cₒt1 DNA, and 0.5% SDS, in a humid oven at 42° C. overnight, followed by successive washes of the microarray in 1× SSC, 0.2% SDS at 55° C. for 5 minutes, and then 0.1× SSC, 0.2% SDS, at 55° C. for 20 minutes. For microarray-based hybridization, “moderate stringency conditions”, suitable for cross-hybridization to mRNA encoding structurally- and functionally-related proteins, are defined to be the same as those for high stringency conditions but with reduction in temperature for hybridization and washing to room temperature (approximately 25° C.).

[0502] As used herein, the terms “protein”, “polypeptide”, and “peptide” are used interchangeably to refer to a naturally-occurring or synthetic polymer of amino acid monomers (residues), irrespective of length, where amino acid monomer here includes naturally-occurring amino acids, naturally-occurring amino acid structural variants, and synthetic non-naturally occurring analogs that are capable of participating in peptide bonds. The terms “protein”, “polypeptide”, and “peptide” explicitly permits of post-translational and post-synthetic modifications, such as glycosylation.

[0503] The term “oligopeptide” herein denotes a protein, polypeptide, or peptide having 25 or fewer monomeric subunits.

[0504] The phrases “isolated protein”, “isolated polypeptide”, “isolated peptide” and “isolated oligopeptide” refer to a protein (or respectively to a polypeptide, peptide, or oligopeptide) that is nonidentical to any protein molecule of identical amino acid sequence as found in nature; “isolated” does not require, although it does not prohibit, that the protein so described has itself been physically removed from its native environment.

[0505] For example, a protein can be said to be “isolated” when it includes amino acid analogues or derivatives not found in nature, or includes linkages other than standard peptide bonds.

[0506] When instead composed entirely of natural amino acids linked by peptide bonds, a protein can be said to be “isolated” when it exists at a purity not found in nature—where purity can be adjudged with respect to the presence of proteins of other sequence, with respect to the presence of non-protein compounds, such as nucleic acids, lipids, or other components of a biological cell, or when it exists in a composition not found in nature, such as in a host cell that does not naturally express that protein.

[0507] A “purified protein” (equally, a purified polypeptide, peptide, or oligopeptide) is an isolated protein, as above described, present at a concentration of at least 95%, as measured on a mass basis with respect to total protein in a composition. A “substantially purified protein” (equally, a substantially purified polypeptide, peptide, or oligopeptide) is an isolated protein, as above described, present at a concentration of at least 70%, as measured on a mass basis with respect to total protein in a composition.

[0508] As used herein, the phrase “protein isoforms” refers to a plurality of proteins having nonidentical primary amino acid sequence but that share amino acid sequence encoded by at least one common exon.

[0509] As used herein, the phrase “alternative splicing” and its linguistic equivalents includes all types of RNA processing that lead to expression of plural protein isoforms from a single gene; accordingly, the phrase “splice variant(s)” and its linguistic equivalents embraces mRNAs transcribed from a given gene that, however processed, collectively encode plural protein isoforms. For example, and by way of illustration only, splice variants can include exon insertions, exon extensions, exon truncations, exon deletions, alternatives in the 5′ untranslated region (“5′ UT”) and alternatives in the 3′ untranslated region (“3′ UT”). Such 3′ alternatives include, for example, differences in the site of RNA transcript cleavage and site of poly(A) addition. See, e.g., Gautheret et al., Genome Res. 8:524-530 (1998).

[0510] As used herein, “orthologues” are separate occurrences of the same gene in multiple species. The separate occurrences have similar, albeit nonidentical, amino acid sequences, the degree of sequence similarity depending, in part, upon the evolutionary distance of the species from a common ancestor having the same gene.

[0511] As used herein, the term “paralogues” indicates separate occurrences of a gene in one species. The separate occurrences have similar, albeit nonidentical, amino acid sequences, the degree of sequence similarity depending, in part, upon the evolutionary distance from the gene duplication event giving rise to the separate occurrences.

[0512] As used herein, the term “homologues” is generic to “orthologues” and “paralogues”.

[0513] As used herein, the term “antibody” refers to a polypeptide, at least a portion of which is encoded by at least one immunoglobulin gene, or fragment thereof, and that can bind specifically to a desired target molecule. The term includes naturally-occurring forms, as well as fragments and derivatives.

[0514] Fragments within the scope of the term include those produced by digestion with various proteases, those produced by chemical cleavage and/or chemical dissociation, and those produced recombinantly, so long as the fragment remains capable of specific binding to a target molecule. Among such fragments are Fab, Fab′, Fv, F(ab)′2, and single chain Fv (scFv) fragments.

[0515] Derivatives within the scope of the term include antibodies (or fragments thereof) that have been modified in sequence, but remain capable of specific binding to a target molecule, including: interspecies chimeric and humanized antibodies; antibody fusions; heteromeric antibody complexes and antibody fusions, such as diabodies (bispecific antibodies), single-chain diabodies, and intrabodies (see, e.g., Marasco (ed.), Intracellular Antibodies: Research and Disease Applications, Springer-Verlag New York, Inc. (1998) (ISBN: 3540641513), the disclosure of which is incorporated herein by reference in its entirety).

[0516] As used herein, “antigen” refers to a ligand that can be bound by an antibody; an antigen need not itself be immunogenic. The portions of the antigen that make contact with the antibody are denominated “epitopes”.

[0517] “Specific binding” refers to the ability of two molecular species concurrently present in a heterogeneous (inhomogeneous) sample to bind to one another in preference to binding to other molecular species in the sample. Typically, a specific binding interaction will discriminate over adventitious binding interactions in the reaction by at least two-fold, more typically by at least 10-fold, often at least 100-fold; when used to detect analyte, specific binding is sufficiently discriminatory when determinative of the presence of the analyte in a heterogeneous (inhomogeneous) sample. Typically, the affinity or avidity of a specific binding reaction is least about 10⁻⁷M, with specific binding reactions of greater specificity typically having affinity or avidity of at least 10⁻⁸ M to at least about 10⁻⁹ M.

[0518] As used herein, “molecular binding partners”—and equivalently, “specific binding partners”—refer to pairs of molecules, typically pairs of biomolecules, that exhibit specific binding. Nonlimiting examples are receptor and ligand, antibody and antigen, and biotin to any of avidin, streptavidin, neutrAvidin and captAvidin.

[0519] As used herein with respect to the visual display of annotated genomic sequence, the term “rectangle” means any geometric shape that has at least a first and a second border, wherein each of the first and second borders is capable of mapping uniquely to a point of another visual object of the display.

[0520] Methods and Apparatus for Generating Single Exon Probes from Genomic Sequence Data

[0521] In a first aspect, the present invention provides 16,834 human genome-derived single exon nucleic acid probes useful for gene expression analysis, particularly for gene expression analysis by microarray hybridization. FIG. 1 illustrates in broad outline the process by which these probes were generated.

[0522] FIG. 1 illustrates a process for predicting functional regions from genomic sequence, confirming and characterizing the functional activity of such regions experimentally, and then associating and displaying the information so obtained in meaningful and useful relationship to the original genomic sequence data. The process is further described in commonly owned and copending U.S. application Ser. No. 09/774,203, filed Jan. 29, 2001, the disclosure of which is incorporated herein by reference in its entirety, and is detailed additionally in experimental Examples 1-4, infra. To generate single exon nucleic acid probes useful for gene expression analysis, the functional activity to be predicted, confirmed, associated and displayed is the ability of the predicted region to contribute to a mature mRNA transcript.

[0523] As shown, the initial input into process 10 is drawn from one or more databases 100 containing genomic sequence data. Because genomic sequence is usually obtained from subgenomic fragments, the sequence data typically will be stored in a series of records corresponding to these subgenomic sequenced fragments. Some fragments will have been catenated to form larger contiguous sequences (“contigs”); others will not. A finite percentage of sequence data in the database will typically be erroneous, consisting inter alia of vector sequence, sequence created from aberrant cloning events, sequence of artificial polylinkers, and sequence that was erroneously read.

[0524] Each sequence record in database 100 will minimally contain as annotation a unique sequence identifier (accession number), and will typically be annotated further to identify the date of accession, species of origin, and depositor. Because database 100 can contain nongenomic sequence, each sequence will typically be annotated further to permit query for genomic sequence. Chromosomal origin, optionally with map location, can also be present. Data can be, and over time increasingly will be, further annotated with additional information, in part through use of the present invention, as described below. Annotation can be present within the data records, in information external to database 100 and linked to the records thereto, or through a combination of the two.

[0525] Databases useful as genomic sequence database 100 in the present invention include GenBank, and particularly include several divisions thereof, including the htgs (draft), NT (nucleotide, command line), and NR (nonredundant) divisions. GenBank is produced by the National Institutes of Health and is maintained by the National Center for Biotechnology Information (NCBI). Databases of genomic sequence from species other than human, such as mouse, rat, Arabidopsis thaliana, C. elegans, C. brigsii, Drosophila melanogaster, zebra fish, and other higher eukaryotic organisms will also prove useful as genomic sequence database 100.

[0526] Genomic sequence obtained by query of genomic sequence database 100 is then input into one or more processes 200 for identification of regions therein that are predicted to have a biological function as specified by the user. Such functions include, but are not limited to, contributing to a mature mRNA transcript, encoding protein, regulating transcription, regulating message transport after transcription, regulating message splicing after transcription, regulating message degradation after transcription, contributing to or controlling chromosomal somatic recombination, contributing to chromosomal stability or movement, contributing to allelic exclusion or X chromosome inactivation, and the like. To generate single exon probes useful for gene expression analysis, the functional activity to be predicted will be the ability to contribute to a mature mRNA transcript and/or protein coding.

[0527] The particular genomic sequence to be input into process 200 will depend upon the function for which relevant sequence is to be identified as well as upon the approach chosen for such identification. Process step 200 can be iterated to identify different functions within a given genomic region. In such case, the input often will be different for the several iterations.

[0528] Sequences predicted to have the requisite function by process 200 are then input into process 300, where a subset of the input sequences suitable for experimental confirmation is identified. Experimental confirmation can involve physical and/or bioinformatic assay. Where the subsequent experimental assay is bioinformatic, rather than physical, there are fewer constraints on the sequences that can be tested, and in this latter case therefore process 300 can output the entirety of the input sequence.

[0529] The subset of sequences output from process 300 is then used in process 400 for experimental verification and characterization of the function predicted in process 200, which experimental verification can, and often will, include both physical and bioinformatic assay.

[0530] Process 500 annotates the sequence data with the functional information obtained in the physical and/or bioinformatic assays of process 400. Such annotation can be done using any technique that usefully relates the functional information to the sequence, as, for example, by incorporating the functional data into the sequence data record itself, by linking records in a hierarchical or relational database, by linking to external databases, by a combination thereof, or by other means well known within the database arts. The data can even be submitted for incorporation into databases maintained by others, such as GenBank, which is maintained by NCBI.

[0531] As further noted in FIG. 1, additional annotation can be input into process 500 from external sources 600.

[0532] The annotated data is then optionally displayed in process 800, either before, concomitantly with, or after optional storage 700 on nontransient media, such as magnetic disk, optical disc, magnetooptical disk, flash memory, or the like.

[0533] FIG. 1 shows that the experimental data output from process 400 can be used in each preceding step of process 10: e.g., facilitating identification of functional sequences in process 200, facilitating identification of an experimentally suitable subset thereof in process 300, and facilitating creation of physical and/or informational substrates for, and performance of subsequent assay, of functional sequences in process 400.

[0534] Information from each step can be passed directly to the succeeding process, or stored in permanent or interim form prior to passage to the succeeding process. Often, data will be stored after each, or at least a plurality, of such process steps. Any or all process steps can be automated.

[0535] FIG. 2 further elaborates the prediction of functional sequence within genomic sequence according to process 200.

[0536] Genomic sequence database 100 is first queried 20 for genomic sequence.

[0537] The sequence required to be returned by query 20 will depend, in the first instance, upon the function to be identified.

[0538] For example, genomic sequences that function to encode protein can be identified inter alia using gene prediction approaches, comparative sequence analysis approaches, or combinations of the two. In gene prediction analysis, sequence from one genome is input into process 200 where at least one, preferably a plurality, of algorithmic methods are applied to identify putative coding regions. In comparative sequence analysis, by contrast, corresponding, e.g., syntenic, sequence from a plurality of sources, typically a plurality of species, is input into process 200, where at least one, possibly a plurality, of algorithmic methods are applied to compare the sequences and identify regions of least variability.

[0539] The exact content of query 20 will also depend upon the database queried. For example, if the database contains both genomic and nongenomic sequence, perhaps derived from multiple species, and the function to be predicted is protein coding in human genomic DNA, the query will accordingly require that the sequence returned be genomic and derived from humans.

[0540] Query 20 can also incorporate criteria that compel return of sequence that meets operative requirements of the subsequent analytical method. Alternatively, or in addition, such operative criteria can be enforced in subsequent preprocess step 24.

[0541] For example, if the function sought to be identified is protein coding, query 20 can incorporate criteria that return from genomic sequence database 100 only those sequences present within contigs sufficiently long as to have obviated substantial fragmentation of any given exon among a plurality of separate sequence fragments.

[0542] Such criteria can, for example, consist of a required minimal individual genomic sequence fragment length, such as 10 kb, more typically 20 kb, 30 kb, 40 kb, and preferably 50 kb or more, as well as an optional further or alternative requirement that sequence from any given clone, such as a bacterial artificial chromosome (“BAC”), be presented in no more than a finite maximal number of fragments, such as no more than 20 separate pieces, more typically no more than 15 fragments, even more typically no more than about 10-12 fragments.

[0543] Our results have shown that genomic sequence from bacterial artificial chromosomes (BACs) is sufficient for gene prediction analysis according to the present invention if the sequence is at least 50 kb in length, and if additionally the sequence from any given BAC is presented in fewer than 15, and preferably fewer than 10, fragments. Accordingly, query 20 can incorporate a requirement that data accessioned from BAC sequencing be in fewer than 15, preferably fewer than 10, fragments.

[0544] An additional criterion that can be incorporated into the query can be the date, or range of dates, of sequence accession. Although the process has been described above as if genomic sequence database 100 were static, it is of course understood that the genomic sequence databases need not be static, and indeed are typically updated on a frequent, even hourly, basis.

[0545] Thus, as further described in experimental Examples 1, 2, and 4, infra, it is possible to query the database for newly added sequence, either newly added after an absolute date or newly added relative to a prior analysis performed using the methods and apparatus of the present invention. In this way, the process herein described can incorporate a dynamic, temporal component.

[0546] One utility of such temporal limitation is to identify, from newly accessioned genomic sequence, the presence of novel genes, particularly those not previously identified by EST sequencing (or other sequencing efforts that are similarly based upon gene expression). As further described in Example 1, such an approach has shown that newly accessioned human genomic sequence, when analyzed for sequences that function to encode protein, readily identifies genes that are novel over those in existing EST and other expression databases. In fact, as shown below, fully ⅔ of genes identified in newly accessioned human genomic sequence have not hitherto been identified. This makes the methods of the present invention extremely powerful gene discovery tools. And as would be appreciated, such gene discovery can be performed using genomic sequence from species other than human. Particularly useful species are those used as model systems during drug development, such as rodent, particularly mouse and rat, Arabidopsis thaliana, C. elegans, C. brigsii, Drosophila melanogaster, and zebra fish.

[0547] If query 20 incorporates multiple criteria, such as above-described, the multiple criteria can be performed as a series of separate queries or as a single query, depending in part upon the query language, the complexity of the query, and other considerations well known in the database arts.

[0548] If query 20 returns no genomic sequence meeting the query criteria, the negative result can be reported by process 22, and process 200 (and indeed, entire process 10) ended 23, as shown. Alternatively, or in addition to report and termination of the initial inquiry, a new query 20 can be generated that takes into account the initial negative result.

[0549] When query 20 returns sequence meeting the query criteria, the returned sequence is then passed to optional preprocessing 24, suitable and specific for the desired analytical approach and the particular analytical methods thereof to be used in process 25.

[0550] Preprocessing 24 can include processes suitable for many approaches and methods thereof, as well as processes specifically suited for the intended subsequent analysis.

[0551] Preprocessing 24 suitable for most approaches and methods will include elimination of sequence irrelevant to, or that would interfere with, the subsequent analysis. Such sequence includes repetitive sequence, such as Alu repeats and LINE elements, vector sequence, artificial sequence, such as artificial polylinkers, and the like. Such removal can readily be performed by identification and subsequent masking of the undesired sequence.

[0552] Identification can be effected by comparing the genomic sequence returned by query 20 with public or private databases containing known repetitive sequence, vector sequence, artificial sequence, and other artifactual sequence. Such comparison can readily be done using programs well known in the art, such as CROSS_MATCH or REPEATMASKER, the latter available on-line at

[0553] http://ftp.genome.washington.edu/RM/RepeatMasker.html, or by proprietary sequence comparison programs the engineering of which is well within the skill in the art.

[0554] Alternatively, or in addition, undesirable, including artifactual, sequence can be identified algorithmically without comparison to external databases and thereafter removed. For example, synthetic polylinker sequence can be identified by an algorithm that identifies a significantly higher than average density of known restriction sites. As another example, vector sequence can be identified by algorithms that identify nucleotide or codon usage at variance with that of the bulk of the genomic sequence.

[0555] Once identified, undesired sequence can be removed. Removal can usefully be done by masking the undesired sequence as, for example, by converting the specific nucleotide references to one that is unrecognized by the subsequent bioinformatic algorithms, such as “X”. Alternatively, but at present less preferred, the undesired sequence can be excised from the returned genomic sequence, leaving gaps.

[0556] Preprocessing 24 can further include selection from among duplicative sequences of that one sequence of highest quality. Higher quality can be measured as a lower percentage of, fewest number of, or least densely clustered occurrence of ambiguous nucleotides, defined as those nucleotides that are identified in the genomic sequence using symbols indicating ambiguity. Higher quality can also or alternatively be valued by presence in the longest contig.

[0557] Preprocessing 24 can, and often will, also include formatting of the data as specifically appropriate for passage to the analytical algorithms of process 25. Such formatting can and typically will include, inter alia, addition of a unique sequence identifier, either derived from the original accession number in genomic sequence database 100, or newly applied, and can further include additional annotation. Formatting can include conversion from one to another sequence listing standard, such as conversion to or from FASTA or the like, depending upon the input expected by the subsequent process.

[0558] Preprocessing, which can be optional depending upon the function desired to be identified and the informational requirements of the methods for effecting such identification, is followed by sequence processing 25, where sequences with the desired function are identified within the genomic sequence.

[0559] As mentioned above, such functions can include, but are not limited to, encoding protein, regulating transcription, regulating message transport after transcription, regulating message splicing after transcription, regulating message degradation after transcription, contributing to or controlling chromosomal somatic recombination, contributing to chromosomal stability or movement, contributing to allelic exclusion or X chromosome inactivation, and the like.

[0560] Where the function specified is protein coding, the above-described process can be used rapidly and efficienty to identify individual exons in genomic sequence. As discussed below, we have used the methods and apparatus of the present invention to identify 16,465 exons in human genomic sequence whose expression we have confirmed in at least one human tissue or cell type. Fully two-thirds of the exons initially characterized belong to genes that were not at the time of our discovery represented in existing public expression (EST, cDNA) databases, making the methods and apparatus of the present invention extremely powerful tools for novel gene discovery.

[0561] And as further mentioned below and described in detail in commonly owned and copending U.S. patent application Ser. No. 09/632,366, filed Aug. 3, 2000, the disclosure of which is incorporated herein by reference in its entirety, the genome-derived single exon probes and microarrays of the present invention prove exceedingly useful in the high throughput identification of a large variety of alternative splice events in eukaryotic cells and tissues.

[0562] To generate such probes, process 25 is used to identify putative coding regions. Two exemplary approaches useful in process 25 for identifying sequence that encodes putative genes are gene prediction and comparative sequence analysis.

[0563] Gene prediction can be performed using any of a number of algorithmic methods, embodied in one or more software programs, that identify open reading frames (ORFs) using a variety of heuristics, such as GRAIL, DICTION, GENSCAN, and GENEFINDER.

[0564] Comparative sequence analysis similarly can be performed using any of a variety of known programs that identify regions with lower sequence variability.

[0565] An advantage of comparative sequence analysis is that genomic sequence can be input into process 200 that is less comprehensive and/or of lesser quality than that required by gene prediction programs.

[0566] We have, for example, recently used comparative sequence analysis to identify sequences that are orthologous as between human and mouse genomes, and output the mouse sequences so identified (“similons”) into process 300; this approach has permitted us to identify, and then to confirm and measure expression of, novel mouse exons and genes. As is well known in the pharmaceutical arts, genes identified in model systems permit targets of pharmaceutical intervention to be validated in a model system; validated targets facilitate screening for potential therapeutic lead agents.

[0567] As further described in Example 1, below, gene prediction software programs yield a range of results. For the newly accessioned human genomic sequence input in Example 1, for example, GRAIL identified the greatest percentage of genomic sequence as putative coding region, 2% of the data analyzed; GENEFINDER was second, calling 1%; and DICTION yielded the least putative coding region, with 0.8% of genomic sequence called as coding region.

[0568] Increased reliability can be obtained when consensus is required among several such methods. Although discussed herein particularly with respect to exon calling, consensus among methods will in general increase reliability of predicting other functions as well.

[0569] Thus, as indicated by query 26, sequence processing 25, optionally with preprocessing 24, can be repeated with a different method, with consensus among such iterations determined and reported in process 27.

[0570] Process 27 compares the several outputs for a given input genomic sequence and identifies consensus among the separately reported results. The consensus itself, as well as the sequence meeting that consensus, is then stored in process 29a, displayed in process 29b, and/or output to process 300 for subsequent identification of a subset thereof suitable for assay.

[0571] Multiple levels of consensus can be calculated and reported by process 27.

[0572] For example, as further described in Example 1, infra, process 27 can report consensus as between all specific pairs of methods of gene prediction, as consensus among any one or more of the pairs of methods of gene prediction, or as among all of the gene prediction algorithms used. Thus, in Example 1, process 27 reported that GRAIL and GENEFINDER programs agreed on 0.7% of genomic sequence, that GPAIL and DICTION agreed on 0.5% of genomic sequence, and that the three programs together agreed on 0.25% of the data analyzed. Put another way, 0.25% of the genomic sequence was identified by all three of the programs as containing putative coding region.

[0573] As another example, three of the four gene prediction algorithms that we presently use—GENEFINDER, GENSCAN, and GRAIL—predict frame information in addition to the position of exons. If there is overlap in position and frame of the predicted exons, even if not complete identity, the predicted exons are merged in process 27 to generate the largest possible consensus coding region. The process is iterated until all possible overlaps have been merged. This approach reduces the mean number of exons present in each amplicon, and is preferred in generating exon-specific probes useful for detecting exon elongation and exon truncation alternative splice events.

[0574] Furthermore, consensus can be required among different approaches to identifying a chosen function.

[0575] For example, if the function desired to be identified is coding of protein sequence, and a first used approach to exon calling is gene prediction, the process can be repeated on the same input sequence, or subset thereof, with another approach, such as comparative sequence analysis. In such a case, where comparative sequence analysis follows gene prediction, the comparison can be performed not only on genomic nucleic acid sequence, but additionally or alternatively can be performed on the predicted amino acid sequence translated from exons prior-identified by the gene prediction approach.

[0576] Although shown as an iterative process, the multiple analyses required to achieve consensus can be done in series, in parallel, or some combination thereof.

[0577] Predicted functional sequence, optionally representing a consensus among a plurality of methods and approaches for determination thereof, is passed to process 300 for identification of a subset thereof for functional assay.

[0578] Where the function sought to be identified is protein coding, process 300 is used to identify a subset thereof suitable for experimental verification by physical and/or bioinformatic approaches.

[0579] Where the goal is the identification and confirmation of expression of only a single exon of gene, putative exons identified in process 200 can be classified, or binned, bioinformatically into putative genes. This binning can be based inter alia upon consideration of the average number of exons/gene in the species chosen for analysis, upon density of exons that have been called on the genomic sequence, and other empirical rules; the putative gene structure is also provided by various of these gene prediction programs. Thereafter, one or more among the exons can be chosen for subsequent use in gene expression assay.

[0580] Where the goal is, instead, the identification and confirmation of expression of all, or of a plurality, of the exons of a gene—as is typically desired for detection of alternative splice events, as further described in commonly owned and copending U.S. patent application Ser. No. 09/632,366, filed Aug. 3, 2000, the disclosure of which is incorporated herein by reference in its entirety—putative exons identified in process 200 can be classified, or binned, bioinformatically into putative genes; thereafter, all of the exons of the gene can be chosen for subsequent confirmation in gene expression assay.

[0581] Where such subsequent gene expression assay uses amplified nucleic acid, considerations such as desired amplicon length, primer synthesis requirements, putative exon length, sequence GC content, existence of possible secondary structure, and the like can be used to identify and select those exons that appear most likely successfully to amplify.

[0582] Where subsequent gene expression assay relies upon nucleic acid hybridization, whether or not using amplified product, further considerations involving hybridization stringency can be applied to identify that subset of sequences that will most readily permit sequence-specific discrimination at a chosen hybridization and wash stringency. One particular such consideration is avoidance of putative exons that span repetitive sequence; such sequence can hybridize spuriously to nonspecific message, reducing specific signal in the hybridization.

[0583] For bioinformatic assay, there are fewer constraints on the sequences that can be tested experimentally, and in this latter case, therefore, process 300 can output the entirety of the input sequence.

[0584] The subset of sequences identified by process 300 as suitable for use in assay is then used in process 400 to create the physical and/or informational substrate for experimental verification of the predictions made in process 200, and thereafter to assay those substrates.

[0585] Where the goal is to generate single exon nucleic acid probes useful for gene expression analysis, as by microarray hybridization, process 400 is used to confirm expression of the predicted exon. In a particularly useful approach, used herein to confirm expression of the 16,834 genome-derived single exon probes of the present invention, expression is confirmed and measured using genome-derived single exon nucleic acid microarrays, as follows.

[0586] Predicted exons are amplified from genomic DNA. Amplification can be performed using the polymerase chain reaction (PCR). Although PCR is conveniently used, other amplification approaches, such as rolling circle amplification, can also be used.

[0587] Amplification schemes can be designed to capture the entirety of each predicted exon in an amplicon with minimal additional (that is, flanking intronic or intergenic) sequence. Because exons predicted from genomic sequence using the methods of the present invention differ in length, such an approach results in amplicons of varying length.

[0588] However, we have found that most exons predicted from human genomic sequence are shorter than 500 bp in length. Although amplicons of at least about 75 base pairs, more preferably at least about 100 base pairs, even more preferably at least about 200 base pairs can be immobilized as probes on nucleic acid microarrays, our early experimental results using the methods of the present invention suggested that longer amplicons, at least about 400 base pairs, more preferably about 500 base pairs, are more effectively immobilized on glass slides or other prepared surfaces.

[0589] Although we had suspected that the intronic and intergenic material flanking putative exons in such longer amplicons might cause interference with exon-specific hybridization during microarray experiments, we have found instead, to our surprise, that the ratio of expression of any such probe as between an experimental tissue (or cell type) and a control tissue is not significantly affected by the presence in the probes of sequence that does not contribute to hybridization to message or cDNA.

[0590] Equally surprising, the art had suggested that single exon probes would not provide sufficient signal intensity for high stringency hybridization analyses. Although low stringency hybridization conditions have been designed that permit informative hybridization to highly redundant oligonucleotide-based microarrays, it was believed that the high stringency hybridization conditions typically used for EST-based microarrays would not be usable with single exon probes. We have found, surprisingly, that single-exon probes provide adequate signal at high stringency.

[0591] As a result, we have found that we are readily able to use genome-derived amplification products having a single exon flanked by intergenic and/or intronic sequence to confirm the expression of bioinformatically predicted exons.

[0592] To the extent that chemical synthesis methods permit oligonucleotides to be generated of sufficient length to encompass an exon, such oligonucleotides can be used as probes in lieu of amplified material. At present, however, amplified products can be generated that exceed the reasonable size limit of chemically synthesized oligonucleotides; amplification thus more readily permits probes to be generated that have single exons flanked by intronic and/or intergenic sequence.

[0593] Probes having flanking intergenic and/or intronic sequence permit a wider range of alternative splice events to be detected than do probes that contain only exonic sequence. For example, exon extension would be detectable with such probes as an increase in signal intensity: we have found a near-linear relationship between signal intensity and length of hybridizing sequence. And when used to assay heteronucloear, i.e., immature mRNA, probes having intronic and/or intergenic flanking sequence permit a wider variety of events to be assessed.

[0594] Furthermore, certain advantages derive from application to the microarray of amplicons of defined size.

[0595] Therefore, amplification schemes can alternatively, and preferably, be designed to amplify regions of defined size, preferably at least about 300 bp, more preferably at least about 400 bp, most preferably about 500 bp, centered about each predicted exon. Such an approach results in a population of amplicons of limited size diversity, but that typically contain intronic and/or intergenic nucleic acid in addition to, and flanking, the putative exon.

[0596] Conversely, somewhat fewer than 10% of exons predicted from human genomic sequence according to the methods of the present invention exceed 500 bp in length. Portions of such longer exons, preferably at least about 300 bp, more preferably at least about 400 bp, most preferably about 500 bp, can be amplified. However, in our early experiments we found that the percentage success at amplifying pieces of such exons is low, and that such putative exons are more effectively amplified when larger fragments, at least about 1000 bp, typically at least about 1500 bp, and even as large as 2000 bp are amplified. Further routine optimization of the PCR reaction would permit 500 bp portions of the longer exons to be amplified.

[0597] For amplification, the putative exons selected in process 300 are input into one or more primer design programs, such as PRIMER3 (available online for use at

[0598] http://www-genome.wi.mit.edu/cgi-bin/primer/),

[0599] with a goal of amplifying at least about 500 base pairs of genomic sequence centered within or about exons predicted to be no more than about 500 bp (or at least about 1000-1500 bp of genomic sequence for exons predicted to exceed 500 bp in length) and the primers synthesized by standard techniques. Primers with the requisite sequences can be purchased commercially or synthesized by standard techniques.

[0600] Conveniently, a first predetermined sequence can be added commonly to each exon-specific 5′ primer and a second, typically different, predetermined sequence commonly added to each 3′ exon-unique primer. This serves to immortalize the amplicon; that is, it serves to permit further amplification of any amplicon using a single set of primers complementary respectively to the common 5′ and common 3′ sequence elements. The presence of these “universal” priming sequences further facilitates later sequence verification, providing a sequence common to all amplicons at which to prime sequencing reactions. The common 5′ and 3′ sequences can further serve to add a cloning site should any of the exons warrant further study.

[0601] Such predetermined sequence is usefully at least about 10 nt in length, typically at least about 12 nt, more typically about 15 nt in length, and usually does not exceed about 25 nt in length. The “universal” priming sequences used in the examples presented infra were each 16 nt long and are further described in commonly owned and copending U.S. patent application Ser. No. 09/608,408, filed Jun. 30, 2000, the disclosure of which is incorporated herein by reference in its entirety. To conserve space, the 5′ and 3′ universal primer sequences are omitted from the probe sequences set forth in the Sequence Listing, the disclosure of which is incorporated herein by reference in its entirety.

[0602] The genomic DNA to be used as substrate for amplification will come from the eukaryotic species from which the genomic sequence data had originally been obtained, or a closely related species, and can conveniently be prepared by well known techniques from somatic or germline tissue or cultured cells of the organism. See, e.g., Short Protocols in Molecular Biology: A Compendium of Methods from Current Protocols in Molecular Biology, Ausubel et al. (eds.), 4^{th} edition (April 1999), John Wiley & Sons (ISBN: 047132938X) and Maniatis et al., Molecular Cloning: A Laboratory Manual, 2^{nd} edition (December 1989), Cold Spring Harbor Laboratory Press (ISBN: 0879693096), the disclosures of which are incorporated herein by reference in their entireties. Many such prepared genomic DNAs are available commercially, with the human genomic DNAs typically also having certification of donor informed consent.

[0603] After partial purification, as by size exclusion spin column or adsorption to glass, with or without confirmation as to amplicon quality as by gel electrophoresis, each amplicon (single exon probe) is disposed in an array upon a support substrate.

[0604] Methods for creating microarrays by deposition and fixation of nucleic acids onto support substrates are well known in the art. Reviewed in Schena (ed.), DNA Microarrays: A Practical Approach (Practical Approach Series), Oxford University Press (1999) (ISBN: 0199637768); Nature Genet. 21(1)(suppl):1-60 (1999); Schena (ed.), Microarray Biochip: Tools and Technology, Eaton Publishing Company/BioTechniques Books Division (2000) (ISBN: 1881299376), the disclosures of which are incorporated herein by reference in their entireties.

[0605] Typically, the support substrate can be glass, although other materials, such as amorphous silicon, crystalline silicon, or plastics, can be used. Plastics usefully can include polymethylacrylic, polyethylene, polypropylene, polyacrylate, polymethylmethacrylate, polyvinylchloride, polytetrafluoroethylene, polystyrene, polycarbonate, polyacetal, polysulfone, celluloseacetate, cellulosenitrate, nitrocellulose, or mixtures or copolymers thereof.

[0606] Typically, the support can be rectangular, although other shapes, particularly circular disks and even spheres, present certain advantages. Particularly advantageous alternatives to glass slides as support substrates for array of nucleic acids are optical discs, as described in Demers, “Spatially Addressable Combinatorial Chemical Arrays in CD-ROM Format,” international patent publication WO 98/12559, incorporated herein by reference in its entirety.

[0607] The amplified nucleic acids can be attached covalently to a surface of the support substrate or, more typically, applied to a derivatized surface in a chaotropic agent that facilitates denaturation and adherence by presumed noncovalent interactions, or some combination thereof.

[0608] Robotic spotting devices useful for arraying nucleic acids on support substrates can be constructed using public domain specifications (The MGuide, version 2.0, http://cmgm.stanford.edu/pbrown/mguide/index.html), or can conveniently be purchased from commercial sources, such as the Molecular Dynamics MicroArray Generation III Array Spotter, which is available from Amersham Pharmacia Biotech (Piscataway, N.J., USA). Spotting can also be effected by printing methods, including those using ink jet technology.

[0609] As is well known in the art, microarrays typically also contain immobilized control nucleic acids. For controls useful in providing measurements of background signal for the genome-derived single exon microarrays of the present invention, a plurality of E. coli genes can readily be used. As further described in Example 1, 16 or 32 E. coli genes suffice to provide a robust measure of nonspecific hybridization in such microarrays.

[0610] As is well known in the art, the amplified product disposed in arrays on a support substrate to create a nucleic acid microarray can consist entirely of natural nucleotides linked by phosphodiester bonds, or alternatively can include either nonnative nucleotides, alternative internucleoside linkages, or both, so long as complementary binding can be obtained in the hybridization reaction. If enzymatic amplification is used to produce the immobilized probes, the amplifying enzyme will impose certain further constraints upon the types of nucleic acid analogs that can be generated.

[0611] Although particularly described herein as using high density microarrays constructed on planar substrates, the methods of the present invention for confirming the expression of exons predicted from genomic sequence can use any of the known types of microarrays, as herein defined, including microarrays on nonplanar, nonunitary, distributed substrates, such as the nonplanar, bead-based microarrays as are described in Brenner et al., Proc. Natl. Acad. Sci. USA 97(4):166501670 (2000); U.S. Pat. Nos. 6,057,107; and 5,736,330, the disclosures of which are incorporated herein by reference in their entireties. In theory, a packed collection of such beads provides in aggregate a higher density of nucleic acid probe than can be achieved with spotting or lithography techniques on a single planar substrate.

[0612] In addition, gene expression can be confirmed using hybridization to lower density arrays, such as those constructed on membranes, such as nitrocellulose, nylon, and positively-charged derivatized nylon membranes.

[0613] Planar microarrays on solid substrates, however, provide certain useful advantages, including compatibility with existing readers. For example, each standard microscope slide can include at least 1000, typically at least 2000, preferably 5000 or more, and up to 19,000 or more nucleic acid probes of discrete sequence.

[0614] Each putative gene can be represented in the array by a single predicted exon or by a plurality of exons predicted to belong to the same gene. And as is well known in the art, each probe of defined sequence, representing a single predicted exon, can be deposited in a plurality of locations on a single microarray to provide redundancy of signal.

[0615] The genome-derived single exon microarrays described above differ in several fundamental and advantageous ways from microarrays presently used in the gene expression art, including (1) those created by deposition of mRNA-derived nucleic acids, (2) those created by in situ synthesis of oligonucleotide probes, and (3) those constructed from yeast genomic DNA.

[0616] Most nucleic acid microarrays that are in use for study of eukaryotic gene expression have as immobilized probes nucleic acids that are derived—either directly or indirectly—from expressed message. It is common, for example, for such microarrays to be derived from cDNA/EST libraries, either from those previously described in the literature, such as those from the I.M.A.G.E. consortium, Lennon et al., “The I.M.A.G.E. Consortium: an Integrated Molecular Analysis of Genomes and Their Expression, Genomics 33(1):151-2 (1996), or from the de novo construction of “problem specific” libraries targeted at a particular biological question, R. S. Thomas et al., Toxicologist 54:68-69 (2000), incorporated herein by reference in their entireties. Such microarrays are herein collectively denominated “EST microarrays”.

[0617] Such EST microarrays by definition can measure expression only of those genes found in EST libraries, which we show herein (see infra) to represent only a fraction of expressed genes. Thus, as further discussed in Example 1, infra, fully ⅔ of genes identified from newly-accessioned human genomic sequence data by the methods of the present invention—for which expression was subsequently confirmed—do not appear in EST or other expression databases, and could not, therefore, have been represented as probes on an EST microarray.

[0618] Furthermore, EST and cDNA libraries—and thus microarrays based thereupon—are biased by the tissue or cell type of message origin.

[0619] In addition, representation of a message in an EST and/or CDNA library depends upon the successful reverse transcription, optionally but typically with subsequent successful cloning, of the message. This introduces substantial bias into the population of probes available for arraying in EST microarrays. For example, as we show in the Examples, infra, the subset of genes identified from genomic sequence by the methods of the present invention that had previously been accessioned in EST or other expression databases are biased toward genes with higher expression levels.

[0620] In contrast, neither reverse transcription nor cloning is required to produce the probes arrayed on the genome-derived single exon microarrays of the present invention. And although the ultimate deposition of a probe on the genome-derived single exon microarray of the present invention depends upon a successful amplification from genomic material, a priori knowledge of the sequence of the desired amplicon affords greater opportunity to recover any given probe sequence recalcitrant to amplification than is afforded by the requirement for successful reverse transcription and cloning of unknown message in EST approaches. Furthermore, if the sequence cannot be amplified, the sequence can at times be chemically synthesized in its entirety for use in the present invention.

[0621] Thus, the genome-derived single exon microarrays of the present invention present a far greater diversity of probes for measuring gene expression, with far less bias, than do EST microarrays presently used in the art.

[0622] As a further consequence of their ultimate origin from expressed message, the probes in EST microarrays often contain poly-A (or complementary poly-T) stretches derived from the poly-A tail of mature mRNA. These homopolymeric stretches contribute to cross-hybridization, that is, to a spurious signal occasioned by hybridization to the homopolymeric tail of a labeled cDNA that lacks sequence homology to the gene-specific portion of the probe.

[0623] In contrast, the probes arrayed in the genome-derived single exon microarrays of the present invention lack homopolymeric stretches derived from message polyadenylation, and thus can provide more specific signal. Typically, at least about 50% of the probes on the genome-derived single exon microarrays of the present invention lack homopolymeric regions consisting of A or T, where a homopolymeric region is defined for purposes herein as stretches of 25 or more, typically 30 or more, identical nucleotides. More typically, at least about 60%, even more typically at least about 75%, of probes on the genome-derived single exon microarrays of the present invention lack such homopolymeric stretches.

[0624] A further distinction, which also affects the specificity of hybridization, is occasioned by the typical derivation of EST microarray probes from cloned material. Because much of the probe material disposed as probes on EST microarrays is excised or amplified from plasmid, phage, or phagemid vectors, EST microarrays typically include a fair amount of vector sequence, more so when the probes are amplified, rather than excised, from the vector.

[0625] In contrast, the vast majority of probes in the genome-derived single exon microarrays of the present invention contain no prokaryotic or bacteriophage vector sequence, having been amplified directly or indirectly from genomic DNA. Typically, therefore, at least about 50%, more typically at least about 60%, 70%, and even 80% or more of individual exon-including probes disposed on a genome-derived single exon microarray of the present invention lack vector sequence, and particularly lack sequences drawn from plasmids and bacteriophage. Preferably, at least about 85%, more preferably at least about 90%, most preferably more than 90% of exon-including probes in the genome-derived single exon microarray of the present invention lack vector sequence. With attention to removal of vector sequences through preprocessing 24, percentages of vector-free exon-including probes can be as high as 95-99%. The substantial absence of vector sequence from the genome-derived single exon microarrays of the present invention results in greater specificity during hybridization, since spurious cross-hybridization to a probe vector sequence is reduced.

[0626] As a further consequence of excision or amplification of probes from vectors in construction of EST microarrays, the probes arrayed thereon often contain artificial sequence, derived from vector polylinker multiple cloning sites, at both 5′ and 3′ ends. The probes disposed upon the genome-derived single exon microarrays need have no such artificial sequence appended thereto.

[0627] As mentioned above, however, the exon-specific primers used to amplify putative exons can include artificial sequences, typically 5′ to the exon-specific primer sequence, useful for “universal” (that is, independent of exon sequence) priming of subsequent amplification or sequencing reactions. When such “universal” 5′ and/or 3′ priming sequences are appended to the amplification primers, the probes disposed upon the genome-derived single exon microarray will include artificial sequence similar to that found in EST microarrays. However, the genome-derived single exon microarray of the present invention can be made without such sequences, and if so constructed, presents an even smaller amount of nonspecific sequence that would contribute to nonspecific hybridization.

[0628] Yet another consequence of typical use of cloned material as probes in EST microarrays is that such microarrays contain probes that result from cloning artifacts, such as chimeric molecules containing coding region of two separate genes. Derived from genomic material, typically not thereafter cloned, the probes of the genome-derived single exon microarrays of the present invention lack such cloning artifacts, and thus provide greater specificity of signal in gene expression measurements.

[0629] A further consequence of the cloned origin of probes on many EST microarrays is that the individual probes often have disparate sizes, which can cause the optimal hybridization stringency to vary among probes on a single microarray. In contrast, as discussed above, the probes arrayed on the genome-derived single exon microarrays of the present invention can readily be designed to have a narrow distribution in sizes, with the range of probe sizes no greater than about 10% of the average size, typically no greater than about 5% of the average probe size.

[0630] Because of their origin from fully- or partially-spliced message, probes disposed upon EST arrays will often include multiple exons. The percentage of such exon-spanning probes in an EST microarray can be calculated, on average, based upon the predicted number of exons/gene for the given species and the average length of the immobilized probes. For human genes, the near-complete sequence of human chromosome 22, Dunham et al., Nature 402(6761):489-95 (1999), predicts that human genes average 5.5 exons/gene. Even with probes of 200-500 bp, the vast majority of human EST microarray probes include more than one exon.

[0631] In contrast, by virtue of their origin from algorithmically identified exons in genomic sequence, the probes in the genome-derived single exon microarrays of the present invention can comprise individual exons, which provides the ability, as further discussed in commonly owned and copending U.S. patent application Ser. No. 09/632,366, filed Aug. 3, 2000, incorporated herein by reference in its entirety, to detect and to characterize the expression of splice variants.

[0632] Although the presence of multiexon probes will not interfere with the ability to confirm expression of predicted exons in a first level screen, it is preferred that at least about 50%, typically at least about 60%, even more typically at least about 70% of probes disposed on the genome-derived microarray of the present invention consist of, or include, no more than one exon. In preferred embodiments, at least about 75%, more preferably at least about 80%, 85%, 90%, 95%, and even 99% of probes in the genome-derived microarrays of the present invention consist of, or include, no more than one exon.

[0633] Although, in the most preferred embodiments, at least about 95%, and even at least about 99% of probes in the genome-derived microarray consist of, or include, no more than one exon, we have found that our early bioinformatic parameters typically produce, at this stage of analysis, about 10% of probes that potentially contain two exons. We expect that some fraction of these probes will prove to encode only a single exon, and that further optimization of our bioinformatic approach will reduce the percentage of probes having more than one potential exon. Nonetheless, we exclude such probes from the appended tables and Sequence Listing, incorporated herein by reference in their entireties.

[0634] Further distinguishing the genome-derived single exon microarrays of the present invention from the EST arrays in the art, the exons that are represented in EST microarrays are often biased toward the 3′ or 5′ end of their respective genes, since sequencing strategies used for EST identification are so biased. In contrast, no such 3′ or 5′ bias necessarily inheres in the selection of exons for disposition on the genome-derived single exon microarrays of the present invention.

[0635] Conversely, the probes provided on the genome-derived single exon microarrays of the present invention typically, but need not necessarily, include intronic and/or intergenic sequence that is absent from EST microarrays, which are derived from mature mRNA. As above-mentioned, such inclusion, although not mandatory, is advantageous, particularly in use of the probes for detection of alternative splice events. Typically, therefore, at least about 50%, more typically at least about 60%, and even more typically at least about 70% of the exon-including probes on the genome-derived single exon microarrays of the present invention include sequence drawn from noncoding regions. In some embodiments, at least about 80%, more typically at least about 85%, 90%, 91%, 92%, 93%, 94%, 95%, 96%, 97%, 98%, and even 99% or more of exon-including probes on the genome-derived single exon microarrays of the present invention will include sequence drawn from noncoding regions.

[0636] The genome-derived single exon microarrays of the present invention are also quite different from in situ synthesis microarrays, where probe size is severely constrained by limitations of the photolithographic or other in situ synthesis processes.

[0637] Typically, probes arrayed on in situ synthesis microarrays are limited to a maximum of about 25 bp. As a well known consequence, hybridization to such chips must be performed at low stringency. In order, therefore, to achieve unambiguous sequence-specific hybridization results, the in situ synthesis microarray requires substantial redundancy, with concomitant programmed arraying for each probe of probe analogues with altered (i.e., mismatched) sequence.

[0638] In contrast, the longer probe length of the genome-derived single exon microarrays of the present invention allows much higher stringency hybridization and wash. Typically, therefore, exon-including probes on the genome-derived single exon microarrays of the present invention average at least about 100 bp, more typically at least about 200 bp, preferably at least about 250 bp, even more preferably about 300 bp, 400 bp, or in preferred embodiments, at least about 500 bp in length. By obviating the need for substantial probe redundancy, this approach permits a higher density of probes for discrete exons or genes to be arrayed on the microarrays of the present invention than can be achieved for in situ synthesis microarrays.

[0639] A further distinction is that the probes in in situ synthesis microarrays typically are covalently linked to the substrate surface. In contrast, the probes disposed on the genome-derived microarray of the present invention typically are, but need not necessarily be, bound noncovalently to the substrate.

[0640] Furthermore, the short probe size on in situ microarrays causes large percentage differences in the melting temperature of probes hybridized to their complementary target sequence, and thus causes large percentage differences in the theoretically optimum stringency across the array as a whole.

[0641] In contrast, the larger probe size in the microarrays of the present invention create lower percentage differences in melting temperature across the range of arrayed probes.

[0642] A further significant advantage of the microarrays of the present invention over in situ synthesized arrays is that the quality of each individual probe can be confirmed before deposition. In contrast, the quality of probes cannot be assessed on a probe-by-probe basis for the in situ synthesized microarrays presently being used.

[0643] The genome-derived single exon microarrays of the present invention are also distinguished over, and present substantial benefits over, the genome-derived microarrays from lower eukaryotes such as yeast. See, e.g., Lashkari et al., Proc. Natl. Acad. Sci. USA 94:13057-13062 (1997).

[0644] Only about 220-250 of the 6100 or so nuclear genes in Saccharomyces cerevisiae—that is, only about 4 to 5%—have standard, spliceosomal, introns, Lopez et al., Nucl. Acids Res. 28:85-86 (2000); Spingola et al., RNA 5(2):221-34 (1999), permitting the ready amplification and disposition of single-exon amplicons on such microarray without the requirement for antecedent use of gene prediction and/or comparative sequence analyses.

[0645] A significant aspect of the present invention is the ability to identify and to confirm expression of predicted coding regions in genomic sequence drawn from eukaryotic organisms that have a higher percentage of genes having introns than do yeast such as Saccharomyces cerevisiae, particularly in genomic sequence drawn from eukaryotes in which at least about 10%, typically at least about 20%, more typically at least about 50% of protein-encoding genes have introns. In preferred embodiments, the methods and apparatus of the present invention are used to identify and confirm expression of exons of novel genes from genomic sequence of eukaryotes in which the average number of introns per gene is at least about one, more typically at least about two, even more typically at least about three or more.

[0646] After the physical substrate is prepared, experimental verification of predicted function is performed. To verify the expression of the 16,834 single exon probes of the present invention, the single exon microarrays were used in simultaneous two-color hybridization reactions, as follows.

[0647] Expression is conveniently measured and reported for each probe in the microarray both as a signal intensity and as a ratio of the expression measured relative to a control, according to techniques well known in the microarray art, reviewed in Schena (ed.), DNA Microarrays: A Practical Approach (Practical Approach Series), Oxford University Press (1999) (ISBN: 0199637768); Nature Genet. 21(1)(suppl):1-60 (1999); Schena (ed.), Microarray Biochip: Tools and Technology, Eaton Publishing Company/BioTechniques Books Division (2000) (ISBN: 1881299376), the disclosures of which are incorporated herein by reference in their entireties. See also Example 2, infra. The mRNA source for the reference (control) used to calculate expression ratios can be heterogeneous, as from a pool of multiple tissues and/or cell types or, alternatively, can be drawn from a homogeneous mRNA source, such as a single cultured cell-type.

[0648] In Examples 1 and 2, infra, we used a pool of 10 tissues/cell types as control. We have since observed that almost every probe that demonstrates expression in the control pool can readily be shown to be expressed in HeLa cells. Since use of a pooled control might mask subtle alternative splice events, we have used HeLa as the source of control message in more recent experiments, such as those reported in Example 4, infra.

[0649] mRNA can be prepared by standard techniques, Short Protocols in Molecular Biology: A Compendium of Methods from Current Protocols in Molecular Biology, Ausubel et al. (eds.), 4th edition (April 1999), John Wiley & Sons (ISBN: 047132938X) and Maniatis et al., Molecular Cloning: A Laboratory Manual, 2^{nd} edition (December 1989), Cold Spring Harbor Laboratory Press (ISBN: 0879693096), the disclosures of which are incorporated herein by reference in their entireties, or purchased commercially. The mRNA is then typically reverse-transcribed in the presence of labeled nucleotides: the index source (that in which expression is desired to be measured) is reverse transcribed in the presence of nucleotides labeled with a first label, typically a fluorophore (equivalently denominated fluorochrome; fluor; fluorescent dye); the reference source is reverse transcribed in the presence of a second label, typically a fluorophore, typically fluorometrically-distinguishable from the first label.

[0650] As further described in Example 2, infra, Cy3 and Cy5 dyes prove particularly useful in these methods. After partial purification of the index and reference targets, hybridization to the probe array is conducted according to standard techniques, typically under a coverslip or in an automatic slide processing unit.

[0651] After wash, microarrays are conveniently scanned using a commercial microarray scanning device, such as a Molecular Dynamics Generation III Array Scanner (Amersham Pharmacia Biotech, Piscataway, N.J., USA) or Molecular Dynamics Avalanche Scanner (Amersham Pharmacia Biotech, Piscataway, N.J., USA). Data on expression is then passed, with or without interim storage, to process 500 , where the results for each probe are related to the original sequence.

[0652] Although the use of high density genome-derived microarrays on solid planar substrates is presently a preferred approach for the physical confirmation and characterization of the expression of sequences predicted to encode protein, other types of microarrays, as well as lower density macro arrays, can also be used.

[0653] Experimental verification in process 400 of the function predicted from genomic sequence in process 200 can be bioinformatic, rather than, or additional to, physical verification. Where the function desired to be identified is protein coding, as in the generation of the 16,834 single exon probes of the present invention, the predicted exons can be compared bioinformatically to sequences known or suspected of being expressed.

[0654] Thus, the sequences output from process 300 (or process 200), can be used to query expression databases, such as EST databases, SNP (“single nucleotide polymorphism”) databases, known cDNA and mRNA sequences, SAGE (“serial analysis of gene expression”) databases, and more generalized sequence databases that allow query for expressed sequences. Such query can be done by any sequence query algorithm, such as BLAST (“basic local alignment search tool”). The results of such query—including information on identical sequences and information on nonidentical sequences that have diffuse or focal regions of sequence homology to the query sequence—can then be passed directly to process 500, or used to inform analyses subsequently undertaken in process 200, process 300, or process 400.

[0655] Experimental data, whether obtained by physical or bioinformatic assay in process 400, is passed to process 500 where it is usefully related to the sequence data itself, a process colloquially termed “annotation”. Such annotation can be done using any technique that usefully relates the functional information to the sequence, as, for example, by incorporating the functional data into the record itself, by linking records in a hierarchical or relational database, by linking to external databases, or by a combination thereof. Such database techniques are well within the skill in the art.

[0656] The annotated sequence data can be stored locally, uploaded to genomic sequence database 100, and/or displayed 800.

[0657] Display of Annotated Genomic Sequence

[0658] The methods and apparatus of the present invention rapidly produce functional information from genomic sequence. As is further discussed below, we have, for example, used the methods and apparatus of the present invention to identify 16,465 exons (in 16,834 separate single exon probes) in human genomic sequence whose expression we have confirmed in at least one human tissue or cell type. Fully two-thirds of the exons belong to genes that were not then represented in existing public expression (EST, cDNA) databases. We have also used these single exon probes to identify alternative splice events in novel genes.

[0659] Coupled with the escalating pace at which sequence now accumulates, the ability rapidly to identify and confirm the function of regions of genomic DNA provided by the present invention produces a need for methods of displaying the information in meaningful ways. It is, therefore, another aspect of the present invention to provide means for displaying annotated sequence, and in particular for displaying sequence annotated according to the methods and apparatus of the present invention. Further, such display can be used as a preferred graphical user interface for electronic search, query, and analysis of such annotated sequence.

[0660] FIG. 3 schematizes visual display 80 presenting a single genomic sequence annotated according to the present invention. Because of its nominal resemblance to artistic works of Piet Mondrian, visual display 80 is alternatively described herein as a “Mondrian”.

[0661] Each of the visual elements of display 80 is aligned with respect to the genomic sequence being annotated (the “annotated sequence”). Given the number of nucleotides typically represented in an annotated sequence, representation of individual nucleotides would rarely be readable in hard copy output of display 80. Typically, therefore, the annotated sequence is schematized as rectangle 89, extending from the left border of display 80 to its right border. By convention herein, the left border of rectangle 89 represents the first nucleotide of the sequence and the right border of rectangle 89 represents the last nucleotide of the sequence.

[0662] As further discussed below, however, the Mondrian visual display of annotated sequence can serve as a convenient graphical user interface for computerized representation, analysis, and query of information stored electronically. For such use, the individual nucleotides can conveniently be linked to the X axis coordinate of rectangle 89. This permits the annotated sequence at any point within rectangle 89 readily to be viewed, either automatically—for example, by time-delayed appearance of a small overlaid window (“tool tip”) upon movement of a cursor or other pointer over rectangle 89—or through user intervention, as by clicking a mouse or other pointing device at a point in rectangle 89.

[0663] Visual display 80 is generated after user specification of the genomic sequence to be displayed. Such specification can consist of or include an accession number for a single clone (e.g., a single BAC accessioned into GenBank), wherein the starting and stopping nucleotides are thus absolutely identified, or alternatively can consist of or include an anchor or fulcrum point about which a chosen range of sequence is anchored, thus providing relative endpoints for the sequence to be displayed. For example, the user can anchor such a range about a given chromosomal map location, gene name, or even a sequence returned by query for similarity or identity to an input query sequence. When visual display 80 is used as a graphical user interface to computerized data, additional control over the first and last displayed nucleotide will typically be dynamically selectable, as by use of standard zooming and/or selection tools.

[0664] Field 81 of visual display 80 is used to present the output from process 200, that is, to present the bioinformatic prediction of those sequences having the desired function within the genomic sequence. Functional sequences are typically indicated by at least one rectangle 83 (83a, 83b, 83c), the left and right borders of which respectively indicate, by their X-axis coordinates, the starting and ending nucleotides of the region predicted to have function.

[0665] Where a single bioinformatic method or approach identifies a plurality of regions having the desired function, a plurality of rectangles 83 is disposed horizontally in field 81. Where multiple methods and/or approaches are used to identify function, each such method and/or approach can be represented by its own series of horizontally disposed rectangles 83, each such horizontally disposed series of rectangles offset vertically from those representing the results of the other methods and approaches.

[0666] Thus, rectangles 83a in FIG. 3 represent the functional predictions of a first method of a first approach for predicting function, rectangles 83b represent the functional predictions of a second method and/or second approach for predicting that function, and rectangles 83c represent the predictions of a third method and/or approach.

[0667] Where the function desired to be identified is protein coding, field 81 is used to present the bioinformatic prediction of sequences encoding protein. For example, rectangles 83a can represent the results from GRAIL or GRAIL II, rectangles 83b can represent the results from GENEFINDER, and rectangles 83c can represent the results from DICTION.

[0668] Optionally, and preferably, rectangles 83 collectively representing predictions of a single method and/or approach are identically colored and/or textured, and are distinguishable from the color and/or texture used for a different method and/or approach.

[0669] Alternatively, or in addition, the color, hue, density, or texture of rectangles 83 can be used further to report a measure of the bioinformatic reliability of the prediction. For example, many gene prediction programs will report a measure of the reliability of prediction. Thus, increasing degrees of such reliability can be indicated, e.g., by increasing density of shading. Where display 80 is used as a graphical user interface, such measures of reliability, and indeed all other results output by the program, can additionally or alternatively be made accessible through linkage from individual rectangles 83, as by time-delayed window (“tool tip” window), or by pointer (e.g., mouse)-activated link.

[0670] As described above, increased predictive reliability can be achieved by requiring consensus among methods and/or approaches to determining function. Thus, field 81 can include a horizontal series of rectangles 83 that indicate one or more degrees of consensus in predictions of function, including the combined length of the separately predicted exons that overlap in frame.

[0671] Although FIG. 3 shows three series of horizontally disposed rectangles in field 81, display 80 can include as few as one such series of rectangles and as many as can discriminably be displayed, depending upon the number of methods and/or approaches used to predict a given function. For example, addition of a fourth gene prediction program, such as GENSCAN

[0672] (http://genes.mit.edu/GENSCANinfo.html),

[0673] to the three gene prediction programs used in our first experiments (GRAIL, GENEFINDER, DICTION) would be accommodated by a fourth series of rectangles disposed horizontally in field 81, but offset vertically from rectangles 81a, 81b, and 81c.

[0674] Furthermore, field 81 can be used to show predictions of a plurality of different functions. However, the increased visual complexity occasioned by such display makes more useful the ability of the user to select a single function for display. When display 80 is used as a graphical user interface for computer query and analysis, such function can usefully be indicated and user-selectable, as by a series of graphical buttons or tabs (not shown in FIG. 3).

[0675] Rectangle 89 is shown in FIG. 3 as including interposed rectangle 84. Rectangle 84 represents the portion of annotated sequence for which predicted functional information has been assayed physically, with the starting and ending nucleotides of the assayed material indicated by the X axis coordinates of the left and right borders of rectangle 84. Rectangle 85, with optional inclusive circles 86 (86a, 86b, and 86c) displays the results of such physical assay.

[0676] Although a single rectangle 84 is shown in FIG. 3, physical assay is not limited to just one region of annotated genomic sequence. It is expected that an increasing percentage of regions predicted to have function by process 200 will be assayed physically, and that display 80 will accordingly, for any given genomic sequence, have an increasing number of rectangles 84 and 85, representing an increased density of sequence annotation. For example, for purposes of generating exon-specific probes for alternative splice detection, it is preferred that a plurality of exons, preferably all of the exons, that commonly belong to a single gene will be assayed experimentally for expression; accordingly, display 80 will have, for the genomic sequence encompassing such exons, a series of rectangles 84 and 85 for each of the assayed exons.

[0677] Where the function desired to be identified is protein coding, rectangle 84 identifies the sequence of the probe used to measure expression. In embodiments of the present invention where expression is measured using genome-derived single exon microarrays, rectangle 84 identifies the sequence included within the probe immobilized on the solid support surface of the microarray. As noted supra, such probe will often include a small amount of additional, synthetic, material incorporated during amplification and designed to permit reamplification of the probe, which sequence is typically not shown in display 80.

[0678] Rectangle 87 is used to present the results of bioinformatic assay of the genomic sequence. For example, where the function desired to be identified is protein coding, process 400 can include bioinformatic query of expression databases with the sequences predicted in process 200 to encode exons. And as discussed above, because bioinformatic assay presents fewer constraints than does physical assay, often the entire output of process 200 can be used for such assay, without further subsetting thereof by process 300. Therefore, rectangle 87 typically need not have separate indicators therein of regions submitted for bioinformatic assay; that is, rectangle 87 typically need not have regions therein analogous to rectangles 84 within rectangle 89.

[0679] Rectangle 87 as shown in FIG. 3 includes smaller rectangles 880 and 88. Rectangles 880 indicate regions that returned a positive result in the bioinformatic assay, with rectangles 88 representing regions that did not return such positive results. Where the function desired to be predicted and displayed is protein coding, rectangles 880 indicate regions of the predicted exons that identify sequence with significant similarity in expression databases, such as EST, SNP, SAGE databases, with rectangles 88 indicating genes novel over those identified in existing expression data bases.

[0680] Rectangles 880 can further indicate, through color, shading, texture, or the like, additional information obtained from bioinformatic assay.

[0681] For example, where the function assayed and displayed is protein coding, the degree of shading of rectangles 880 can be used to represent the degree of sequence similarity found upon query of expression databases. The number of levels of discrimination can be as few as two (identity, and similarity, where similarity has a user-selectable lower threshold).

[0682] Alternatively, as many different levels of discrimination can be indicated as can visually be discriminated.

[0683] Where display 80 is used as a graphical user interface, rectangles 880 can additionally provide links directly to the sequences identified by the query of expression databases, and/or statistical summaries thereof. As with each of the precedingly-discussed uses of display 80 as a graphical user interface, it should be understood that the information accessed via display 80 need not be resident on the computer presenting such display, which often will be serving as a client, with the linked information resident on one or more remotely located servers.

[0684] Rectangle 85 displays the results of physical assay of the sequence delimited by its left and right borders.

[0685] Rectangle 85 can consist of a single rectangle, thus indicating a single assay, or alternatively, and increasingly typically, will consist of a series of rectangles (85a, 85b, 85c) indicating separate physical assays of the same sequence.

[0686] Where the function assayed is gene expression, and where gene expression is assayed as herein described using simultaneous two-color fluorescent detection of hybridization to genome-derived single exon microarrays, individual rectangles 85 can be colored to indicate the degree of expression relative to control. Conveniently, shades of green can be used to depict expression in the sample over control values, and shades of red used to depict expression less than control, corresponding to the spectra of the Cy3 and Cy5 dyes conventionally used for respective labeling thereof.

[0687] Additional functional information can be provided in the form of circles 86 (86a, 86b, 86c), where the diameter of the circle can be used to indicate a parameter different from that set forth in rectangle 85. For example, where the annotated functions are the distribution of expression of the one or more predicted exons, rectangle 85 can report expression relative to control and circle 86 can be used to report signal intensity. As discussed infra, such relative expression (expression ratio) and absolute expression (signal intensity) can be expressed using normalized values.

[0688] Where display 80 is used as a graphical user interface, rectangle 85 can be used as a link to further information about the assay. For example, where the assay is one for gene expression, each rectangle 85 can be used to link to information about the source of the hybridized mRNA, the identity of the control, raw or processed data from the microarray scan, or the like.

[0689] For purposes of illustration only, FIG. 4 shows an embodiment of display 80 showing typical color conventions when hypothetical genomic sequence is annotated with exon-specific expression data. As would of course readily be understood, the color choice is arbitrary, and alternative colors can be used.

[0690] In this typical presentation, BAC sequence (“Chip seq.”) 89 is presented in red, with the physically assayed region thereof (corresponding to rectangle 84 in FIG. 3) shown in white. Algorithmic gene predictions are shown in field 81, with predictions by GRAIL shown in green, predictions by GENEFINDER shown in blue, and predictions by DICTION shown in pink. Within rectangle 87, regions of sequence that, when used to query expression databases, return identical or similar sequences (“EST hit”) are shown as white rectangles (corresponding to rectangles 880 in FIG. 3), gray indicates low homology, and black indicates unknowns (where black and gray would correspond to rectangles 88 in FIG. 3).

[0691] Although FIGS. 3 and 4 show a single stretch of sequence, uninterrupted from left to right, longer sequences are usefully represented by vertical stacking of such individual Mondrians, as shown in FIGS. 9 and 10.

[0692] Using our visual display tool, the Mondrian, we have found that consensus in the pattern of expression of individual exons is a powerful means for identifying exons that commonly belong to a single gene. It is, therefore, another aspect of the present invention to provide methods, including methods based upon visual display, for associating exons that commonly belong to a single gene using, as the criterion for association, consensus in their patterns of expression in a plurality of tissues and/or cell types.

[0693] As further discussed in Example 3, FIG. 9 presents a Mondrian of BAC AC008172 (bases 25,000 to 130,000 shown), containing the carbamyl phosphate synthetase gene (AF154830.1), the sequence and structure of which has previously been reported. Purple background within the region shown as field 81 in FIG. 3 indicates all 37 known exons for this gene.

[0694] As can be seen, GRAIL II successfully identified 27 of the known exons (73%), GENEFINDER successfully identified 37 of the known exons (100%), while DICTION identified 7 of the known exons (19%).

[0695] Seven of the predicted exons were selected for physical assay, of which 5 successfully amplified by PCR and were sequenced. These five exons were all found to be from the same gene, the carbamyl phosphate synthetase gene (AF154830.1).

[0696] The five exons were arrayed and gene expression measured across 10 tissues. As is readily seen by visual inspection of the resulting Mondrian (FIG. 5), the five single-exon probes report identical expression ratio patterns: each exon is expressed above control (i.e., in green) in the tissues represented by the fourth, seventh, and eighth rectangles (corresponding to rectangles 85 in FIG. 3) and is expressed at or below control in the remaining tissues.

[0697] Of course, an exon that is removed or truncated by alternatively splicing in one of the assayed tissues would produce a variant expression pattern. For purposes of associating exons as belonging commonly to a single gene, however, a consensus among assayed tissues would still identify the exon as presumptively belonging to the same gene.

[0698] The methods of this aspect of the invention can, and typically will, be automated. For example, WO 99/58720, incorporated herein by reference in its entirety, describes algorithms for ordering the relatedness of a plurality of multidimensional expression data sets. The methods set forth therein can readily be adapted to ordering the relatedness of data sets, wherein each data set comprises expression ratios of an individual exon across a plurality of tissues and cell types, permitting exons with related, but not necessarily identical, patterns of expression to be classified as belonging to a common gene.

[0699] Utility of Genome-Derived Single Exon Probes and Microarrays

[0700] The methods and apparatus above-described rapidly produce functional information from genomic sequence. When the functions to be identified are protein coding and the distribution of expression of the predicted exon, the methods and apparatus of the present invention rapidly identify and confirm the expression of portions of genomic sequence that function to encode protein. Using these methods and apparatus, we have, for example, generated 16,834 single exon probes that demonstrate significant expression in one or more of ten tested human tissues or cell types.

[0701] As would immediately be appreciated by one of skill in the art, each single exon probe having demonstrable expression in one or more tissues is currently available for use in measuring the level of its exon's expression in each of the tissues in which expression has been confirmed. The utility is specific to the probe; under high stringency hybridization conditions, each probe reports the level of expression of message specifically containing that exon.

[0702] Accordingly, each single exon probe of the present invention, each of which has been shown to have demonstrable expression in one or more tissues or cell types, is currently available as a tool for specifically measuring the expression of the probe's exon in at least one tissue or cell type. Sequences of the probes and respective expression data can be found in the appended Sequence Listing and Tables 4-13, incorporated herein by reference.

[0703] Measuring tools are well known in many arts, not just in molecular biology, and are known to possess credible, specific, and substantial utility. For example, U.S. Pat. No. 6,016,191 describes and claims a tool for measuring characteristics of fluid flow in a hydrocarbon well; U.S. Pat. No. 6,042,549 describes and claims a device for measuring exercise intensity; U.S. Pat. No. 5,889,351 describes and claims a device for measuring viscosity and for measuring characteristics of a fluid; U.S. Pat. No. 5,570,694 describes and claims a device for measuring blood pressure; U.S. Pat. No. 5,930,143 describes and claims a device for measuring the dimensions of machine tools; U.S. Pat. No. 5,279,044 describes and claims a measuring device for determining an absolute position of a movable element; U.S. Pat. No. 5,186,042 describes and claims a device for measuring action force of a wheel, and U.S. Pat. No. 4,246,774 describes and claims a device for measuring the draft of smoking articles such as cigarettes.

[0704] As for those genome-derived single exon probes identified by the methods of the present invention, for which expression has not yet been demonstrated (and that are, on that basis, excluded from the appended Sequence Listing), such probes are currently available as tools for surveying tissues to detect the presence of expressed messages that contain their specific exon.

[0705] Survey tools—i.e., tools for determining the presence and/or location of a desired object by search of an area—are well known in many arts, not just in molecular biology, and are known to possess credible, specific, and substantial utility. For example, U.S. Pat. No. 6,046,800 describes and claims a device for surveying an area for objects that move; for example, U.S. Pat. No. 6,025,201 describes and claims an apparatus for locating and discriminating platelets from non-platelet particles or cells on a cell-by-cell basis in a whole blood sample; U.S. Pat. No. 5,990,689 describes and claims a device for detecting and locating anomalies in the electromagnetic protection of a system, and U.S. Pat. No. 5,984,175 describes and claims a device for detecting and identifying wearable user identification units.

[0706] It will be appreciated, of course, that those probes for which expression has been demonstrated are useful for both measurement in the tissues for which expression has been confirmed and for survey in other tissues.

[0707] It will also be appreciated that the inability to demonstrate expression of certain of the probes predicted by the methods of the present invention, making such probes more useful as survey, than as measurement, tools, confers upon these probes some of their useful advantages over prior nucleic acid probes.

[0708] Significant among such advantages is the presence of probes for novel genes.

[0709] As mentioned above and further detailed in Examples 1 and 2, infra, fully ⅔ of the exons identified using the methods of the present invention are not present in existing expression databases. And the fewer the number of tissues in which the exon can be shown to be expressed, the more likely the exon will prove to be part of a novel gene: as further discussed in Example 2, exons whose expression was measurable in only a single of the tested tissues were represented in existing expression databases at a rate of only 11%, whereas 36% of exons whose expression was measurable in 9 tissues were present in existing expression databases, and fully 45% of those exons expressed in all ten tested tissues were present in existing expressed sequence databases.

[0710] Thus, the genome-derived single exon probes of the present invention that have not yet been shown to be expressed in one of our ten standard tissues will likely contain the largest percentage of unknown genes.

[0711] And it should further be appreciated that the genome-derived single exon probes of the present invention for which significant expression has not yet been shown, and that are thus useful principally as survey tools, will later be demonstrated to be expressed in other tissues, cell types, and/or developmental stages, and will thus assume substantial additional utility as tools for measuring specific gene expression.

[0712] Either as tools for measuring gene expression or tools for surveying gene expression, the genome-derived single exon probes of the present invention have significant advantages over the cDNA or EST-based probes that are currently available for achieving these utilities.

[0713] As mentioned earlier with respect to the genome-derived single exon microarrays used to confirm expression of predicted exons, which discussion is incorporated herein by reference in its entirety, the genome-derived single exon probes of the present invention advantageously lack the biases inherent in probes drawn from EST libraries, such as expression level bias, 3′ or 5′ end-bias, bias imposed by reverse transcription, bias imposed by cloning limitations; advantageously lack the homopolymeric stretches often seen in probes derived from expressed message; advantageously lack the prokaryotic or bacteriophage vector sequence often seen in probes derived from expressed message; advantageously lack cloning artifacts; and provide a much enhanced ability to monitor the expression of individual exons, and thus to detect alternative splicing events.

[0714] The genome-derived single exon probes of the present invention are useful in constructing genome-derived single exon microarrays; the genome-derived single exon microarrays, in turn, are saleable products of manufacture that are useful for measuring and for surveying gene expression.

[0715] When included on a microarray, each genome-derived single exon probe of the present invention makes the microarray specifically useful for detecting the probe's specific exon, thus imparting upon the microarray device the ability to detect a signal where, absent such probe, it would have reported no signal. This utility makes each individual probe on such microarray akin to an antenna, circuit, firmware or software element included in an electronic apparatus, where the antenna, circuit, firmware or software element imparts upon the apparatus the ability newly and additionally to detect signal in a portion of the radio-frequency spectrum where previously it could detect no signal; such devices are known to have specific, substantial, and credible utility.

[0716] Gene expression analysis using microarrays—conventionally using microarrays having probes derived from expressed message—is well-established as useful.

[0717] For example, Kaminski et al., “Global Analysis of Gene Expression in Pulmonary Fibrosis Reveals Distinct Programs Regulating Lung Inflammation and Fibrosis,” Proc. Natl. Acad. Sci. USA 97(4):1778-83 (2000), incorporated herein by reference, describe the use of microarrays to analyze the gene expression programs that underlie pulmonary fibrosis in a mouse model; the analysis identified two distinct groups of genes involved in the time-dependent inflammatory and fibrotic responses to the drug bleomycin.

[0718] For example, Livesey et al., “Microarray Analysis of the Transcriptional Network Controlled by the Photoreceptor Homeobox Gene Crx,” Curr. Biol. 10(6):301-310 (2000), incorporated herein by reference, used microarrays to study the transcriptional network of the Crx transcription factor, which is preferentially expressed in the retina, and mutation of which results in congenital blindness or photoreceptor degeneration in humans; the analysis identified genes differentially expressed as between mutated mice which completely lacked the mouse version of the Crx gene and normal mice.

[0719] For example, Geiss et al., “Large-scale Monitoring of Host Cell Gene Expression During HIV-1 Infection Using cDNA Microarrays,” Virology 266(1):8-16 (2000), incorporated herein by reference, used nucleic acid microarrays to monitor the expression of approximately 1500 cellular cDNAs in infected CD4⁺ T-cells: twenty cellular genes were identified as differentially expressed at 3 days post infection, and thus promising targets for development of anti-HIV drugs.

[0720] For example, Alon et al., “Broad Patterns of Gene Expression Revealed by Clustering Analysis of Tumor and Normal Colon Tissues Probed by Oligonucleotide Arrays,” Proc. Natl. Acad. Sci. USA 96(12):6745-50 (1999), incorporated herein by reference, describe use of microarrays to distinguish colon cancer samples from samples of normal colon tissue based on subtle differences in gene expression patterns, even when expression of individual genes varied only slightly between the tissues.

[0721] For example, Scherf et al., “A Gene Expression Database for the Molecular Pharmacology of Cancer,” Nat. Genet. 24(3):236-44 (2000), incorporated herein by reference, used microarrays to assess gene expression profiles in 60 human cancer cell lines used in drug discovery screens by the National Cancer Institute; the expression data were then correlated to drug responsiveness to identify particular genes, the expression of which may predict drug sensitivity and resistance.

[0722] For example, Alizadeh et al., “Distinct types of diffuse large B-cell lymphoma identified by gene expression profiling,” Nature 403(6769):503-11 (2000), incorporated herein by reference, used microarrays to stratify patients having diffuse large B-cell lymphoma according to expression patterns indicative of different stages of B-cell differentiation, providing improved diagnostic resolution.

[0723] For example, Perou et al., “Distinctive Gene Expression Patterns in Human Mammary Epithelial Cells and Breast Cancers, Proc. Natl. Acad. Sci. USA 96(16):9212-7 (1999), incorporated herein by reference, used microarrays to identify patterns of gene expression in human mammary epithelial cells growing in culture and in primary human breast tumors. Two such clusters were found to have patterns that correlated with variation in cell proliferation rates and with activation of the IFN-regulated signal transduction pathway, respectively. This analysis demonstrates that variation in gene expression patterns in human cancers can serve as a means to classify solid tumors.

[0724] For example, Sgroi et al., “In vivo Gene Expression Profile Analysis of Human Breast Cancer Progression,” Cancer Res. 59(22):5656-61 (1999), incorporated herein by reference, used cDNA microarrays to monitor in vivo gene expression levels in purified normal, invasive, and metastatic breast cell populations from a single patient; the analysis demonstrated that microarrays can be used to track gene expression changes associated with progression of cancer, with diagnostic, prognostic, and therapeutic implications.

[0725] For example, Wang et al., “Identification of Genes Differentially Over-expressed in Lung Squamous Cell Carcinoma Using Combination of cDNA Subtraction and Microarray Analysis,” Oncogene 19(12):1519-28 (2000), incorporated herein by reference, used a combination of cDNA library subtraction and microarrays to identify seventeen genes preferentially over-expressed in lung squamous cell carcinoma, including four novel genes; the analysis demonstrated that microarrays can be used to identify tumor-specific genes useful for diagnosis and therapy.

[0726] For example, Whitney et al., “Analysis of Gene Expression in Multiple Sclerosis Lesions Using cDNA Microarrays,” Ann. Neurol. 46(3):425-8 (1999), incorporated herein by reference, used microarrays to monitor the expression pattern of over 5,000 genes and compare the gene expression profile of normal white matter to that found in acute lesions from the brain of a single patient with multiple sclerosis (MS); sixty-two differentially expressed genes were identified.

[0727] For example, Shelton et al., “Microarray Analysis of Replicative Senescence,” Curr. Biol. 9(17):939-45 (1999), incorporated herein by reference, used microarrays to study gene expression associated with cell aging, or senescence, an arrested state in which cells remain viable but stop replicating and display an altered pattern of gene and protein expression, in dermal fibroblasts, retinal pigment epithelial cells, and vascular endothelial cells. Comparison of early- and late-passage cells stimulated with serum showed specific deficits in the early and mid G1 response of senescent cells, demonstrating that microarrays can be used to identify genes involved in the cellular aging process.

[0728] For example, Voehringer et al., “Gene Microarray Identification of Redox and Mitochondrial Elements That Control Resistance or Sensitivity to Apoptosis,” Proc. Natl. Acad. Sci. USA 97(6):2680-5 (2000), incorporated herein by reference, used microarrays to study gene expression patterns in an apoptosis-sensitive and apoptosis-resistant murine B cell lymphoma model system before and after irradiation; the analysis demonstrated that microarrays can be used to explore a fundamental cell biological process, programmed cell death, that figures prominently in the ability of cancer cells to survive exposure to chemotherapeutic agents and tumor killing radiation.

[0729] For example, Heller et al., “Discovery and Analysis of Inflammatory Disease-related Genes Using cDNA Microarrays,” Proc. Natl. Acad. Sci. USA 94(6):2150-5 (1997), incorporated herein by reference, used cDNA microarrays to profile gene expression associated with rheumatoid arthritis and inflammatory bowel disease; the cytokine IL-3, the chemokine Gro alpha, and the metalloproteinase matrix metallo-elastase were implicated in both diseases, whereas tissue inhibitor of metalloproteinase 1, ferritin light chain, and manganese superoxide dismutase genes were identified as differentially expressed between the two diseases.

[0730] For example, Nuwaysir et al., “Microarrays and Toxicology: the Advent of Toxicogenomics,” Mol. Carcinog. 24(3):153-9 (1999), incorporated herein by reference, used cDNA microarrays to measure gene expression as a means to identify compounds potentially toxic to humans and the environment, and to determine their mechanism of action.

[0731] For example, Bartosiewicz et al., “Development of a Toxicological Gene Array and Quantitative Assessment of This Technology,” Arch. Biochem. Biophys. 376(1):66-73 (2000), incorporated herein by reference, used microarrays containing expressed sequence tags for xenobiotic metabolizing enzymes, proteins associated with glutathione regulation, DNA repair enzymes, heat shock proteins, and housekeeping genes to examine gene expression in mouse liver in response to administration of beta-naphthoflavone (beta-NF); the analysis demonstrated that microarrays can be used to observe the effects of toxic compounds on gene expression in organs, such as liver, responsible for their metabolism.

[0732] In such toxicologic screens, and analogously in microarray-based gene expression screens of pharmacologic drug candidates upon cells, each probe provides specific useful data. In particular, it should be appreciated that even those probes that show no change in expression are as informative as those that do change, serving, in essence, as negative controls.

[0733] For example, where gene expression analysis is used to assess toxicity of chemical agents on cells, the failure of the agent to change a gene's expression level is evidence that the drug likely does not affect the pathway of which the gene's expressed protein is a part. Analogously, where gene expression analysis is used to assess side effects of pharmacologic agents—whether in lead compound discovery or in subsequent screening of lead compound derivatives—the inability of the agent to alter a gene's expression level is evidence that the drug does not affect the pathway of which the gene's expressed protein is a part.

[0734] WO 99/58720, incorporated herein by reference in its entirety, provides methods for quantifying the relatedness of a first and second gene expression profile and for ordering the relatedness of a plurality of gene expression profiles. The methods so described permit useful information to be extracted from a greater percentage of the individual gene expression measurements from a microarray than methods previously used in the art. Furthermore, the function of the genes need not be known for the level of expression to provide useful information.

[0735] Other uses of microarrays are described in Gerhold et al., “DNA Chips: Promising Toys Have Become Powerful Tools,” Trends Biochem. Sci. 24(5):168-173 (1999) and Zweiger, “Knowledge Discovery in Gene-expression-microarray Data: Mining the Information Output of the Genome,” Trends Biotechnol. 17(11):429-436 (1999); Schena (ed.), DNA Microarrays: A Practical Approach (Practical Approach Series), Oxford University Press (1999) (ISBN: 0199637768); Nature Genet. 21(1) (suppl):1-60 (1999); Schena (ed.), Microarray Biochip: Tools and Technology, Eaton Publishing Company/BioTechniques Books Division (2000) (ISBN: 1881299376), the disclosures of each of which is incorporated herein by reference in its entirety.

[0736] The genome-derived single exon microarrays of the present invention have each of the above-described well-established utilities in gene expression analysis.

[0737] In addition, the genome-derived single exon microarrays of the present invention present substantial and useful advantages in the conduct of such analyses over the devices conventional in the art. Those advantages include each of the advantages over EST-based and in situ synthesized oligo-based microarrays that were discussed hereinabove with respect to confirmation of expression of predicted exons, which discussion is incorporated herein by reference in its entirety, including, inter alia: inclusion of novel probes; absence of the biases inherent in EST libraries, such as expression level bias, 3′ or 5′ end-bias, bias imposed by reverse transcription or by cloning limitations; the absence from the probes of homopolymeric stretches; the absence from the probes of prokaryotic or bacteriophage vector sequence; the absence from the probes of cloning artifacts; the ability to monitor the expression of individual exons; and the uniformity in size and in duplex melting temperature of the arrayed probes.

[0738] Gene expression analysis by microarray hybridization is, of course, principally a laboratory-based art. Devices and apparatus used principally in laboratories to facilitate laboratory research are well-established to possess specific, substantial, and credible utility. For example, U.S. Pat. No. 6,001,233 describes and claims a gel electrophoresis apparatus having a cam-activated clamp; for example, U.S. Pat. No. 6,051,831 describes and claims a high mass detector for use in time-of-flight mass spectrometers; for example, U.S. Pat. No. 5,824,269 describes and claims a flow cytometer—as is well known, few gel electrophoresis apparatuses, TOF-MS devices, or flow cytometers are sold for home use.

[0739] Indeed, and in particular, nucleic acid microarrays, as devices intended for laboratory use in measuring gene expression, are well-established to have specific, substantial and credible utility. Thus, the genome-derived single exon microarrays of the present invention have at least the specific, substantial and credible utilities of the microarrays claimed as devices and articles of manufacture in the following U.S. patents, the disclosures of each of which is incorporated herein by reference: U.S. Pat. Nos. 5,445,934 (“Array of oligonucleotides on a solid substrate”); No. 5,744,305 (“Arrays of materials attached to a substrate”); and No. 6,004,752 (“Solid support with attached molecules”)

[0740] The genome-derived single exon nucleic acid microarrays of the present invention have further utility as products of manufacture that are specifically useful in methods of doing business.

[0741] For example, a first such method comprises selling and/or licensing genome-derived single-exon microarrays to a customer desiring to measure gene expression, in consideration of fees paid by such customer.

[0742] Such methods can usefully be implemented on a computer. In such computerized embodiments, the method comprises: making available for computerized query a database having a record corresponding to each genome-derived single exon microarray available for sale and/or license; responding to a customer query of the database by returning to the customer at least one record, or an identifier of that record, that best meets the customer query criteria; and offering for sale or license to the querying customer the genome-derived single exon microarray identified in that at least one record.

[0743] This method can usefully be implemented by making the database resident on a server computer and available for query by a remotely located client, for example by query over the Internet, an intranet, LAN or WAN. The method can usefully include a later step of permitting the customer to place an order for the identified microarray. This later step can usefully employ the one-click method described and claimed in U.S. Pat. No. 5,960,411, incorporated herein by reference in its entirety.

[0744] The genome-derived single exon microarrays of the present invention, as final products of manufacture, also have utility in a second method of doing business, the method comprising designing and/or manufacturing a genome-derived single exon microarray, in consideration of fees paid by those desiring a custom nucleic acid microarray, that has genome-derived single exon probes sharing at least one common attribute.

[0745] Such method can usefully be implemented on a computer. In such computerized embodiments, the method comprises: receiving from a customer at least one criterion for common probe attribute, such as tissue of expression; using the at least one criterion to identify within a database having records corresponding to available genome-derived single exon probes those that meet the criterion; and then disposing such identified probes on a support substrate capable of functioning in microarray hybridization experiments.

[0746] One useful common probe attribute is expression in a given tissue or cell type. Each of Examples 5-14, infra, presents (in Tables 4-13, respectively) genome-derived single exon probes demonstrated to have significant expression in the identified tissue or cell type; the probes presented therein are thus specifically useful in such a method.

[0747] The genome-derived single exon microarrays of the present invention are further useful in a third method of doing business, wherein expression data obtained from use of the genome-derived single exon probes and genome-derived single exon microarrays of the present invention are made available by subscription to customers that desire such information, in consideration for fees.

[0748] This aspect of the invention can usefully be implemented on a computer. In such computerized embodiments, the method comprises: making available to a subscription client for computerized query a database having records containing expression data generated using genome-derived single exon probes disposed upon microarrays; and responding to a customer query of the database by returning to the customer at least one record, or an identifier of the at least one record, that best meets the customer query criteria. Each of examples 5-14 presents records from such a database, organized by tissue and/or cell type, and collectively containing expression data for 16,834 single exon probes having unique exons.

[0749] The response to the customer in this method can usefully return only the amount of information minimally required to permit the customer to decide whether to pay for further information from the identified record or records. The method can also usefully include a later step of permitting the customer to place an order for the identified microarray. This later step can usefully employ the one-click method described and claimed in U.S. Pat. No. 5,960,411, incorporated herein by reference in its entirety. The third method of doing business, in each of its embodiments, can usefully be performed by making the database resident on a server computer and available for query by a remotely located client, for example by query over the Internet, an intranet, a LAN or WAN.

[0750] Each single exon probe has specific utility in such a method, providing information not hitherto present therein. Furthermore, the specific utility is amplified for each successive addition, it being well-established in the database and network arts that each new record or node added to the database or network increases the value of all preceding records or nodes.

[0751] The genome-derived single exon nucleic acid probes and microarrays of the present invention have the further real world use in a fourth method of doing business, comprising attracting investment to a company that makes and sells the same. One of ordinary skill in the art would immediately appreciate from the fact that the market capitalization of Affymetrix, Inc. (Sunnyvale, Calif.) on May 14, 2001 was $1.692 billion, although earnings per share were $−1.05, and from the fact that the market capitalization of Incyte Genomics, Inc. (Palo Alto, Calif.) on May 14, 2001 was $1.182 billion, with an earnings/share of −$0.61, that nucleic acid microarrays attract investor dollars without expectation of their sale generating profits.

[0752] Thus, the genome-derived single exon nucleic acid microarrays of the present invention are further useful in a method of doing business, the method comprising: advertising the availability for distribution, sale, or license of genome-derived single exon probes, microarrays, and/or data therefrom; and then selling stock in the company.

[0753] This method can usefully be implemented on a computer, wherein the advertising is performed on an Internet web page, in an Internet chat room, and/or a Usenet newsgroup; and wherein the stock sale is consummated through an electronic brokerage.

[0754] The genome-derived single exon probes and microarrays of the present invention have the further credible, specific, and substantial real world utility of providing income to the drafter of the patent specification in which the probes and microarrays are specifically described and claimed. Specificity of this utility derives from the requirements of 35 U.S.C. § § 102(a), (b), (f) and (g); given the present structure of legal compensation in the United States, the income, and thus utility, is substantial; one or ordinary skill in the art would find the compensation not incredible.

[0755] The genome-derived single exon probes of the present invention have additional utilities.

[0756] For example, as mentioned above, the single exon probes are particularly useful for identifying and characterizing alternative splicing events, as further described in commonly owned and copending U.S. patent application Ser. No. 09/632,366, filed Aug. 3, 2000, the disclosure of which is incorporated herein by reference in its entirety.

[0757] As another example, the single exon probes of the present invention can be used as hybridization probes to detect, characterize, and quantify copy number of their included exon in samples of genomic nucleic acid.

[0758] Thus, the probes of the present invention can be used to detect and characterize gross alterations in the genomic locus that includes their exon, such as deletions, insertions, translocations, and duplications through fluorescence in situ hybridization (FISH) to chromosome spreads. See, e.g., Andreeff et al. (eds.), Introduction to Fluorescence In Situ Hybridization: Principles and Clinical Applications, John Wiley & Sons (1999) (ISBN: 0471013455), the disclosure of which is incorporated herein by reference in its entirety.

[0759] The probes of the present invention can be used to assess smaller genomic alterations using, e.g., Southern blot detection of restriction fragment length polymorphisms.

[0760] The probes can also be used to isolate nucleic acids that include their exon, both from transcript-derived nucleic acid samples, such as pools or libraries of cDNA, and from genomic DNA-derived nucleic acid samples.

[0761] The probes of the present invention can also be used to prime synthesis of nucleic acid, for purpose of either analysis or isolation, using mRNA, cDNA, or genomic DNA as template.

[0762] For use as primers, at least 17 contiguous nucleotides of the probe will typically be used. Often, at least 18, 19, or 20 contiguous nucleotides of the probe will be used, and on occasion at least 20, 22, 24, or 25 contiguous nucleotides of exon will be used, and even 30 nucleotides or more of the probe can be used to prime specific synthesis.

[0763] The nucleic acid primers of the present invention can be used, for example, to prime first strand cDNA synthesis on an mRNA template. In such case, the primer will typically be drawn from the exonic portion of the single exon probe.

[0764] Such primer extension can be done directly to analyze the message. Alternatively, synthesis on an mRNA template can be done to produce first strand cDNA. The first strand cDNA can thereafter be used, inter alia, directly as a single-stranded probe, as a template for sequencing—permitting identification of alterations, including deletions, insertions, and substitutions, both normal allelic variants and mutations associated with abnormal phenotypes- or as a template, either for second strand cDNA synthesis (e.g., as an antecedent to insertion into a cloning or expression vector), or for amplification.

[0765] The nucleic acid primers of the present invention can also be used, for example, to prime single base extension (SBE) for SNP detection (see, e.g., U.S. Pat. No. 6,004,744, the disclosure of which is incorporated herein by reference in its entirety).

[0766] The nucleic acid primers of the present invention can also be used to prime specific amplification of the probe, or portions thereof, using transcript-derived or genomic DNA as template.

[0767] Primer-directed amplification methods are now well-established in the art. Methods for performing the polymerase chain reaction (PCR) are compiled, inter alia, in McPherson, PCR (Basics: From Background to Bench), Springer Verlag (2000) (ISBN: 0387916008); Innis et al. (eds.), PCR Applications: Protocols for Functional Genomics, Academic Press (1999) (ISBN: 0123721857); Gelfand et al. (eds.), PCR Strategies, Academic Press (1998) (ISBN: 0123721822); Newton et al., PCR, Springer-Verlag New York (1997) (ISBN: 0387915060); Burke (ed.), PCR: Essential Techniques, John Wiley & Son Ltd (1996) (ISBN: 047195697X); White (ed.), PCR Cloning Protocols: From Molecular Cloning to Genetic Engineering, Vol. 67, Humana Press (1996) (ISBN: 0896033430); McPherson et al. (eds.), PCR 2: A Practical Approach, Oxford University Press, Inc. (1995) (ISBN: 0199634254), the disclosures of which are incorporated herein by reference in their entireties.

[0768] Methods for performing RT-PCR are collected, e.g., in Siebert et al. (eds.), Gene Cloning and Analysis by RT-PCR, Eaton Publishing Company/Bio Techniques Books Division, 1998 (ISBN: 1881299147); Siebert (ed.), PCR Technique:RT-PCR, Eaton Publishing Company/BioTechniques Books (1995) (ISBN:1881299139), the disclosure of which is incorporated herein by reference in its entirety.

[0769] Isothermal amplification approaches, such as rolling circle amplification, are also now well-described. See, e.g., Schweitzer et al., Curr. Opin. Biotechnol. 12(1):21-7 (2001); U.S. Pat. Nos. 5,854,033 and 5,714,320 and international patent publications WO 97/19193 and WO 00/15779, the disclosures of which are incorporated herein by reference in their entireties. Rolling circle amplification can be combined with other techniques to facilitate SNP detection. See, e.g., Lizardi et al., Nature Genet. 19(3):225-32 (1998).

[0770] Nucleic acids of the present invention, inserted into vectors that flank the nucleic acid insert with a phage promoter, such as T7, T3, or SP6 promoter, can be used to drive in vitro expression of RNA complementary to either strand of the nucleic acids of the present invention. The RNA can be used, inter alia, as a single-stranded probe, to effect subtraction, or for in vitro translation.

[0771] Additionally, the nucleic acids of the present invnetion can be used to express the ORF-encoded peptide, or fragments thereof, either alone, or as part of fusion proteins.

[0772] Protein expression can be effected in eukaryotic or in prokaryotic cells using vectors, host cells, and methods well known in the art.

[0773] Expressed in vitro, the ORF-encoded peptide or fusion thereof can thereafter be isolated, to be used, inter alia, as a standard in immunoassays specific for the ORF-encoded peptide; to be used as a therapeutic agent, e.g., to be administered as passive replacement therapy in individuals deficient in the protein of which the ORF-encoded peptide is an active moiety or to be administered as a vaccine; to be used for in vitro production of specific antibody, the antibody thereafter to be used, e.g., as an analytical reagent for detection and quantitation of proteins containing the ORF-encoded peptide or to be used as an immunotherapeutic agent.

[0774] The isolated nucleic acids of the present invention (genome-derived single exon probes) can also be used to drive in vivo expression of the ORF-encoded peptides of the present invention. In vivo expression can be driven from a vector—typically a viral vector, often a vector based upon a replication incompetent retrovirus, an adenovirus, or an adeno-associated virus (AAV)—for purpose of gene therapy. In vivo expression can also be driven from plasmid vectors, including for purpose of “naked” nucleic acid vaccination, as further described in U.S. Pat. Nos. 5,589,466; 5,679,647; 5,804,566; 5,830,877; 5,843,913; 5,880,104; 5,958,891; 5,985,847; 6,017,897; 6,110,898; 6,204,250, the disclosures of which are incorporated herein by reference in their entireties.

[0775] The nucleic acids of the present invention can also be used for antisense inhibition of translation. See Phillips (ed.), Antisense Technology, Part B, Methods in Enzymology Vol. 314, Academic Press, Inc. (1999) (ISBN: 012182215X); Phillips (ed.), Antisense Technology, Part A, Methods in Enzymology Vol. 313, Academic Press, Inc. (1999) (ISBN: 0121822141); Hartmann et al. (eds.), Manual of Antisense Methodology (Perspectives in Antisense Science), Kluwer Law International (1999) (ISBN:079238539X); Stein et al. (eds.), Applied Antisense Oligonucleotide Technology, Wiley-Liss (cover (1998) (ISBN: 0471172790); Agrawal et al. (eds.), Antisense Research and Application, Springer-Verlag New York, Inc. (1998) (ISBN: 3540638334); Lichtenstein et al. (eds.), Antisense Technology: A Practical Approach, Vol. 185, Oxford University Press, INC. (1998) (ISBN: 0199635838); Gibson (ed.), Antisense and Ribozyme Methodology: Laboratory Companion, Chapman & Hall (1997) (ISBN: 3826100794); Chadwick et al. (eds.), Oligonucleotides as Therapeutic Agents—Symposium No. 209, John Wiley & Son Ltd (1997) (ISBN: 0471972797), the disclosures of which are incorporated herein by reference in their entireties.

[0776] The single exon probes of the present invention, and fragments thereof, can be integrated non-homologously into the genome of somatic cells, e.g. CHO cells, COS cells, or 293 cells, with or without amplification of the insertional locus, in order, e.g., to create stable cell lines capable of producing the ORF-encoded peptides of the present invention.

[0777] The single exon probes of the present invention, and fragments thereof, can also be used for targeted gene correction or alteration, possibly by cellular mechanisms different from those engaged during homologous recombination.

[0778] For example, partially duplexed RNA/DNA chimeras have been shown to have utility in targeted gene correction, U.S. Pat. Nos. 5,945,339, 5,888,983, 5,871,984, 5,795,972, 5,780,296, 5,760,012, 5,756,325, 5,731,181, the disclosures of which are incorporated herein by reference in their entireties. So too have small oligonucleotides fused to triplexing domains have been shown to have utility in targeted gene correction, Culver et al., “Correction of chromosomal point mutations in human cells with bifunctional oligonucleotides,” Nature Biotechnol. 17(10):989-93 (1999), as have oligonucleotides having modified terminal bases or modified terminal internucleoside bonds, Gamper et al., Nucl. Acids Res. 28(21):4332-9 (2000), the disclosures of which are incorporated herein by reference.

[0779] Genome-Derived Single Exon Probes

[0780] In light of the above-described credible, specific, and substantial utilities, it is an aspect of the present invention to provide genome-derived single exon nucleic acid probes. The invention particularly provides genome-derived single-exon probes known to be expressed in one or more tissues. In particular embodiments, the present invention provides human single-exon probes that include specifically-hybridizable fragments of the exons presented in SEQ ID NOs: 16,835-33,299, wherein the fragment hybridizes at high stringency (under high stringency conditions) to an expressed human gene. In particular embodiments, the invention provides single exon probes having SEQ ID NOs: 1-16,834.

[0781] It will be appreciated that the Sequence Listing appended hereto and incorporated herein by reference presents, by convention, only that strand of the probe and exon sequences that can be directly translated, reading from 5′ to 3′ end. As would be well understood by one of skill in the art, single stranded probes must be complementary in sequence to the target; it is well within the skill in the art to determine such complementary sequence. It will further be understood that double stranded probes can be used in both solution-phase hybridization and microarray-based hybridization if suitably denatured.

[0782] Thus, it is an aspect of the present invention to provide single-stranded nucleic acid probes that have sequence complementary to those described herein above and below, and double-stranded probes one strand of which has sequence complementary to the probes described herein.

[0783] Unless otherwise indicated, each nucleotide sequence is set forth herein as a sequence of deoxyribonucleotides. It is intended, however, that the given sequence be interpreted as would be appropriate to the polynucleotide composition: for example, if the isolated nucleic acid is composed of RNA, the given sequence intends ribonucleotides, with uridine substituted for thymidine.

[0784] Unless otherwise indicated, nucleotide sequences of the isolated nucleic acids of the present invention were determined by sequencing a DNA molecule that had resulted, directly or indirectly, from at least one enzymatic polymerization reaction (e.g., reverse transcription and/or polymerase chain reaction) using an automated sequencer (such as the MegaBACE™ 1000, Molecular Dynamics, Sunnyvale, Calif., USA), or by reliance upon such sequence or upon genomic sequence prior-accessioned into a public database. Unless otherwise indicated, all amino acid sequences of the polypeptides of the present invention were predicted by translation from the nucleic acid sequences so determined.

[0785] As a consequence, any nucleic acid sequence presented herein may contain errors introduced by erroneous incorporation of nucleotides during polymerization, by erroneous base calling by the automated sequencer (although such sequencing errors have been minimized for the nucleic acids directly determined herein, unless otherwise indicated, by the sequencing of each of the complementary strands of a duplex DNA), or by similar errors accessioned into the public database.

[0786] Furthermore, single nucleotide polymorphisms (SNPs) occur frequently in eukaryotic genomes—more than 1.4 million SNPs have already identified in the human genome, International Human Genome Sequencing Consortium, Nature 409:860-921 (2001)—and the sequence determined from one individual of a species may differ from other allelic forms present within the population. Additionally, small deletions and insertions, rather than single nucleotide polymorphisms, are not uncommon in the general population, and often do not alter the function of the protein.

[0787] Accordingly, it is an aspect of the present invention to provide nucleic acids not only identical in sequence to those described with particularity herein, but also to provide isolated nucleic acids at least about 90% identical in sequence to those described with particularity herein, typically at least about 91%, 92%, 93%, 94%, or 95% identical in sequence to those decribed with particularity herein, usefully at least about 96%, 97%, 98%, or 99% identical in sequence to those described with particularity herein, and, most conservatively, at least about 99.5%, 99.6%, 99.7%, 99.8% and 99.9% identical in sequence to those described with particularity herein. These sequence variants can be naturally occurring or can result from human intervention, as by random or directed mutagenesis.

[0788] For purposes herein, percent identity of two nucleic acid sequences is determined using the procedure of Tatiana et al., “Blast 2 sequences—a new tool for comparing protein and nucleotide sequences”, FEMS Microbiol Lett. 174:247-250 (1999), which procedure is effectuated by the computer program BLAST 2 SEQUENCES, available online at

[0789] http://www.ncbi.nlm.nih.gov/blast/bl2seq/bl2.html.

[0790] To assess percent identity of nucleic acids, the BLASTN module of BLAST 2 SEQUENCES is used with default values of (i) reward for a match: 1; (ii) penalty for a mismatch: −2; (iii) open gap 5 and extension gap 2 penalties; (iv) gap X_dropoff 50 expect 10 word size 11 filter, and both sequences are entered in their entireties.

[0791] As is well known, the genetic code is degenerate, with each amino acid except methionine translated from a plurality of codons, thus permitting a plurality of nucleic acids of disparate sequence to encode the identical protein. As is also well known, codon choice for optimal expression varies from species to species. The isolated nucleic acids of the present invention being useful for expression of ORFs encoded by the exons present within the probes (ORF-encoded peptides), it is, therefore, another aspect of the present invention to provide isolated isolated nucleic acids that encode the ORF-encoded peptides, and portions thereof, not only identical in sequence to those described with particularity herein, but degenerate variants thereof as well.

[0792] As is also well known, amino acid substitutions occur frequently among natural allelic variants, with conservative substitutions often occasioning only de minimis change in protein function.

[0793] Accordingly, it is an aspect of the present invention to provide nucleic acids not only identical in sequence to those described with particularity herein, but also to provide isolated nucleic acids that encode the ORF-encoded peptides, and fragments thereof, having conservative amino acid substitutions. It is a further aspect to provide nucleic acids that encode the ORF-encoded peptides having moderately conservative amino acid substitutions.

[0794] Although there are a variety of metrics for calling conservative amino acid substitutions, based primarily on either observed changes among evolutionarily related proteins or on predicted chemical similarity, for purposes herein a conservative replacement is any change having a positive value in the PAM250 log-likelihood matrix reproduced herein below (see Gonnet et al., Science 256(5062):1443-5 (1992)):

| | A | R | N | D | C | Q | E | G | H | I | L | K | M | F | P | S | T | W | Y | V |
|---|---|---|---|---|---|---|---|---|---|---|---|---|---|---|---|---|---|---|---|---|
| A | 2 | −1 | 0 | 0 | 0 | 0 | 0 | 0 | −1 | −1 | −1 | 0 | −1 | −2 | 0 | 1 | 1 | −4 | −2 | 0 |
| R | −1 | 5 | 0 | 0 | −2 | 2 | 0 | −1 | 1 | −2 | −2 | 3 | −2 | −3 | −1 | 0 | 0 | −2 | −2 | −2 |
| N | 0 | 0 | 4 | 2 | −2 | 1 | 1 | 0 | 1 | −3 | −3 | 1 | −2 | −3 | −1 | 1 | 0 | −4 | −1 | −2 |
| D | 0 | 0 | 2 | 5 | −3 | 1 | 3 | 9 | 9 | −4 | −4 | 0 | −3 | −4 | −1 | 0 | 0 | −5 | −3 | −3 |
| C | 0 | −2 | −2 | −3 | 12 | −2 | −3 | −2 | −1 | −1 | −2 | −3 | −1 | −1 | −3 | 0 | 0 | −1 | 0 | 0 |
| Q | 0 | 2 | 1 | 1 | −2 | 3 | 2 | −1 | 1 | −2 | −2 | 2 | −1 | −3 | 0 | 0 | 0 | −3 | −2 | −2 |
| E | 0 | 0 | 1 | 3 | 2 | 4 | −1 | 0 | −3 | −3 | 1 | −2 | −4 | 0 | 0 | 0 | −4 | −3 | −2 | |
| G | 0 | −1 | 0 | 0 | −2 | −1 | −1 | 7 | −1 | −4 | −4 | −1 | −4 | −5 | −2 | 0 | −1 | −4 | −4 | −3 |
| H | −1 | 1 | 1 | 0 | −1 | 1 | 0 | −1 | 6 | −2 | −2 | 1 | −1 | 0 | −1 | 0 | 0 | −1 | 2 | −2 |
| I | −1 | −2 | −3 | −4 | −1 | −2 | −3 | −4 | −2 | 4 | 3 | −2 | 2 | 1 | −3 | −2 | −1 | −2 | −1 | 3 |
| L | −1 | −2 | −3 | −4 | −2 | −2 | −3 | −4 | −2 | 3 | 4 | −2 | 3 | 2 | −2 | −2 | −1 | −1 | 0 | 2 |
| K | 0 | 3 | 1 | 0 | −3 | 2 | 1 | −1 | 1 | −2 | −2 | 3 | −1 | −3 | −1 | 0 | 0 | −4 | −2 | −2 |
| M | −1 | −2 | −2 | −3 | −1 | −1 | −2 | −4 | −1 | 2 | 3 | −1 | 4 | 2 | −2 | −1 | −1 | −1 | 0 | 2 |
| F | −2 | −3 | −3 | −4 | −1 | −3 | −4 | −5 | 0 | 1 | 2 | −3 | 2 | 7 | −4 | −3 | −2 | 4 | 5 | 0 |
| P | 0 | −1 | −1 | −1 | −3 | 0 | 0 | −2 | −1 | −3 | −2 | −1 | −2 | −4 | 8 | 0 | 0 | −5 | −3 | −2 |
| S | 1 | 0 | 1 | 0 | 0 | 0 | 0 | 0 | 0 | −2 | −2 | 0 | −1 | −3 | 0 | 2 | 2 | −3 | −2 | −1 |
| T | 1 | 0 | 0 | 0 | 0 | 0 | 0 | −1 | 0 | −1 | −1 | 0 | −1 | −2 | 0 | 2 | 2 | −4 | −2 | 0 |
| W | −4 | −2 | −4 | −5 | −1 | −3 | −4 | −4 | −1 | −2 | −1 | −4 | −1 | 4 | −5 | −3 | −4 | 14 | 4 | −3 |
| Y | −2 | −2 | −1 | −3 | 0 | −2 | −3 | −4 | 2 | −1 | 0 | −2 | 0 | 5 | −3 | −2 | −2 | 4 | 8 | −1 |
| V | 0 | −2 | −2 | −3 | 0 | −2 | −2 | −3 | −2 | 3 | 2 | −2 | 2 | 0 | −2 | −1 | 0 | −3 | −1 | 3 |

[0795] For purposes herein, a “moderately conservative” replacement is any change having a nonnegative value in the PAM250 log-likelihood matrix reproduced herein above.

[0796] As is also well known in the art, relatedness of nucleic acids can also be characterized using a functional test, the ability of the two nucleic acids to base-pair to one another at defined hybridization stringencies.

[0797] It is, therefore, another aspect of the invention to provide isolated nucleic acids not only identical in sequence to those described with particularity herein, but also to provide isolated nucleic acids (“cross-hybridizing nucleic acids”) that hybridize under high stringency conditions (as defined herein) to all or to a portion of the nucleic acids of the present invention, as set forth in the appended Sequence Listing (“reference nucleic acids”). It is a further aspect of the invention to provide isolated nucleic acids that hybridize under moderate stringency conditions to all or to a protion of the nucleic acids of the present invention, as set forth in the appended Sequence Listing (“reference nucleic acids”).

[0798] Such cross-hybridizing nucleic acids are useful, inter alia, as probes for, and to drive expression of, proteins related to the ORF-encoded peptides of the present invention as alternative isoforms, homologues, paralogues, and orthologues. Particularly preferred orthologues are those from other primate species, such as chimpanzee, rhesus macaque, baboon, and gorilla, from rodents, such as rats, mice, guinea pigs, and from livestock, such as cow, pig, sheep, horse, goat.

[0799] The hybridizing portion of the reference nucleic acid is typically at least 15 nucleotides in length, often at least 17 nucleotides in length. Often, however, the hybridizing portion of the reference nucleic acid is at least 20 nucleotides in length, 25 nucleotides in length, and even 30 nucleotides, 35 nucleotides, 40 nucleotides, and 50 nucleotides in length. Of course, cross-hybridizing nucleic acids that hybridize to a larger portion of the reference nucleic acid—for example, to a portion of at least 50 nt, at least 100 nt, at least 150 nt, 200 nt, 250 nt, 300 nt, 350 nt, 400 nt, 450 nt, or 500 nt or more—or even to the entire length of the reference nucleic acid, are also useful.

[0800] The hybridizing portion of the cross-hybridizing nucleic acid is at least 75% identical in sequence to at least a portion of the reference nucleic acid. Typically, the hybridizing portion of the cross-hybridizing nucleic acid is at least 80%, often at least 85%, 86%, 87%, 88%, 89% or even at least 90% identical in sequence to at least a portion of the reference nucleic acid. Often, the hybridizing portion of the cross-hybridizing nucleic acid will be at least 91%, 92%, 93%, 94%, 95%, 96%, 97%, 98%, or 99% identical in sequence to at least a portion of the reference nucleic acid sequence. At times, the hybridizing portion of the cross-hybridizing nucleic acid will be at least 99.5% identical in sequence to at least a portion of the reference nucleic acid.

[0801] The invention also provides fragments of various of the nucleic acids set forth in the appended Sequence Listing (“reference nucleic acids”).

[0802] By “fragments” of a reference nucleic acid is here intended isolated nucleic acids, however obtained, that have a nucleotide sequence identical to a portion of the reference nucleic acid sequence, which portion is at least 17 nucleotides and less than the entirety of the reference nucleic acid. As so defined, “fragments” need not be obtained by physical fragmentation of the reference nucleic acid, although such provenance is not thereby precluded.

[0803] In theory, an oligonucleotide of 17 nucleotides is of sufficient length as to occur at random less frequently than once in the three gigabase human genome, and thus to provide a nucleic acid probe that can uniquely identify the reference sequence in a nucleic acid mixture of genomic complexity. As is well known, further specificity can be obtained by probing nucleic acid samples of subgenomic complexity, and/or by using plural fragments as short as 17 nucleotides in length collectively to prime amplification of nucleic acids, as, e.g., by polymerase chain reaction (PCR).

[0804] As is well known in the art, nucleic acid fragments that encode at least 6 contiguous amino acids (i.e., fragments of 18 nucleotides or more) are useful in directing the expression or the synthesis of peptides that have utility in mapping the epitopes of the protein encoded by the reference nucleic acid. See, e.g., Geysen et al., “Use of peptide synthesis to probe viral antigens for epitopes to a resolution of a single amino acid,” Proc. Natl. Acad. Sci. USA 81:3998-4002 (1984); and U.S. Pat. Nos. 4,708,871 and 5,595,915, the disclosures of which are incorporated herein by reference in their entireties.

[0805] As is also well known, fragments that encode at least 8 contiguous amino acids (i.e., fragments of 24 nucleotides or more) are useful in directing the expression or the synthesis of peptides that have utility as immunogens. See, e.g., Lerner, “Tapping the immunological repertoire to produce antibodies of predetermined specificity,” Nature 299:592-596 (1982); Shinnick et al., “Synthetic peptide immunogens as vaccines,” Annu. Rev. Microbiol. 37:425-46 (1983); Sutcliffe et al., “Antibodies that react with predetermined sites on proteins,” Science 219:660-6 (1983), the disclosures of which are incorporated herein by reference in their entireties.

[0806] The nucleic acid fragment of the present invention is thus at least 17 nucleotides in length, typically at least 18 nucleotides in length, and often at least 24 nucleotides in length. Often, the nucleic acid of the present invention is at least 25 nucleotides in length, and even 30 nucleotides, 35 nucleotides, 40 nucleotides, or 45 nucleotides in length. Of course, larger fragments having at least 50 nt, at least 100 nt, at least 150 nt, 200 nt, 250 nt, 300 nt, 350 nt, 400 nt, 450 nt, or 500 nt or more are also useful, and at times preferred.

[0807] The isolated nucleic acids of the present invention—including single exon probes and fragments thereof—can be composed of natural nucleotides in native 5′-3′ phosphodiester internucleoside linkage—e.g., DNA or RNA—or can contain any or all of nonnatural nucleotide analogues, nonnative internucleoside bonds, or post-synthesis modifications, either throughout the length of the nucleic acid or localized to one or more portions thereof. As is well known in the art, when the isolated nucleic acid is used as a hybridization probe, the range of such nonnatural analogues, nonnative internucleoside bonds, or post-synthesis modifications will be limited to those that permit sequence-discriminating basepairing of the resulting nucleic acid. When used to direct expression or RNA or protein in vitro or in vivo, the range of such nonnatural analogues, nonnative internucleoside bonds, or post-synthesis modifications will be limited to those that permit the nucleic acid to function properly as a polymerization substrate. When the isolated nucleic acid is used as a therapeutic agent, the range of such changes will be limited to those that do not confer toxicity upon the isolated nucleic acid.

[0808] For example, when desired to be used as probes, the isolated nucleic acids of the present invention can usefully include nucleotide analogues that incorporate labels that are directly detectable, such as radiolabels or fluorophores, or nucleotide analogues that incorporate labels that can be visualized in a subsequent reaction, such as biotin or various haptens.

[0809] Common radiolabeled analogues include those labeled with ³³P, ³²P, and ³⁵S, such as α-³²P-dATP, α-₃₂P-dCTP, α-³²P-dGTP, α-³²P-dTTP, α-³²P-3′dATP, α-³²P-ATP, α-³²P-CTP, α-³²P-GTP, α-³²P-UTP, α-³⁵S-DATP, γ-³⁵S-GTP, γ-33P-dATP, and the like.

[0810] Commercially available fluorescent nucleotide analogues readily incorporated into the nucleic acids of the present invention include Cy3-dCTP, Cy3-dUTP, Cy5-dCTP, Cy3-dUTP (Amersham Pharmacia Biotech, Piscataway, N.J., USA), fluorescein-12-dUTP, tetramethylrhodamine-6-dUTP, Texas Red®-5-dUTP, Cascade Blue®-7-dUTP, BODIPY® FL-14-dUTP, BODIPY® TMR-14-dUTP, BODIPY® TR-14-dUTP, Rhodamine Green™-5-dUTP, Oregon Green® 488-5-dUTP, Texas Red®-12-dUTP, BODIPY® 630/650-14-dUTP, BODIPY® 650/665-14-dUTP, Alexa Fluor® 488-5-dUTP, Alexa Fluor® 532-5-dUTP, Alexa Fluor® 568-5-dUTP, Alexa Fluor® 594-5-dUTP, Alexa Fluor® 546-14-dUTP, fluorescein-12-UTP, tetramethylrhodamine-6-UTP, Texas Red®-5-UTP, Cascade Blue®-7-UTP, BODIPY® FL-14-UTP, BODIPY® TMR-14-UTP, BODIPY® TR-14-UTP, Rhodamine Green™-5-UTP, Alexa Fluor® 488-5-UTP, Alexa Fluor® 546-14-UTP (Molecular Probes, Inc. Eugene, Oreg., USA).

[0811] Protocols are available for custom synthesis of nucleotides having other fluorophores. Henegariu et al., “Custom Fluorecent-Nucleotide Synthesis as an Alternative Method for Nucleic Acid Labeling,” Nature Biotechnol. 18:345-348 (2000), the disclosure of which is incorporated herein by reference in its entirety.

[0812] Haptens that are commonly conjugated to nucleotides for subsequent labeling include biotin (biotin-11-dUTP, Molecular Probes, Inc., Eugene, Oreg., USA; biotin-21-UTP, biotin-21-dUTP, Clontech Laboratories, Inc., Palo Alto, Calif., USA), digoxigenin (DIG-11-dUTP, alkali labile, DIG-11-UTP, Roche Diagnostics Corp., Indianapolis, Ind., USA), and dinitrophenyl (dinitrophenyl-11-dUTP, Molecular Probes, Inc., Eugene, Oreg., USA).

[0813] As another example, when desired to be used for antisense inhibition of translation, the isolated nucleic acids of the present invention can usefully include altered, often nuclease-resistant, internucleoside bonds. See Hartmann et al. (eds.), Manual of Antisense Methodology (Perspectives in Antisense Science), Kluwer Law International (1999) (ISBN:079238539X); Stein et al. (eds.), Applied Antisense Oligonucleotide Technology, Wiley-Liss (cover (1998) (ISBN: 0471172790); Chadwick et al. (eds.), Oligonucleotides as Therapeutic Agents—Symposium No. 209, John Wiley & Son Ltd (1997) (ISBN: 0471972797), or for targeted gene correction, Gamper et al., Nucl. Acids Res. 28(21):4332-9 (2000), the disclosures of which are incorporated herein by reference in their entireties.

[0814] Modified oligonucleotide backbones often preferred when the nucleic acid is to be used for antisense purposes are, for example, phosphorothioates, chiral phosphorothioates, phosphorodithioates, phosphotriesters, aminoalkylphosphotriesters, methyl and other alkyl phosphonates including 3′-alkylene phosphonates and chiral phosphonates, phosphinates, phosphoramidates including 3′-amino phosphoramidate and aminoalkylphosphoramidates, thionophosphoramidates, thionoalkylphosphonates, thionoalkylphosphotriesters, and boranophosphates having normal 3′-5′ linkages, 2′-5′ linked analogs of these, and those having inverted polarity wherein the adjacent pairs of nucleoside units are linked 3′-5′ to 5′-3′ or 2′-5′ to 5′-2′. Representative U.S. patents that teach the preparation of the above phosphorus-containing linkages include, but are not limited to, U.S. Pat. Nos. 3,687,808; 4,469,863; 4,476,301; 5,023,243; 5,177,196; 5,188,897; 5,264,423; 5,276,019; 5,278,302; 5,286,717; 5,321,131; 5,399,676; 5,405,939; 5,453,496; 5,455,233; 5,466,677; 5,476,925; 5,519,126; 5,536,821; 5,541,306; 5,550,111; 5,563,253; 5,571,799; 5,587,361; and 5,625,050, the disclosures of which are incorporated herein by reference in their entireties.

[0815] Preferred modified oligonucleotide backbones for antisense use that do not include a phosphorus atom have backbones that are formed by short chain alkyl or cycloalkyl internucleoside linkages, mixed heteroatom and alkyl or cycloalkyl internucleoside linkages, or one or more short chain heteroatomic or heterocyclic internucleoside linkages. These include those having morpholino linkages (formed in part from the sugar portion of a nucleoside); siloxane backbones; sulfide, sulfoxide and sulfone backbones; formacetyl and thioformacetyl backbones; methylene formacetyl and thioformacetyl backbones; alkene containing backbones; sulfamate backbones; methyleneimino and methylenehydrazino backbones; sulfonate and sulfonamide backbones; amide backbones; and others having mixed N, O, S and CH₂ component parts. Representative U.S. patents that teach the preparation of the above backbones include, but are not limited to, U.S. Pat. Nos. 5,034,506; 5,166,315; 5,185,444; 5,214,134; 5,216,141; 5,235,033; 5,264,562; 5,264,564; 5,405,938; 5,434,257; 5,466,677; 5,470,967; 5,489,677; 5,541,307; 5,561,225; 5,596,086; 5,602,240; 5,610,289; 5,602,240; 5,608,046; 5,610,289; 5,618,704; 5,623,070; 5,663,312; 5,633,360; 5,677,437; and 5,677,439, the disclosures of which are incorporated herein by reference in their entireties.

[0816] In other preferred oligonucleotide mimetics, both the sugar and the internucleoside linkage are replaced with novel groups, such as peptide nucleic acids (PNA).

[0817] In PNA compounds, the phosphodiester backbone of the nucleic acid is replaced with an amide-containing backbone, in particular by repeating N-(2-aminoethyl) glycine units linked by amide bonds. Nucleobases are bound directly or indirectly to aza nitrogen atoms of the amide portion of the backbone, typically by methylene carbonyl linkages.

[0818] The uncharged nature of the PNA backbone provides PNA/DNA and PNA/RNA duplexes with a higher thermal stability than is found in DNA/DNA and DNA/RNA duplexes, resulting from the lack of charge repulsion between the PNA and DNA or RNA strand. In general, the Tm of a PNA/DNA or PNA/RNA duplex is 1° C. higher per base pair than the Tm of the corresponding DNA/DNA or DNA/RNA duplex (in 100 mM NaCl).

[0819] The neutral backbone also allows PNA to form stable DNA duplexes largely independent of salt concentration. At low ionic strength, PNA can be hybridized to a target sequence at temperatures that make DNA hybridization problematic or impossible. And unlike DNA/DNA duplex formation, PNA hybridization is possible in the absence of magnesium. Adjusting the ionic strength, therefore, is useful if competing DNA or RNA is present in the sample, or if the nucleic acid being probed contains a high level of secondary structure.

[0820] PNA also demonstrates greater specificity in binding to complementary DNA. A PNA/DNA mismatch is more destabilizing than DNA/DNA mismatch. A single mismatch in mixed a PNA/DNA 15-mer lowers the Tm by 8-20° C. (15° C. on average). In the corresponding DNA/DNA duplexes, a single mismatch lowers the Tm by 4-16° C. (11° C. on average). Because PNA probes can be significantly shorter than DNA probes, their specificity is greater.

[0821] Additionally, nucleases and proteases do not recognize the PNA polyamide backbone with nucleobase sidechains. As a result, PNA oligomers are resistant to degradation by enzymes, and the lifetime of these compounds is extended both in vivo and in vitro. In addition, PNA is stable over a wide pH range.

[0822] Because its backbone is formed from amide bonds, PNA can be synthesized using a modified peptide synthesis protocol. FNA oligomers can be synthesized by both Fmoc and tBoc methods. Representative U.S. patents that teach the preparation of PNA compounds include, but are not limited to, U.S. Pat. Nos. 5,539,082; 5,714,331; and 5,719,262, each of which is herein incorporated by reference; automated PNA synthesis is readily achievable on commercial synthesizers (see, e.g., “PNA User's Guide,” Rev. 2, February 1998, Perseptive Biosystems Part No. 60138, Applied Biosystems, Inc., Foster City, Calif.).

[0823] PNA chemistry and applications are reviewed, inter alia, in Ray et al., FASEB J. 14(9):1041-60 (2000); Nielsen et al., Pharmacol Toxicol. 86(1):3-7 (2000); Larsen et al., Biochim Biophys Acta. 1489(1):159-66 (1999); Nielsen, Curr. Opin. Struct. Biol. 9(3):353-7 (1999), and Nielsen, Curr. Opin. Biotechnol. 10(l):71-5 (1999), the disclosures of which are incorporated herein by reference in their entireties.

[0824] Differences from nucleic acid compositions found in nature—e.g., nonnative bases, altered internucleoside linkages, post-synthesis modification—can be present throughout the length of the nucleic acid or can, instead, usefully be localized to discrete portions thereof. As an example of the latter, chimeric nucleic acids can be synthesized that have discrete DNA and RNA domains and demonstrated utility for targeted gene repair, as further described in U.S. Pat. Nos. 5,760,012 and 5,731,181, the disclosures of which are incorporated herein by reference in their entireties. As another example, chimeric nucleic acids comprising both DNA and PNA have been demonstrated to have utility in modified PCR reactions. See Misra et al., Biochem. 37: 1917-1925 (1998); see also Finn et al., Nucl. Acids Res. 24: 3357-3363 (1996), incorporated herein by reference.

[0825] Unless otherwise specified, nucleic acids of the present invention can include any topological conformation appropriate to the desired use; the term thus explicitly comprehends, among others, single-stranded, double-stranded, triplexed, quadruplexed, partially double-stranded, partially-triplexed, partially-quadruplexed, branched, hairpinned, circular, and padlocked conformations. Padlock conformations and their utility are further described in Baner et al., Curr. Opin. Biotechnol. 12:11-15 (2001); Escude et al., Proc. Natl. Acad. Sci. USA 14;96(19):10603-7 (1999); Nilsson et al., Science 265(5181):2085-8 (1994), the disclosures of which are incorporated herein by reference in their entireties. Triplex and quadruplex conformations, and their utility, are reviewed in Praseuth et al., Biochim. Biophys. Acta. 1489(1):181-206 (1999); Fox, Curr. Med. Chem. 7(1):17-37 (2000); Kochetkova et al., Methods Mol. Biol. 130:189-201 (2000); Chan et al., J. Mol. Med. 75(4):267-82 (1997), the disclosures of which are incorporated herein by reference in their entireties.

[0826] The nucleic acids of the present invention can be detectably labeled. Commonly-used labels include radionuclides, such as ³²P, 33P, ³⁵S, ³H (and for nmr detection, ¹³C and ¹⁵N), haptens that can be detected by specific antibody or high affinity binding partner (such as avidin), and fluorophores.

[0827] As noted above, detectable labels can be incorporated by inclusion of labeled nucleotide analogues in the nucleic acid. Such analogues can be incorporated by enzymatic polymerization, such as by nick translation, random priming, polymerase chain reaction (PCR), terminal transferase tailing, and end-filling of overhangs, for DNA molecules, and in vitro transcription driven, e.g., from phage promoters, such as T7, T3, and SP6, for RNA molecules. Commercial kits are readily available for each such labeling approach.

[0828] Analogues can also be incorporated during automated solid phase chemical synthesis.

[0829] As is well known, labels can also be incorporated after nucleic acid synthesis, with the 5′ phosphate and 3′ hydroxyl providing convenient sites for post-synthetic covalent attachment of detectable labels.

[0830] Various other post-synthetic approaches permit internal labeling of nucleic acids.

[0831] For example, fluorophores can be attached using a cisplatin reagent that reacts with the N7 of guanine residues (and, to a lesser extent, adenine bases) in DNA, RNA, and PNA to provide a stable coordination complex between the nucleic acid and fluorophore label (Universal Linkage System) (available from Molecular Probes, Inc., Eugene, Oreg., USA and Amersham Pharmacia Biotech, Piscataway, N.J., USA); see Alers et al., Genes, Chromosomes & Cancer, Vol. 25, pp. 301-305 (1999); Jelsma et al., J. NIH Res. 5:82 (1994); Van Belkum et al., BioTechniques 16:148-153 (1994), incorporated herein by reference. As another example, nucleic acids can be labeled using a disulfide-containing linker (FastTag™ Reagent, Vector Laboratories, Inc., Burlingame, Calif., USA) that is photo- or thermally coupled to the target nucleic acid using aryl azide chemistry; after reduction, a free thiol is available for coupling to a hapten, fluorophore, sugar, affinity ligand, or other marker.

[0832] Multiple independent or interacting labels can be incorporated into the nucleic acids of the present invention. For example, both a fluorophore and a moiety that in proximity thereto acts to quench fluorescence can be included to report specific hybridization through release of fluorescence quenching, Tyagi et al., Nature Biotechnol. 14: 303-308 (1996); Tyagi et al., Nature Biotechnol. 16, 49-53 (1998); Sokol et al., Proc. Natl. Acad. Sci. USA 95: 11538-11543 (1998); Kostrikis et al., Science 279:1228-1229 (1998); Marras et al., Genet. Anal. 14: 151-156 (1999); U.S. Pat. Nos. 5,846,726, 5,925,517, 5925517, or to report exonucleotidic excision, U.S. Pat. No. 5,538,848; Holland et al., Proc. Natl. Acad. Sci. USA 88:7276-7280 (1991); Heid et al., Genome Res. 6(10):986-94 (1996); Kuimelis et al., Nucleic Acids Symp Ser. (37):255-6 (1997); U.S. Pat. No. 5,723,591, the disclosures of which are incorporated herein by reference in their entireties.

[0833] In one aspect, the invention provides the individual single exon probes of the present invention as isolated nucleic acids.

[0834] In one series of embodiments of this aspect of the invention, the probe is provided in quantity sufficient to perform a hybridization reaction.

[0835] When provided in quantity sufficient to perform a hybridization reaction, the probe can be in any form directly hybridizable to the target that contains the probe's exon or ORF (or their complement), such as double stranded DNA, single-stranded DNA complementary to the target, single-stranded RNA complementary to the target, or chimeric DNA/RNA molecules so hybridizable.

[0836] Usefully, however, such probes are instead provided in a form and quantity suitable for amplification. Typically, such probes are provided in a form and quantity suitable for amplification by PCR or by other well known amplification technique. One such technique additional to PCR is rolling circle amplification, as is described, inter alia, in U.S. Pat. Nos. 5,854,033 and 5,714,320 and international patent publications WO 97/19193 and WO 00/15779, the disclosures of which are incorporated herein by reference in their entireties. As is well understood, where the probes are to be provided in a form suitable for amplification, the range of nucleic acid analogues and/or internucleoside linkages will be constrained by the requirements and nature of the amplification enzyme.

[0837] Where the probe is to be provided in form suitable for amplification, the quantity need not be sufficient for direct hybridization, and need be sufficient only to function as an amplification template, typically at least about 1 pg, more typically at least about 10 pg, and usually at least about 100 pg or more.

[0838] Each discrete amplifiable probe can also be packaged with amplification primers, either in a single composition that comprises probe template and primers, or in a kit that comprises such primers separately packaged therefrom. As mentioned above, which discussion is incorporated here by reference, the exon-specific 5′ primers used for genomic amplification can have a first common sequence added thereto, and the exon-specific 31 primers used for genomic amplification can have a second, different, common sequence added thereto, thus permitting, in this embodiment, the use of a single set of 5′ and 3′ primers to amplify any one of the probes. The probe composition and/or kit can also include buffers, enzyme, etc., required to effect amplification.

[0839] In another embodiment, only amplification primers are provided. The primers are sufficient to permit generation of the single exon probe by amplification from genomic DNA, which can be provided by the user.

[0840] As mentioned above, when intended for use on a genome-derived single exon microarray of the present invention, the genome-derived single exon probes of the present invention will typically average at least about 50-100 bp, more typically at least about 200 bp, preferably at least about 250 bp, even more preferably about 300 bp, 400 bp, or in preferred embodiments, at least about 500 bp in length, including (and typically, but not necessarily centered about) the exon. Furthermore, when intended for use on a genome-derived single exon microarray of the present invention, the genome-derived single exon probes of the present invention will typically not contain a detectable label.

[0841] When intended for use in solution phase hybridization, however—that is, for use in a hybridization reaction in which the probe is not first bound to a support substrate (although the target may indeed be so bound)—length constraints that are imposed in microarray-based hybridization approaches will be relaxed, and such probes will typically be labeled.

[0842] In such case, the only functional constraint that dictates the minimum size of such probe is that each such probe must be capable of specific hybridization. In theory, a probe of as little as 17 nucleotides is capable of uniquely identifying its cognate sequence in the human genome. For hybridization to expressed message—a subset of target sequence that is much reduced in complexity as compared to genomic sequence—even fewer nucleotides are required for specificity.

[0843] Therefore, the probes of the present invention can include as few as 20 bp of exon, typically at least about 25 bp of exon, more typically at least about 50 bp or exon, or more. The minimum amount of exon required to be included in the probe of the present invention in order to provide specific signal in either solution phase or microarray-based hybridizations can readily be determined by routine experimentation using standard high stringency conditions.

[0844] When intended for use in solution phase hybridization, the maximum size of the single exon probes of the present invention is dictated by the proximity of other expressed exons in genomic DNA: although each single exon probe can include intergenic and/or intronic material contiguous to the exon in the human genome, each probe of the present invention will typically include portions of only one expressed exon.

[0845] Thus, each single exon probe will include no more than about 25 kb of contiguous genomic sequence, more typically no more than about 20 kb of contiguous genomic sequence, more usually no more than about 15 kb, even more usually no more than about 10 kb. Usually, probes that are maximally about 5 kb will be used, more typically no more than about 3 kb.

[0846] And when intended for use in solution hybridization, the probes of the present invention can usefully have detectable labels.

[0847] As mentioned above, which discussion is incorporated here by reference, the probes can, but need not, contain intergenic and/or intronic material that flanks the exon, on one or both sides, in the same linear relationship to the exon that the intergenic and/or intronic material bears to the exon in genomic DNA. The probes typically do not, however, contain nucleic acid derived from more than one expressed exon; that is, they do not contain as contiguous sequence nucleic acids that are expressed from, but present discontinuously in, the genome.

[0848] The probes, either in quantity sufficient for hybridization or sufficient for amplification, can be provided in individual vials or containers, and can be provided dry (e.g., lyophilized), or solvated. If solvated, the solution can usefully include buffers and salts as desired for hybridization and/or amplification. Furthermore, if desired to be spotted on a microarray, the probes can usefully be provided in a solution of chaotropic agent to facilitate adherence to the microarray support substrate.

[0849] Alternatively, such probes can usefully be packaged as a plurality of such individual genome-derived single exon probes.

[0850] In one embodiment of this aspect, a small quantity of each probe is disposed, typically without attachment to substrate, in a spatially-addressable ordered set, typically one per well of a microtiter dish. Although a 96 well microtiter plate can be used, greater efficiency is obtained using higher density arrays, such as are provided by microtiter plates having 384, 864, 1536, 3456, 6144, or 9600 wells. And although microtiter plates having physical depressions (wells) are conveniently used, any device that permits addressable withdrawal of reagent from fluidly-noncommunicating areas can be used.

[0851] Each of the probes of the ordered set can be provided in any of the forms that are described above with respect to the probes as individually packaged.

[0852] As mentioned above, the exon-specific 5′ primers used for genomic amplification can have a first common sequence added thereto, and the exon-specific 3′ primers used for genomic amplification can have a second, different, common sequence added thereto, thus permitting, in certain embodiments, the use of a single set of 5′ and 3′ primers to amplify any one of the probes from the amplifiable ordered set.

[0853] Such collections of genome-derived single exon probes can usefully include a plurality of probes chosen for a common attribute, such as common expression in a given tissue, cell type, developmental stage, disease state, or the like.

[0854] In such defined subsets, typically at least 50% of the probes will have the common attribute, such as expression in the defined tissue or cell type. More typically, at least about 60% of the probes will be expressed in the defined tissue, even more typically at least about 75%, and preferably at least about 80%, 85%, or, in preferred embodiments, at least about 90%, and even 95% or more of the probes will have the common attribute, such as expression in the defined tissue or cell type.

[0855] In exemplified embodiments of this aspect of the invention, the present invention particularly provides subsets of probes having SEQ ID NOs: 1-16,834, the plurality of probes in each subset chosen for their common expression in one of human brain, heart, liver, fetal liver, placenta, lung, bone marrow, HeLa cells, BT 474 cells, or HBL 100 cells. Examples 5-14, infra, present such subsets in Tables 4-13, respectively; probes that have been shown to be expressed in a plurality of the tested tissues appear in the respective plurality of examples and tables.

[0856] Genome-Derived Single Exon Microarrays

[0857] In light of the above-described credible, specific, and substantial utilities, it is another aspect of the present invention to provide genome-derived single exon nucleic acid microarrays useful for gene expression analysis.

[0858] In a first series of embodiments of this aspect of the invention, the genome-derived single exon nucleic acid microarrays are as described hereinabove (“Methods and Apparatus for Generating Single Exon Probes from Genomic Sequence Data”), which discussion is incorporated here by reference in its entirety.

[0859] In preferred embodiments, the microarrays include a plurality of probes known to be expressed in one or more tissues. In particular embodiments, the genome-derived single exon microarrays of the present invention include a plurality of probes, each of which plurality includes a nucleotide sequence as set forth in any one of SEQ ID NOs: 16,835-33,299, the complement thereof, or a fragment of the referenced SEQ ID NO: or complement thereof, wherein the probe hybridizes at high stringency (i.e., under high stringency conditions) to a nucleic acid expressed in human cells, and wherein the probe includes portions of no more than one human exon.

[0860] Among these embodiments are microarrays that include a plurality of probes, each of which plurality comprises a nucleotide sequence as set forth in SEQ ID NOs. 1-16,834 or the complement thereof. It would be understood that although SEQ ID NOs: 1-16,834 exclude the 51 and 31 universal primer sequences above-described, such sequences can, and often will, be present in the probes as disposed on the microarray substrate.

[0861] Single exon microarrays of the present invention can usefully include a plurality of genome-derived single exon probes chosen for a common attribute, such as common expression in a given tissue, cell type, developmental stage, disease state, or the like.

[0862] These “subset-defined” genome-derived single exon microarrays can be distinguished by the percentage of probes thereon that are known to have a common attribute, such as expression in a defined tissue or cell type. On such “subset-defined” microarrays, typically at least 50% of the probes will have the common attribute, typically expression in the defined tissue or cell type. More typically, at least about 60% of the probes will be expressed in the defined tissue, even more typically at least about 75%, and preferably at least about 80%, 85%, or, in preferred embodiments, at least about 90%, and even 95% or more of the probes will have the common attribute, such as expression in the defined tissue or cell type.

[0863] The invention particularly provides defined subset genome-derived single exon microarrays in which the common attribute is expression respectively in human brain, heart, liver, fetal liver, placenta, lung, bone marrow, HeLa cells, BT 474 cells, or HBL 100 cells.

[0864] When used for gene expression analysis, the “defined subset” genome-derived single exon microarrays provide greater physical informational density than do the genome-derived single exon microarrays that have lower percentages of probes known to be expressed commonly in the tested tissue. At a fixed probe density, for example, a given microarray surface area of the defined subset genome-derived single exon microarray can yield a greater number of expression measurements. Alternatively, at a given probe density, the same number of expression measurements can be obtained from a smaller substrate surface area. Alternatively, at a fixed probe density and fixed surface area, probes can be provided redundantly, providing greater reliability in signal measurement for any given probe. Furthermore, with a higher percentage of probes known to be expressed in the assayed tissue, the dynamic range of the detection means can be adjusted to reveal finer levels discrimination among the levels of expression.

[0865] The present invention particularly provides defined subset genome-derived single exon microarrays having subsets of the probes having SEQ ID NOs: 1-16,834, the plurality of probes in each subset chosen for their common expression in one of human brain, heart, liver, fetal liver, placenta, lung, bone marrow, HeLa cells, BT 474 cells, or HBL 100 cells. Examples 5-14, infra, present such subsets in Tables 4-13, presented herewith in electronic format and incorporated by reference in the respective examples.

[0866] In another aspect of the present invention, a genome-derived single-exon microarray is packaged together with an addressable set of individual probes, the set of individual probes including at least a subset of the probes on the microarray. In alternative embodiments, the ordered set of amplifiable probes is packaged separately from the genome-derived single exon microarray.

[0867] In some embodiments, the microarray and/or ordered probe set are further packaged with recorded media that provide probe identification and addressing information, and that can additionally contain annotation information, such as gene expression data. Such recordable media can be packaged with the microarray, with the ordered probe set, or with both.

[0868] If the microarray is constructed on a substrate that incorporates recorded media, such as is described in international patent application No. WO 98/12559, entitled “Spatially addressable combinatorial chemical arrays in CD-ROM format,” incorporated herein by reference in its entirety, then separate packaging of the genome-derived single exon microarray and the bioinformatic information is not required.

[0869] Vectors and Host Cells

[0870] In another aspect, the present invention provides vectors that comprise one or more of the isolated nucleic acids of the present invention, and host cells in which such vectors have been introduced.

[0871] The vectors can be used, inter alia, for propagating the nucleic acids of the present invention in host cells (cloning vectors), for shuttling the nucleic acids of the present invention between host cells derived from disparate organisms (shuttle vectors), for inserting the nucleic acids of the present invention into host cell chromosomes (insertion vectors), for expressing sense or antisense RNA transcripts of the nucleic acids of the present invention in vitro or within a host cell, and for expressing polypeptides encoded by the nucleic acids of the present invention, alone or as fusions to heterologous polypeptides. Vectors of the present invention will often be suitable for several such uses.

[0872] Vectors are by now well-known in the art, and are described, inter alia, in Jones et al. (eds.), Vectors: Cloning Applications: Essential Techniques (Essential Techniques Series), John Wiley & Son Ltd 1998 (ISBN: 047196266X); Jones et al. (eds.), Vectors: Expression Systems: Essential Techniques (Essential Techniques Series), John Wiley & Son Ltd, 1998 (ISBN:0471962678); Gacesa et al., Vectors: Essential Data, John Wiley & Sons, 1995 (ISBN: 0471948411); Cid-Arregui (eds.), Viral Vectors: Basic Science and Gene Therapy, Eaton Publishing Co., 2000 (ISBN: 188129935X); Sambrook et al., Molecular Cloning: A Laboratory Manual (3^{rd} ed.), Cold Spring Harbor Laboratory Press, 2001 (ISBN: 0879695773); Ausubel et al. (eds.), Short Protocols in Molecular Biology: A Compendium of Methods from Current Protocols in Molecular Biology (4^{th} ed.), John Wiley & Sons, 1999 (ISBN: 047132938X), the disclosures of which are incorporated herein by reference in their entireties. Furthermore, an enormous variety of vectors are available commercially. Use of existing vectors and modifications thereof being well within the skill in the art, only basic features need be described here.

[0873] Typically, vectors are derived from virus, plasmid, prokaryotic or eukaryotic chromosomal elements, or some combination thereof, and include at least one origin of replication, at least one site for insertion of heterologous nucleic acid, typically in the form of a polylinker with multiple, tightly clustered, single cutting restriction sites, and at least one selectable marker, although some integrative vectors will lack an origin that is functional in the host to be chromosomally modified, and some vectors will lack selectable markers. Vectors of the present invention will further include at least one nucleic acid of the present invention inserted into the vector in at least one location.

[0874] Where present, the origin of replication and selectable markers are chosen based upon the desired host cell or host cells; the host cells, in turn, are selected based upon the desired application.

[0875] For example, prokaryotic cells, typically E. coli, are typically chosen for cloning. In such case, vector replication is predicated on the replication strategies of coliform-infecting phage—such as phage lambda, M13, T7, T3 and P1—or on the replication origin of autonomously replicating episomes, notably the ColE1 plasmid and later derivatives, including pBR322 and the pUC series plasmids. Where E. coli is used as host, selectable markers are, analogously, chosen for selectivity in gram negative bacteria: e.g., typical markers confer resistance to antibiotics, such as ampicillin, tetracycline, chlorampenicol, kanamycin, streptomycin, zeocin; auxotrophic markers can also be used.

[0876] As another example, yeast cells, typically S. cerevisiae, are chosen, inter alia, for eukaryotic genetic studies, due to the ease of targeting genetic changes by homologous recombination and to the ready ability to complement genetic defects using recombinantly expressed proteins, for identification of interacting protein components, e.g. through use of a two-hybrid system, and for protein expression. Vectors of the present invention for use in yeast will typically, but not invariably, contain an origin of replication suitable for use in yeast and a selectable marker that is functional in yeast.

[0877] Integrative YIp vectors do not replicate autonomously, but integrate, typically in single copy, into the yeast genome at low frequencies and thus replicate as part of the host cell chromosome; these vectors lack an origin of replication that is functional in yeast, although they typically have at least one origin of replication suitable for progation of the vector in bacterial cells. YEp vectors, in contrast, replicate episomally and autonomously due to presence of the yeast 2 micron plasmid origin (2 μm ori). The YCp yeast centromere plasmid vectors are autonomously replicating vectors containing centromere sequences, CEN, and autonomously replicating sequences, ARS; the ARS sequences are believed to correspond to the natural replication origins of yeast chromosomes. YACs are based on yeast linear plasmids, denoted YLp, containing homologous or heterologous DNA sequences that function as telomeres (TEL) in vivo, as well as containing yeast ARS (origins of replication) and CEN (centromeres) segments.

[0878] Selectable markers in yeast vectors include a variety of auxotrophic markers, the most common of which are (in Saccharomyces cerevisiae) URA3, HIS3, LEU2, TRP1 and LYS2, which complement specific auxotrophic mutations, such as ura3-52, his3-D1, leu2-D1, trpl-D1 and lys2-201. The URA3 and LYS2 yeast genes further permit negative selection based on specific inhibitors, 5-fluoro-orotic acid (FOA) and a-aminoadipic acid (AA), respectively, that prevent growth of the prototrophic strains but allows growth of the ura3 and lys2 mutants, respectively. Other selectable markers confer resistance to, e.g., zeocin.

[0879] As yet another example, insect cells are often chosen for high efficiency protein expression. Where the host cells are from Spodoptera frugiperda—e.g., Sf9 and Sf21 cell lines, and expresSF™ cells (Protein Sciences Corp., Meriden, Conn., USA)—the vector replicative strategy is typically based upon the baculovirus life cycle. Typically, baculovirus transfer vectors are used to replace the wild-type AcMNPV polyhedrin gene with a heterologous gene of interest. Sequences that flank the polyhedrin gene in the wild-type genome are positioned 5′ and 3′ of the expression cassette on the transfer vectors. Following cotransfection with AcMNPV DNA, a homologous recombination event occurs between these sequences resulting in a recombinant virus carrying the gene of interest and the polyhedrin or p10 promoter. Selection can be based upon visual screening for lacZ fusion activity.

[0880] As yet another example, mammalian cells are often chosen for expression of proteins intended as pharmaceutical agents, and are also chosen as host cells for screening of potential agonist and antagonists of a protein or a physiological pathway.

[0881] Where mammalian cells are chosen as host cells, vectors intended for autonomous extrachromosomal replication will typically include a viral origin, such as the SV40 origin (for replication in cell lines expressing the large T-antigen, such as COS1 and COS7 cells), the papillomavirus origin, or the EBV origin for long term episomal replication (for use, e.g., in 293-EBNA cells, which constitutively express the EBV EBNA-1 gene product and adenovirus ElA). Vectors intended for integration, and thus replication as part of the mammalian chromosome, can, but need not, include an origin of replication functional in mammalian cells, such as the SV40 origin. Vectors based upon viruses, such as adenovirus, adeno-associated virus, vaccinia virus, and various mammalian retroviruses, will typically replicate according to the viral replicative strategy.

[0882] Selectable markers for use in mammalian cells include resistance to neomycin (G418), blasticidin, hygromycin and to zeocin, and selection based upon the purine salvage pathway using HAT medium.

[0883] Vectors of the present invention will also often include elements that permit in vitro transcription of RNA from the inserted heterologous nucleic acid. Such vectors typically include a phage promoter, such as that from T7, T3, or SP6, flanking the nucleic acid insert. Often two different such promoters flank the inserted nucleic acid, permitting separate in vitro production of both sense and antisense strands.

[0884] Expression vectors of the present invention—that is, those vectors that will drive expression of polypeptides from the inserted heterologous nucleic acid—will often include a variety of other genetic elements operatively linked to the protein-encoding heterologous nucleic acid insert, typically genetic elements that drive transcription, such as promoters and enhancer elements, those that facilitate RNA processing, such as transcription termination and/or polyadenylation signals, and those that facilitate translation, such as ribosomal consensus sequences.

[0885] For example, vectors for expressing proteins of the present invention in prokaryotic cells, typically E. coli, will include a promoter, often a phage promoter, such as phage lambda pL promoter, the trc promoter, a hybrid derived from the trp and lac promoters, the bacteriophage T7 promoter (in E. coli cells engineered to express the T7 polymerase), or the araBAD operon. Often, such prokaryotic expression vectors will further include transcription terminators, such as the aspA terminator, and elements that facilitate translation, such as a consensus ribosome binding site and translation termination codon, Schomer et al., Proc. Natl. Acad. Sci. USA 83:8506-8510 (1986).

[0886] As another example, vectors for expressing proteins of the present invention in yeast cells, typically S. cerevisiae, will include a yeast promoter, such as the CYC1 promoter, the GAL1 promoter, ADH1 promoter, or the GPD promoter, and will typically have elements that facilitate transcription termination, such as the transcription termination signals from the CYC1 or ADH1 gene.

[0887] As another example, vectors for expressing proteins of the present invention in mammalian cells will include a promoter active in mammalian cells. Such promoters are often drawn from mammalian viruses—such as the enhancer-promoter sequences from the immediate early gene of the human cytomegalovirus (CMV), the enhancer-promoter sequences from the Rous sarcoma virus long terminal repeat (RSV LTR), and the enhancer-promoter from SV40. Often, expression is enhanced by incorporation of polyadenylation sites, such as the late SV40 polyadenylation site and the polyadenylation signal and transcription termination sequences from the bovine growth hormone (BGH) gene, and ribosome binding sites. Furthermore, vectors can include introns, such as intron II of rabbit β-globin gene and the SV40 splice elements.

[0888] Vector-drive protein expression can be constitutive or inducible.

[0889] Inducible vectors include either naturally inducible promoters, such as the trc promoter, which is regulated by the lac operon, and the pL promoter, which is regulated by tryptophan, the MMTV-LTR promoter, which is inducible by dexamethasone, or can contain synthetic promoters and/or additional elements that confer inducible control on adjacent promoters. Examples of inducible synthetic promoters are the hybrid Plac/ara-1 promoter and the PLtetO-1 promoter. The PltetO-1 promoter takes advantage of the high expression levels from the PL promoter of phage lambda, but replaces the lambda repressor sites with two copies of operator 2 of the Tn10 tetracycline resistance operon, causing this promoter to be tightly repressed by the Tet repressor protein and induced in response to tetracycline (Tc) and Tc derivatives such as anhydrotetracycline.

[0890] As another example of inducible elements, hormone response elements, such as the glucocorticoid response element (GRE) and the estrogen response element (ERE), can confer hormone inducibility where vectors are used for expression in cells having the respective hormone receptors. To reduce background levels of expression, elements responsive to ecdysone, an insect hormone, can be used instead, with coexpression of the ecdysone receptor.

[0891] Expression vectors can be designed to fuse the expressed polypeptide to small protein tags that facilitate purification and/or visualization.

[0892] For example, proteins of the present invention can be expressed with a polyhistidine tag that facilitates purification of the fusion protein by immobilized metal affinity chromatography, for example using NiNTA resin (Qiagen Inc., Valencia, Calif., USA) or TALON resin (cobalt immobilized affinity chromatography medium, Clontech Labs, Palo Alto, Calif., USA). As another example, the fusion protein can include a chitin-binding tag and self-excising intein, permitting chitin-based purification with self-removal of the fused tag (IMPACT™ system, New England Biolabs, Inc., Beverley, Mass., USA). Alternatively, the fusion protein can include a calmodulin-binding peptide tag, permitting purification by calmodulin affinity resin (stratagene, La Jolla, Calif., USA), or a specifically excisable fragment of the biotin carboxylase carrier protein, permitting purification of in vivo biotinylated protein using an avidin resin and subsequent tag removal (Promega, Madison, Wis., USA).

[0893] Other tags include, for example, the Xpress epitope, detectable by anti-Xpress antibody (Invitrogen, Carlsbad, Calif., USA), a myc tag, detectable by anti-myc tag antibody, the V5 epitope, detectable by anti-VS antibody (Invitrogen, Carlsbad, Calif., USA), FLAG® epitope, detectable by anti-FLAG® antibody (Stratagene, La Jolla, Calif., USA), and the HA epitope.

[0894] For secretion of expressed proteins, vectors can include appropriate sequences that encode secretion signals, such as leader peptides. For example, the pSecTag2 vectors (Invitrogen, Carlsbad, Calif., USA) are 5.2 kb mammalian expression vectors that carry the secretion signal from the V-J2-C region of the mouse Ig kappa-chain for efficient secretion of recombinant proteins from a variety of mammalian cell lines.

[0895] Expression vectors can also be designed to fuse proteins encoded by the heterologous nucleic acid insert to polypeptides larger than purification and/or identification tags. Useful protein fusions include those that permit display of the encoded protein on the surface of a phage or cell, fusions to intrinsically fluorescent proteins, such as green fluorescent protein (GFP), fusions to the IgG Fc region, and fusions for use in two hybrid systems.

[0896] Vectors for phage display fuse the encoded polypeptide to, e.g., the gene III protein (pIII) or gene VIII protein (pVIII) for display on the surface of filamentous phage, such as M13. See Barbas et al., Phage Display: A Laboratory Manual, Cold Spring Harbor Laboratory Press (2001) (ISBN 0-87969-546-3); Kay et al. (eds.), Phage Display of Peptides and Proteins: A Laboratory Manual, San Diego: Academic Press, Inc., 1996; Abelson et al. (eds.), Combinatorial Chemistry, Methods in Enzymology vol. 267, Academic Press (May 1996).

[0897] Vectors for yeast display, e.g. the pYD1 yeast display vector (Invitrogen, Carlsbad, Calif., USA), use the a-agglutinin yeast adhesion receptor to display recombinant protein on the surface of S. cerevisiae. Vectors for mammalian display, e.g., the pDisplay™ vector (Invitrogen, Carlsbad, Calif., USA), target recombinant proteins using an N-terminal cell surface targeting signal and a C-terminal transmembrane anchoring domain of platelet derived growth factor receptor.

[0898] A wide variety of vectors now exist that fuse proteins encoded by heterologous nucleic acids to the chromophore of the substrate-independent, intrinsically fluorescent green fluorescent protein from Aequorea Victoria (“GFP”) and its variants. These proteins are intrinsically fluorescent: the GFP-like chromophore is entirely encoded by its amino acid sequence and can fluoresce without requirement for cofactor or substrate.

[0899] Structurally, the GFP-like chromophore comprises an 11-stranded β-barrel (β-can) with a central α-helix, the central α-helix having a conjugated n-resonance system that includes two aromatic ring systems and the bridge between them. The n-resonance system is created by autocatalytic cyclization among amino acids; cyclization proceeds through an imidazolinone intermediate, with subsequent dehydrogenation by molecular oxygen at the Cα-Cβ bond of a participating tyrosine.

[0900] The GFP-like chromophore can be selected from GFP-like chromophores found in naturally occurring proteins, such as A. victoria GFP (GenBank accession number AAA27721), Renilla reniformis GFP, FP583 (GenBank accession no. AF168419) (DsRed), FP593 (AF272711), FP483 (AF168420), FP484 (AF168424), FP595 (AF246709), FP486 (AF168421), FP538 (AF168423), and FP506 (AF168422), and need include only so much of the native protein as is needed to retain the chromophore's intrinsic fluorescence. Methods for determining the minimal domain required for fluorescence are known in the art. Li et al., “Deletions of the Aequorea victoria Green Fluorescent Protein Define the Minimal Domain Required for Fluorescence,” J. Biol. Chem. 272:28545-28549 (1997).

[0901] Alternatively, the GFP-like chromophore can be selected from GFP-like chromophores modified from those found in nature. Typically, such modifications are made to improve recombinant production in heterologous expression systems (with or without change in protein sequence), to alter the excitation and/or emission spectra of the native protein, to facilitate purification, to facilitate or as a consequence of cloning, or are a fortuitous consequence of research investigation.

[0902] The methods for engineering such modified GFP-like chromophores and testing them for fluorescence activity, both alone and as part of protein fusions, are well-known in the art. Early results of these efforts are reviewed in Heim et al., Curr. Biol. 6:178-182 (1996), incorporated herein by reference in its entirety; a more recent review, with tabulation of useful mutations, is found in Palm et al., “Spectral Variants of Green Fluorescent Protein,” in Green Fluorescent Proteins, Conn (ed.), Methods Enzymol. vol. 302, pp. 378-394 (1999), incorporated herein by reference in its entirety. A variety of such modified chromophores are now commercially available and can readily be used in the fusion proteins of the present invention.

[0903] For example, EGFP (“enhanced GFP”), Cormack et al., Gene 173:33-38 (1996); U.S. Pat. Nos. 6,090,919 and 5,804,387, is a red-shifted, human codon-optimized variant of GFP that has been engineered for brighter fluorescence, higher expression in mammalian cells, and for an excitation spectrum optimized for use in flow cytometers. EGFP can usefully contribute a GFP-like chromophore to the fusion proteins of the present invention. A variety of EGFP vectors, both plasmid and viral, are available commercially (Clontech Labs, Palo Alto, Calif., USA), including vectors for bacterial expression, vectors for N-terminal protein fusion expression, vectors for expression of C-terminal protein fusions, and for bicistronic expression.

[0904] Toward the other end of the emission spectrum, EBFP (“enhanced blue fluorescent protein”) and BFP2 contain four amino acid substitutions that shift the emission from green to blue, enhance the brightness of fluorescence and improve solubility of the protein, Heim et al., Curr. Biol. 6:178-182 (1996); Cormack et al., Gene 173:33-38 (1996). EBFP is optimized for expression in mammalian cells whereas BFP2, which retains the original jellyfish codons, can be expressed in bacteria; as is further discussed below, the host cell of production does not affect the utility of the resulting fusion protein. The GFP-like chromophores from EBFP and BFP2 can usefully be included in the fusion proteins of the present invention, and vectors containing these blue-shifted variants are available from Clontech Labs (Palo Alto, Calif., USA).

[0905] Analogously, EYFP (“enhanced yellow fluorescent protein”), also available from Clontech Labs, contains four amino acid substitutions, different from EBFP, Ormo et al., Science 273:1392-1395 (1996), that shift the emission from green to yellowish-green. Citrine, an improved yellow fluorescent protein mutant, is described in Heikal et al., Proc. Natl. Acad. Sci. USA 97:11996-12001 (2000). ECFP (“enhanced cyan fluorescent protein”) (Clontech Labs, Palo Alto, Calif., USA) contains six amino acid substitutions, one of which shifts the emission spectrum from green to cyan. Heim et al., Curr. Biol. 6:178-182 (1996); Miyawaki et al., Nature 388:882-887 (1997). The GFP-like chromophore of each of these GFP variants can usefully be included in the fusion proteins of the present invention.

[0906] The GFP-like chromophore can also be drawn from other modified GFPs, including those described in U.S. Pat. Nos. 6,124,128; 6,096,865; 6,090,919; 6,066,476; 6,054,321; 6,027,881; 5,968,750; 5,874,304; 5,804,387; 5,777,079; 5,741,668; and 5,625,048, the disclosures of which are incorporated herein by reference in their entireties. See also Conn (ed.), Green Fluorescent Protein, Methods in

[0907] Fusions to the IgG Fc region increase serum half life of protein pharmaceutical products through interaction with the FcRn receptor (also denominated the FcRp receptor and the Brambell receptor, FcRb), further described in international patent application nos. WO 97/43316, WO 97/34631, WO 96/32478, WO 96/18412.

[0908] The present invention further includes host cells comprising the vectors of the present invention, either present episomally within the cell or integrated, in whole or in part, into the host cell chromosome.

[0909] As noted earlier, host cells can be prokaryotic or eukaryotic. Representative examples of appropriate host cells include, but are not limited to, bacterial cells, such as E. coli, Caulobacter crescentus, Streptomyces species, and Salmonella typhimurium; yeast cells, such as Saccharomyces cerevisiae, Schizosaccharomyces pombe, Pichia pastoris, Pichia methanolica; insect cell lines, such as those from Spodoptera frugiperda—e.g., Sf9 and Sf21 cell lines, and expresSF™ cells (Protein Sciences Corp., Meriden, Conn., USA)—Drosophila S2 cells, and Trichoplusia ni High Five® Cells (Invitrogen, Carlsbad, Calif., USA); and mammalian cells. Typical mammalian cells include COS1 and COS7 cells, chinese hamster ovary (CHO) cells, NIH 3T3 cells, 293 cells, HEPG2 cells, HeLa cells, L cells, murine ES cell lines (e.g., from strains 129/SV, C57/BL6, DBA-1, 129/SVJ), K562, Jurkat cells, and BW5147. Other mammalian cell lines are well known and readily available from the American Type Culture Collection (ATCC) (Manassas, Va., USA) and the National Institute of General medical Sciences (NIGMS) Human Genetic Cell Repository at the Coriell Cell Repositories (Camden, N.J., USA).

[0910] Methods for introducing the vectors and nucleic acids of the present invention into the host cells are well known in the art; the choice of technique will depend primarily upon the specific vector to be introduced and the host cell chosen.

[0911] For example, phage lambda vectors will typically be packaged using a packaging extract (e.g., Gigapack® packaging extract, Stratagene, La Jolla, Calif., USA), and the packaged virus used to infect E. coli. Plasmid vectors will typically be introduced into chemically competent or electrocompetent bacterial cells.

[0912] E. coli cells can be rendered chemically competent by treatment, e.g., with CaCl₂, or a solution of Mg²⁺, Mn²⁺, Ca²⁺, Rb⁺ or K³⁰ , dimethyl sulfoxide, dithiothreitol, and hexamine cobalt (III), Hanahan, J. Mol. Biol. 166(4):557-80 (1983), and vectors introduced by heat shock. A wide variety of chemically competent strains are also available commercially (e.g., Epicurian Coli® XL10-Gold® Ultracompetent Cells (Stratagene, La Jolla, Calif., USA); DH5A competent cells (Clontech Laboratories, Palo Alto, Calif., USA); TOP10 Chemically Competent E. coli Kit (Invitrogen, Carlsbad, Calif., USA)).

[0913] Bacterial cells can be rendered electrocompetent—that is, competent to take up exogenous DNA by electroporation—by various pre-pulse treatments; vectors are introduced by electroporation followed by subsequent outgrowth in selected media. An extensive series of protocols is provided online in Electroprotocols (BioRad, Richmond, Calif., USA)

[0914] (http://www.bio-rad.com/LifeScience/pdf/New_Gene_Pulser.pdf).

[0915] Vectors can be introduced into yeast cells by spheroplasting, treatment with lithium salts, electroporation, or protoplast fusion.

[0916] Spheroplasts are prepared by the action of hydrolytic enzymes—a snail-gut extract, usually denoted Glusulase, or Zymolyase, an enzyme from Arthrobacter luteus—to remove portions of the cell wall in the presence of osmotic stabilizers, typically 1 M sorbitol. DNA is added to the spheroplasts, and the mixture is co-precipitated with a solution of polyethylene glycol (PEG) and Ca²⁺. Subsequently, the cells are resuspended in a solution of sorbitol, mixed with molten agar and then layered on the surface of a selective plate containing sorbitol.

[0917] For lithium-mediated transformation, yeast cells are treated with lithium acetate, which apparently permeabilizes the cell wall, DNA is added and the cells are co-precipitated with PEG. The cells are exposed to a brief heat shock, washed free of PEG and lithium acetate, and subsequently spread on plates containing ordinary selective medium. Increased frequencies of transformation are obtained by using specially-prepared single-stranded carrier DNA and certain organic solvents. Schiestl et al., Curr. Genet. 16(5-6):339-46 (1989).

[0918] For electroporation, freshly-grown yeast cultures are typically washed, suspended in an osmotic protectant, such as sorbitol, mixed with DNA, and the cell suspension pulsed in an electroporation device. Subsequently, the cells are spread on the surface of plates containing selective media. Becker et al., Methods Enzymol. 194:182-7 (1991). The efficiency of transformation by electroporation can be increased over 100-fold by using PEG, single-stranded carrier DNA and cells that are in late log-phase of growth. Larger constructs, such as YACs, can be introduced by protoplast fusion.

[0919] Mammalian and insect cells can be directly infected by packaged viral vectors, or transfected by chemical or electrical means.

[0920] For chemical transfection, DNA can be coprecipitated with CaPO₄ or introduced using liposomal and nonliposomal lipid-based agents. Commercial kits are available for CaPO₄ transfection (CalPhos™ Mammalian Transfection Kit, Clontech Laboratories, Palo Alto, Calif., USA), and lipid-mediated transfection can be practiced using commercial reagents, such as LIPOFECTAMINE™ 2000, LIPOFECTAMINE™ Reagent, CELLFECTIN® Reagent, and LIPOFECTIN® Reagent (Invitrogen, Carlsbad, Calif., USA), DOTAP Liposomal Transfection Reagent, FuGENE 6, X-tremeGENE Q2, DOSPER, (Roche Molecular Biochemicals, Indianapolis, Ind. USA), Effectene, PolyFect Superfect® (Qiagen, Inc., Valencia, Calif., USA).

[0921] Protocols for electroporating mammalian cells can be found online in Electroprotocols (Bio-Rad, Richmond, Calif., USA) (http://www.bio-rad.com/LifeScience/pdf/New_Gene_Pulser.pdf). See also, Norton et al. (eds.), Gene Transfer Methods: Introducinq DNA into Living Cells and Organisms, BioTechiques Books, Eaton Publishing Co. (2000) (ISBN 1-881299-34-1), incorporated herein by reference in its entirety.

[0922] ORF-encoded Peptides

[0923] It is another aspect of the present invention to provide peptides encoded by the ORFs presented in SEQ ID NOs: 1-33,299; the sequences of the ORF-encoded peptides are set forth in SEQ ID NOs: 33,300-49,117. The concordance among probe, exon, and ORF-encoded peptide SEQ ID NOs: is set forth in Tables 4-13, infra. It is another aspect to provide fragments and fusions of the ORF-encoded peptides of the present invention.

[0924] Unless otherwise indicated, amino acid sequences of the proteins of the present invention were determined as a predicted translation from a nucleic acid sequence. Accordingly, any amino acid sequence presented herein may contain errors due to errors in the nucleic acid sequence, as described in detail above. Furthermore, single nucleotide polymorphisms (SNPs) occur frequently in eukaryotic genomes—more than 1.4 million SNPs have already identified in the human genome, International Human Genome Sequencing Consortium, Nature 409:860-921 (2001)—and the sequence determined from one individual of a species may differ from other allelic forms present within the population. Small deletions and insertions can often be found that do not alter the function of the protein.

[0925] Accordingly, it is an aspect of the present invention to provide proteins not only identical in sequence to those described with particularity herein, but also to provide, for each ORF-encoded peptide described herein, isolated proteins at least about 90% identical in sequence, typically at least about 91%, 92%, 93%, 94%, or 95% identical in sequence to those decribed with particularity herein, usefully at least about 96%, 97%, 98%, or 99% identical in sequence to those described with particularity herein, and, most conservatively, at least about 99.5%, 99.6%, 99.7%, 99.8% and 99.9% identical in sequence to those described with particularity herein. These sequence variants can be naturally occurring or can result from human intervention by way of random or directed mutagenesis.

[0926] For purposes herein, percent identity of two amino acid sequences is determined using the procedure of Tatiana et al., “Blast 2 sequences—a new tool for comparing protein and nucleotide sequences”, FEMS Microbiol Lett. 174:247-250 (1999), which procedure is effectuated by the computer program BLAST 2 SEQUENCES, available online at

[0927] http://www.ncbi.nlm.nih.gov/blast/b12seq/b12.html,

[0928] To assess percent identity of amino acid sequences, the BLASTP module of BLAST 2 SEQUENCES is used with default values of (i) BLOSUM62 matrix, Henikoff et al., Proc. Natl. Acad. Sci USA 89(22):10915-9 (1992); (ii) open gap 11 and extension gap 1 penalties; and (iii) gap x_dropoff 50 expect 10 word size 3 filter, and both sequences are entered in their entireties.

[0929] As is well known, amino acid substitutions occur frequently among natural allelic variants, with conservative substitutions often occasioning only de minimis change in protein function.

[0930] Accordingly, it is an aspect of the present invention to provide proteins not only identical in sequence to those described with particularity herein, but also to provide isolated proteins having the sequence of the ORF-encoded peptides, or portions thereof, with conservative amino acid substitutions. It is a further aspect to provide isolated proteins having the sequence of ORF-encoded peptides, and portions thereof, with moderately conservative amino acid substitutions. These conservatively-sustituted or moderately conservatively-substituted variants can be naturally occurring or can result from human intervention.

[0931] Although there are a variety of metrics for calling conservative amino acid substitutions, based primarily on either observed changes among evolutionarily related proteins or on predicted chemical similarity, for purposes herein a conservative replacement is any change having a positive value in the PAM250 log-likelihood matrix reproduced herein below (see Gonnet et al., Science 256(5062):1443-5 (1992)):

| | A | R | N | D | C | Q | E | G | H | I | L | K | M | F | P | S | T | W | Y | V |
|---|---|---|---|---|---|---|---|---|---|---|---|---|---|---|---|---|---|---|---|---|
| A | 2 | −1 | 0 | 0 | 0 | 0 | 0 | 0 | −1 | −1 | −1 | 0 | −1 | −2 | 0 | 1 | 1 | −4 | −2 | 0 |
| R | −1 | 5 | 0 | 0 | −2 | 2 | 0 | −1 | 1 | −2 | −2 | 3 | −2 | −3 | −1 | 0 | 0 | −2 | −2 | −2 |
| N | 0 | 0 | 4 | 2 | −2 | 1 | 1 | 0 | 1 | −3 | −3 | 1 | −2 | −3 | −1 | 1 | 0 | −4 | −1 | −2 |
| D | 0 | 0 | 2 | 5 | −3 | 1 | 3 | 9 | 9 | −4 | −4 | 0 | −3 | −4 | −1 | 0 | 0 | −5 | −3 | −3 |
| C | 0 | −2 | −2 | −3 | 12 | −2 | −3 | −2 | −1 | −1 | −2 | −3 | −1 | −1 | −3 | 0 | 0 | −1 | 0 | 0 |
| Q | 0 | 2 | 1 | 1 | −2 | 3 | 2 | −1 | 1 | −2 | −2 | 2 | −1 | −3 | 0 | 0 | 0 | −3 | −2 | −2 |
| E | 0 | 0 | 1 | 3 | 2 | 4 | −1 | 0 | −3 | −3 | 1 | −2 | −4 | 0 | 0 | 0 | −4 | −3 | −2 | |
| G | 0 | −1 | 0 | 0 | −2 | −1 | −1 | 7 | −1 | −4 | −4 | −1 | −4 | −5 | −2 | 0 | −1 | −4 | −4 | −3 |
| H | −1 | 1 | 1 | 0 | −1 | 1 | 0 | −1 | 6 | −2 | −2 | 1 | −1 | 0 | −1 | 0 | 0 | −1 | 2 | −2 |
| I | −1 | −2 | −3 | −4 | −1 | −2 | −3 | −4 | −2 | 4 | 3 | −2 | 2 | 1 | −3 | −2 | −1 | −2 | −1 | 3 |
| L | −1 | −2 | −3 | −4 | −2 | −2 | −3 | −4 | −2 | 3 | 4 | −2 | 3 | 2 | −2 | −2 | −1 | −1 | 0 | 2 |
| K | 0 | 3 | 1 | 0 | −3 | 2 | 1 | −1 | 1 | −2 | −2 | 3 | −1 | −3 | −1 | 0 | 0 | −4 | −2 | −2 |
| M | −1 | −2 | −2 | −3 | −1 | −1 | −2 | −4 | −1 | 2 | 3 | −1 | 4 | 2 | −2 | −1 | −1 | −1 | 0 | 2 |
| F | −2 | −3 | −3 | −4 | −1 | −3 | −4 | −5 | 0 | 1 | 2 | −3 | 2 | 7 | −4 | −3 | −2 | 4 | 5 | 0 |
| P | 0 | −1 | −1 | −1 | −3 | 0 | 0 | −2 | −1 | −3 | −2 | −1 | −2 | −4 | 8 | 0 | 0 | −5 | −3 | −2 |
| S | 1 | 0 | 1 | 0 | 0 | 0 | 0 | 0 | 0 | −2 | −2 | 0 | −1 | −3 | 0 | 2 | 2 | −3 | −2 | −1 |
| T | 1 | 0 | 0 | 0 | 0 | 0 | 0 | −1 | 0 | −1 | −1 | 0 | −1 | −2 | 0 | 2 | 2 | −4 | −2 | 0 |
| W | −4 | −2 | −4 | −5 | −1 | −3 | −4 | −4 | −1 | −2 | −1 | −4 | −1 | 4 | −5 | −3 | −4 | 14 | 4 | −3 |
| Y | −2 | −2 | −1 | −3 | 0 | −2 | −3 | −4 | 2 | −1 | 0 | −2 | 0 | 5 | −3 | −2 | −2 | 4 | 8 | −1 |
| V | 0 | −2 | −2 | −3 | 0 | −2 | −2 | −3 | −2 | 3 | 2 | −2 | 2 | 0 | −2 | −1 | 0 | −3 | −1 | 3 |

[0932] For purposes herein, a “moderately conservative” replacement is any change having a nonnegative value in the PAM250 log-likelihood matrix reproduced herein above.

[0933] As is also well known in the art, relatedness of proteins can also be characterized using a functional test, the ability of the encoding nucleic acids to base-pair to one another at defined hybridization stringencies.

[0934] It is, therefore, another aspect of the invention to provide isolated proteins not only identical in sequence to those described with particularity herein, but also to provide, for each ORF-encoded peptide of the present invention, isolated proteins (“hybridization related proteins”) that are encoded by nucleic acids that hybridize under high stringency conditions (as defined herein above) to all or to a portion of the ORF-encoded peptide's encoding exon (“reference nucleic acids”). It is a further aspect of the invention to provide, for each ORF-encoded peptide described with particularity herein, isolated proteins (“hybridization related proteins”) that are encoded by nucleic acids that hybridize under moderate sringency conditions (as defined herein above) to all or to a portion of each of the encoding exon of the respective ORF-encoded peptide.

[0935] The hybridization related proteins can be alternative isoforms, homologues, paralogues, and orthologues of the ORF-encoded peptides of the present invention. Particularly preferred orthologues are those from other primate species, such as chimpanzee, rhesus macaque, baboon, and gorilla, from rodents, such as rats, mice, guinea pigs, and from livestock, such as cow, pig, sheep, horse, goat.

[0936] Relatedness of proteins can also be characterized using a second functional test, the ability of a first protein competitively to inhibit the binding of a second protein to an antibody.

[0937] It is, therefore, another aspect of the present invention to provide isolated proteins not only identical in sequence to the ORF-encoded peptides described with particularity herein, but also to provide, for each ORF-encoded peptide, isolated proteins (“cross-reactive proteins”) that competitively inhibit the binding of antibodies to all or to a portion of the respective ORF-encoded peptide of the present invention (“reference proteins”). Such competitive inhibition can readily be determined using immunoassays well known in the art.

[0938] As further described below, the isolated proteins of the present invention can readily be used as specific immunogens to raise antibodies that specifically recognize the ORF-encoded peptides, their isoforms, homologues, paralogues, and/or orthologues. The antibodies, in turn, can be used, inter alia, specifically to assay for the respective ORF-encoded peptides of the present invention—e.g. by ELISA for detection of protein fluid samples, such as serum, by immunohistochemistry or laser scanning cytometry, for detection of protein in tissue samples, or by flow cytometry, for detection of intracellular protein in cell suspensions—for specific antibody-mediated isolation and/or purification of ORF-encoded peptides of the present invention, as for example by immunoprecipitation, and for use as specific agonists or antagonists of ORF-encoded peptide action.

[0939] The isolated proteins of the present invention are also immediately available for use as specific standards in assays used specifically to determine the concentration and/or amount of the respective ORF-encoded peptide (and proteins comprising the same) of the present invention. For example, ELISA kits for detection and quantitation of protein analytes include purified protein of known concentration for use as a measurement standard (e.g., the human interferon-γ OptEIA kit, catalog no. 555142, Pharmingen, San Diego, Calif., USA includes human recombinant gamma interferon, baculovirus produced).

[0940] The isolated proteins of the present invention are also immediately available for use as specific biomolecule capture probes for surface-enhanced laser desorption ionization (SELDI) detection of protein-protein interactions, WO 98/59362; WO 98/59360; WO 98/59361; and Merchant et al., Electrophoresis 21(6):1164-77 (2000), the disclosures of which are incorporated herein by reference in their entireties. The isolated proteins of the present invention are also immediately available for use as specific biomolecule capture probes on BIACORE surface plasmon resonance probes.

[0941] The isolated proteins of the present invention are also useful as a therapeutic supplement in patients having a specific deficiency in ORF-encoded peptide production.

[0942] In another aspect, the invention also provides fragments of various of the proteins of the present invention. The protein fragments are useful, inter alia, as antigenic and immunogenic fragments of the ORF-encoded peptide.

[0943] By “fragments” of a protein is here intended isolated proteins (equally, polypeptides, peptides, oligopeptides), however obtained, that have an amino acid sequence identical to a portion of the reference amino acid sequence, which portion is at least 6 amino acids and less than the entirety of the reference nucleic acid. As so defined, “fragments” need not be obtained by physical fragmentation of the reference protein, although such provenance is not thereby precluded.

[0944] Fragments of at least 6 contiguous amino acids are useful in mapping B cell and T cell epitopes of the reference protein. See, e.g., Geysen et al., “Use of peptide synthesis to probe viral antigens for epitopes to a resolution of a single amino acid,” Proc. Natl. Acad. Sci. USA 81:3998-4002 (1984) and U.S. Pat. Nos. 4,708,871 and 5,595,915, the disclosures of which are incorporated herein by reference in their entireties. Because the fragment need not itself be immunogenic, part of an immunodominant epitope, nor even recognized by native antibody, to be useful in such epitope mapping, all fragments of at least 6 amino acids of the proteins of the present invention have utility in such a study.

[0945] Fragments of at least 8 contiguous amino acids, often at least 15 contiguous amino acids, have utility as immunogens for raising antibodies that recognize the proteins of the present invention. See, e.g., Lerner, “Tapping the immunological repertoire to produce antibodies of predetermined specificity,” Nature 299:592-596 (1982); Shinnick et al., “Synthetic peptide immunogens as vaccines,” Annu. Rev. Microbiol. 37:425-46 (1983); Sutcliffe et al., “Antibodies that react with predetermined sites on proteins,” Science 219:660-6 (1983), the disclosures of which are incorporated herein by reference in their entireties. As further described in the above-cited references, virtually all 8-mers, conjugated to a carrier, such as a protein, prove immunogenic—that is, prove capable of eliciting antibody for the conjugated peptide; accordingly, all fragments of at least 8 amino acids of the proteins of the present invention have utility as immunogens.

[0946] Fragments of at least 8, 9, 10 or 12 contiguous amino acids are also useful as competitive inhibitors of binding of the entire protein, or a portion thereof, to antibodies (as in epitope mapping), and to natural binding partners, such as subunits in a multerimic complex or to receptors or ligands of the subject protein; this competitive inhibition permits identification and separation of molecules that bind specifically to the protein of interest, U.S. Pat. Nos. 5,539,084 and 5,783,674, incorporated herein by reference in their entireties.

[0947] The protein, or protein fragment, of the present invention is thus at least 6 amino acids in length, typically at least 8, 9, 10 or 12 amino acids in length, and often at least 15 amino acids in length. Often, the protein or the present invention, or fragment thereof, is at least 20 amino acids in length, even 25 amino acids, 30 amino acids, 35 amino acids, or 50 amino acids or more in length. Of course, larger fragments having at least 75 amino acids, 100 amino acids, or even 150 amino acids are also useful, and at times preferred.

[0948] The present invention further provides fusions of each of the proteins and protein fragments of the present invention to heterologous polypeptides.

[0949] By fusion is here intended that the protein or protein fragment of the present invention is linearly contiguous to the heterologous polypeptide in a peptide-bonded polymer of amino acids or amino acid analogues; by “heterologous polypeptide” is here intended a polypeptide that does not naturally occur in contiguity with the protein or protein fragment of the present invention. As so defined, the fusion can consist entirely of a plurality of fragments of the ORF-encoded peptide in altered arrangement; in such case, any of the ORF-encoded peptide fragments can be considered heterologous to the other ORF-encoded peptide fragments in the fusion protein. More typically, however, the heterologous polypeptide is not drawn from the ORF-encoded peptide itself.

[0950] The fusion proteins of the present invention will include at least one fragment of the protein of the present invention, which fragment is at least 6, typically at least 8, often at least 15, and usefully at least 16, 17, 18, 19, or 20 amino acids long. The fragment of the protein of the present to be included in the fusion can usefully be at least 25 amino acids long, at least 50 amino acids long, and can be at least 75, 100, or even 150 amino acids long. Fusions that include the entirety of the ORF-encoded peptide of the present invention have particular utility.

[0951] The heterologous polypeptide included within the fusion protein of the present invention is at least 6 amino acids in length, often at least 8 amino acids in length, and usefully at least 15, 20, and 25 amino acids in length. Fusions that include larger polypeptides, such as the IgG Fc region, and even entire proteins (such as GFP chromophore-containing proteins), have particular utility.

[0952] As described above in the description of vectors and expression vectors of the present invention, which discussion is incorporated here by reference in its entirety, heterologous polypeptides to be included in the fusion proteins of the present invention can usefully include those designed to facilitate purification and/or visualization of recombinantly-expressed proteins. Although purification tags can also be incorporated into fusions that are chemically synthesized, chemical synthesis typically provides sufficient purity that further purification by HPLC suffices; however, visualization tags as above described retain their utility even when the protein is produced by chemical synthesis, and when so included render the fusion proteins of the present invention useful as directly detectable markers of the presence of the respective ORF-encoded peptide.

[0953] As also discussed above, heterologous polypeptides to be included in the fusion proteins of the present invention can usefully include those that facilitate secretion of recombinantly expressed proteins—into the periplasmic space or extracellular milieu for prokaryotic hosts, into the culture medium for eukaryotic cells—through incorporation of secretion signals and/or leader sequences.

[0954] Other useful protein fusions of the present invention include those that permit use of the protein of the present invention as bait in a yeast two-hybrid system. See Bartel et al. (eds.), The Yeast Two-Hybrid System, Oxford University Press (1997) (ISBN: 0195109384); Zhu et al., Yeast Hybrid Technologies, Eaton Publishing, (2000) (ISBN 1-881299-15-5); Fields et al., Trends Genet. 10(8):286-92 (1994); Mendelsohn et al., Curr. Opin. Biotechnol. 5(5):482-6 (1994); Luban et al., Curr. Opin. Biotechnol. 6(1):59-64 (1995); Allen et al., Trends Biochem. Sci. 20(12):511-6 (1995); Drees, Curr. Opin. Chem. Biol. 3(1):64-70 (1999); Topcu et al., Pharm. Res. 17(9):1049-55 (2000); Fashena et al., Gene 250(1-2):1-14 (2000), the disclosures of which are incorporated herein by reference in their entireties. Typically, such fusion is to either E. coli LexA or yeast GAL4 DNA binding domains. Related bait plasmids are available that express the bait fused to a nuclear localization signal.

[0955] Other useful protein fusions include those that permit display of the encoded protein on the surface of a phage or cell, fusions to intrinsically fluorescent proteins, such as green fluorescent protein (GFP), and fusions to the IgG Fc region.

[0956] The proteins and protein fragments of the present invention can also usefully be fused to protein toxins, such as Pseudomonas exotoxin A, diphtheria toxin, shiga toxin A, anthrax toxin lethal factor, ricin, in order to effect ablation of cells that bind or take up the proteins of the present invention.

[0957] The isolated proteins, protein fragments, and protein fusions of the present invention can be composed of natural amino acids linked by native peptide bonds, or can contain any or all of nonnatural amino acid analogues, nonnative bonds, and post-synthetic (post translational) modifications, either throughout the length of the protein or localized to one or more portions thereof.

[0958] As is well known in the art, when the isolated protein is used, e.g., for epitope mapping, the range of such nonnatural analogues, nonnative inter-residue bonds, or post-synthesis modifications will be limited to those that permit binding of the peptide to antibodies. When used as an immunogen for the preparation of antibodies in a non-human host, such as a mouse, the range of such nonnatural analogues, nonnative inter-residue bonds, or post-synthesis modifications will be limited to those that do not interfere with the immunogenicity of the protein. When the isolated protein is used as a therapeutic agent, such as a vaccine or for replacement therapy, the range of such changes will be limited to those that do not confer toxicity upon the isolated protein.

[0959] Non-natural amino acids can be incorporated during solid phase chemical synthesis or by recombinant techniques, although the former is typically more common.

[0960] Solid phase chemical synthesis of peptides is well established in the art. Procedures are described, inter alia, in Chan et al. (eds.), Fmoc Solid Phase Peptide Synthesis: A Practical Approach (Practical Approach Series, (Paper)), Oxford Univ. Press (March 2000) (ISBN: 0199637245); Jones, Amino Acid and Peptide Synthesis (Oxford Chemistry Primers, No 7), Oxford Univ. Press (August 1992) (ISBN: 0198556683); and Bodanszky, Principles of Peptide Synthesis (Springer Laboratory), Springer Verlag (December 1993) (ISBN: 0387564314), the disclosures of which are incorporated herein by reference in their entireties.

[0961] Non-natural amino acids can be incorporated during solid phase chemical synthesis. For example, D-enantiomers of natural amino acids can readily be incorporated during chemical peptide synthesis: peptides assembled from D-amino acids are more resistant to proteolytic attack; incorporation of D-enantiomers can also be used to confer specific three dimensional conformations on the peptide. Other amino acid analogues commonly added during chemical synthesis include ornithine, norleucine, phosphorylated amino acids (typically phosphoserine, phosphothreonine, phosphotyrosine), L-malonyltyrosine, a non-hydrolyzable analog of phosphotyrosine (Kole et al., Biochem. Biophys. Res. Com. 209:817-821 (1995)), and various halogenated phenylalanine derivatives.

[0962] Amino acid analogues having detectable labels are also usefully incorporated during synthesis to provide a labeled polypeptide.

[0963] Biotin, for example, can be added using biotinoyl—(9-fluorenylmethoxycarbonyl)-L-lysine (FMOC biocytin) (Molecular Probes, Eugene, Oreg., USA). The FMOC and tBOC derivatives of dabcyl-L-lysine (Molecular Probes, Inc., Eugene, Oreg., USA) can be used to incorporate the dabcyl chromophore at selected sites in the peptide sequence during synthesis. The aminonaphthalene derivative EDANS, the most common fluorophore for pairing with the dabcyl quencher in fluorescence resonance energy transfer (FRET) systems, can be introduced during automated synthesis of peptides by using EDANS—FMOC-L-glutamic acid or the corresponding tBOC derivative (both from Molecular Probes, Inc., Eugene, Oreg., USA). Tetramethylrhodamine fluorophores can be incorporated during automated FMOC synthesis of peptides using (FMOC)—TMR-L-lysine (Molecular Probes, Inc. Eugene, Oreg., USA).

[0964] Other useful amino acid analogues that can be incorporated during chemical synthesis include aspartic acid, glutamic acid, lysine, and tyrosine analogues having allyl side-chain protection (Applied Biosystems, Inc., Foster City, Calif., USA); the allyl side chain permits synthesis of cyclic, branched-chain, sulfonated, glycosylated, and phosphorylated peptides.

[0965] A large number of other FMOC-protected non-natural amino acid analogues capable of incorporation during chemical synthesis are available commercially, including, e.g., Fmoc-2-aminobicyclo[2.2.1]heptane-2-carboxylic acid, Fmoc-3-endo-aminobicyclo[2.2.1]heptane-2-endo-carboxylic acid, Fmoc-3-exo-aminobicyclo[2.2.1]heptane-2-exo-carboxylic acid, Fmoc-3-endo-amino-bicyclo[2.2.1]hept-5-ene-2-endo-carboxylic acid, Fmoc-3-exo-amino-bicyclo[2.2.l]hept-5-ene-2-exo-carboxylic acid, Fmoc-cis-2-amino-1-cyclohexanecarboxylic acid, Fmoc-trans-2-amino-1-cyclohexanecarboxylic acid, Fmoc-1-amino-1-cyclopentanecarboxylic acid, Fmoc-cis-2-amino-1-cyclopentanecarboxylic acid, Fmoc-1-amino-1-cyclopropanecarboxylic acid, Fmoc-D-2-amino-4-(ethylthio)butyric acid, Fmoc-L-2-amino-4-(ethylthio)butyric acid, Fmoc-L-buthionine, Fmoc-S-methyl-L-Cysteine, Fmoc-2-aminobenzoic acid (anthranillic acid), Fmoc-3-aminobenzoic acid, Fmoc-4-aminobenzoic acid, Fmoc-2-aminobenzophenone-2′-carboxylic acid, Fmoc-N-(4-aminobenzoyl)-b-alanine, Fmoc-2-amino-4,5-dimethoxybenzoic acid, Fmoc-4-aminohippuric acid, Fmoc-2-amino-3-hydroxybenzoic acid, Fmoc-2-amino-5-hydroxybenzoic acid, Fmoc-3-amino-4-hydroxybenzoic acid, Fmoc-4-amino-3-hydroxybenzoic acid, Fmoc-4-amino-2-hydroxybenzoic acid, Fmoc-5-amino-2-hydroxybenzoic acid, Fmoc-2-amino-3-methoxybenzoic acid, Fmoc-4-amino-3-methoxybenzoic acid, Fmoc-2-amino-3-methylbenzoic acid, Fmoc-2-amino-5-methylbenzoic acid, Fmoc-2-amino-6-methylbenzoic acid, Fmoc-3-amino-2-methylbenzoic acid, Fmoc-3-amino-4-methylbenzoic acid, Fmoc-4-amino-3-methylbenzoic acid, Fmoc-3-amino-2-naphtoic acid, Fmoc-D,L-3-amino-3-phenylpropionic acid, Fmoc-L-Methyldopa, Fmoc-2-amino-4,6-dimethyl-3-pyridinecarboxylic acid, Fmoc-D,L-?-amino-2-thiophenacetic acid, Fmoc-4-(carboxymethyl)piperazine, Fmoc-4-carboxypiperazine, Fmoc-4-(carboxymethyl)homopiperazine, Fmoc-4-phenyl-4-piperidinecarboxylic acid, Fmoc-L-1,2,3,4-tetrahydronorharman-3-carboxylic acid, Fmoc-L-thiazolidine-4-carboxylic acid, all available from The Peptide Laboratory (Richmond, Calif., USA).

[0966] Non-natural residues can also be added biosynthetically by engineering a suppressor tRNA, typically one that recognizes the UAG stop codon, by chemical aminoacylation with the desired unnatural amino acid and. Conventional site-directed mutagenesis is used to introduce the chosen stop codon UAG at the site of interest in the protein gene. When the acylated suppressor tRNA and the mutant gene are combined in an in vitro transcription/translation system, the unnatural amino acid is incorporated in response to the UAG codon to give a protein containing that amino acid at the specified position. Liu et al., Proc. Natl Acad. Sci. USA 96(9):4780-5 (1999).

[0967] The isolated proteins, protein fragments and fusion proteins of the present invention can also include nonnative inter-residue bonds, including bonds that lead to circular and branched forms.

[0968] The isolated proteins and protein fragments of the present invention can also include post-translational and post-synthetic modifications, either throughout the length of the protein or localized to one or more portions thereof.

[0969] For example, when produced by recombinant expression in eukaryotic cells, the isolated proteins, fragments, and fusion proteins of the present invention will typically include N-linked and/or O-linked glycosylation, the pattern of which will reflect both the availability of glycosylation sites on the protein sequence and the identity of the host cell. Further modification of glycosylation pattern can be performed enzymatically.

[0970] As another example, recombinant polypeptides of the invention may also include an initial modified methionine residue, in some cases resulting from host-mediated processes.

[0971] When the proteins, protein fragments, and protein fusions of the present invention are produced by chemical synthesis, post-synthetic modification can be performed before deprotection and cleavage from the resin or after deprotection and cleavage. Modification before deprotection and cleavage of the synthesized protein often allows greater control, e.g. by allowing targeting of the modifying moiety to the N-terminus of a resin-bound synthetic peptide.

[0972] Useful post-synthetic (and post-translational) modifications include conjugation to detectable labels, such as fluorophores.

[0973] A wide variety of amine-reactive and thiol-reactive fluorophore derivatives have been synthesized that react under nondenaturating conditions with N-terminal amino groups and epsilon amino groups of lysine residues, on the one hand, and with free thiol groups of cysteine residues, on the other.

[0974] Kits are available commercially that permit conjugation of proteins to a variety of amine-reactive or thiol-reactive fluorophores: Molecular Probes, Inc. (Eugene, Oreg., USA), e.g., offers kits for conjugating proteins to Alexa Fluor 350, Alexa Fluor 430, Fluorescein-EX, Alexa Fluor 488, Oregon Green 488, Alexa Fluor 532, Alexa Fluor 546, Alexa Fluor 546, Alexa Fluor 568, Alexa Fluor 594, and Texas Red-X.

[0975] A wide variety of other amine-reactive and thiol-reactive fluorophores are available commercially (Molecular Probes, Inc., Eugene, Oreg., USA), including Alexa Fluor® 350, Alexa Fluor® 488, Alexa Fluor® 532, Alexa Fluor® 546, Alexa Fluor® 568, Alexa Fluor® 594, Alexa Fluor® 647 (monoclonal antibody labeling kits available from Molecular Probes, Inc., Eugene, Oreg., USA), BODIPY dyes, such as BODIPY 493/503, BODIPY FL, BODIPY R6G, BODIPY 530/550, BODIPY TMR, BODIPY 558/568, BODIPY 558/568, BODIPY 564/570, BODIPY 576/589, BODIPY 581/591, BODIPY TR, BODIPY 630/650, BODIPY 650/665, Cascade Blue, Cascade Yello, Dansyl, lissamine rhodamine B, Marina Blue, Oregon Green 488, Oregon Green 514, Pacific Blue, rhodamine 6G, rhodamine green, rhodamine red, tetramethylrhodamine, Texas Red (available from Molecular Probes, Inc., Eugene, Oreg., USA).

[0976] The polypeptides of the present invention can also be conjugated to fluorophores, other proteins, and other macromolecules, using bifunctional linking reagents.

[0977] Common homobifunctional reagents include, e.g., APG, AEDP, BASED, BMB, BMDB, BMH, BMOE, BM[PEO]3, BM[PEO]4, BS3, BSOCOES, DFDNB, DMA, DMP, DMS, DPDPB, DSG, DSP (Lomant's Reagent), DSS, DST, DTBP, DTME, DTSSP, EGS, HBVS, Sulfo-BSOCOES, Sulfo-DST, Sulfo-EGS (all available Pierce, Rockford, Ill., USA); common heterobifunctional cross-linkers include ABH, AMAS, ANB-NOS, APDP, ASBA, BMPA, BMPH, BMPS, EDC, EMCA, EMCH, EMCS, KMUA, KMUH, GMBS, LC-SMCC, LC-SPDP, MBS, M2C2H, MPBH, MSA, NHS-ASA, PDPH, PMPI, SADP, SAED, SAND, SANPAH, SASD, SATP, SBAP, SFAD, SIA, SIAB, SMCC, SMPB, SMPH, SMPT, SPDP, Sulfo-EMCS, Sulfo-GMBS, Sulfo-HSAB, Sulfo-KMUS, Sulfo-LC-SPDP, Sulfo-MBS, Sulfo-NHS-LC-ASA, Sulfo-SADP, Sulfo-SANPAH, Sulfo-SIAB, Sulfo-SMCC, Sulfo-SMPB, Sulfo-LC-SMPT, SVSB, TFCS (all available Pierce, Rockford, Ill., USA).

[0978] The proteins, protein fragments, and protein fusions of the present invention can be conjugated, using such cross-linking reagents, to fluorophores that are not amine- or thiol-reactive.

[0979] Other labels that usefully can be conjugated to the proteins, protein fragments, and fusion proteins of the present invention include radioactive labels, echosonographic contrast reagents, and MRI contrast agents.

[0980] The proteins, protein fragments, and protein fusions of the present invention can also usefully be conjugated using cross-linking agents to carrier proteins, such as KLH, bovine thyroglobulin, and even bovine serum albumin (BSA), to increase immunogenicity for raising antibodies that recognize the ORF-encoded peptide immunogen.

[0981] The proteins, protein fragments, and protein fusions of the present invention can also usefully be conjugated to polyethylene glycol (PEG); PEGylation increases the serum half life of proteins administered intravenously for replacement therapy. Delgado et al., Crit. Rev. Ther. Drug Carrier Syst. 9(3-4):249-304 (1992); Scott et al., Curr. Pharm. Des. 4(6):423-38 (1998); DeSantis et al., Curr. Opin. Biotechnol. 10(4):324-30 (1999), incorporated herein by reference in their entireties. PEG monomers can be attached to the protein directly or through a linker, with PEGylation using PEG monomers activated with tresyl chloride (2,2, 2-trifluoroethanesulphonyl chloride) permitting direct attachment under mild conditions.

[0982] The isolated proteins of the present invention, including fusions thereof, can be produced by recombinant expression, typically using the expression vectors of the present invention as above-described or, if fewer than about 100 amino acids, by chemical synthesis (typically, solid phase synthesis), and, on occasion, by in vitro translation.

[0983] Production of the isolated proteins of the present invention can optionally be followed by purification.

[0984] Purification of recombinantly expressed proteins is now well within the skill in the art. See, e.g., Thorner et al. (eds.), Applications of Chimeric Genes and Hybrid Proteins, Part A: Gene Expression and Protein Purification (Methods in Enzymology, Volume 326), Academic Press (2000), (ISBN: 0121822273); Harbin (ed.), Cloning, Gene Expression and Protein Purification: Experimental Procedures and Process Rationale, Oxford Univ. Press (2001) (ISBN: 0195132947); Marshak et al., Strategies for Protein Purification and Characterization: A Laboratory Course Manual, Cold Spring Harbor Laboratory Press (1996) (ISBN: 0-87969-385-1); and Roe (ed.), Protein Purification Applications, Oxford University Press (2001), the disclosures of which are incorporated herein by reference in their entireties, and thus need not be detailed here.

[0985] Briefly, however, if purification tags have been fused through use of an expression vector that appends such tag, purification can be effected, at least in part, by means appropriate to the tag, such as use of immobilized metal affinity chromatography for polyhistidine tags. Other techniques common in the art include ammonium sulfate fractionation, immunoprecipitation, fast protein liquid chromatography (FPLC), high performance liquid chromatography (HPLC), and preparative gel electrophoresis.

[0986] Purification of chemically-synthesized peptides can readily be effected, e.g., by HPLC.

[0987] Accordingly, it is an aspect of the present invention to provide the isolated proteins of the present invention in pure or substantially pure form.

[0988] A purified protein of the present invention is an isolated protein, as above described, that is present at a concentration of at least 95%, as measured on a mass basis with respect to total protein in a composition. Such purities can often be obtained during chemical synthesis without further purification, as, e.g., by HPLC. Purified proteins of the present invention can be present at a concentration (measured on a mass basis with respect to total protein in a composition) of 96%, 97%, 98%, and even 99%. The proteins of the present invention can even be present at levels of 99.5%, 99.6%, and even 99.7%, 99.8%, or even 99.9% following purification, as by HPLC.

[0989] Although high levels of purity are preferred when the isolated proteins of the present invention are used as therapeutic agents—such as vaccines, or for replacement therapy—the isolated proteins of the present invention are also useful at lower purity. For example, partially purified proteins of the present invention can be used as immunogens to raise antibodies in laboratory animals.

[0990] Thus, in another aspect, the present invention provides the isolated proteins of the present invention in substantially purified form. A “substantially purified protein” of the present invention is an isolated protein, as above described, present at a concentration of at least 70%, measured on a mass basis with respect to total protein in a composition. Usefully, the substantially purified protein is present at a concentration, measured on a mass basis with respect to total protein in a composition, of at least 75%, 80%, or even at least 85%, 90%, 91%, 92%, 93%, 94%, 94.5% or even at least 94.9%.

[0991] In preferred embodiments, the purified and substantially purified proteins of the present invention are in compositions that lack detectable ampholytes, acrylamide monomers, bis-acrylamide monomers, and polyacrylamide.

[0992] The proteins, fragments, and fusions of the present invention can usefully be attached to a substrate. The substrate can porous or solid, planar or non-planar; the bond can be covalent or noncovalent.

[0993] For example, the proteins, fragments, and fusions of the present invention can usefully be bound to a porous substrate, commonly a membrane, typically comprising nitrocellulose, polyvinylidene fluoride (PVDF), or cationically derivatized, hydrophilic PVDF; so bound, the proteins, fragments, and fusions of the present invention can be used to detect and quantify antibodies, e.g. in serum, that bind specifically to the immobilized protein of the present invention.

[0994] As another example, the proteins, fragments, and fusions of the present invention can usefully be bound to a substantially nonporous substrate, such as plastic, to detect and quantify antibodies, e.g. in serum, that bind specifically to the immobilized protein of the present invention. Such plastics include polymethylacrylic, polyethylene, polypropylene, polyacrylate, polymethylmethacrylate, polyvinylchloride, polytetrafluoroethylene, polystyrene, polycarbonate, polyacetal, polysulfone, celluloseacetate, cellulosenitrate, nitrocellulose, or mixtures thereof; when the assay is performed in standard microtiter dish, the plastic is typically polystyrene.

[0995] The proteins, fragments, and fusions of the present invention can also be attached to a substrate suitable for use as a surface enhanced laser desorption ionization source; so attached, the protein, fragment, or fusion of the present invention is useful for binding and then detecting secondary proteins that bind with sufficient affinity or avidity to the surface-bound protein to indicate biologic interaction therebetween. The proteins, fragments, and fusions of the present invention can also be attached to a substrate suitable for use in surface plasmon resonance detection; so attached, the protein, fragment, or fusion of the present ivnention is useful for binding and then detecting secondary proteins that bind with sufficient affinity or avidity to the surface-bound protein to indicate biological interaction therebetween.

[0996] Antibodies and Antibody-Producing Cells

[0997] In another aspect, the invention provides antibodies, including fragments and derivatives thereof, that bind specifically to the ORF-encoded peptides, and fragments thereof, of the present invention, or that bind to one or more of the proteins and protein fragments encoded by the isolated nucleic acids of the present invention. The antibodies of the present invention specifically recognize any or all of linear epitopes, discontinuous epitopes, or conformational epitopes of such proteins or protein fragments, either as present on the protein in its native conformation or, in some cases, as present on the proteins as denatured, as, e.g., by solubilization in SDS.

[0998] In other embodiments, the invention provides antibodies, including fragments and derivatives thereof, the binding of which can be competitively inhibited by one or more of the ORF-encoded peptides and peptide fragments of the present invention, or by one or more of the proteins and protein fragments encoded by the isolated nucleic acids of the present invention.

[0999] As used herein, the term “antibody” refers to a polypeptide, at least a portion of which is encoded by at least one immunoglobulin gene, which can bind specifically to a first molecular species, and to fragments or derivatives thereof that remain capable of such specific binding.

[1000] By “bind specifically” and “specific binding” is here intended the ability of the antibody to bind to a first molecular species in preference to binding to other molecular species with which the antibody and first molecular species are admixed. An antibody is said specifically to “recognize” a first molecular species when it can bind specifically to that first molecular species.

[1001] As is well known in the art, the degree to which an antibody can discriminate as among molecular species in a mixture will depend, in part, upon the conformational relatedness of the species in the mixture; typically, the antibodies of the present invention will discriminate over adventitious binding to proteins other than the ORF-encoded peptide by at least two-fold, more typically by at least 5-fold, typically by more than 10-fold, 25-fold, 50-fold, 75-fold, and often by more than 100-fold, and on occasion by more than 500-fold or 1000-fold. When used to detect the proteins or protein fragments of the present invention, the antibody of the present invention is sufficiently specific when it can be used to determine the presence of the protein of the present invention in human serum.

[1002] Typically, the affinity or avidity of an antibody (or antibody multimer, as in the case of an IgM pentamer) of the present invention for a protein or protein fragment of the present invention will be at least about 1×10⁻⁶ molar (M), typically at least about 5×10⁻⁷ M, usefully at least about 1×10⁻⁷ M, with affinities and avidities of at least 1×10⁻⁸ M, 5×10⁻⁹ M, and 1×10⁻¹⁰ M proving especially useful.

[1003] The antibodies of the present invention can be naturally-occurring forms, such as IgG, IgM, IgD, IgE, and IgA, from any mammalian species.

[1004] Human antibodies can, but will infrequently, be drawn directly from human donors or human cells. In such case, antibodies to the proteins of the present invention will typically have resulted from fortuitous immunization, such as autoimmune immunization, with the protein or protein fragments of the present invention. Such antibodies will typically, but will not invariably, be polyclonal.

[1005] Human antibodies are more frequently obtained using transgenic animals that express human immunoglobulin genes, which transgenic animals can be affirmatively immunized with the protein immunogen of the present invention. Human Ig-transgenic mice capable of producing human antibodies and methods of producing human antibodies therefrom upon specific immunization are described, inter alia, in U.S. Pat. Nos. 6,162,963; 6,150,584; 6,114,598; 6,075,181; 5,939,598; 5,877,397; 5,874,299; 5,814,318; 5,789,650; 5,770,429; 5,661,016; 5,633,425; 5,625,126; 5,569,825; 5,545,807; 5,545,806, and 5,591,669, the disclosures of which are incorporated herein by reference in their entireties. Such antibodies are typically monoclonal, and are typically produced using techniques developed for production of murine antibodies.

[1006] Human antibodies are particularly useful, and often preferred, when the antibodies of the present invention are to be administered to human beings as in vivo diagnostic or therapeutic agents, since recipient immune response to the administered antibody will often be substantially less than that occasioned by administration of an antibody derived from another species, such as mouse.

[1007] IgG, IgM, IgD, IgE and IgA antibodies of the present invention are also usefully obtained from other mammalian species, including rodents—typically mouse, but also rat, guinea pig, and hamster—lagomorphs, typically rabbits, and also larger mammals, such as sheep, goats, cows, and horses. In such cases, as with the transgenic human-antibody-producing non-human mammals, fortuitous immunization is not required, and the non-human mammal is typically affirmatively immunized, according to standard immunization protocols, with the protein or protein fragment of the present invention.

[1008] As discussed above, virtually all fragments of 8 or more contiguous amino acids of the proteins of the present invention can be used effectively as immunogens when conjugated to a carrier, typically a protein such as bovine thryoglobulin, keyhole limpet hemocyanin, or bovine serum albumin, conveniently using a bifunctional linker such as those described elsewhere above, which discussion is incorporated by reference here.

[1009] Immunogenicity can also be conferred by fusion of the proteins and protein fragments of the present invention to other moieties.

[1010] For example, peptides of the present invention can be produced by solid phase synthesis on a branched polylysine core matrix; these multiple antigenic peptides (MAPs) provide high purity, increased avidity, accurate chemical definition and improved safety in vaccine development. Tam et al., Proc. Natl. Acad. Sci. USA 85:5409-5413 (1988); Posnett et al., J. Biol. Chem. 263, 1719-1725 (1988).

[1011] Protocols for immunizing non-human mammals are well-established in the art, Harlow et al. (eds.), Antibodies: A Laboratory Manual, Cold Spring Harbor Laboratory (1998) (ISBN: 0879693142); Coligan et al. (eds.), Current Protocols in Immunology, John Wiley & Sons, Inc. (2001) (ISBN: 0-471-52276-7); Zola, Monoclonal Antibodies: Preparation and Use of Monoclonal Antibodies and Engineered Antibody Derivatives (Basics: From Background to Bench), Springer Verlag (2000) (ISBN: 0387915907), the disclosures of which are incorporated herein by reference, and often include multiple immunizations, either with or without adjuvants such as Freund's complete adjuvant and Freund's incomplete adjuvant.

[1012] Antibodies from nonhuman mammals can be polyclonal or monoclonal, with polyclonal antibodies having certain advantages in immunohistochemical detection of the proteins of the present invention and monoclonal antibodies having advantages in identifying and distinguishing particular epitopes of the proteins of the present invention.

[1013] Following immunization, the antibodies of the present invention can be produced using any art-accepted technique. Such techniques are well known in the art, Coligan et al. (eds.), Current Protocols in Immunology, John Wiley & Sons, Inc. (2001) (ISBN: 0-471-52276-7); Zola, Monoclonal Antibodies: Preparation and Use of Monoclonal Antibodies and Engineered Antibody Derivatives (Basics: From Background to Bench), Springer Verlag (2000) (ISBN: 0387915907); Howard et al. (eds.), Basic Methods in Antibody Production and Characterization, CRC Press (2000) (ISBN: 0849394457); Harlow et al. (eds.), Antibodies: A Laboratory Manual, Cold Spring Harbor Laboratory (1998) (ISBN: 0879693142); Davis (ed.), Monoclonal Antibody Protocols, Vol. 45, Humana Press (1995) (ISBN: 0896033082); Delves (ed.), Antibody Production: Essential Techniques, John Wiley & Son Ltd (1997) (ISBN: 0471970107); Kenney, Antibody Solution: An Antibody Methods Manual, Chapman & Hall (1997) (ISBN: 0412141914), incorporated herein by reference in their entireties, and thus need not be detailed here.

[1014] Briefly, however, such techniques include, inter alia, production of monoclonal antibodies by hybridomas and expression of antibodies or fragments or derivatives thereof from host cells engineered to express immunoglobulin genes or fragments thereof. These two methods of production are not mutually exclusive: genes encoding antibodies specific for the proteins or protein fragments of the present invention can be cloned from hybridomas and thereafter expressed in other host cells. Nor need the two necessarily be performed together: e.g., genes encoding antibodies specific for the proteins and protein fragments of the present invention can be cloned directly from B cells known to be specific for the desired protein, as further described in U.S. Pat. No. 5,627,052, the disclosure of which is incorporated herein by reference in its entirety, or from antibody-displaying phage.

[1015] Recombinant expression in host cells is particularly useful when fragments or derivatives of the antibodies of the present invention are desired.

[1016] Host cells for recombinant antibody production—either whole antibodies, antibody fragments, or antibody derivatives—can be prokaryotic or eukaryotic.

[1017] Prokaryotic hosts are particularly useful for producing phage displayed antibodies of the present invention. The technology of phage-displayed antibodies, in which antibody variable region fragments are fused, for example, to the gene III protein (pIII) or gene VIII protein (pVIII) for display on the surface of filamentous phage, such as M13, is by now well-established, Sidhu, Curr. Opin. Biotechnol. 11(6):610-6 (2000); Griffiths et al., Curr. Opin. Biotechnol. 9(1):102-8 (1998); Hoogenboom et al., Immunotechnology, 4(1):1-20 (1998); Rader et al., Current Opinion in Biotechnology 8:503-508 (1997); Aujame et al., Human Antibodies 8:155-168 (1997); Hoogenboom, Trends in Biotechnol. 15:62-70 (1997); de Kruif et al., 17:453-455 (1996); Barbas et al., Trends in Biotechnol. 14:230-234 (1996); Winter et al., Ann. Rev. Immunol. 433-455 (1994), and techniques and protocols required to generate, propagate, screen (pan), and use the antibody fragments from such libraries have recently been compiled, Barbas et al., Phage Display: A Laboratory Manual, Cold Spring Harbor Laboratory Press (2001) (ISBN 0-87969-546-3); Kay et al. (eds.), Phage Display of Peptides and Proteins: A Laboratory Manual, Academic Press, Inc. (1996); Abelson et al. (eds.), Combinatorial Chemistry, Methods in Enzymology vol. 267, Academic Press (May 1996), the disclosures of which are incorporated herein by reference in their entireties.

[1018] Typically, phage-displayed antibody fragments are scFv fragments or Fab fragments; when desired, full length antibodies can be produced by cloning the variable regions from the displaying phage into a complete antibody and expressing the full length antibody in a further prokaryotic or a eukaryotic host cell.

[1019] Eukaryotic cells are also useful for expression of the antibodies, antibody fragments, and antibody derivatives of the present invention.

[1020] For example, antibody fragments of the present invention can be produced in Pichia pastoris, Takahashi et al., Biosci. Biotechnol. Biochem. 64(10):2138-44 (2000); Freyre et al., J. Biotechnol. 76(2-3):157-63 (2000); Fischer et al., Biotechnol. Appl. Biochem. 30 (Pt 2):117-20 (1999); Pennell et al., Res. Immunol. 149(6):599-603 (1998); Eldin et al., J. Immunol. Methods. 201(1):67-75 (1997); and in Saccharomyces cerevisiae, Frenken et al., Res. Immunol. 149(6):589-99 (1998); Shusta et al., Nature Biotechnol. 16(8):773-7 (1998), the disclosures of which are incorporated herein by reference in their entireties.

[1021] Antibodies, including antibody fragments and derivatives, of the present invention can also be produced in insect cells, Li et al., Protein Expr. Purif. 21(1):121-8 (2001); Ailor et al., Biotechnol. Bioeng. 58(2-3):196-203 (1998); Hsu et al., Biotechnol. Prog. 13(l):96-104 (1997); Edelman et al., Immunology 91(1):13-9 (1997); and Nesbit et al., J. Immunol. Methods. 151(1-2):201-8 (1992), the disclosures of which are incorporated herein by reference in their entireties.

[1022] Antibodies and fragments and derivatives thereof of the present invention can also be produced in plant cells, Giddings et al., Nature Biotechnol. 18(11):1151-5 (2000); Gavilondo et al., Biotechniques 29(1):128-38 (2000); Fischer et al., J. Biol. Regul. Homeost. Agents 14(2):83-92 (2000); Fischer et al., Biotechnol. Appl. Biochem. 30 (Pt 2):113-6 (1999); Fischer et al., Biol. Chem. 380(7-8):825-39 (1999); Russell, Curr. Top. Microbiol. Immunol. 240:119-38 (1999); and Ma et al., Plant Physiol. 109(2):341-6 (1995), the disclosures of which are incorporated herein by reference in their entireties.

[1023] Mammalian cells useful for recombinant expression of antibodies, antibody fragments, and antibody derivatives of the present invention include CHO cells, COS cells, 293 cells, and myeloma cells.

[1024] Verma et al., J. Immunol. Methods 216(1-2):165-81 (1998), review and compare bacterial, yeast, insect and mammalian expression systems for expression of antibodies.

[1025] Antibodies of the present invention can also be prepared by cell free translation, as further described in Merk et al., J. Biochem. (Tokyo). 125(2):328-33 (1999) and Ryabova et al., Nature Biotechnol. 15(1):79-84 (1997), and in the milk of transgenic animals, as further described in Pollock et al., J. Immunol. Methods 231(1-2):147-57 (1999), the disclosures of which are incorporated herein by reference in their entireties.

[1026] The invention further provides antibody fragments that bind specifically to one or more of the proteins and protein fragments of the present invention, to one or more of the proteins and protein fragments encoded by the isolated nucleic acids of the present invention, or the binding of which can be competitively inhibited by one or more of the proteins and protein fragments of the present invention or one or more of the proteins and protein fragments encoded by the isolated nucleic acids of the present invention.

[1027] Among such useful fragments are Fab, Fab′, Fv, F(ab)′₂, and single chain Fv (scFv) fragments. Other useful fragments are described in Hudson, Curr. Opin. Biotechnol. 9(4):395-402 (1998).

[1028] It is also an aspect of the present invention to provide antibody derivatives that bind specifically to one or more of the proteins and protein fragments of the present invention, to one or more of the proteins and protein fragments encoded by the isolated nucleic acids of the present invention, or the binding of which can be competitively inhibited by one or more of the proteins and protein fragments of the present invention or one or more of the proteins and protein fragments encoded by the isolated nucleic acids of the present invention.

[1029] Among such useful derivatives are chimeric, primatized, and humanized antibodies; such derivatives are less immunogenic in human beings, and thus more suitable for in vivo administration, than are unmodified antibodies from non-human mammalian species.

[1030] Chimeric antibodies typically include heavy and/or light chain variable regions (including both CDR and framework residues) of immunoglobulins of one species, typically mouse, fused to constant regions of another species, typically human. See, e.g., U.S. Pat. No. 5,807,715; Morrison et al., Proc. Natl. Acad. Sci USA.81(21):6851-5 (1984); Sharon et al., Nature 309(5966):364-7 (1984); Takeda et al., Nature 314(6010):452-4 (1985), the disclosures of which are incorporated herein by reference in their entireties. Primatized and humanized antibodies typically include heavy and/or light chain CDRs from a murine antibody grafted into a non-human primate or human antibody V region framework, usually further comprising a human constant region, Riechmann et al., Nature 332(6162):323-7 (1988); Co et al., Nature 351(6326):501-2 (1991); U.S. Pat. Nos. 6,054,297; 5,821,337; 5,770,196; 5,766,886; 5,821,123; 5,869,619; 6,180,377; 6,013,256; 5,693,761; and 6,180,370, the disclosures of which are incorporated herein by reference in their entireties.

[1031] Other useful antibody derivatives of the invention include heteromeric antibody complexes and antibody fusions, such as diabodies (bispecific antibodies), single-chain diabodies, and intrabodies.

[1032] The antibodies of the present invention, including fragments and derivatives thereof, can usefully be labeled. It is, therefore, another aspect of the present invention to provide labeled antibodies that bind specifically to one or more of the proteins and protein fragments of the present invention, to one or more of the proteins and protein fragments encoded by the isolated nucleic acids of the present invention, or the binding of which can be competitively inhibited by one or more of the proteins and protein fragments of the present invention or one or more of the proteins and protein fragments encoded by the isolated nucleic acids of the present invention.

[1033] The choice of label depends, in part, upon the desired use.

[1034] For example, when the antibodies of the present invention are used for immunohistochemical staining of tissue samples, the label can usefully be an enzyme that catalyzes production and local deposition of a detectable product.

[1035] Enzymes typically conjugated to antibodies to permit their immunohistochemical visualization are well known, and include alkaline phosphatase, β-galactosidase, glucose oxidase, horseradish peroxidase (HRP), and urease. Typical substrates for production and deposition of visually detectable products include o-Nitrophenyl-beta-D-galactopyranoside (ONPG); o-Phenylenediamine Dihydrochloride (OPD); p-Nitrophenyl Phosphate (PNPP); p-Nitrophenyl-beta-D-galactopryanoside (PNPG); 3′,3′Diaminobenzidine (DAB); 3-Amino-9-ethylcarbazole (AEC); 4-Chloro-l-naphthol (CN); 5-Bromo-4-chloro-3-indolyl-phosphate (BCIP); ABTS®; BluoGal; iodonitrotetrazolium (INT); nitroblue tetrazolium chloride (NBT); phenazine methosulfate (PMS); phenolphthalein monophosphate (PMP); tetramethyl benzidine (TMB); tetranitroblue tetrazolium (TNBT); X-Gal; X-Gluc; and X-Glucoside.

[1036] Other substrates can be used to produce products for local deposition that are luminescent. For example, in the presence of hydrogen peroxide (H₂O₂), horseradish peroxidase (HRP) can catalyze the oxidation of cyclic diacylhydrazides, such as luminol. Immediately following the oxidation, the luminol is in an excited state (intermediate reaction product), which decays to the ground state by emitting light. Strong enhancement of the light emission is produced by enhancers, such as phenolic compounds. Advantages include high sensitivity, high resolution, and rapid detection without radioactivity and requiring only small amounts of antibody. See, e.g., Thorpe et al., Methods Enzymol. 133:331-53 (1986); Kricka et al., J. Immunoassay 17(1):67-83 (1996); and Lundqvist et al., J. Biolumin. Chemilumin. 10(6):353-9 (1995), the disclosures of which are incorporated herein by reference in their entireties. Kits for such enhanced chemiluminescent detection (ECL) are available commercially.

[1037] The antibodies can also be labeled using colloidal gold.

[1038] As another example, when the antibodies of the present invention are used, e.g., for flow cytometric detection, for scanning laser cytometric detection, or for fluorescent immunoassay, they can usefully be labeled with fluorophores.

[1039] There are a wide variety of fluorophore labels that can usefully be attached to the antibodies of the present invention.

[1040] For flow cytometric applications, both for extracellular detection and for intracellular detection, common useful fluorophores can be fluorescein isothiocyanate (FITC), allophycocyanin (APC), R-phycoerythrin (PE), peridinin chlorophyll protein (PerCP), Texas Red, Cy3, Cy5, fluorescence resonance energy tandem fluorophores such as PerCP-Cy5.5, PE-Cy5, PE-Cy5.5, PE-Cy7, PE-Texas Red, and APC-Cy7.

[1041] Other fluorophores include, inter alia, Alexa Fluor® 350, Alexa Fluor® 488, Alexa Fluor® 532, Alexa Fluor® 546, Alexa Fluor® 568, Alexa Fluor® 594, Alexa Fluor® 647 (monoclonal antibody labeling kits available from Molecular Probes, Inc., Eugene, Oreg., USA), BODIPY dyes, such as BODIPY 493/503, BODIPY FL, BODIPY R6G, BODIPY 530/550, BODIPY TMR, BODIPY 558/568, BODIPY 558/568, BODIPY 564/570, BODIPY 576/589, BODIPY 581/591, BODIPY TR, BODIPY 630/650, BODIPY 650/665, Cascade Blue, Cascade Yello, Dansyl, lissamine rhodamine B, Marina Blue, Oregon Green 488, Oregon Green 514, Pacific Blue, rhodamine 6G, rhodamine green, rhodamine red, tetramethylrhodamine, Texas Red (available from Molecular Probes, Inc., Eugene, Oreg., USA), and Cy2, Cy3, Cy3.5, Cy5, Cy5.5, Cy7, all of which are also useful for fluorescently labeling the antibodies of the present invention.

[1042] For secondary detection using labeled avidin, streptavidin, captavidin or neutravidin, the antibodies of the present invention can usefully be labeled with biotin.

[1043] When the antibodies of the present invention are used, e.g., for western blotting applications, they can usefully be labeled with radioisotopes, such as 33P, 32P, 35S, ³H, and ¹²⁵I.

[1044] As another example, when the antibodies of the present invention are used for radioimmunotherapy, the label can usefully be ²²⁸Th, ²²⁷Ac, ²²⁵Ac, ²²³Ra, ²¹³Bi, ²¹²Pb, ²¹²Bi, ²¹¹At, ²⁰³Pb, ¹⁹⁴Os, ¹⁸⁸Re, ¹⁵³Re. ¹⁵³Sm, ¹⁴⁹Tb, ¹³¹I, ¹²⁵I, ¹¹¹In, ¹⁰⁵Rh, ^{99m}mTc, ⁹⁷Ru, ⁹⁰Y, ⁹⁰Sr, ⁸⁸Y, ⁷²Se, ⁶⁷Cu, or ⁴⁷Sc.

[1045] As another example, when the antibodies of the present invention are to be used for in vivo diagnostic use, they can be rendered detectable by conjugation to MRI contrast agents, such as gadolinium diethylenetriaminepentaacetic acid (DTPA), Lauffer et al., Radiology 207(2):529-38 (1998), or by radioisotopic labeling As would be understood, use of the labels described above is not restricted to the application as for which they were mentioned.

[1046] The antibodies of the present invention, including fragments and derivatives thereof, can also be conjugated to toxins, in order to target the toxin's ablative action to cells that display and/or express the proteins of the present invention. Commonly, the antibody in such immunotoxins is conjugated to Pseudomonas exotoxin A, diphtheria toxin, shiga toxin A, anthrax toxin lethal factor, or ricin. See Hall (ed.), Immunotoxin Methods and Protocols (Methods in Molecular Biology, Vol 166), Humana Press (2000) (ISBN:0896037754); and Frankel et al. (eds.), Clinical Applications of Immunotoxins, Springer-Verlag New York, Incorporated (1998) (ISBN:3540640975), the disclosures of which are incorporated herein by reference in their entireties, for review.

[1047] The antibodies of the present invention can usefully be attached to a substrate, and it is, therefore, another aspect of the invention to provide antibodies that bind specifically to one or more of the proteins and protein fragments of the present invention, to one or more of the proteins and protein fragments encoded by the isolated nucleic acids of the present invention, or the binding of which can be competitively inhibited by one or more of the proteins and protein fragments of the present invention or one or more of the proteins and protein fragments encoded by the isolated nucleic acids of the present invention, attached to a substrate.

[1048] Substrates can be porous or nonporous, planar or nonplanar.

[1049] For example, the antibodies of the present invention can usefully be conjugated to filtration media, such as NHS-activated Sepharose or CNBr-activated Sepharose for purposes of immunoaffinity chromatography.

[1050] For example, the antibodies of the present invention can usefully be attached to paramagnetic microspheres, typically by biotin-streptavidin interaction, which microsphere can then be used for isolation of cells that express or display the proteins of the present invention. As another example, the antibodies of the present invention can usefully be attached to the surface of a microtiter plate for ELISA.

[1051] As noted above, the antibodies of the present invention can be produced in prokaryotic and eukaryotic cells. It is, therefore, another aspect of the present invention to provide cells that express the antibodies of the present invention, including hybridoma cells, B cells, plasma cells, and host cells recombinantly modified to express the antibodies of the present invention.

[1052] In yet a further aspect, the present invention provides aptamers evolved to bind specifically to one or more of the proteins and protein fragments of the present invention, to one or more of the proteins and protein fragments encoded by the isolated nucleic acids of the present invention, or the binding of which can be competitively inhibited by one or more of the proteins and protein fragments of the present invention or one or more of the proteins and protein fragments encoded by the isolated nucleic acids of the present invention.

[1053] Business Methods

[1054] As mentioned above, the genome-derived single exon probes and microarrays of the present invention are useful in methods of doing business. In another aspect, therefore, the present invention provides such methods of doing business.

[1055] A first such method comprises: selling and/or licensing genome-derived single-exon microarrays to a customer desiring to measure gene expression, in consideration of fees paid by such customer.

[1056] Such methods can usefully be implemented on a computer. In such computerized embodiments, the method comprises: making available for computerized query a database having a record corresponding to each genome-derived single exon microarray available for sale and/or license; responding to a customer query of the database by returning to the customer at least one record, or an identifier of that record, that best meets the customer query criteria; and offering for sale or license to the querying customer the genome-derived single exon microarray identified in that at least one record.

[1057] This method can usefully be implemented by making the database resident on a server computer and available for query by a remotely located client, for example by query over the Internet, an intranet, LAN or WAN. The method can usefully include a later step of permitting the customer to place an order for the identified microarray. This later step can usefully employ the one-click method described and claimed in U.S. Pat. No. 5,960,411, incorporated herein by reference in its entirety.

[1058] The genome-derived single exon microarrays of the present invention, as final products, have utility in a second method of doing business, the method comprising designing and/or manufacturing a genome-derived single exon microarray, in consideration of fees paid by those desiring a custom nucleic acid microarray, that has genome-derived single exon probes sharing at least one common attribute.

[1059] Such method can usefully be implemented on a computer. In such computerized embodiments, the method comprises: receiving from a customer at least one criterion for common probe attribute, such as tissue of expression; using the at least one criterion to identify within a database having records corresponding to available genome-derived single exon probes those that meet the criterion; and then disposing such identified probes on a support substrate capable of functioning in microarray hybridization experiments. Examples 5-14, infra, identify the level of expression in one or more of ten tissues or cell types of 16,834 human genome-derived single exon probes, each of which is specifically useful in such a method.

[1060] The genome-derived single exon microarrays of the present invention are further useful in a third method of doing business, wherein expression data obtained from use of the genome-derived single exon probes and genome-derived single exon microarrays of the present invention are made available by subscription to customers that desire such information, in consideration for fees.

[1061] This aspect of the invention can usefully be implemented on a computer. In such computerized embodiments, the method comprises: making available to a subscription client for computerized query a database having records containing expression data generated using genome-derived single exon probes disposed upon microarrays; and responding to a customer query of the database by returning to the customer at least one record, or an identifier of the at least one record, that best meets the customer query criteria. Each of examples 5-14 presents records from such a database, organized by tissue and/or cell type, and collectively containing expression data for 16,834 single exon probes collectively including 16,465 individual exons.

[1062] The response to the customer in this method can usefully return only the amount of information minimally required to permit the customer to decide whether to pay for further information from the identified record or records. The method can also usefully include a later step of permitting the customer to place an order for the identified microarray. This later step can usefully employ the one-click method described and claimed in U.S. Pat. No. 5,960,411, incorporated herein by reference in its entirety. The third method of doing business, in each of its embodiments, can usefully be performed by making the database resident on a server computer and available for query by a remotely located client, for example by query over the Internet, an intranet, a LAN or WAN.

[1063] Thus, the genome-derived single exon nucleic acid microarrays of the present invention are further useful in a method of doing business, the method comprising: advertising the availability for distribution, sale, or license of genome-derived single exon probes, microarrays, and/or data therefrom; and then selling stock in the company. This method can usefully be implemented on a computer, wherein the advertising is performed on an Internet web page, in an Internet chat room, and/or a Usenet newsgroup; and wherein the stock sale is consummated through an electronic brokerage.

[1064] The following examples are offered by way of illustration and not by way of limitation.

### EXAMPLE 1

### Preparation of Single Exon Microarrays from Exons Predicted in Human Genomic Sequence

[1065] Bioinformatics Results

[1066] All human BAC sequences in fewer than 10 pieces that had been accessioned in a five month period immediately preceding this study were downloaded from GenBank. This corresponds to ≈2200 clones, totaling ≈350 MB of sequence, or approximately 10% of the human genome.

[1067] After masking repetitive elements using the program CROSS_MATCH, the sequence was analyzed for open reading frames using three separate gene finding programs. The three programs predict genes using independent algorithmic methods developed on independent training sets: GRAIL uses a neural network, GENEFINDER uses a hidden Markoff model, and DICTION, a program proprietary to Genetics Institute, operates according to a different heuristic. The results of all three programs were used to create a prediction matrix across the segment of genomic DNA.

[1068] The three gene finding programs yielded a range of results. GRAIL identified the greatest percentage of genomic sequence as putative coding region, 2% of the data analyzed. GENEFINDER was second, calling 1%, and DICTION yielded the least putative coding region, with 0.8% of genomic sequence called as coding region.

[1069] The consensus data were as follows. GRAIL and GENEFINDER agreed on 0.7% of genomic sequence, GRAIL and DICTION agreed on 0.5% of genomic sequence, and the three programs together agreed on 0.25% of the data analyzed. That is, 0.25% of the genomic sequence was identified by all three of the programs as containing putative coding region.

[1070] Exons predicted by any two of the three programs (“consensus exons”) were assorted into “gene bins” using two criteria: (1) any 7 consecutive exons within a 25 kb window were placed together in a bin as likely contributing to a single gene, and (2) all exons within a 25 kb window were placed together in a bin as likely contributing to a single gene if fewer than 7 exons were found within the 25 kb window. PCR

[1071] The largest exon from each gene bin that did not span repetitive sequence was then chosen for amplification, as were all consensus exons longer than 500 bp. This method approximated one exon per gene; however, a number of genes were found to be represented by multiple elements.

[1072] Previously, we had determined that DNA fragments fewer than 250 bp in length do not bind well to the amino-modified glass surface of the slides used as support substrate for construction of microarrays; therefore, amplicons were designed in the present experiments to approximate 500 bp in length.

[1073] Accordingly, after selecting the largest exon per gene bin, a 500 bp fragment of sequence centered on the exon was passed to the primer picking software, PRIMER3 (available online for use at http://www-genome.wi.mit.edu/cgi-bin/primer/). A first additional sequence was commonly added to each exon-unique 5′ primer, and a second, different, additional sequence was commonly added to each exon-unique 3′ primer, to permit subsequent reamplification of the amplicon using a single set of “universal” 5′ and 3′ primers, thus immortalizing the amplicon. The addition of universal priming sequences also facilitates sequence verification, and can be used to add a cloning site should some exons be found to warrant further study.

[1074] The exons were then PCR amplified from genomic DNA, verified on agarose gels, and sequenced using the universal primers to validate the identity of the amplicon to be spotted in the microarray.

[1075] Primers were supplied by Operon Technologies (Alameda, Calif.). PCR amplification was performed by standard techniques using human genomic DNA (Clontech, Palo Alto, Calif.) as template. Each PCR product was verified by SYBR® green (Molecular Probes, Inc., Eugene, Oreg.) staining of agarose gels, with subsequent imaging by Fluorimager (Molecular Dynamics, Inc., Sunnyvale, Calif.). PCR amplification was classified as successful if a single band appeared.

[1076] The success rate for amplifying exons of interest directly from genomic DNA using PCR was approximately 75%. FIG. 5 graphs the distribution of predicted exon length and distribution of amplified PCR products, with exon length shown by dashed line and PCR product length shown by solid line. Although the range of exon sizes is readily seen to extend to beyond 900 bp, the mean predicted exon size was only 229 bp, with a median size of 150 bp (n=9498). With an average amplicon size of 475±25 bp, approximately 50% of the average PCR amplification product contained predicted coding region, with the remaining 50% of the amplicon containing either intron, intergenic sequence, or both.

[1077] Using a strategy predicated on amplifying about 500 bp, it was found that long exons had a higher PCR failure rate. To address this, the bioinformatics process was adjusted to amplify 1000, 1500 or 2000 bp fragments from exons larger than 500 bp. This improved the rate of successful amplification of exons exceeding 500 bp, constituting about 9.2% of the exons predicted by the gene finding algorithms.

[1078] Approximately 75% of the probes disposed on the array (90% of those that successfully PCR amplified) were sequence-verified by sequencing in both the forward and reverse direction using MegaBACE sequencer (Molecular Dynamics, Inc., Sunnyvale, Calif.), universal primers, and standard protocols.

[1079] Some genomic clones (BACs) yielded very poor PCR and sequencing results. The reasons for this are unclear, but may be related to the quality of early draft sequence or the inclusion of vector and host contamination in some submitted sequence data.

[1080] Although the intronic and intergenic material flanking coding regions could theoretically interfere with hybridization during microarray experiments, subsequent empirical results demonstrated that differential expression ratios were not significantly affected by the presence of noncoding sequence. The variation in exon size was similarly found not to affect differential expression ratios significantly; however, variation in exon size was observed to affect the absolute signal intensity (data not shown).

[1081] The 350 MB of genomic DNA was, by the above-described process, reduced to 9750 discrete probes, which were spotted in duplicate onto glass slides using commercially available instrumentation (MicroArray GenII Spotter and/or MicroArray GenIII Spotter, Molecular Dynamics, Inc., Sunnyvale, Calif.). Each slide additionally included either 16 or 32 E. coli genes, the average hybridization signal of which was used as a measure of background biological noise.

[1082] Each of the probe sequences was BLASTed against the human EST data set, the NR data set, and SwissProt GenBank (May 7, 1999 release 2.0.9).

[1083] One third of the probe sequences (as amplified) produced an exact match (BLAST Expect (“E”) values less than 1 e-100) (i.e., 1×10⁻¹⁰⁰) to either an EST (20% of sequences) or a known mRNA (13% of sequences). A further 22% of the probe sequences showed some homology to a known EST or mRNA (BLAST E values from 1e−5 to 1e−99) (1×10⁻⁵ to 1×10⁻⁹⁹). The remaining 45% of the probe sequences showed no significant sequence homology to any expressed, or potentially expressed, sequences present in public databases.

[1084] All of the probe sequences (as amplified) were then analyzed for protein similarities with the SwissProt database using BLASTX, Gish et al., Nature Genet. 3:266 (1993). The predicted functional breakdowns of the ⅔ of probes identical or homologous to known sequences are presented in Table 1.

TABLE 1
Function of Predicted Exons As Deduced From
Comparative Sequence Analysis

| | | | Function Predicted from |
|---|---|---|---|
| | | | Comparative Sequence |
| Total | V6 chip | V7 chip | Analysis |
| 211 | 96 | 115 | Receptor |
| 120 | 43 | 77 | Zinc Finger |
| 30 | 11 | 19 | Homeobox |
| 25 | 9 | 16 | Transcription Factor |
| 17 | 11 | 7 | Transcription |
| 118 | 57 | 61 | Structural |
| 95 | 39 | 56 | Kinase |
| 36 | 18 | 18 | Phosphatase |
| 83 | 31 | 52 | Ribosomal |
| 45 | 19 | 26 | Transport |
| 21 | 7 | 14 | Growth Factor |
| 17 | 12 | 5 | Cytochrome |
| 50 | 33 | 17 | Channel |

[1085] As can be seen, the two most common types of genes were transcription factors and receptors, making up 2.2% and 1.8% of the arrayed elements, respectively.

### EXAMPLE 2

### Gene Expression Measurements From Genome-derived Single Exon Microarrays

[1086] The two genome-derived single exon microarrays prepared according to Example 1 were hybridized in a series of simultaneous two-color fluorescence experiments to (1) Cy3-labeled cDNA synthesized from message drawn individually from each of brain, heart, liver, fetal liver, placenta, lung, bone marrow, HeLa, BT 474, or HBL 100 cells, and (2) Cy5-labeled cDNA prepared from message pooled from all ten tissues and cell types, as a control in each of the measurements. Hybridization and scanning were carried out using standard protocols and Molecular Dynamics equipment.

[1087] Briefly, MRNA samples were bought from commercial sources (Clontech, Palo Alto, Calif. and Amersham Pharmacia Biotech (APB)). Cy3-dCTP and Cy5-dCTP (both from APB) were incorporated during separate reverse transcriptions of 1 μg of polyA⁺ mRNA performed using 1 μg oligo(dT)12-18 primer and 2 μg random 9mer primers as follows. After heating to 70° C., the RNA:primer mixture was snap cooled on ice. After snap cooling on ice, added to the RNA to the stated final concentration was: 1× Superscript II buffer, 0.01 M DTT, 100μM DATP, 100 μM dGTP, 100 μM dTTP, 50 μM dCTP, 50 μM Cy3-dCTP or Cy5-dCTP 50 μM, and 200 U Superscript II enzyme. The reaction was incubated for 2 hours at 42° C. After 2 hours, the first strand cDNA was isolated by adding 1 U Ribonuclease H, and incubating for 30 minutes at 37° C. The reaction was then purified using a Qiagen PCR cleanup column, increasing the number of ethanol washes to 5. Probe was eluted using 10 mM Tris pH 8.5.

[1088] Using a spectrophotometer, probes were measured for dye incorporation. Volumes of both Cy3 and Cy5 cDNA corresponding to 50 pmoles of each dye were then dried in a Speedvac, resuspended in 30 μl hybridization solution containing 50% formamide, 5× SSC, 0.2 μg/μl poly(dA), 0.2 μg/μl human cₒt1 DNA, and 0.5% SDS.

[1089] Hybridizations were carried out under a coverslip, with the array placed in a humid oven at 42° C. overnight. Before scanning, slides were washed in 1× SSC, 0.2% SDS at 55° C. for 5 minutes, followed by 0.1× SSC, 0.2% SDS, at 55° C. for 20 minutes. Slides were briefly dipped in water and dried thoroughly under a gentle stream of nitrogen.

[1090] Slides were scanned using a Molecular Dynamics Gen3 scanner, as described. Schena (ed.), Microarray Biochip: Tools and Technology, Eaton Publishing Company/BioTechniques Books Division (2000) (ISBN: 1881299376).

[1091] Although the use of pooled cDNA as a reference permitted the survey of a large number of tissues, it attenuates the measurement of relative gene expression, since every highly expressed gene in the tissue/cell type-specific fluorescence channel will be present to a level of at least 10% in the control channel. Because of this fact, both signal and expression ratios (the latter hereinafter, “expression” or “relative expression”) for each probe were normalized using the average ratio or average signal, respectively, as measured across the whole slide.

[1092] Data were accepted for further analysis only when signal was at least three times greater than biological noise, the latter defined by the average signal produced by the E. coli control genes.

[1093] The relative expression signal for these probes was then plotted as a function of tissue or cell type, and is presented in FIG. 6.

[1094] FIG. 6 shows the distribution of expression across a panel of ten tissues. The graph shows the number of sequence-verified products that were either not expressed (“0”), expressed in one or more but not all tested tissues (“1” - “9”), and expressed in all tissues tested (“10”).

[1095] Of 9999 arrayed elements on the two microarrays (including positive and negative controls and “failed” products), 2353 (51%) were expressed in at least one tissue or cell type. Of the gene elements showing significant signal—where expression was scored as “significant” if the normalized Cy3 signal was greater than 1, representing signal 5-fold over biological noise (0.2)—39% (991) were expressed in all 10 tissues. The next most common class (15%) consisted of gene elements expressed in only a single tissue.

[1096] The genes expressed in a single tissue were further analyzed, and the results of the analyses are compiled in FIG. 7.

[1097] FIG. 7A is a matrix presenting the expression of all verified sequences that showed signal intensity greater than 3 in at least one tissue. Each clone is represented by a column in the matrix. Each of the 10 tissues assayed is represented by a separate row in the matrix, and relative expression (expression ratio) of a clone in that tissue is indicated at the respective node by intensity of green shading, with the intensity legend shown in panel B. The top row of the matrix (“EST Hit”) contains “bioinformatic” rather than “physical” expression data—that is, presents the results returned by query of EST, NR and SwissProt databases using the probe sequence. The legend for “bioinformatic expression” (i.e., degree of homology returned) is presented in panel C. Briefly, white is known, black is novel, with gray depicting nonidentical with significant homology. “E”xpect values are: white—E values<1e−100) (i.e., <1×10⁻¹⁰⁰); gray—E values from 1e−05 to 1e−99 (i.e., 1×10⁻⁵ to 1×10⁻⁹⁹); black—E values>1e−05 (i.e., >1×10⁻⁵).

[1098] As FIG. 7 readily shows, heart and brain were demonstrated to have the greatest numbers of genes that were shown to be uniquely expressed in the respective tissue. In brain, 200 uniquely expressed genes were identified; in heart, 150. The remaining tissues gave the following figures for uniquely expressed genes: liver, 100; lung, 70; fetal liver, 150; bone marrow, 75; placenta, 100; HeLa, 50; HBL, 100; and BT474, 50.

[1099] It was further observed that there were many more “novel” genes among those that were up-regulated in only one tissue, as compared with those that were down-regulated in only one tissue. In fact, it was found that exons whose expression was measurable in only a single of the tested tissues were represented in sequencing databases at a rate of only 11%, whereas 36% of the exons whose expression was measurable in 9 of the tissues were present in public databases. As for those exons expressed in all ten tissues, fully 45% were present in existing expressed sequence databases. These results are not unexpected, since genes expressed in a greater number of tissues have a higher likelihood of being, and thus of having been, discovered by EST approaches.

[1100] Comparison of Signal from Known and Unknown Genes

[1101] The normalized signal of the genes found to have high homology to genes present in the GenBank human EST database were compared to the normalized signal of those genes not found in the GenBank human EST database. The data are shown in FIG. 8.

[1102] FIG. 8 shows in dashed line the normalized Cy3 signal intensity for all sequence-verified products with a BLAST Expect (“E”) value of greater than 1e−30 (designated “unknown”) upon query of existing EST, NR and SwissProt databases, and shows in blue the normalized Cy3 signal intensity for all sequence-verified products with a BLAST Expect value of less than 1e−30 (“known”). Note that biological background noise has an averaged normalized Cy3 signal intensity of 0.2.

[1103] As expected, the most highly expressed of the exons were “known” genes. This is not surprising, since very high signal intensity correlates with very commonly-expressed genes, which have a higher likelihood of being found by EST sequence.

[1104] However, a significant point is that a large number of even the high expressers were “unknown”. Since the genomic approach used to identify genes and to confirm their expression does not bias exons toward either the 3′ or 5′ end of a gene, many of these high expression genes will not have been detected in an end-sequenced cDNA library.

[1105] The significant point is that presence of the gene in an EST database is not a prerequisite for incorporation into a genome-derived microarray, and further, that arraying such “unknown” exons can help to assign function to as-yet undiscovered genes.

[1106] Verification of Gene Expression

[1107] To ascertain the validity of the approach described above to identify genes from raw genomic sequence, expression of two of the probes was assayed using reverse transcriptase polymerase chain reaction (RT PCR) and northern blot analysis.

[1108] Two microarray probes were selected on the basis of exon size, prior sequencing success, and tissue-specific gene expression patterns as measured by the microarray experiments. The primers originally used to amplify the two respective exons from genomic DNA were used in RT PCR against a panel of tissue-specific cDNAs (Rapid-Scan gene expression panel 24 human cDNAs) (OriGene Technologies, Inc., Rockville, Md.).

[1109] Sequence AL079300_{—}1 was shown by microarray hybridization to be present in cardiac tissue, and sequence AL031734_{—}1 was shown by microarray experiment to be present in placental tissue (data not shown). RT-PCR on these two sequences confirmed the tissue-specific gene expression as measured by microarrays, as ascertained by the presence of a correctly sized PCR product from the respective tissue type cDNAs.

[1110] Clearly, all microarray results cannot, and indeed should not, be confirmed by independent assay methods, or the high throughput, highly parallel advantages of microarray hybridization assays will be lost. However, in addition to the two RT-PCR results presented above, the observation that ⅓ of the arrayed genes exist in expression databases provides powerful confirmation of the power of our methodology—which combines bioinformatic prediction with expression confirmation using genome-derived single exon microarrays—to identify novel genes from raw genomic data.

[1111] To verify that the approach further provides correct characterization of the expression patterns of the identified genes, a detailed analysis was performed of the microarrayed sequences that showed high signal in brain.

[1112] For this latter analysis, sequences that showed high (normalized) signal in brain, but which showed very low (normalized) signal (less than 0.5, determined to be biological noise) in all other tissues, were further studied. There were 82 sequences that fit these criteria, approximately 2% of the arrayed elements. The 10 sequences showing the highest signal in brain in microarray hybridizations are detailed in Table 2, along with assigned function, if known or reasonably predicted.

TABLE 2
Function of the Most Highly
Expressed Genes Expressed Only in Brain

| | | | Homology | |
|---|---|---|---|---|
| | | | to EST | |
| Microarray | Normal- | Expres- | present | Gene Function |
| Sequence | ized | sion | in | as described |
| Name | Signal | Ratio | GenBank | by GenBank |
| AP000217-1 | 5.2 | +7.7 | High | S-100 protein, |
| | | | | b-chain, Ca²⁺ |
| | | | | binding |
| | | | | protein |
| | | | | expressed in |
| | | | | central |
| | | | | nervous system |
| AP000047-1 | 2.3 | | High | Unknown |
| | | | | Function |
| AC006548-9 | 1.7 | | High | Similar to |
| | | | | mouse membrane |
| | | | | glyco-protein |
| | | | | M6, expressed |
| | | | | in central |
| | | | | nervous system |
| AC007245-5 | 1.5 | | High | Similar to |
| | | | | amphiphysin, a |
| | | | | synaptic |
| | | | | vesicle- |
| | | | | associated |
| | | | | protein. Ref |
| | | | | 21 |
| L44140-4 | 1.2 | +2.0 | High | Endothelial |
| | | | | actin-binding |
| | | | | protein found |
| | | | | in nonmuscle |
| | | | | filamin |
| AC004689-9 | 1.2 | +3.5 | High | Protein |
| | | | | Phosphatase |
| | | | | PP2A, |
| | | | | neuronal/ |
| | | | | downregulates |
| | | | | activated |
| | | | | protein |
| | | | | kinases |
| AL031657-1 | 1.2 | +3.0 | High | Unknown |
| | | | | function/ |
| | | | | Contains the |
| | | | | anhyrin motif, |
| | | | | a common |
| | | | | protein |
| | | | | sequence motif |
| AC009266-2 | 1.1 | +3.7 | Low | Low homology |
| | | | | to the |
| | | | | Synaptotagmin |
| | | | | I protein in |
| | | | | rat/present at |
| | | | | low levels |
| | | | | throughout rat |
| | | | | brain |
| AP000086-1 | 1.0 | +2.7 | Low | Unknown, very |
| | | | | poor homology |
| | | | | to collagen |
| AC004689-3 | 1.0 | | High | Protein |
| | | | | Phosphatase |
| | | | | PP2A, |
| | | | | neuronal/ |
| | | | | downregulates |
| | | | | activated |
| | | | | protein |
| | | | | kinases |

[1113] Of the ten sequences studied by these latter confirmatory approaches, eight were previously known. Of these eight, six had previously been reported to be important in the central nervous system or brain. The exon giving the highest signal (AP00217-1) was found to be the gene encoding an S100B Ca²⁺ binding protein, reported in the literature to be highly and uniquely expressed in the central nervous system. Heizmann, Neurochem. Res. 9:1097 (1997).

[1114] A number of the brain-specific probe sequences (including AC006548-9, AC009266-2) did not have homology to any known human cDNAs in GenBank but did show homology to rat and mouse cDNAs. Sequences AC004689-9 and AC004689-3 were both found to be phosphatases present in neurons (Millward et al., Trends Biochem. Sci. 24(5):186-191 (1999)). Two microarray sequences, AP000047-1 and AP000086-1 have unknown function, with AP000086-1 being absent from GenBank. Functionality can now be narrowed down to a role in the central nervous system for both of these genes, showing the power of designing microarrays in this fashion.

[1115] Next, the function of the chip sequences with the highest (normalized) signal intensity in brain, regardless of expression in other tissues, was assessed. In this latter analysis, we found expression of many more common genes, since the sequences were not limited to those expressed only in brain. For example, looking at the 20 highest signal intensity spots in brain, 4 were similar to tubulin (AC00807905; AF146191-2; AC007664-4; AF14191-2), 2 were similar to actin (AL035701-2; AL034402-1), and 6 were found to be homologous to glyceraldehyde-3-phosphate dehydrogenase (GAPDH) (AL035604-1; Z86090-1; AC006064-L, AC006064-K; AC035604-3; AC006064-L). These genes are often used as controls or housekeeping genes in microarray experiments of all types.

[1116] Other interesting genes highly expressed in brain were a ferritin heavy chain protein, which is reported in the literature to be found in brain and liver (Joshi et al., J. Neurol. Sci. 134(Suppl):52-56 (1995)), a result confirmed with the array. Other highly expressed chip sequences included a translation elongation factor 1α (AC007564-4), a DEAD-box homolog (AL023804-4), and a Y-chromosome RNA-binding motif (Chai et al., Genomics 49(2):283-89 (1998))(AC007320-3). A low homology analog (AP00123-½) to a gene, DSCR1, thought to be involved in trisomy 21 (Down's syndrome), showed high expression in both brain and heart, in agreement with the literature (Fuentes et al., Mol. Genet. 4(10):1935-44 (1995)).

[1117] As a further validation of the approach, we selected the BAC AC006064 to be included on the array. This BAC was known to contain the GAPDH gene, and thus could be used as a control for the exon selection process. The gene finding and exon selection algorithms resulted in choosing 25 exons from BAC AC006064 for spotting onto the array, of which four were drawn from the GAPDH gene. Table 3 shows the comparison of the average expression ratio for the 4 exons from BAC006064 compared with the average expression ratio for 5 different dilutions of a commercially available GAPDH cDNA (Clontech).

TABLE 3
Comparison of Expression Ratio, for each tissue, of
GAPDH

| | AC006064 (n = 4) | Control ( n = 5) |
|---|---|---|
| Bone Marrow | −1.81 ± 0.11 | −1.85 ± 0.08 |
| Brain | −1.41 ± 0.11 | −1.17 ± 0.05 |
| BT474 | 1.85 ± 0.09 | 1.66 ± 0.12 |
| Fetal Liver | −1.62 ± 0.07 | −1.41 ± 0.05 |
| HBL100 | 1.32 ± 0.05 | 2.64 ± 0.12 |
| Heart | 1.16 ± 0.09 | 1.56 ± 0.10 |
| HeLa | 1.11 ± 0.06 | 1.30 ± 0.15 |
| Liver | −1.62 ± 0.22 | −2.07 ± |
| Lung | −4.95 ± 0.93 | −3.75 ± 0.21 |
| Placenta | −3.56 ± 0.25 | −3.52 ± 0.43 |

[1118] Each tissue shows excellent agreement between the experimentally chosen exons and the control, again demonstrating the validity of the present exon mining approach. In addition, the data also show the variability of expression of GAPDH within tissues, calling into question its classification as a housekeeping gene and utility as a housekeeping control in microarray experiments.

### EXAMPLE 3

### Representation of Sequence and Expression Data as a “Mondrian ”

[1119] For each genomic clone processed for microarray as above-described, a plethora of information was accumulated, including full clone sequence, probe sequence within the clone, results of each of the three gene finding programs, EST information associated with the probe sequences, and microarray signal and expression for multiple tissues, challenging our ability to display the information.

[1120] Accordingly, we devised a new tool for visual display of the sequence with its attendant annotation which, in deference to its visual similarity to the paintings of Piet Mondrian, is hereinafter termed a “Mondrian”. FIGS. 3 and 4 present the key to the information presented on a Mondrian.

[1121] FIG. 9 presents a Mondrian of BAC AC008172 (bases 25,000 to 130,000 shown), containing the carbamyl phosphate synthetase gene (AF154830.1). Purple background within the region shown as field 81 in FIG. 3 indicates all 37 known exons for this gene.

[1122] As can be seen, GRAIL II successfully identified 27 of the known exons (73%), GENEFINDER successfully identified 37 of the known exons (100%), while DICTION identified 7 of the known exons (19%).

[1123] Seven of the predicted exons were selected for physical assay, of which 5 successfully amplified by PCR and were sequenced. These five exons were all found to be from the same gene, the carbamyl phosphate synthetase gene (AF154830.1).

[1124] The five exons were arrayed, and gene expression measured across 10 tissues. As is readily seen in the Mondrian, the five chip sequences on the array show identical expression patterns, elegantly demonstrating the reproducibility of the system.

[1125] FIG. 10 is a Mondrian of BAC AL049839. We selected 12 exons from this BAC, of which 10 successfully sequenced, which were found to form between 5 and 6 genes. Interestingly, 4 of the genes on this BAC are protease inhibitors. Again, these data elegantly show that exons selected from the same gene show the same expression patterns, depicted below the red line. From this figure, it is clear that our ability to find known genes is very good. A novel gene is also found from 86.6 kb to 88.6 kb, upon which all the exon finding programs agree. We are confident we have two exons from a single gene since they show the same expression patterns and the exons are proximal to each other. Backgrounds in the following colors indicate a known gene (top to bottom):

[1126] red=kallistatin protease inhibitor (P29622);

[1127] purple=plasma serine protease inhibitor (P05154);

[1128] turquoise=al anti-chymotrypsin (P01011);

[1129] mauve=40S ribosomal protein (P08865).

[1130] Note that chip sequence 8 and 12 did not sequence verify.

### EXAMPLE 4

### Genome-derived Single Exon Probes Useful for Measuring Human Gene Expression

[1131] The protocols set forth in Examples 1 and 2, supra, were applied with some modification to additional human genomic sequence as it became newly available in GenBank. From the collective efforts of these and the experiments reported in Example 2, we generated 16,834 unique human genome-derived single exon probes that could be shown to be expressed at significant levels in one or more of ten tested tissues.

[1132] Modifications to the protocols for bioinformatic prediction of exons set forth in Examples 1 and 2 were as follows.

[1133] First, we added a fourth gene prediction program, GENSCAN, to the three originally used, DICTION, GENEFINDER, and GRAIL.

[1134] Second, we increased the resolution of our exon predictions, as follows.

[1135] In the experiments reported in Examples 1 and 2, we applied a 25 bp window in scanning genomic sequence: exons were called when any two of the three gene prediction programs identified an exon anywhere within the window. In the more recent experiments, we looked for consensus on a nucleotide by nucleotide basis: when any two or more of the four programs identified the nucleotide as falling within an exon, the nucleotide was called as belonging to an exon. This had the additional benefit of merging overlapping predicted exons.

[1136] Finally, we applied a lower size threshold of 75 contiguous nucleotides to each consensus exon.

[1137] Each probe was completely sequenced on both strands prior to its use on a genome-derived single exon microarray; sequencing confirmed the exact chemical structure of each probe. An added benefit of sequencing is that it placed us in possession of a set of single base-incremented fragments of the sequenced nucleic acid, starting from the sequencing primer 3′ OH. (Since the single exon probes were first obtained by PCR amplification from genomic DNA, we were of course additionally in possession of an even larger set of single base incremented fragments of each of the 16,834 single exon probes, each fragment corresponding to an extension product from one of the two amplification primers.)

[1138] Hybridization analysis was conducted essentially as set forth in Examples 1 and 2, with one modification.

[1139] In Examples 1 and 2, we used a pool of 10 tissues/cell types as control. We have since observed that every probe that demonstrates expression in the control pool can readily be shown to be expressed in HeLa cells, and have used HeLa as the source of control message in the more recent experiments.

[1140] In the analysis of hybridization results, the uniform absolute signal intensity threshold used in Examples 1 and 2 to identify signals large enough to be considered biologically significant (0.5, representing a level roughly 10 times greater than the average of all E. coli control spots on a first iteration chip) was replaced with a statistical threshold determined for each channel and each hybridization as follows.

[1141] Starting typically with 32 E. coli sequences, spotted in duplicate (left and right side) for a total of 64 control spots per microarray, control spots were eliminated if we observed more than a five-fold difference between the left and right side raw (unnormalized) signals for the probe.

[1142] The median of the normalized signal from the remaining control spots was calculated (see infra for normalization routine).

[1143] Control spots were eliminated as outliers if they had signal intensity greater than the median of the normalized signals plus 2.4 (where 2.4 is roughly 12 times the observed standard deviation of control spot populations) and normalization was performed as set forth below.

[1144] The mean and standard deviation of the normalized signal intensity from the remaining control spots were calculated, and the mean plus three standard deviations of the controls was then applied as a minimum intensity threshold for the particular hybridization experiment, giving a 99% confidence that expression is significant.

[1145] Signal normalization was accomplished as follows. For each hybridization (each microarray, separately for each of the two colors), the median value of all of the spots was determined. For each probe, the normalized signal value is the arithmetic mean of the probe's duplicate intensities (each DNA probe, including controls, is spotted twice per slide) divided by the population median.

[1146] Using this threshold, we identified a total of 16,834 single exon probes that produce significant signal in one or more of ten tested tissues/cell types. The structures of these 16,834 single exon probes are clearly presented in the Sequence Listing appended hereto as SEQ ID NOs: 1-16,834. The 16 nt 5′ primer universal primer sequence and 16 nt 3′ universal primer sequence present on the amplicon are not included in the sequence listing, and may be found in commonly owned and copending U.S. patent application Ser. No. 09/608,408, filed Jun. 30, 2000, the disclosure of which is incorporated herein by reference in its entirety.

[1147] The sequences of the exons present within each of the single exon probes is presented in the Sequence Listing as SEQ ID NOs: 16,835-33,299. Certain of the exons appear in a plurality of probes, accounting for the slight discrepancy in the number of probe sequences versus the number of exon sequences.

[1148] We also predicted the sequence of the ORF within the exon of each of the 16,834 probes, where ORF was defined as that portion of an exon that can be translated in its entirety into a sequence of contiguous amino acids.

[1149] To predict the ORF, we first looked for consensus as between any two or more of the four gene prediction programs. Consensus was required in two parameters: (1) as with prediction of the exon, each nucleotide must have been identified by two or more programs as falling within an exon; and, additionally, (2) the programs relied upon to establish that consensus must have agreed on the frame. Presence of a stop codon disqualified the predicted ORF. ORFs shorter than 50 nt were also disregarded.

[1150] Absent consensus as to nucleotide and frame, each of the six frames of the predicted exon were examined individually for stop codons and the longest open reading frame of at least 51 nt selected as the exon's likely ORF. Certain of the exons have no ORF as defined by either set of criteria.

[1151] We then translated the predicted ORFs using the standard genetic code. Translations of the ORF-encoded peptides are presented in the Sequence Listing as SEQ ID NOs: 33,300-49,117.

[1152] Concordance as among PROBE SEQ ID NO:, EXON SEQ ID NO:, and ORF-encoded peptide SEQ ID NO: is presented collectively in Tables 4-13, presented in electronic format and incorporated by reference respectively in Examples 5-14, infra. The tables also provide the expression data for each probe.

[1153] Each example, with its respective table, presents the subset of probes that is significantly expressed in the respective tissue and/or cell type: human brain, heart, liver, fetal liver, placenta, lung, bone marrow, HeLa cells, BT 474 cells, or HBL 100 cells; each example thus presents the subset of probes that was recognized to be useful for measuring expression of their cognate genes in the respective tissue.

[1154] The sequence of each of the probes, exons, and ORF-encoded peptides was used as a query to identify the most similar sequence in each of dbEST, GenBank NR, and SWISSPROT. The query programs used were BLAST (nucleic acid sequence query of dbEST and NR), BLASTX (nucleic acid sequence query of SWISSPROT), TBLASTX (peptide sequence query of dbEST and NR), and BLASTP (peptide sequence query of SWISSPROT). Because the query sequences are themselves derived from genomic sequence in GenBank, only nongenomic hits from NR were scored.

[1155] The attached Sequence Listing reports, for each SEQ ID NO:, the accession number of the entry from each of the three queried databases that gave the highest absolute expect (“E”) value (the “top hit”), along with the “E” value itself. The Sequence Listing is incorporated herein by reference in its entirety.

[1156] Tables 4-13 provide a subset of these query results.

[1157] The smallest in value of the expect (“E”) scores for each exon query sequence across the three database divisions was used as a measure of the “expression novelty” of the probe's exon. Each of Tables 4-13 is sorted in descending order based on this measure, reported as “Most Similar (top) Hit BLAST E Value”.

[1158] As sorted, each table thus lists its respective probes from least similar to sequences known to be expressed (i.e., highest BLAST E value), at the beginning of each table, to most similar to sequences known to be expressed (i.e., lowest BLAST E value), at the bottom of each table.

[1159] Each table further provides, for each listed probe, the accession number of the database sequence that yielded the “Most Similar (top) Hit BLAST E Value” (when queried with exon sequence), along with the name of the database in which the database sequence is found (“Top Hit Database Source”), and a portion of the descriptor for the top hit (“Top Hit Descriptor”) as provided in the sequence database. For those exons that are similar in sequence, but nonidentical to known sequences (e.g., those with BLAST E values between about 1e−05 and 1e−100), the descriptor reveals the likely function of the protein encoded by the probe's exon.

[1160] Using BLAST E value cutoffs of 1e−05 (i.e., 1×10⁻⁵) and 1e−100 (i.e., 1×10⁻¹⁰⁰) as evidence of similarity to sequences known to be expressed is of course arbitrary: in Example 2, supra, a BLAST E value of 1e−30 was used as the boundary when only two classes were to be defined for analysis (unknown, >1e−30; known <1e−30) (see also FIG. 8). Furthermore, even when the “Most Similar (Top) Hit BLAST E Value” is low, e.g., less than about 1e−100—which is probative evidence that the query sequence has previously been shown to be expressed—the top hit is highly unlikely exactly to match the probe sequence.

[1161] First, such expression entries typically will not have the intronic and/or intergenic sequence present within the single exon probes listed in the Tables. Second, even the exon itself is unlikely in such cases to be present identically in the databases, since most of the EST and mRNA clones in existing databases include multiple exons, without any indication of the location of exon boundaries.

[1162] As noted, the data presented in tables 4-13 represent a subset of the data present within the appended Sequence Listing, which is incorporated herein by reference in its entirety. For each probe (SEQ ID NOs: 1-16,834), exon (SEQ ID NOs: 16,835-33,299, respectively), and ORF-encoded peptide (SEQ ID NOs: 33,300-49,117, the sequence listing further provides, through iterated annotation fields <220> and <223> (not necessarily presented in the Sequence Listing LISTING in this order):

[1163] (a) the accession number of the BAC or contig from which the sequence was derived (“MAP TO”), thus providing a link to the chromosomal map location and other information about the genomic milieu of the probe sequence;

[1164] (b) the name of each tissue or cell type in which significant expression could be demonstrated, with the expression signal in the respective tissue;

[1165] (c) the most similar sequence provided by BLAST query of the EST database, with accession number and BLAST E value for the “hit”;

[1166] (d) the most similar sequence provided by BLAST query of the GenBank NR/NT database, with accession number and BLAST E value for the “hit”; and

[1167] (e) the most similar sequence provided by BLASTX query of the SWISSPROT database, with accession number and BLAST E value for the “hit”.

### EXAMPLE 5

### Genome-derived Single Exon Probes Useful for Measuring Expression of Genes in Human Brain

[1168] Diseases of the brain and nervous system are a significant cause of human morbidity and mortality. Increasingly, genetic factors are being found that contribute to predisposition, onset, and/or aggressiveness of most, if not all, of these diseases. Although mutations in single genes have been identified as causative for some diseases of the brain and nervous system, for the most part these disorders are believed to have polygenic etiologies.

[1169] For example, over the past few decades Alzheimer's disease (AD), once considered a rare disorder, has become recognized as a major public health problem; over 4,000,000 people in the United States are now estimated to suffer with various stages of this progressive, degenerative brain disorder.

[1170] Although there is no agreement on the exact incidence or prevalence of Alzheimer's disease, in part due to varying diagnostic criteria and difficulties of differential diagnosis among dementias, the studies are consistent in pointing to an exponential rise in prevalence of this disease with age. After age 65, the percentage of affected people approximately doubles with every decade of life, regardless of definition. Among people age 85 or older, studies suggest that 25 to 35 percent have dementia, including Alzheimer's disease; one study reports that 47.2 percent of people over age 85 have Alzheimer's disease, exclusive of other dementias.

[1171] Alzheimer's disease progressively destroys memory, reason, judgment, language, and, eventually, the ability to carry out even the simplest of tasks. Anatomic changes associated with Alzheimer's disease begin in the entorhinal cortex, proceed to the hippocampus, and then gradually spread to other regions, particularly the cerebral cortex. Chief among such anatomic changes are the presence of characteristic extracellular plaques and internal neurofibrillary tangles.

[1172] Alzheimer's disease has been suspected to have a multifactorial genetic etiological component for almost half a century. Sjogren et al., Acta Psychiat. Neurol. Scand. 82(suppl.): 1-152 (1952).

[1173] At least four genes have been identified to date that contribute to development of Alzheimer's disease: AD1 is caused by mutations in the amyloid precursor gene (APP); AD2 is associated with the APOE4 allele on chromosome 19; AD3 is caused by mutation in a chromosome 14 gene encoding a 7-transmembrane domain protein, presenilin-1 (PSEN1), and AD4 is caused by mutation in a gene on chromosome 1 that encodes a similar 7-transmembrane domain protein, presenilin-2 (PSEN2).

[1174] There is strong evidence, however, for additional, as yet uncharacterized, AD loci on other chromosomes.

[1175] For example, Daw et al., Am. J. Hum. Genet. 66: 196-204 (2000), estimated the number of additional quantitative trait loci (QTLs) and their contribution to the variance in age at onset of AD, and reported that 4 loci make a contribution to the variance in age at onset of late-onset AD similar to or greater in magnitude than that made by apoE, with one locus making a contribution several times greater than that of apoE. These results suggest that several genes not yet localized may play a larger role than does apoE in late-onset AD.

[1176] In accord, three groups recently announced the possible existence of an AD susceptibility gene on chromosome 10. Bertram et al., Science 290(5500):2302-2303 (2000); Ertekin-Taner et al., Science 290(5500):2303-2304 (2000); and Myers et al., Science 290(5500):2304-23055 (2000).

[1177] As another example, multiple sclerosis (MS) affects about 350,000 Americans, with approximately 200 new cases diagnosed each week, with an estimated annual monetary cost in the U.S. alone of $2.5 billion.

[1178] Clinically, MS is an unpredictable disorder, with symptoms, presentation and course falling broadly into one of several clinical patterns. In relapsing-remitting (RR) MS, the disease first manifests as a series of attacks followed by complete or partial remissions, with symptoms returning later after a period of stability. In primary-progressive (PP) MS, there is a gradual clinical decline with no distinct remissions, although there may be temporary plateaus or minor relief from symptoms. Secondary-progressive (SP) MS begins with a relapsing-remitting course followed by a later primary-progressive course. Rarely, patients may have a progressive-relapsing (PR) course in which the disease takes a progressive path punctuated by acute attacks. PP, SP, and PR MS are sometimes lumped together and called chronic progressive MS. The waxing and waning course characteristic of RR, SP and PR MS makes differential diagnosis difficult.

[1179] Anatomically, MS attacks are associated with focal inflammation in areas of the white matter of the central nervous system (CNS), accompanied or followed by demyelination in these areas, termed plaques. Destruction of the myelin sheath slows or blocks neurological transmission, leading to diminished or lost function. Clinical manifestations depend upon the location of the plaques and severity of demyelination, and range from fatigue, the most common symptom of MS, to visual impairment, due to inflammation of the optic nerve, termed optic neuritis, to numbness and paresthesias, to focal muscular weakness, ataxia, and bladder incontinence.

[1180] Increasing evidence suggests that genotype contributes to susceptibility to MS.

[1181] As early as 1965, McAlpine, in Multiple Sclerosis: A Reappraisal (McAlpine, ed.), Williams and Wilkins Co. pp. 61-74 (1965), concluded that the risk to a first-degree relative of a patient with multiple sclerosis is at least 15 times that for a member of the general population, but could discern no definite genetic pattern of inheritance.

[1182] Subsequently, many studies associated MS with HLA (MHC) haplotype. Haines et al., Hum. Molec. Genet. 7:1229-1234 (1998), studying a data set of 98 multiplex MS families, confirmed earlier reports that genetic linkage to the MHC can be explained by association with the HLA-DR2 allele, but suggested that MHC association explains only between 17% and 62% of the genetic etiology of MS.

[1183] From a review of genomic screens, Dyment et al., Hum. Molec. Genet. 6: 1693-1698 (1997), concluded that a number of genes with interacting effects are likely and that no single region has a major influence on familial risk. Chataway et al., Brain 121: 1869-1887 (1998), reporting a follow-up on U.K. studies using a systematic genome screen to determine the genetic basis of MS, stated that a gene of major effect had been excluded from 95% of the genome and one with a moderate role from 65%, results thus suggesting that multiple sclerosis depends on independent or epistatic effects of several genes, each with small individual effects, rather than a very few genes of major biologic importance.

[1184] As a yet further example, schizophrenia has long been recognized to have complex, likely polygenic, genetic contributions.

[1185] Schizophrenia is a common psychiatric disorder, occurring in 1 to 1.5 percent of the population worldwide, and is characterized by variable constellations of symptoms drawn from a universe of behavioral abnormalities. Although there are accepted alternative diagnostic criteria, primary criteria for diagnosis require two or more of the following, each present for a significant portion of time during a 1-month period (or less if successfully treated): (1) delusions; (2) hallucinations; (3) disorganized speech (e.g., frequent derailment or incoherence); (4) grossly disorganized or catatonic behavior; (5) negative symptoms, i.e., affective flattening, alogia, or avolition. See Diagnostic and Statistic Manual of Mental Disorders DSM-IV-TR, American Psychiatric Association (2000).

[1186] Only one such symptom is required if delusions are bizarre or hallucinations consist of a voice keeping up a running commentary on the person's behavior or thoughts, or consist of two or more voices conversing with each other.

[1187] Three-quarters of persons with schizophrenia develop the disease between 16 and 25 years of age: onset is uncommon after age 30, rare after age 40. In the 16 to 25 year old age group, schizophrenia affects more men than women; in the 25-30 year old group, the incidence is higher in women than in men. Studies have shown that some persons with schizophrenia recover completely, and many others improve to the point where they can live independently, often with the maintenance of drug therapy. However, approximately 15 percent of people with schizophrenia respond only moderately to medication and require extensive support throughout their lives, while another 15 percent simply do not respond to existing treatment.

[1188] Schizophrenia has long been known to have a significant genetic component. Studies have consistently demonstrated that the risk to relatives of a proband with schizophrenia is higher than the risk to relatives of controls. Moldin, in Genetics and Mental Disorders: Report of the NIMH Genetics Workgroup (NIH publication 98-4268, (1998), reviewed family and twin studies published between 1920 and 1987 and found the recurrence risk ratios to be 48 for monozygotic twins, 11 for first-degree relatives, 4.25 for second-degree relatives, and 2 for third-degree relatives. He also found that concordance rates for monozygotic twins averaged 46%, even when reared in different families, whereas the concordance rates for dizygotic twins averaged only 14%. The prevalence of schizophrenia is known to be higher in biologic than in adoptive relatives of schizophrenic adoptees.

[1189] The mode of inheritance is unclear, however. Susceptibility has been mapped to many loci, including chromosomes 1q21-q22, 5, 6p23, 8p22-p21, 11q, 13q14-q21, 13q32, 15q15, 15q14, 18p, and 22q11. Chromosome 19 has also been implicated in schizophrenia, at 2 different sites, as have sites on the X chromosome. Wei et al., Nature Genet. 25:376-377 (2000) report more specifically that the NOTCH4 locus is associated with susceptibility to schizophrenia.

[1190] In general, however, it is believed that development of schizophrenia involves multiple loci.

[1191] For example, Williams et al., Hum. Molec. Genet. 8: 1729-1739 (1999) undertook a systematic search for linkage in 196 affected sib pairs (ASPs) with schizophrenia. Using 229 microsatellite markers at an average intermarker distance of 17.26 cM, followed in a second stage by a further 54 markers allowing the regions identified in stage 1 to be typed at an average spacing of 5.15 cM, Williams et al. considered results on chromosomes 4p, 18q, and Xcen as suggestive; however, given the scores, Williams et al. interpreted their results as suggesting that common genes of major effect (susceptibility ratio more than 3) are unlikely to exist for schizophrenia.

[1192] Similarly, Shaw et al., Am. J. Med. Genet. 81(5):364-76 (1998), in a genome-wide search for schizophrenia susceptibility genes, found that twelve chromosomes (1, 2, 4, 5, 8, 10, 11, 12, 13, 14, 16, and 22) had at least one region with a nominal P value <0.05, that two of these chromosomes had a nominal P value<0.01 (chromosomes 13 and 16), and that five chromosomes (1, 2, 4, 11, and 13) had at least one marker with a lod score>2.0, suggesting the existence of multiple loci that contribute to schizophrenia susceptibility.

[1193] As yet another example, multiple genes are thought to predispose to epilepsy.

[1194] Epilepsy is characterized by recurrent, paroxysmal disorders of cerebral function (seizures); that is, by sudden, brief attacks of altered consciousness, motor activity, sensory phenomena, or inappropriate behavior. The risk of developing epilepsy is 1% in the period from birth to age 20, and 3% at age 75.

[1195] Epilepsy is caused by excessive discharge of cerebral neurons. Clinical manifestations depend on the type and location of discharge. In partial seizures, for example, the excess neuronal discharge is contained within one region of the cerebral cortex. Simple partial seizures consist of motor, sensory, or psychomotor phenomena without loss of consciousness; the specific phenomenon reflects the affected area of the brain. In generalized seizures, the discharge bilaterally and diffusely involves the entire cortex. Sometimes a focal lesion of one part of a hemisphere activates the entire cerebrum bilaterally so rapidly that it produces a generalized tonic-clonic seizure before a focal sign appears.

[1196] Epilepsy is a family of disorders. Those that are idiopathic are believed to have multiple genetic contributions. For example, idiopathic generalized epilepsy (IGE) is characterized by recurring generalized seizures in the absence of detectable brain lesions and/or metabolic abnormalities. Twin and family studies suggest that genetic factors play a key part in its etiology. Although a mutation in the CACNB4 gene can cause the disorder, linkage to 8q24, Zara et al., Hum. Molec. Genet. 4: 1201-1207(1995), 3q26 and 14q23, Sander et al., Hum. Molec. Genet. 9:1465-1472 (2000), and 2q36 has been also demonstrated, with a multilocus model appearing to fit best the observed familial patterns.

[1197] Polygenic contributions to the etiology of various neurologic cancers have similarly been described.

[1198] For example, gliomas account for 45% of intracranial tumors, and multiple loci have been implicated in its development, with losses of chromosome 17p, increase in copy number of chromosome 7, structural abnormalities of chromosomes 9p and 19q, and genes on chromosome 10 among the suspects.

[1199] Other significant diseases of brain and nervous tissue are also believed to have a genetic, typically polygenic, etiologic component. These diseases include, for example, Parkinson's disease, dementia with Lewy bodies, frontotemporal dementia, corticobasal ganglionic degeneration, progressive supranuclear palsy, prion diseases (Creutzfeld-Jakob, Gerstmann-Strausller-Shenker, familial fatal insomnia), Tourette's Syndrome, corticobasal degeneration, multiple system atrophy, striatonigral degeneration, Shy-Drager syndrome, olivopontocerebellar atrophy, spinocerebellar ataxia, Friedreich ataxia, ataxia-telangiectasia, amyotrophic lateral sclerosis, bulbospinal atrophy (Kennedy's syndrome), spinal muscular atrophy, neuronal storage diseases (sphingolipid, mucopolysaccharide, mucolipid), leukodystrophy, Krabbe disease, metachromic leukodystrophy, adrenoleukodystrophy, Pelizaeus-Merzbacher disease, Canavan disease, mitochondrial encephalomyopathy, Leigh disease, neurofibromatosis (Type 1 and Type II), tuberous sclerosis, paraneoplastic syndrome, subacute cerebellar degeneration, subacute sensory neuropathy, opsoclonus/myoclonus, retinal degeneration, stiff-man syndrome and Von Hippel-Lindau disease.

[1200] Many neurologic cancers other than gliomas have also been shown or suspected to have genetic bases or contributions. Among these cancers are astrocytoma, fibrillary astrocytoma, pilocytic astrocytoma, pleomorphic xanthoastrocytoma, oligodendroglioma, ependymoma, gangliocytoma, ganglioglioma, medulloblastoma, primary brain germ cell tumor, pineocytoma, pineoblastoma, and meningioma.

[1201] Other disorders of brain and central nervous system that likely have genetic components include the various forms of neural deafness, catatonia, depression, bipolar (manic-depressive) disorder, Wilson's Disease, Pick disease, neuromyelitis optica (Devic disease), central pontine myelinolysis, Marchiafava-Bignami disease, Guillain-Barre syndrome, sleep disorders (insomnia, myoclonus, narcolepsy, cataplexy, sleep apnea), amnesia, aphasias (including Broca's aphasia and Wernicke's aphasia), cortical blindness, visual agnosia, auditory agnosia, and Kluver-Bucy syndrome.

[1202] The human genome-derived single exon nucleic acid probes and microarrays of the present invention are useful for predicting, diagnosing, grading, staging, monitoring and prognosing diseases of human brain, particularly those diseases with polygenic etiology. With each of the single exon probes described in this Example having been shown to be expressed at detectable levels in human brain, and with about ⅔ of the probes identifying novel genes, single exon microarrays of the present invention that include such probes provide exceptionally high informational content for such studies.

[1203] For example, diagnosis (including differential diagnosis among clinically indistinguishable disorders), staging, and/or grading of a disease can be based upon the quantitative relatedness of a patient gene expression profile to one or more reference expression profiles known to be characteristic of a given neurologic disease, or to specific grades or stages thereof.

[1204] In one embodiment, the patient gene expression profile is generated by hybridizing nucleic acids obtained directly or indirectly from transcripts expressed in the patient's brain (or other CNS tissues, including cultured tissues) to the genome-derived single exon microarray of the present invention. Reference profiles are obtained similarly by hybridizing nucleic acids from individuals with known disease. Methods for quantitatively relating gene expression profiles, without regard to the function of the protein encoded by the gene, are disclosed in WO 99/58720, incorporated herein by reference in its entirety.

[1205] In another approach, the genome-derived single exon probes and microarrays of the present invention can be used to interrogate genomic DNA, rather than pools of expressed message; this latter approach permits predisposition to and/or prognosis of neurologic disease to be assessed through the massively parallel determination of altered copy number, deletion, or mutation in the patient's genome of exons known to be expressed in human brain. The algorithms set forth in WO 99/58720 can be applied to such genomic profiles without regard to the function of the protein encoded by the interrogated gene.

[1206] Table 4, presented herewith in electronic format and incorporated herein by reference in its entirety, presents expression, homology, and functional information for the genome-derived single exon probes of the present invention that are expressed significantly in human brain.

### EXAMPLE 6

[1207] Genome-derived Single Exon Probes Useful for Measuring Expression of Genes in Heart

[1208] Diseases of the heart and vascular system are a significant cause of human morbidity and mortality. Increasingly, genetic factors are being found that contribute to predisposition, onset, and/or aggressiveness of most, if not all, of these diseases. Although mutations in single genes have on occasion been identified as causative, these disorders are for the most part believed to have polygenic etiologies.

[1209] For example, cardiovascular disease (CVD), which includes coronary heart disease, stroke, and peripheral arterial vascular disease, is the leading cause of death in the United States and other developed countries. In developing regions, coronary heart disease and stroke are ranked second and third, respectively, as causes of mortality. In the United States alone, about 1 million deaths (about 42% of total deaths per year) result from CVD each year. CVD is also a significant cause of morbidity, with about 1.5 million people suffering myocardial infarction, and about 500,000 suffering strokes in the United States each year. With risk for CVD increasing with age, and an increasingly aging population, CVD will continue to be a major health problem into the future.

[1210] CVD is caused by arterial lesions that begin as fatty streaks, which consist of lipid-laden foam cells, and develop into fibrous plaques. The atherosclerotic plaque may grow slowly, and over several decades may produce a severe stenosis or result in arterial occlusion. Some plaques are stable, but other, more unstable, ones may rupture and induce thrombosis. The thrombi may embolize, rapidly occluding the lumen and leading to myocardial infarction or acute ischemic syndrome.

[1211] Risk factors for CVD include age and gender. In addition, a family history of CVD significantly increases risk, indicating a genetic basis for development of this disease complex. Obesity, especially truncal obesity, the cause of which is suspected to be genetic, is yet another risk factor for CVD. Familial disorders such as hyperlipidemia, hypoalphalipoproteinemia, hypertriglyceridemia, hypercholesterolemia, hyperinsulinemia, homocystinuria, and dysbetalipoproteinemia, all of which lead to lipid or lipoprotein abnormalities, can predispose one to the development of CVD. Both insulin-dependent and non-insulin-dependent diabetes mellitus, both of which have genetic components, have been also linked to the development of atherosclerosis.

[1212] The literature is replete with evidence for genetic causes of cardiovascular diseases. For example, studies by Allayee et al., Am. J. Hum. Genet. 63:577-585(1998), indicated a genetic association between familial combined hyperlipidemia (FCHL) and small dense LDL particles. The studies also concluded that the genetic determinants for LDL particle size are shared, at least in part, among FCHL families and the more general population at risk for CVD. Juo et al., Am. J. Hum. Genet. 63: 586-594 (1998) demonstrated that small, dense LDL particles and elevated apolipoprotein B levels, both of which are commonly found in members of FCHL families, share a common major gene plus individual polygenic components. The common major gene was estimated to explain 37% of the variants of adjusted LDL particle size and 23% of the variants of adjusted apoB levels.

[1213] The atherogenic lipoprotein phenotype (ALP) is a common heritable trait, symptoms of which include a prevalence of small, dense LDL particles, increased levels of triglyceride-rich lipoproteins, reduced levels of high density lipoprotein, and increased risk of CVD, particularly myocardial infarction. Both Nishina et al., Proc. Nat. Acad. Sci. 89: 708-712 (1992) and Rotter et al., Am. J. Hum. Genet. 58: 585-594(1996) demonstrated linkage between ALP and the LDLR locus. Rotter et al., supra, also reported linkage to the CETP locus on chromosome 16 and to the SOD1 locus on chromosome 6, and possibly also to the APOA1/APOC3/APOA4 cluster on chromosome 11.

[1214] Mutations in genes identified as components of lipid metabolism, e.g., apolipoprotein E (apoE) and LDL receptor (LDLR), have been shown to be associated with predisposition to the development of CVD. For example, several apoE variants had been found to be associated with familial dysbetalipoproteinemia, characterized by elevated plasma cholesterol and triglyceride levels and an increased risk for atherosclerosis (de Knijff et al., Mutat 4: 178-194 (1994)). Mutations in the LDLR gene have been associated with the familial hypercholesterolemia, an autosomal dominant disorder characterized by elevation of serum cholesterol bound to low density lipoprotein (LDL), that can lead to increased susceptibility to CVD.

[1215] To date, mutations in numerous genes have been shown to be associated with increased CVD susceptibility. However, the identified genetic associations are believed not to account for all genetic contributions to CVD.

[1216] As yet another example, hypertension is a major health problem because of its high prevalence and its association with increased risk of CVD. Approximately 25% of all adults and over 60% of persons older than 60 years in the United States have high blood pressure.

[1217] Arterial or systemic hypertension is diagnosed when the average of two or more diastolic BP measurements on at least two subsequent visits is 90 mm Hg or more, or when the average of multiple systolic BP readings on two or more subsequent visits is consistently greater than 140 mm Hg. Pulmonary hypertension is defined as pressure within the pulmonary arterial system elevated above the normal range; pulmonary hypertension may lead to right ventricle (RV) failure.

[1218] Hypertension, together with other cardiovascular risk factors, leads to atherosclerosis and other forms of CVD, primarily by damaging the vascular endothelium. In more than 40% of the U.S. population, hypertension is accompanied by hyperlipidemia and leads to the development of atherosclerotic plaques. In the absence of hyperlipidemia, intimal thickening occurs. Non-atherosclerotic hypertension-induced vascular damage can lead to stroke or heart failure.

[1219] Familial diseases associated with secondary hypertension include familial renal disease, polycystic kidney disease, medullary thyroid cancer, pheochromocytoma, and hyperparathyroidism. Hypertension is also twice as common in patients with diabetes mellitus.

[1220] More than 95% of all hypertension cases are essential hypertension, that is, lack identifiable antecedent clinical cause. Essential hypertension shows clustering in families and can result from a variety of genetic diseases. In most cases, high blood pressure results from a complex interaction of factors with both genetic and environmental components. The recent search for genes that contribute to the development of essential hypertension has shown that the disorder is polygenic in origin. However, with several exceptions (such as angiotensinogen, angiotensin receptor-1, beta-3 subunit of guanine nucleotide-binding protein, tumor necrosis factor receptor-2, and α-adducin), the particular genes involved are still being sought.

[1221] Susceptibility loci for essential hypertension have been mapped to chromosomes 17 and 15q. Hasstedt et al., Am. J. Hum. Genet. 43: 14-22 (1988) measured red cell sodium in 1,800 normotensive members of 16 Utah pedigrees ascertained through hypertensive or normotensive probands, siblings with early stroke death, or brothers with early coronary disease, and suggested that red blood cell sodium was determined by 4 alleles at a single locus. This major locus was thought to explain 29% of the variance in red cell sodium, and polygenic inheritance explained another 54.6%. A higher frequency of the high red blood cell sodium genotype in pedigrees in which the proband was hypertensive rather than normotensive provided evidence that this major locus increases susceptibility to hypertension.

[1222] From a study of systolic blood pressure in 278 pedigrees, Perusse et al., Am. J. Hum. Genet. 49: 94-105 (1991) reported that variability in systolic blood pressure is likely influenced by allelic variation of a single gene, with gender and age dependence. They also suggested that a single gene may be associated with a steeper increase of blood pressure with age among males and females.

[1223] There is strong evidence, however, for additional as yet uncharacterized, hypertension-associated loci on other chromosomes.

[1224] For example, Xu et al., Am. J. Hum. Genet. 64: 1694-1701 (1999) carried out a systematic search for chromosomal regions containing genes that regulate blood pressure by scanning the entire autosomal genome using 367 polymorphic markers. Because of the sampling design, the number of sib pairs, and the availability of genotyped parents, this study represented one of the most powerful of its kind. Although no regions achieved a 5% genomewide significance level, maximum lod scores were greater than 2.0 for regions of chromosomes 3, 11, 15, 16, and 17.

[1225] As another example, cardiac arrhythmias account for several thousand deaths each year. Arrhythmias such as ventricular fibrillation, which causes more than 300,000 sudden deaths annually in the United States alone, encompass a multitude of disorders. Another type of arrhythmia, idiopathic dilated cardiomyopathy, of which familial dilated cardiomyopathy accounts for 20-25%, is responsible for more than 10,000 deaths in the United States annually and is the predominant indication for cardiac transplantation.

[1226] Cardiac arrhythmias can be divided into bradyarrhythmias (slowed rhythms) or tachyarrhythmias (speeded rhythms). Bradyarrhythmias result from abnormalities of intrinsic automatic behavior or conduction, primarily within the atrioventricular node and the His-Purkinje's network. Tachyarrhythmias are caused by altered automaticity, reentry, or triggered automaticity.

[1227] Bradyarrhythmias arising from suspected polygenic disorders include Long QT syndrome 4, atrioventricular block, familial sinus node disease, progressive cardiac conduction defect, and familial cardiomyopathy. Tachyarrhythmias with possible underlying polygenic causes include familial ventricular tachycardia, Wolff-Parkinson-White syndrome, familial arrhythmogenic right ventricular dysplasia, heart-hand syndrome V, Mal de Meleda, familial ventricular fibrillation, and familial noncompaction of left ventricular myocardium.

[1228] For some of the arrhythmias, one or more of the causative genes have been identified.

[1229] For example, atrioventricular block has been associated with mutations in the SCN5A gene, as well as mutations in a locus mapped to 19q13. Studies have shown linkage of familial sinus node disease to a marker on 10q22-q24. Familial ventricular tachycardia has been linked to mutations in genes encoding the G protein subunit alpha-i2 (GNAI1), and/or related genes. Examination of families with Wolff-Parkinson-White syndrome suggest an autosomal dominant pattern of inheritance and evidence of linkage of the disorder to DNA markers on band 7q3. Linkage analysis shows strong evidence for localization of a gene for Mal de Meleda disease on 8qter. Familial ventricular fibrillation can be caused by mutations in the cardiac sodium channel gene SCN5A. Familial noncompaction of left ventricular myocardium has been linked to mutations in the gene encoding tafazzin (TAZ), or in the FK506-binding protein 1A gene (FKBPlA).

[1230] Familial dilated cardiomyopathy is characterized by an autosomal dominant pattern of inheritance with age-related penetrance. The linkage of familial dilated cardiomyopathy to several loci indicate that it is polygenic. These loci include CMD1A on 1p11-q11, CMD1B on 9q13, CMD1C on 10q21, CMD1D on 1q32, CMD1E on 3p, CMD1F on 6q, CMD1G on 2q31, CMD1H on 2q14-q22, and CMD1I, which results from mutation in the DES gene on 2q35. In addition, cardiomyopathy can also be caused by mutations in the ACTC gene, the cardiac beta-myosin heavy chain gene (MYH7), or the cardiac troponin T gene.

[1231] Familial arrhythmogenic right ventricular dysplasia is inherited as an autosomal dominant with reduced penetrance and is one of the major genetic causes of juvenile sudden death. It is estimated that the prevalence of familial arrhythmogenic right ventricular dysplasia ranges from 6 per 10,000 in the general population to 4.4 per 1,000 in some areas. Several loci for familial arrhythmogenic right ventricular dysplasia have been mapped indicating that this disease is also polygenic in nature. These loci include ARVD1 on 14q23-q24, ARVD2 on 1q42-q43, ARVD3 on 14q12-q22, ARVD4 on 2q32.1-q32.3, ARVD5 on 3p23, and ARVD6 on 10p14-p12.

[1232] Progressive cardiac conduction defect (PCCD), also called Lenegre-Lev disease, is one of the most common cardiac conduction diseases. It is characterized by progressive alteration of cardiac conduction through the His-Purkinje system with right or left bundle branch block and widening of QRS complexes, leading to complete atrioventricular block and ultimately causing syncope and sudden death. It represents the major cause of pacemaker implantation in the world (0.15 implantations per 1,000 inhabitants per year in developed countries). The cause of PCCD is unknown but familial cases with right bundle branch block have been reported suggesting that at least some cases are of genetic origin. Reports have linked PCCD to HB1 on 19q13.3, and to mutations in the SCN5A gene (Schott et al., Nature Genet. 23: 20-21 (1999)).

[1233] As yet a further example, congenital heart disease occurs at a rate of 8 per 1000 live births, which corresponds to approximately 32,000 infants with newly diagnosed congenital heart disease each year in the United States. Twenty percent of infants with congenital heart disease die within the first year of life. Approximately 80% of the first-year survivors live to reach adulthood. Congenital heart disease also has economic impact due to the estimated 20,000 surgical procedures performed to correct circulatory defects in these patients. The estimated number of adults with congenital heart disease in the United States is currently about 900,000.

[1234] In 90% of patients, congenital heart disease is attributable to multifactorial inheritance. Only 5-10% of malformations are due to primary genetic factors, which are either chromosomal or a result of a single mutant gene.

[1235] The most common congenital heart disease found in adults is bicuspid aortic valve. This defect occurs in 2% of the general population and accounts for approximately 50% of operated cases of aortic stenosis in adults. Atrial septal defect is responsible for 30-40% of congenital heart disease seen in adults. The most common congenital cardiac defect observed in the pediatric population is ventricular septal defect, which accounts for 15-20% of all congenital lesions. Tetralogy of Fallot is the most common cyanotic congenital anomaly observed in adults. Other congenital heart diseases include Eisenmenger's syndrome, patent ductus arteriosus, pulmonary stenosis, coarctation of the aorta, transposition of the great arteries, tricuspid atresia, univentricular heart, Ebstein's anomaly, and double-outlet right ventricle.

[1236] A number of studies have identified putative genetic loci associated with one or more congenital heart diseases.

[1237] Congenital heart disease affects more than 40% of all Down syndrome patients. The candidate chromosomal region containing the putative gene or genes for congenital heart disease associated with Down syndrome is 21q22.2-q22.3, between ETS2 and MX1.

[1238] DiGeorge syndrome (DGS) is characterized by several symptoms including outflow tract defects of the heart such as teratology of Fallot. Most cases result from a deletion of chromosome 22q11.2 (the DiGeorge syndrome chromosome region, or DGCR). The 22q11 deletion is the second most common cause of congenital heart disease after Down syndrome. Several genes are lost in this deletion including the putative transcription factor TUPLE1. This deletion is associated with a variety of phenotypes, e.g., Shprintzen syndrome; conotruncal anomaly face (or Takao syndrome); and isolated outflow tract defects of the heart including Tetralogy of Fallot, truncus arteriosus, and interrupted aortic arch.

[1239] Whereas 90% of cases of DGS may now be attributed to a 22qll deletion, other associated chromosome defects have been identified. For example, Greenberg et al., Am. J. Hum. Genet. 43:605-611 (1988), reported 1 case of DGS with del10p13 and one with a 18q21.33 deletion. Fukushima et al., Am. J. Hum. Genet. 51 (suppl.):A80 (1992) reported linkage with a deletion of 4q21.3-q25. Gottlieb et al., Am. J. Hum. Genet. 62: 495-498 (1998) concluded that the deletion of more than 1 region on 10p could be associated with the DGS phenotype. The association of the DiGeorge syndrome with at least 2 and possibly more chromosomal locations suggests strongly the involvement of several genes in this disease.

[1240] Digilio et al., J. Med. Genet. 34: 188-190 (1997), calculated empiric risk figures for recurrence of isolated Tetralogy of Fallot in families after exclusion of del(22q11), and concluded that gene(s) different from those located on 22q11 must be involved in causing familial aggregation of nonsyndromic Tetralogy of Fallot. Johnson et al., Am. J. Med. Genet. (1997) conducted a cytogenetic evaluation of 159 cases of Tetralogy of Fallot. They reported that a del(22q11) was identified in 14% who underwent fluorescence in situ hybridization (FISH) testing with the N25 cosmid probe.

[1241] Other congenital heart disease are also suspected to be of polygenic origin. For example, Holmes et al., Birth Defects Orig. Art. Ser. X(4): 228-230 (1974) described familial clustering of hypoplastic left heart syndrome in siblings consistent with multifactorial causation.

[1242] Other significant diseases of the heart and vascular system are also believed to have a genetic, typically polygenic, etiological component. These diseases include, for example, hypoplastic left heart syndrome, cardiac valvular dysplasia, Pfeiffer cardiocranial syndrome, oculofaciocardiodental syndrome, Kapur-Toriello syndrome, Sonoda syndrome, Ohdo Blepharophimosis syndrome, heart-hand syndrome, Pierre-Robin syndrome, Hirschsprung disease, Kousseff syndrome, Grange occlusive arterial syndrome, Kearns-Sayre syndrome, Kartagener syndrome, Alagille syndrome, Ritscher-Schinzel syndrome, Ivemark syndrome, Young-Simpson syndrome, hemochromatosis, Holzgreve syndrome, Barth syndrome, Smith-Lemli-Opitz syndrome, glycogen storage disease, Gaucher-like disease, Fabry disease, Lowry-Maclean syndrome, Rett syndrome, opitz syndrome, Marfan syndrome, Miller-Dieker lissencephaly syndrome, mucopolysaccharidosis, Bruada syndrome, humerospinal dysostosis, Phaver syndrome, McDonough syndrome, Marfanoid hypermobility syndrome, atransferrinemia, Cornelia de Lange syndrome, Leopard syndrome, Diamond-Blackfan anemia, Steinfeld syndrome, progeria, and Williams-Beuren syndrome.

[1243] The human genome-derived single exon nucleic acid probes and microarrays of the present invention are useful for predicting, diagnosing, grading, staging, monitoring and prognosing diseases of human heart and vascular system, particularly those diseases with polygenic etiology. With each of the single exon probes described in this Example shown to be expressed at detectable levels in human heart, and with about ⅔ of the probes identifying novel genes, single exon microarrays of the present invention that include such probes provide exceptionally high informational content for such studies.

[1244] For example, diagnosis (including differential diagnosis among clinically indistinguishable disorders), staging, and/or grading of a disease can be based upon the quantitative relatedness of a patient gene expression profile to one or more reference expression profiles known to be characteristic of a given heart or vascular disease, or to specific grades or stages thereof.

[1245] In one embodiment, the patient gene expression profile is generated by hybridizing nucleic acids obtained directly or indirectly from transcripts expressed in the patient's heart or vascular tissues to the genome-derived single exon microarray of the present invention. Reference profiles are obtained similarly by hybridizing nucleic acids obtained directly or indirectly from transcripts expressed in heart or vascular tissue of individuals with known disease. Methods for quantitatively relating gene expression profiles, without regard to the function of the protein encoded by the gene, are disclosed in WO 99/58720, incorporated herein by reference in its entirety.

[1246] In another approach, the genome-derived single exon probes and microarrays of the present invention can be used to interrogate genomic DNA, rather than pools of expressed message; this latter approach permits predisposition to and/or prognosis of heart or vascular disease to be assessed through the massively parallel determination of altered copy number, deletion, or mutation in the patient's genome of exons known to be expressed in human heart. The algorithms set forth in WO 99/58720 can be applied to such genomic profiles without regard to the function of the protein encoded by the interrogated gene.

[1247] Table 5, presented herewith in electronic format and incorporated herein by reference in its entirety, presents expression, homology, and functional information for the genome-derived single exon probes of the present invention that are expressed significantly in human heart.

### EXAMPLE 7

### Genome-derived Single Exon Probes Useful for Measuring Expression of Genes in Liver

[1248] Diseases of the liver are a significant cause of human morbidity and mortality. Increasingly, genetic factors are being found that contribute to predisposition, onset, and/or aggressiveness of most, if not all, of these diseases; although causative mutations in single genes have been identified for some, these disorders are believed for the most part to have polygenic etiologies.

[1249] For example, cirrhosis is a major public health problem. In the industrialized world, it is among the top ten causes of death; among patients aged 45 to 65, it is the third leading cause of death. The high prevalence is largely the result of alcohol abuse, but other major contributors include chronic hepatitis, biliary disease and iron overload. Approximately 10-15% are cryptogenic.

[1250] Cirrhosis is a broad description encompassing the common end stage of many forms of liver injury. Many patients with cirrhosis will remain asymptomatic for years, while others show generalized weakness, anorexia, malaise, and weight loss or, occasionally, more severe symptoms.

[1251] The progression from fibrosis, an early consequence of liver disease, to cirrhosis, and the specific histologic morphology that characterizes cirrhosis depend on the extent of injury, the presence of continuing damage, and the response of the liver to damage. The liver may be injured acutely and severely (e.g. necrosis with hepatitis), moderately over months or years (e.g. biliary tract obstruction and chronic active hepatitis), or modestly but continuously (e.g. alcohol abuse).

[1252] During the repair process, new vessels connecting the hepatic artery and portal vein to the hepatic venules form within the fibrous sheath that surrounds the surviving nodules of liver cells. These vessels restore the intrahepatic circulatory pathway, but provide relatively low-volume, high-pressure drainage that is less efficient than normal and results in increased portal vein pressure (portal hypertension). Thus, cirrhosis is not static and its features depend on the disease activity and stage.

[1253] As cirrhosis is the end stage of many forms of liver disease, many genes have been identified that can contribute to the development of cirrhosis. These include, e.g., the genes responsible for Wilson disease (Online Mendelian Inheritance of Man (“OMIM”) 277900), type IV glycogen storage disease (OMIM 232500), galactosemia (OMIM 230400), and a deficiency of alpha-1-antitrypsin (OMIM 107400). There is substantial evidence, however, for as yet uncharacterized loci which cause cirrhosis.

[1254] For example, Iber and Maddrey, Prog. Liver Dis. 2: 290-302 (1965), reviewed 13 previously reported families and 8 new to this study, each with 2 or more affected members. They pointed out that, with a single exception, the multiple cases were in the same generation. Within a given family, the age of onset, clinical course, and biopsy findings were very similar, but there were wide differences between families.

[1255] Kalra et al., Hum. Hered. 32:170-175 (1982) studied the families of 220 cases of Indian childhood cirrhosis and 70 families of age-matched controls. The hypotheses of autosomal recessive, partial sex-linkage, and doubly recessive inheritance were found untenable and the authors concluded that multifactorial inheritance was most plausible. Lefkowitch et al., New Eng. J. Med. 307:271-277 (1982) described 4 white American sibs who died between ages 4.5 and 6 years of cirrhosis that closely resembled that of the childhood cirrhosis of Asiatic Indians.

[1256] Another example of uncharacterized loci which cause cirrhosis are those related to the risk of alcoholism.

[1257] Cloninger, Science 236:410-416 (1987), defined two separate types of alcoholism. According to these definitions, type 1 alcohol abuse has its usual onset after the age of 25 years and is characterized by severe psychological dependence and guilt. Type 1 occurs in both men and women and requires both genetic and environmental factors to become manifest. By contrast, type 2 alcohol abuse has its onset before the age of 25; persons with this type of alcoholism are characterized by their inability to abstain from alcohol and by frequent aggressive and antisocial behavior. Type 2 alcoholism is rarely found in women and is much more heritable.

[1258] Despite considerable effort to identify genes related to the risk of alcoholism, relatively few genes have been identified. Some of this work has suggested a relationship between the metabolism of dopamine and alcoholism. Blum et al., J.A.M.A. 263:2055-2060 (1990) and Bolos et al., J.A.M.A. 264:3156-3160 (1990) investigated the relationship of the dopamine D2 receptor (DRD2; OMIM 126450) to alcoholism, but the sample size was small and their results were inconclusive. However, Tiihonen et al., Molec. Psychiat. 4, 286-289 (1999), found a markedly higher frequency in a population of type 1 alcoholics of the low activity allele of the enzyme catechol-O-methyltransferase (COMT, OMIM 116790), which has a crucial role in the metabolism of dopamine, suggesting a role for dopamine metabolism in increased risk of alcoholism. For a brief review of recent progress toward the identification of genes related to risk for alcoholism see Buck, Genome 9:927-928 (1998).

[1259] As another example, multiple genes have been shown to predispose to hyperlipoproteinemia or hyperlipidemia. Much attention has been focused on these disorders because there is a strong association of hyperlipidemia, especially hypercholesterolemia, with development of coronary artery disease. Coronary artery disease accounts for at least 25% of all deaths in the United States. Coronary artery disease results when the arteries supplying the heart muscle become occluded by plaques composed of lipids like cholesterol, blood clotting components and blood cells.

[1260] The major plasma lipids circulate bound to proteins as macromolecular complexes called lipoproteins. Although closely interrelated, the major lipoprotein classes—chylomicron, very-low-density lipoprotein (VLDL), low-density lipoprotein (LDL), and high-density lipoprotein (HDL)—are usually classified in terms of physicochemical properties (e.g., density after centrifugation). Chylomicrons, the largest lipoproteins, carry exogenous triglyceride from the intestine via the thoracic duct to the venous system and into peripheral sites. VLDL carries endogenous triglyceride primarily from the liver to the same peripheral sites for storage or use. Lipases quickly degrade the triglyceride in VLDL to produce intermediate density lipoproteins (IDL) and within 2 to 6 h, IDL is degraded further to generate LDL, which has a plasma half-life of 2 to 3 days. While the overall fate of LDL is unclear, the liver is responsible for removing approximately 70% and active receptor sites have been found on the surfaces of hepatocytes.

[1261] Several monogenic conditions that lead to elevated levels of one or more serum lipoproteins have been defined and the responsible gene identified, including, e.g., hyperlipoproteinemia type I (OMIM 238600), familial hypercholesterolemia (OMIM 143890), and familial defective apolipoprotein B (OMIM 107730). However, in many cases the etiology is unknown and there is strong evidence for additional uncharacterized loci.

[1262] For example, Zuliani et al., Arterioscler. Thromb. Vasc. Biol. 19:802-809 (1999) identified a Sardinian family with a recessive form of hypercholesterolemia with the clinical features of familial hypercholesterolemia (OMIM 603813), and found that previously identified genes were not responsible for this disorder. They proposed that in this new lipid disorder, a recessive defect causes a selective impairment of the LDL receptor function in the liver. Ciccarese et al., Am. J. Hum. Genet. 66:453-460 (2000) recently mapped this novel disease locus.

[1263] Another example is designated familial combined hyperlipidemia (OMIM 144250) which affects approximately 1-2% of the population in the Western world. This disorder can have its basis in mutation in several novel genes, two of which have been mapped to chromosome 1 (Pajukanta et al., Nature Genet. 18:369-373 (1998)) and chromosome 11 (Aouizerat et al., Am. J. Hum. Genet. 65, 397-412 (1999)). The high frequency of this disorder suggests that most, if not all, hyperlipidemias are of multifactorial genetic etiology.

[1264] As yet a further example, primary schlerosing cholangitis (PSC) is a disorder characterized by a patchy obliterative inflammatory fibrosis of the large bile ducts. Chronic inflammation leads to extensive bile duct strictures, cholestasis, and gradual progression to biliary cirrhosis. PSC occurs most often in young men and is commonly associated with inflammatory bowel disease, especially ulcerative colitis. The onset is usually insidious, with gradual, progressive fatigue, pruritus, and jaundice. There is no specific therapy for sclerosing cholangitis, and liver transplantation is the only apparent cure.

[1265] The etiology of PSC is not known, but both genetic and immunologic abnormalities have been implicated. However, the frequency of HLA-B8 and HLA-DT2, which are associated with a number of autoimmune diseases, is higher in PSC than normal individuals. Prochazka et al., New Eng. J. Med. 322:1842-1844 (1990) found that 100% of 29 patients with primary sclerosing cholangitis carried the HLA-DRw52a antigen, which is normally present in 35% of the population.

[1266] As a still further example, sarcoidosis is a disease of unknown cause characterized by non-caseating granulomas in one or more organ systems. These granulomas may resolve completely or proceed to fibrosis. The disorder is systemic, but the liver is affected in approximately 75% of cases. Sarcoidosis occurs mainly in persons aged 20 to 40 yr and is most common in Northern Europeans and American blacks. The lifetime risk of developing sarcoidosis is particularly high among Swedish men (1.15%), Swedish women (1.6%), and African Americans (2.4%).

[1267] The much greater frequency in African Americans relative to the United States population overall suggests a genetic contribution to etiology. Early research studying familial aggregation indicated that the disease may have a nongenetic basis because the family pattern did not conform to a simple Mendelian mode of inheritance (Allison, Sth. Med. J. 57: 27-32 (1964)). However, Headings et al., Ann. N.Y. Acad. Sci. 278:377-385 (1976) favored multifactorial genetic inheritance of susceptibility. Nowack et al., Arch. Intern. Med. 147:481-483 (1987), found an unusually high frequency of HLA-DRS in a study of 440 patients with sarcoidosis in Marburg, Germany. They also concluded that the role of an environmental or infectious agent triggering sarcoidosis cannot be envisaged without considering genetically linked cofactors.

[1268] Other significant diseases of liver are also believed to have a genetic, typically polygenic, etiologic component. These diseases include, e.g., primary biliary cirrhosis, Zellweger syndrome, cholestasis-lymphedema syndrome, Alstrom syndrome, primary pulmonary hypertension, Berardinelli-Seip congenital lipodystrophy, iron overload in Africa, neonatal cholestatic hepatitis, autosomal recessive KID syndrome, familial hypotransferrinemia, type I congenital dyserythropoietic anemia, porphyria variegata, Finnish lactic acidosis with hepatic hemosiderosis, Rotor syndrome, essential hypertension, ARC syndrome, type II conjugated hyperbilirubinemia, Lambert syndrome, ichthyosis congenita with biliary atresia, Kabuki make-up syndrome, Meckel syndrome, cerebral aneurysm-cirrhosis syndrome, glycogen storage diseases, polycystic kidney and hepatic disease, isolated Caroli disease, trisomy 18-like syndrome, Osler-Rendu-Weber syndrome 3, fatal intrahepatic cholestasis, Coach syndrome, type C Niemann-Pick disease, and hepatocellular cancer.

[1269] Altered responses to a variety of infectious agents that target the liver, especially acute viral hepatitis, have also been shown or are suspected to have genetic bases or contributions. In addition to differential susceptibility to primary infectious agents, these altered responses include predisposition to complicating conditions following contact with particular infectious agents. These include, e.g., development of hepatocellular carcinoma 2 correlated with Hepatitis B infection, and severe hepatic fibrosis following Schistosoma mansoni infection.

[1270] The central role of the liver in drug metabolism results in exposure of this organ to a large variety of potentially toxic chemical agents and metabolites. These include naturally occurring plant alkaloids and mycotoxins, industrial chemicals, and, additionally, pharmacologic agents used in treating disease. The range of manifestations of toxin- and drug-induced liver disease are virtually as broad as the range of acute and chronic disorders and have also been shown or suspected to have genetic bases or contributions.

[1271] Such interactions between drugs and genotype have been shown in the response, e.g., to the anticonvulsant phenytoin, which can cause severe hepatitis-like disease in individuals who are impaired in the ability to detoxify a metabolite of phenytoin in the liver, and in the response to the drug sodium valproate, which can produce severe hepatotoxicity in certain individuals. The abnormal responses to both of these drugs are believed to be influenced by underlying genetic factors.

[1272] The human genome-derived single exon nucleic acid probes and microarrays of the present invention are useful for predicting, diagnosing, grading, staging, monitoring and prognosing diseases of human liver, particularly those diseases with polygenic etiology. With each of the single exon probes described in this Example shown to be expressed at detectable levels in human liver, and with about ⅔ of the probes identifying novel genes, single exon microarrays of the present invention that include such probes provide exceptionally high informational content for such studies.

[1273] For example, diagnosis (including differential diagnosis among clinically indistinguishable disorders, such as cirrhosis), staging, and/or grading of a disease can be based upon the quantitative relatedness of a patient gene expression profile to one or more reference expression profiles known to be characteristic of a given liver disease, or to specific grades or stages thereof.

[1274] In one embodiment, the patient gene expression profile is generated by hybridizing nucleic acids obtained directly or indirectly from transcripts expressed in the patient's liver to the genome-derived single exon microarray of the present invention. Reference profiles are obtained similarly, using nucleic acids obtained directly or indirectly from transcripts expressed by liver of individuals with known liver disease. Methods for quantitatively relating gene expression profiles, without regard to the function of the protein encoded by the gene, are disclosed in WO 99/58720, incorporated herein by reference in its entirety.

[1275] In another approach, the genome-derived single exon probes and microarrays of the present invention can be used to interrogate genomic DNA, rather than pools of expressed message; this latter approach permits predisposition to and/or prognosis of liver disease to be assessed through the massively parallel determination of altered copy number, deletion, or mutation in the patient's genome of exons known to be expressed in human liver. The algorithms set forth in WO 99/58720 can be applied to such genomic profiles without regard to the function of the protein encoded by the interrogated gene.

[1276] Table 6, presented herewith in electronic format and incorporated herein by reference in its entirety, presents expression, homology, and functional information for the genome-derived single exon probes of the present invention that are expressed significantly in human liver.

### EXAMPLE 8

### Genome-derived Single Exon Probes Useful for Measuring Expression of Genes in Fetal Liver

[1277] Table 7, presented herewith in electronic format and incorporated herein by reference in its entirety, presents expression, homology, and functional information for the genome-derived single exon probes of the present invention that are expressed significantly in human fetal liver.

### EXAMPLE 9

### Genome-derived Single Exon Probes Useful for Measuring Expression of Genes in Placenta

[1278] Given the substantial impact on human morbidity and mortality of diseases directly caused by genetic defect, and given the profound influence of genetic factors on the predisposition, onset, and/or aggressiveness of most, if not all human diseases, there has long been interest in efficient and safe means for early detection of gene defects and polymorphisms that cause, are associated with, or are implicated in development of disease.

[1279] Classically, such antenatal diagnosis was effected during second trimester by metaphase karyotyping of fetal cells that had shed spontaneously into amniotic fluid.

[1280] More recently, techniques have been developed that permit direct sampling of placenta earlier in pregnancy.

[1281] One technique in current clinical practice is chorionic villus sampling, which can be used to detect gene defects or polymorphisms in cells from the developing fetus, usually between 10 and 12 weeks of pregnancy. In chorionic villus sampling, a small sample of chorionic villi, which are tiny projections that make up part of the placenta, a fetal-derived tissue, is removed through the mother's cervix or the abdominal wall. Placental chromosomal DNA is then isolated from the chorionic villus cells and analyzed to detect a small number of known genetic defects. Such defects range from gross karyotypic changes, such as triploidy, to discrete point mutations known to cause diseases having significant morbidity or mortality.

[1282] Although only a few diseases are at present diagnosed by antenatal analysis of human placenta, a far higher number of human diseases and disorders have been catalogued in which dysfunction or misregulation of one or more genes contributes to the disease phenotype. At one end of the spectrum of genetic diseases are those, such as sickle cell trait, in which a single point mutation is responsible for the disease phenotype. At the other end of the spectrum lie disorders such as Down syndrome wherein the presence of a supernumerary chromosome manifests itself in variety of phenotypic defects that vary in severity among affected individuals. For most, possibly all genetic diseases, the precise phenotypic manifestation and its severity is a function of a complex interaction between the definable genetic lesion and the action of many other genes and environmental factors.

[1283] Although the incidence of many genetic diseases is low, a sufficient number of such genetic diseases affect a sufficiently large population that they impact the national health economy. For example, cystic fibrosis, caused by mutations in a gene encoding a chloride ion channel and resulting in lung and other disorders, occurs at a rate of about 1 in 3000 births among Caucasians and costs over $1 billion annually for direct medical treatment in the U.S. alone. Furthermore, it is increasingly thought that for many diseases where no clear-cut genetic lesion appears responsible, possession by individuals of particular gene alleles naturally occurring within certain populations places such individuals at increased risk for developing those diseases. Examples include heart disease, neurogenerative disorders, diabetes, cancer and autoimmune disorders.

[1284] For yet other diseases, especially cancer, the etiology is truly polygenic in that defects in multiple genes must cooincide in the same individual or even the same cell for the disease to develop and/or progress.

[1285] The human genome-derived single exon nucleic acid probes and microarrays of the present invention are useful for antenatal diagnosis of human genetic disorders. With each of the single exon probes described in this Example shown to be expressed at detectable levels in human placenta, and with about ⅔ of the probes identifying novel genes, single exon microarrays of the present invention that include such probes provide exceptionally high informational content for such studies.

[1286] For example, antenatal diagnosis can be based upon the quantitative relatedness of a placental gene expression profile to one or more reference expression profiles known to be characteristic of a given disease, or to specific grades or stages thereof.

[1287] In one embodiment, the gene expression profile is generated by hybridizing nucleic acids obtained directly or indirectly from placenta, typically through chorionic villus sampling, to the genome-derived single exon microarray of the present invention. Reference profiles are obtained similarly by hybridizing nucleic acids from individuals with known disease. Methods for quantitatively relating gene expression profiles, without regard to the function of the protein encoded by the gene, are disclosed in WO 99/58720, incorporated herein by reference in its entirety.

[1288] In another approach, the genome-derived single exon probes and microarrays of the present invention can be used to interrogate genomic DNA, rather than pools of expressed message; this latter approach permits presence and/or predisposition to disease to be assessed through the massively parallel determination of altered copy number, deletion, or mutation of exons known to be expressed in human placenta. The algorithms set forth in WO 99/58720 can be applied to such genomic profiles without regard to the function of the protein encoded by the interrogated gene.

[1289] Table 8, presented herewith in electronic format and incorporated herein by reference in its entirety, presents expression, homology, and functional information for the genome-derived single exon probes of the present invention that are expressed significantly in human placenta.

### EXAMPLE 10

[1290] Genome-derived Single Exon Probes Useful for Measuring Expression of Genes in Lung

[1291] Diseases of the lung are a significant cause of human morbidity and mortality. Increasingly, genetic factors are being found that contribute to predisposition, onset, and/or aggressiveness of most, if not all, of these diseases; although causative mutations in single genes have been identified for some, these disorders are, for the most part, believed to have polygenic etiologies.

[1292] For example, asthma affects about 5% of the adult population in the United States, making it the seventh-ranking chronic condition. The worldwide prevalence of asthma has increased more than 30% since the late 1970s, mostly in areas of increased industrialization. The yearly economic costs (including both direct and indirect costs) are estimated at almost $12 billion dollars. Asthma is also one of the most common reasons to seek medical treatment, with over 1.5 million emergency room visits, 500,000 hospitalizations and over 5,500 deaths each year. Outpatient visits are estimated at 15 million per year.

[1293] Patients with asthma suffer shortness of breath accompanied by cough, wheezing, and anxiety. Common features of acute asthma attacks include a rapid respiratory rate, tachycardia, and pulsus paradoxus. Acute attacks can be triggered by environmental factors such as allergens, changes in temperature, and exercise; other acute exacerbations have no discernible precipitating cause. If asthma is not treated, it can be life-threatening.

[1294] It is now well known that genetic factors predispose to asthma, but the exact nature of this genetic component is still imprecise.

[1295] A 1986 human genetic study supported polygenic inheritance, Townley, et. al., J. Allergy Clin. Immun. 77: 101-107 (1986), and more recent studies have suggested that predisposing factors for asthma, if not the disease itself, are heritable. Slutsky, J. Clin. Pharmacol. 39: 246-51 (1999).

[1296] In one approach to elaborating the polygenic contributions to asthma, candidate genes have been suggested based upon presumed involvement in the physiologic processes known to contribute to the asthmatic state. Huss et al., Nurs. Clin. North Am. 35: 695-705 (2000).

[1297] In other studies, linkages and/or associations of genetic markers with atopy, bronchial hyperresponsiveness and/or asthma have been reported in candidate regions, including the 6p region, which includes both the HLA complex and the Tumor Necrosis Factor a gene (TNF-a), the 11q region which includes the gene coding for the b sub-unit of the high-affinity IgE receptor (FcE R1), the T-cell receptor a gene on chromosome 14, the 5q region bearing numerous candidate genes among which are the interleukin (IL-3, 4, 5, 9, 13) cluster and the b₂-adrenergic receptor gene, the 12q region containing the genes for interferon-gamma (IFNg), a mast cell growth factor (MGF), and an insulin-like growth factor (IGF1). The strongest of these linkages are associated with chromosomes 5 and 11. Other linkage regions have been reported on chromosomes 6, 7, 11, 12 and 13. Demenais, The European Network For Understanding Mechanisms of Severe Asthma, BIOMED 2 Program—European Commission (1998). Linkage regions have also been suggested on chromosomes 3, 16 and 14. Duffy, D., “Review of Molecular Genetics of Asthma and Allergy”,

[1298] (http://www2.qimr.edu.au/davidD/asthma6.html).

[1299] As another example, chronic obstructive pulmonary disease (COPD) is the fourth most common cause of death in the United States. Although cigarette smoking is the most common cause of COPD, with smokers having a rate 10 to 30 times higher for developing emphysema than non-smokers, genetic factors are thought to play a significant role in susceptibility to COPD; indeed, only 15-20% of long-term cigarette smokers will develop COPD, suggesting that genetic factors strongly affect outcome.

[1300] COPD includes both chronic bronchitis and emphysema, which share similar symptoms and frequently coexist. More than 16 million Americans have COPD at a cost currently estimated at $30 billion dollars each year. Chronic obstructive lung disease is characterized by a decline in lung function resulting in difficulty in breathing and physiological changes. In severe COPD, patients breathe at very high lung volumes, having lost the lung's normal elastic recoil. Because COPD does not affect the lung uniformly, ventilation and perfusion distribution is impaired. In areas of the lung with low ventilation-perfusion ratios, arterial hypoxia results. This can further lead to pulmonary hypertension, right ventricular failure, and, ultimately, tissue ischemia, such as coronary artery disease.

[1301] The only confirmed genetic risk factor for COPD is the inherited deficiency of alpha 1-proteinase inhibitor (familial emphysema). Familial emphysema accounts for less than 5 percent of all cases of COPD, however, and familial clustering of lung function and COPD suggest the presence of other genetic risk factors. Luisetti et al., Mondaldi Arch. Chest Dis. 50:28-32 (1995); Khoury et. al., Genet Epidemiol. 2: 155-66 (1985).

[1302] Among such additional genetic factors are the presence of the GC2 allele, which appears to exert a protective effect against COPD. Horne et. al., Hum. Hered. 40: 173-76 (1990). Other suspected genetic involvement includes genes coding for alpha1-antichymotrypsin, alpha2-macroglobulin, vitamin D-binding protein and blood group antigens. Sandford et. al., Eur. Respir. J. 10: 1380-91 (1997). Finally, the form of the enzyme microsomal epoxide hydrolase is correlated to susceptibility to COPD. Smith et al., The Lancet 350: 630-33 (1997). It remains uncertain, however, whether other loci contribute to predisposition and aggressiveness of COPD.

[1303] As yet a further example, lung cancer is the leading cause of cancer death in both men and women in the United States. Although smoking is the primary risk factor, genetics plays a known role in susceptibility to these bronchogenic carcinomas.

[1304] The most common of the bronchogenic carcinomas is non-small cell lung cancer (NSCLC), which accounts for 75% of all primary lung cancers. NSCLCs are divided into adenocarcinomas, squamous cell carcinomas, and large cell carcinomas. Small cell lung cancer (SCLC) comprises 20% of primary lung cancers, and carcinoids make up 5%. Other rare forms of lung cancer (all totaling less than 1%) include lymphoma, carcinosarcoma, mucoepidermoid carcinoma, malignant fibrous histiocytoma, melanoma, sarcoma, and blastoma. Lung cancer is generally not associated with clinical symptoms until late in the course of the disease; this late diagnosis is likely to contribute to the poor 5-year survival rate of 14%.

[1305] Premalignant changes are thought to include a number of successive mutations in various growth regulation genes. A chromosome 3p deletion, chromosome 9p deletion, and p53 gene mutations have been identified in premalignant lesions. Chromosomal abnormalities identified in both SCLC and NSCLC include deletions involving chromosomes 3p, 5q, 9p, 11p, 13q, and 17p. Weston et. al., Proc. Nat. Acad. Sci. 86: S5099-5103 (1989). For most of these regions, suspected loci are tumor suppressor genes. Additionally, transforming oncogenes such as Ki-ras, H-ras, N-ras, myc, her2neu, c-kit, bcl-2 and cyclin D1 (prad) have also been shown to be activated in certain types of bronchogenic carcinomas. Perucho et. al., Cell 27: 467-76 (1981); Cecil Textbook of Medicine, 21^{st} ed. (2000).

[1306] Other contributing genetic loci have been identified, including a deletion of the phosphatase and tensin homolog (PTEN) at 10q23.3. Overexpression of PTEN can inhibit invasion in lung cancer cells, and appears to downregulate integrin alpha(6), laminin beta(3), heparin-binding epidermal growth factor-like growth factor, urokinase-type plasminogen activator, myb protein B, and Akt2. Hong et. al., Am. J. Respir. Cell Mol. Biol 23: 355-63 (2000). In a recent study assessing the risk of lung cancer from environmental tobacco smoke (ETS), women who were homozygous null for glutathione S-transferase (GST)-1 (GSTM1) had a statistically significant greater risk of developing lung cancer from ETS. Bennett et. al., J. Nat. Cancer. Inst. 91: 2009-2014 (1999). The identified genetic factors are believed to be only a subset, however, of loci that contribute to disease.

[1307] As a still further example, the interstitial lung diseases (ILDs) share certain pathogenic mechanisms and histopathologic features. ILDs comprise more than 100 disorders characterized by diffuse inflammation and scarring of the lung interstitium, derangement of the alveolar walls and loss of functional alveolar capillary units. Symptoms include breathlessness, exercise intolerance, and progressive respiratory insufficiency. ILD is estimated to account for 100,000 hospital admissions each year.

[1308] Genetic factors are known to contribute to the development of some types of ILD. Examples are familial idiopathic pulmonary fibrosis, neurofibromatosis, tuberous sclerosis, Gaucher's disease, Niemann-Pick disease and Hermansky-Pudlak syndrome. ILDs with unknown etiology include, e.g., sarcoidosis, pulmonary hemosiderosis, pulmonary histiocytosis, lymphangioleiomyomatosis, pulmonary alveolar proteinosis, and nonspecific interstitial lung disease.

[1309] As an example of still undefined polygenic basis, the etiology of sarcoidosis remains enigmatic, but has long been suspected to have a genetic component. Ethnic preponderance, familial clustering and multigenerational involvement all point towards hereditary susceptibility. Rybicki et. al., Clin. Chest Med. 18: 707-717 (1997). Some studies have shown an association between susceptibility to sarcoidosis and HLA type. Nowack et al., Arch. Intern. Med. 147: 481-83 (1987); Ishihara et. al., Tissue Antigens 50: 650-53 (1997).

[1310] Other significant diseases of the lung are also believed to have a genetic, typically polygenic, etiologic component. These diseases include, for example, Kartagener syndrome, fibrocystic pulmonary dysplasia, primary ciliary dyskinesis, pulmonary hypertension, and hyaline membrane disease.

[1311] The human genome-derived single exon nucleic acid probes and microarrays of the present invention are useful for predicting, diagnosing, grading, staging, monitoring and prognosing diseases of human lung, particularly those diseases with polygenic etiology. With each of the single exon probes described in this Example shown to be expressed at detectable levels in human lung, and with about ⅔ of the probes identifying novel genes, single exon microarrays of the present invention that include such probes provide exceptionally high informational content for such studies.

[1312] For example, diagnosis (including differential diagnosis among clinically indistinguishable disorders, such as the ILDs), staging, and/or grading of a disease can be based upon the quantitative relatedness of a patient gene expression profile to one or more reference expression profiles known to be characteristic of a given lung disease, or to specific grades or stages thereof.

[1313] In one embodiment, the patient gene expression profile is generated by hybridizing nucleic acids obtained directly or indirectly from transcripts expressed in the patient's lung to the genome-derived single exon microarray of the present invention. Reference profiles are obtained similarly by hybridizing nucleic acids from individuals with known disease. Methods for quantitatively relating gene expression profiles, without regard to the function of the protein encoded by the gene, are disclosed in WO 99/58720, incorporated herein by reference in its entirety.

[1314] In another approach, the genome-derived single exon probes and microarrays of the present invention can be used to interrogate genomic DNA, rather than pools of expressed message; this latter approach permits predisposition to and/or prognosis of lung disease to be assessed through the massively parallel determination of altered copy number, deletion, or mutation in the patient's genome of exons known to be expressed in human lung. The algorithms set forth in WO 99/58720 can be applied to such genomic profiles without regard to the function of the protein encoded by the interrogated gene.

[1315] Table 9, presented herewith in electronic format and incorporated herein by reference in its entirety, presents expression, homology, and functional information for the genome-derived single exon probes of the present invention that are expressed significantly in human lung.

### EXAMPLE 11

### Genome-derived Single Exon Probes Useful for Measuring Expression of Genes in Bone Marrow

[1316] Because bone marrow is the tissue in which blood cells originate, diseases of the bone marrow are a significant cause of human morbidity and mortality. Increasingly, genetic factors are being found that contribute to predisposition, onset, and/or aggressiveness of most, if not all, of these diseases. Although mutations in single genes have in some cases been identified as causal—notably in the thalassemias and sickle cell anemia—disorders of the bone marrow are, for the most part, believed to have polygenic etiologies.

[1317] For example, cancers that originate in the bone marrow and lymphatic tissues such as the lymphomas, leukemias, and myeloma have been recognized as a major health concern. An estimated 632,000 Americans are presently living with lymphoma, leukemia or myeloma, and over 110,000 new cases are anticipated each year. The new cases alone account for 11% of all cancer cases reported in the United States.

[1318] Lymphoma is a general term for a group of cancers of lymphocytes that manifest in the tissues of the lymphatic system. Eventually, monoclonal proliferation crowds out healthy cells and creates tumors which enlarge lymph nodes. Approximately 450,000 members of the U.S. population are living with lymphoma: 160,000 with Hodgkin disease (HD) and 290,000 with non-Hodgkin lymphoma.

[1319] Hodgkin disease (HD) is a specialized form of lymphoma, and represent about 8% of all lymphomas. HD can be distinguish in tissues by the presence of an abnormal cell called the Reed-Sternberg cell. Incidence rates of HD are higher in adolescents and young adults, but HD is considered to be one of the most curable forms of cancer. Symptoms of HD include painless welling of lymph glands, fatigue, recurrent high fever, sweating at night, skin irritations and loss of weight.

[1320] Although an infectious etiology has been proposed to account for the disproportionate incidence of HD among siblings reared together—particularly an association with Epstein Barr Virus (EBV)—multiple genetic contributions have also been suggested.

[1321] As early as 1986, linkage to HLA was suggested, with Klitz et al., Am. J. Hum. Genet. 54: 497-505 (1994) reporting an overall association of the nodular sclerosing (NSHD) group with the HLA class II region. Results of the study suggested that susceptibility to NSHD is influenced by more than 1 locus within the class II region. Through a literature search, Shugart and Collins (2000), Europ. J. Hum. Genet. 8: 460-463 (2000), performed a combined segregation and linkage analysis on 59 nuclear families with HD and concluded that HD is most likely determined by both an HLA-associated major gene and other non-HLA genetic factors, in conjunction with environmental effects.

[1322] Non-Hodgkin lymphoma (NHL) is a malignant monoclonal proliferation of the lymphoid cells in the immune system, including bone marrow, spleen, liver and GI tract. The pathologic classification of NHL continues to evolve, reflecting new insights into the cells of origin and the biologic bases of these heterogeneous diseases. The course of NHL varies from indolent and initially well tolerated to rapidly fatal. Furthermore, common clinical symptoms of NHL, but rare in HD, are congestion and edema of the face and neck and ureteral compression.

[1323] Non-Hodgkin lymphoma (NHL) has been linked to a variety of specific genetic defects, including 26 mutated genes and at least 9 identified chromosomal translocations. Among the mutated genes are: ALK (2p23); API2 (MIHC, cIAP2) (11q22-q23); API4 (survivin, SVV)(17q25(?)); ATM (ATA, ATC) (11q22.3); BCL1 (11q13.3); BCL10 (CLAP, CIPER)(1p22); BCL2 (18q21.3); BCL6 (LAZ3,ZNF51) (3q27); BLYM (1p32); BMI1 (10p13); CCND1 (D11S287E, Cyclin D,PRAD1)(11q13); CD44 (MDU3, HA, MDU2)(11pter-p13); FRAT1 (10q23-q24(?)); FRAT2 (GBP)(10(?)); IL6 (IFNB2)(7p21); IRF4 (MUM1, LSIRF) (6p25-p23); LCP1 (PLS2)(13q14.1-q14.3); MALT1 (MLT)(18q21); MUC1 (PUM,PEM)(1q21); MYBL1 (AMYB, A-MYB)(8q22); MYC (CMYC, C-MYC )(8q24.12-q24.13); NBS1(8q21); NPM1 (B23)(5q35); PCNA (20pl2); TIAM1 (21q22.1); and TP53 (p53, P53)(17q13.1).

[1324] Among the chromosomal abnormalities are: t(1;14) (p22;q32); t(14;18)(q32;q21); t(3;14)(q27;q32); t(6;14)(p25,q32); t(11;18)(q21;q21); t(1;14)(q21;q32); t(2;5)(p23;q35); add(14q32)/dup(14p32); and t(ll;14) (ql3;q32).

[1325] Additional genetic loci, as yet undiscovered, are believed to account for other occurrences of NHL.

[1326] As another example, acute leukemia is a malignant disease of blood-forming tissues such as the bone marrow. It is characterized by the uncontrolled growth of white blood cells. As a result, immature myeloid cells (in acute myelogenous leukemia (AML)) or lymphoid cells (in acute lymphocytic leukemia (ALL)) rapidly accumulate and progressively replace the bone marrow; diminished production of normal red cells, white cells, and platelets ensues. This loss of normal marrow function in turn gives rise to the typical clinical complications of leukemia: anemia, infection, and bleeding.

[1327] If untreated, ALL is rapidly fatal; most patients die within several months of diagnosis. With appropriate therapy, many patients can be cured. The survival rate for patients diagnosed with AML or ALL is 14% and 58% respectively. However, the incidences of AML is expected to be greater than ALL: an estimated 10,000 new cases of AML, predominantly in older adults, is anticipated in the U.S. alone, whereas 3,100 new cases of ALL are expected, with 1,500 of these new cases occurring among children. The etiology of acute leukemia is not known.

[1328] Although human T-cell lymphotropic virus type I (HTLV-I), a causative agent of adult T-cell leukemia, and HTLV-II, obtained from several patients with a syndrome resembling hairy cell leukemia, have been isolated, the etiologic link between HTLV and malignancy is uncertain. There is, however, evidence which suggests a genetic predisposition to incidences of acute leukemia.

[1329] For example, genetic disorders such as Fanconi anemia and Down syndrome appear to increase risk of acute leukemia, specifically, AML. Evidence supporting a chromosome 21 locus for acute myelogenous leukemia (AML) includes the finding of linkage to 21q22.1-q22.2 in a family with a platelet disorder and propensity to develop AML (Ho et al., Blood 87: 5218-5224 (1996), an increased incidence of leukemia in Down syndrome, and frequent somatic translocation in leukemia involving the CBFA gene on 21q22.3. In addition, Horwitz et al., Am. J. Hum. Genet. 61:873-881 (1997), suggest that a gene on 16q22 may be a second cause of acute myelogenous leukemia. Nonparametric linkage analysis gave a P-value of 0.00098 for the conditional probability of linkage. Mutational analysis excluded expansion of the AT-rich minisatellite repeat FRA16B fragile site and the CAG trinucleotide repeat in the E2F-4 transcription factor. Large CAG repeat expansion was excluded as a cause of leukemia in this family.

[1330] Similarly, acute lymphoblastic leukemia (ALL) has been suggested to have a genetic predisposition. In particular, linkage to chromosome 9p has been reported by a number of groups. Chilcote et al., New Eng. J. Med. 313: 286-291 (1985), found that 6 of 8 patients with clinical features of lymphomatous ALL (LALL), a distinct category of ALL of T-cell lineage, had karyotypic abnormalities leading to loss of bands 9p22-p21. The mechanisms varied and included deletions, unbalanced translocations, and loss of the entire chromosome; only 1 of 57 patients without LALL had an abnormality of chromosome 9 at diagnosis. Kowalczyk et al., Cancer Genet. Cytogenet. 9:383-385 (1981), had earlier found changes in 9p in a subgroup of ALL cases. Chilcote et al. (1985) pointed out that there is a fragile site at 9p21 and raised the question of familial predisposition on this basis. This fragile site is the breakpoint in the translocation t(9;11)(p21-22;q23), which is associated with acute nonlymphocytic leukemia with monocytic features, ANLL-AMoL-M5a. In a large series, Murphy et al., New Eng. J. Med. 313:1611 (1985), confirmed an abnormality of 9p in 10 to 11% of cases (33 out of more than 300) of acute lymphoblastic leukemia. The breakpoints in 9p clustered in the p22-p21 region. They could not, however, corroborate the specific association with T-cell origin or so-called lymphomatous clinical features. In addition, Taki et al., Proc. Natl. Acad. Sci. USA 96:14535 (1999), recently identified AF5q31, a new AF4-related gene, fused to MLL in infant ALL with ins(5;11)(q31;ql3q23), and suspects that AF5q31 and AF4 might define a new family particularly involved in the pathogenesis of 11q23-associated-ALL.

[1331] As yet a further example of a disease affecting bone marrow with likely polygenic etiology is multiple myeloma (MM).

[1332] MM is a cancer of plasma cells, the final differentiated stage of B lymphocyte maturation. The malignant clone proliferates in the bone marrow and frequently invades the adjacent bone, producing extensive skeletal destruction that results in bone pain and fractures. Anemia, hypercalcemia, and renal failure are some clinical manifestations associated with MM.

[1333] MM causes 1% of all cancer deaths in Western countries. A genetic component to its etiology is suggested by disparate incidence among various groups in the country. Its incidence is higher in men than in women, in people of African descent relative to the U.S. population at large, and in older adults as compared to the young. It has been estimated that 14,000 new cases of myeloma will be diagnosed in the U.S., and over 11,000 persons will die from MM within the year.

[1334] Although, Kaposi's sarcoma-associated herpes virus has been associated with MM (Retig et al., Science 276:1851 (1997)), there is evidence that chromosomal abnormalities, such as the deletion of 13ql4 and rearrangements of 14q increase the proliferation of myeloma cells.

[1335] Up to 30% of patients who suffer with MM have a balanced translocation, t(4;14)(p16.3;q32), that places the fibroblast growth factor receptor 3 (FGFR3) gene under the control of IgH promoter elements (Chesi et al., Nat. Genet. 16:260 (1997)). This results in increased expression of FGFR3, a member of a family of tyrosine kinase receptors implicated in control of cellular proliferation.

[1336] According to Zoger et al., Blood 95:1925 (2000), monoallelic deletions of the retinoblastoma-1 (rb-1) gene and the D13S319 locus were observed in 48 of 104 patients (46.2%) and in 28 of 72 (38.9%) patients, respectively, with newly diagnosed MM. Fluorescence in situ hybridization (FISH) studies found that 13q14 was deleted in all 17 patients with karyotypic evidence of monosomy 13 or deletion of 13q but also in 9 of 19 patients with apparently normal karyotypes. Patients with a 13q14 deletion were more likely to have higher serum levels of beta(2)-microglobulin (P=0.059) and a higher percentage of bone marrow plasma cells (P=0.085) than patients with a normal 13q14 status on FISH analysis. In patients with a deletion of 13q14, myeloma cell proliferation was markedly increased. The presence of a 13q14 deletion on FISH analysis was associated with a significantly lower rate of response to conventional-dose chemotherapy (40.8% compared with 78.6%; P=0.009) and a shorter overall survival (24.2 months compared with >60 months; P<0.005) than in patients without the deletion.

[1337] There are numerous other mutated genes and chromosomal abnormalities that may predispose to MM. Examples of such genes are: B2M (15q21-q22); CCND1 (D11S287E, Cyclin D, PRAD1)(11q13); CD19 (16p11.2); HGF (HPTA)(7q21.1); IL6 (IFNB2)(7p21); IRF4 (MUM1, LSIRF)(6p25-p23); LTA (TNFB, LT)(6p21.3); SDC1 (2p24.1); and TNF (TNFA, TNFSF2, DIF)(6p21.3). Examples of chromosomal abnormalities include:

[1338] t(6;14)(p25;q32) and t(11;14)(q13;q32).

[1339] Other significant diseases or disorders of the bone marrow are also believed, or likely to have, a genetic, typically polygenic, etiologic component. These diseases include, for example, chronic myeloid leukemia, chronic lymphoid leukemia, polycythemia vera, myelofibrosis, primary thrombocythemia, myelodysplastic syndromes, Wiskott-Aldrich, lymphoproliferative syndrome, aplastic anemia, Fanconi anemia, Down syndrome, sickle cell disease, thalassemia, granulocyte disorders, Kostmann syndrome, chronic granulomatous disease, Chediak-Higashi syndrome, platelet disorders, Glanzmann thrombasthenia, Bernard-Soulier syndrome, metabolic storage diseases, osteopetrosis, congenital hemophagocytic syndrome.

[1340] The human genome-derived single exon nucleic acid probes and microarrays of the present invention are useful for predicting, diagnosing, grading, staging, monitoring and prognosing diseases of human bone marrow, particularly those diseases with polygenic etiology. With each of the single exon probes described in this Example shown to be expressed at detectable levels in human bone marrow, and with about ⅔ of the probes identifying novel genes, single exon microarrays of the present invention that include such probes provide exceptionally high informational content for such studies.

[1341] For example, diagnosis, grading, and/or staging of a disease can be based upon the quantitative relatedness of a patient gene expression profile to one or more reference expression profiles known to be characteristic of a given bone marrow disease, or to specific grades or stages thereof.

[1342] In one embodiment, the patient gene expression profile is generated by hybridizing nucleic acids obtained directly or indirectly from transcripts expressed in the patient's bone marrow (or cells cultured therefrom) to the genome-derived single exon microarray of the present invention. Reference profiles are obtained similarly by hybridizing nucleic acids obtained directly or indirectly from transcripts expressed in the bone marrow of individuals with known disease. Methods for quantitatively relating gene expression profiles, without regard to the function of the protein encoded by the gene, are disclosed in Wo 99/58720, incorporated herein by reference in its entirety.

[1343] In another approach, the genome-derived single exon probes and microarrays of the present invention can be used to interrogate genomic DNA, rather than pools of expressed message; this latter approach permits predisposition to and/or prognosis of diseases of bone marrow to be assessed through the massively parallel determination of altered copy number, deletion, or mutation in the patient's genome of exons known to be expressed in human bone marrow. The algorithms set forth in WO 99/58720 can be applied to such genomic profiles without regard to the function of the protein encoded by the interrogated gene.

[1344] Table 10, presented herewith in electronic format and incorporated herein by reference in its entirety, presents expression, homology, and functional information for the genome-derived single exon probes of the present invention that are expressed significantly in human bone marrow.

### EXAMPLE 12

### Genome-derived Single Exon Probes Useful for Measuring Expression of Genes in HeLa Cells

[1345] Table 11, presented herewith in electronic format and incorporated herein by reference in its entirety, presents expression, homology, and functional information for the genome-derived single exon probes of the present invention that are expressed significantly in HeLa cells.

### EXAMPLE 13

### Genome-derived Single Exon Probes Useful for Measuring Expression of Genes in BT 474 Cells

[1346] Diseases of the breast are a significant cause of human morbidity and mortality. Increasingly, genetic factors are being found that contribute to predisposition, onset, and/or aggressiveness of most, if not all, of these diseases. Although mutations in single genes have been identified as causative for some diseases of the breast, for the most part these disorders are believed to have polygenic etiologies.

[1347] For example, according to the American Cancer Society (ACS), carcinoma of the breast is the second most common cancer in women and, after lung cancer, is the second deadliest. The ACS estimates that in the U.S. there occurred 182,800 new cases of malignant breast cancer in 2000, and about 40,800 deaths from the disease. Although incidence of breast cancer is said to have declined, the disease clearly continues to represent a serious risk to the health and life of American women. Indeed, about one in nine U.S. women will develop breast cancer in her lifetime, and at present mortality rates, about a third of such women will eventually die from the disease.

[1348] A variety of factors are known to increase the risk of breast carcinoma. Sex is one: breast cancer in men is rare. Age is another: as women age, their risk for developing breast cancer increases, a 70 year old woman having three times the risk of developing cancer and five times the risk of dying from the disease as compared to a 40 year old woman. Most breast cancers occur after age 50, although in women with a genetic susceptibility, breast cancer tends to occur at an earlier age than in sporadic cases. Reproductive and menstrual history are also known to affect risk, with risk increasing with early menarche and late menopause, and is reduced by early first full term pregnancy. Additional risk factors, oft-times termed “lifestyle factors”, include weight gain, obesity, fat intake, alcohol consumption, and level of physical activity.

[1349] That genetic factors underlie the etiology of breast cancer is suggested by the approximately two-fold increased risk for development of breast cancer by women with a first-degree relative who has also developed breast cancer. After gender and age, a positive family history is the strongest known predictive risk factor for breast cancer. Genetic linkage analysis in families with high rates of inherited cancer have facilitated the identification of several genes in which mutations can be shown to contribute substantially to the development and progression of breast cancer, including BRCA1, BRCA2, p53, and PTEN/MMAC1. Further study has made clear, however, that these genes are not alone sufficient to explain all genetic contributions to breast cancer.

[1350] For example, BRCA1 appears to be responsible for disease in up to 90% of families with both breast and ovarian cancer, but in only 45% of families with multiple cases of breast cancer without occurrence of ovarian cancer. And mutations in BRCA2, localized to the long arm of chromosome 13, are thought to account for only approximately 35% of multiple case breast cancer families. Furthermore, despite the strong correlation between germline mutations in BRCA1 or BRCA2 and development of breast cancer, only weak connections have been made between these genes and sporadic breast cancer.

[1351] Epistatic effects of BRCA1 and BRCA2 mutations on other genetic loci, only some of which have been identified, have been postulated to account for some of the deleterious effects of mutations in these two genes.

[1352] Thus, mutations in p53 seem to be much more frequent in BRCAl breast cancers (20/26) and somewhat more frequent in BRCA2-associated breast cancers (10/22) than in grade-matched sporadic cancers (7/20). BRCA mutation-associated cancers contain p53 mutations not typically found in sporadic breast cancer, and 12 individual hereditary breast cancers have been shown to contain more than a single p53 mutation. Mutations of BRCA1 and BRCA2 may thus confer a “mutator” phenotype permitting the accumulation of genetic abnormalities, with p53 inactivation selected during tumor progression.

[1353] Additionally, genome-wide screening for chromosomal gains or losses in breast cancers harboring BRCA1 or BRCA2 mutations demonstrated more regions that were amplified or deleted compared to controls, suggesting a generalized increase in large-scale genomic instability. Chromosomes 5q, 4q, and 4p had very frequent loss of heterozygosity in BRCA1 tumors, while BRCA2 tumors were characterized by losses at 13q (near the BRCA2 locus itself) and 6q, and chromosomal gains at 17q (outside of the HER2/neu locus) and 20q.

[1354] Mutations of other genes have also been implicated in susceptibility to development or aggressiveness of breast cancer. For example, germline mutations in the ATM gene, localized to chromosome 11q22-23, result in an increased risk of breast cancer among female heterozygote carriers with an estimated relative risk of 3.9 to 6.4; it is unclear, however, if mutations in the ATM gene itself contribute to breast cancer.

[1355] Normal allelic variation in a variety of genes, as opposed to frank mutation, may also influence susceptibility to developing breast carcinoma and the propensity for the disease to progress. Such polymorphisms may thus explain why particular women or ethnic groups who do not otherwise bear mutations in genes known to be linked to breast cancer are at greater risk, especially in the context of exposure to environmental agents and other nonhereditary risk factors. Polymorphically expressed genes may code for enzymes that metabolize estrogens or detoxify drugs and environmental carcinogens.

[1356] For example, molecular epidemiologic studies of cancer of the breast have examined associations with p450 cytochrome genotypes including CYPlAl, CYP2D6, and CYP17. The CYPlAl gene, located on chromosome 15q, encodes the enzyme aryl hydrocarbon hydroxylase (AHH), present in breast tissue, and which catabolizes polycyclic aromatic hydrocarbons and arylamines. AHH is strongly inducible, i.e., greater enzymatic activity is seen with greater exposure to substrates. AHH catalyzes the monooxygenation of polycyclic aromatic hydrocarbons to phenolic products and epoxides that may be carcinogenic. AHH is also involved in the conversion of estrogen to hydroxylated conjugated estrogens such as 2-hydroxyestradiol.

[1357] Three polymorphisms in the CYPlAl gene have been identified: an MspI RFLP of the 3′ end of the gene (MspI); an adenine to guanine mutation in exon 7, causing an isoleucine to valine substitution (Ile-Val); and a polymorphism of the CYPlAl gene identified among Negroids. The frequencies of the MspI and Ile-Val polymorphisms vary considerably by race, being higher among Japanese and Hawaiian populations as compared with Caucasians and Negroids.

[1358] The CYP2D6 gene is located on chromosome 22q and encodes the enzyme debrisoquine hydroxylase, which metabolizes a variety of drugs and other xenobiotics. Like other polymorphically expressed p450 enzymes, it may activate procarcinogens or, conversely, detoxify carcinogens. A number of alleles have been characterized at the CYP2D6 locus. The “poor metabolizer” phenotype (CYP2D6 mutant/mutant genotype), which is rare in Asians, occurs in about 5% to 10% of Caucasians and in 2% of Negroids.

[1359] As another example, the N-acetyl transferase-1 (NAT1) and N-acetyl transferase-2 (NAT2) genes are located on chromosome 8q. Allelic variation in the NAT genes may contribute to variation in populations as to the susceptibility of individuals to development of breast carcinoma, particularly in the context of exposure to compounds present in tobacco. NAT2 detoxifies or, conversely, activates aromatic amines found in tobacco smoke such as 4-aminobiphenyl. Both phenotypic assays and genotypic assays for NAT2 can be used to classify individuals as rapid or slow acetylators. Genetic variants of the NAT2 gene have been cloned and 6 alleles at this locus have been identified: the Fl allele confers the fast acetylator phenotype. The distribution of NAT1 and NAT2 alleles differs widely between racial and ethnic groups.

[1360] As yet another example, the glutathione S-transferase-M1(GSTM1) gene is located on chromosome 1 and the gene for glutathione S-transferase-T1 (GSTT1) is located on chromosome 11q. A glutathione S-transferase-P1 (GSTP1) gene has also been identified. Glutathione S-transferases detoxify a variety of carcinogens and cytotoxic drugs (for example, benzo(a)pyrene, monohalomethanes such as methyl chloride, ethylene oxide, pesticides, and solvents used in industry) by catalyzing the conjugation of a glutathione moiety to the substrate. Allelic variation in the glutathione-S-transferase genes may contribute to variation in populations as to the susceptibility of individuals to development of breast carcinoma, particularly in the context of exposure to environmental toxins. Individuals homozygous for deletions in the GSTM1, GSTT1, or GSTP1 genes may have a higher risk of cancer of the breast and other sites because of their impaired ability to metabolize and eliminate carcinogens.

[1361] GSTM1 is polymorphically expressed and 3 alleles at the GSTM1 locus have been identified: GSTM1-0 (homozygous deletion genotype), GSTMla, and GSTMlb. The null allele (GSTM1-0) is present in about 38% to 67% of Caucasians and 22% to 35% of Negroids. GSTM is not expressed in breast tissue at high levels. Two functionally different genotypes at the GSTT1 locus have been described: GSTT1-0 (homozygous deletion genotype) and GSTT1-1 (genotypes with 1 or 2 undeleted alleles). A polymorphism of the GSTP1 gene, A313G (changing codon 105 from Ile to Val), has been identified. The GSTT1-0 allele has been associated with accelerated age of first breast cancer diagnosis as compared with the GSTT1-1 allele.

[1362] Many other genes have been suggested to be involved in the development and/or progression of breast cancer, either as a result of gain of function or loss of function mutations, or as a result of normal allelic variation within different populations. A nonexhaustive list of such genes, each followed by the gene's chromosomal location, if known, follows: AMPH 7p14-p13; AMPHL (BIN1 , SH3P9) 2q14; API4 (survivin, SVV) 17q25(?); ARHA (ARH12, RhoA) 3p21.3; ARHC (RhoC) 1p21-p13; ATM (ATA, ATC) 11q22.3; BAG19p12; BARD1 2q34-q35; BCAR1 16q23.1; BCAR2; BCAR3 (NSP2); BCAS1 (NABC1, AIBC1) 20q13.2-q13.3; BRCA1 17q21; BRCA2 13q12.3; CCND1 (D11S287E, Cyclin D, PRAD1) 11q13; CD44 (MDU3, HA, MDU2) 11pter-p13; CD9 (p24, MIC3, BA2) 12p13; CDKN1B (KIP1, P27) 12p13; CDKN2A (P16, INK4A, MTS1) 9p21; COMT 22q11.2; COT (MAP3K8, TPL-2, EST) 10p11.2; CSK (c-src) 15q23-q25; CTSD (CPSD) 11p15.5; CYP17 10q24.3; CYP19 15q21.1; CYP1A1 (CYP1) 15q22-q24; CYP1B1 (GLC3A) 2p22-p21; EFNB2 (EPLG5, LERK5, ephrin-B2) 13q33; EIF3S6 (INT6) 8q22-q23; EIF4E (EIF-4E) 4q21-q25; EMS1 11q13; ERBB2 (HER2, NEU) 17q11.2-q12; ERBB3 (HER3) 12q13; ESR1 (ESRA) 6q25.1; ESR2 (ESRB, ERBeta) 14q; FGF8 (AIGF) 10q24; GSTM1 (GST1, MU) 1p13.3; GSTP1 (FAEES3, GST3, PI) 11q13; GSTT1 22q11.23 ?; HRAS llpl5.5; HSPB1 (HSP27) 7q; HSPCA (HSP90A , HSPC1); HSPCB (HSP90B, HSPC2) 6p12; IGF1 12q22-q24.1; IGF1R (JTK13) 15q25-q26; IGF2 11p15.5; IL6 (IFNB2) 7p21; ING1 13q34; KISS1 (KiSS-1) 1q32; KLK3 (PSA, APS) 19q13; LASP1 (MLN50) 17q11-q21.3; LIBC 6q22; MAP2K4 (MKK4, SEKI, JNKK1) 17p11.2; MKI67 (Ki-67) 10q25-qter; MMP11 (STMY3, STR3) 22q11.2; MMP2 (CLG4A, CLG4, GELA) 16q13; MUC1 (PUM, PEM) 1q21; MYC (CMYC, C-MYC) 8q24.12-q24.13; NOTCH4 (INT3, NOTCH3) 6p21.3; PCNA 20p12; PI5 (maspin ) 18q21.3; PLAU (uPA, URK) 10q24; PSEN2 (D21S21, HPS2, BCEI) 21q22.3; RARB (NR1B2, HAP) 3p24; RB1 (Rb) 13q14.2; S100A4 (MTS1, P9KA, metastasin) 1q21; SLC22A1L (BWSCR1A, ORCTL2, IMPT1) 11p15.5; SNCG (BCSG1) 10q23.2-q23.3; SRD5A2 2p23; STIP1 (HSP70) 11?; STK11 (LKB1, PJS) 19p13.3; TFAP2A (AP2, AP2TF) 6p24; TFAP2B (AP2B) 6p12; TFAP2C 20q13.2; TFF1 (D21S21, BCEI) 21q22.3; TGFBR2 3p22; TIMP2 17q25; TP53 (p53 , P53) 17q13.1; TPD52 (D52) 8q21; TPD52L1 (D53, hD53) 6q22-q23; TSG101 11p15.2-p15.1.

[1363] The etiology of non-cancerous disorders of the breast may also involve genetic factors. Such disorders include disorders of development, inflammatory diseases of the breast, fibrocystic changes, proliferative breast disease, and non-carcinoma tumors.

[1364] Disorders of development of the breast include supernumerary nipples or breasts; accessory axillary breast tissue; congenital inversion of the nipples; and macromastia.

[1365] Inflammatory diseases of the breast include acute mastitis; periductal mastitis, also called recurrent subareolar absecess and sqamous metaplasia of the lactiferous ducts; mammary duct ectasia; fat necrosis; and granulomatous mastitis, including granulomatous lobular mastitis. Systemic granulomatous diseases that can affect the breast include Wegener granulomatosis and sarcoidosis.

[1366] Proliferative breast diseases include epithelial hyperplasia; sclerosing adenosis; and small duct papillomas. Non-carcinoma tumors include stomal tumors including fibroadenoma and phyllodes tumor, and sarcomas that include angiosarcoma, rhabdomyosarcoma, liposarcoma, leiomyosarcoma, chondrosarcoma and osteosarcoma. Other breast tumors include epithelial cell tumors including large duct papillomas.

[1367] The human genome-derived single exon nucleic acid probes and microarrays of the present invention are useful for predicting, diagnosing, grading, staging, monitoring and prognosing diseases of human breast, particularly those diseases with polygenic etiology. With each of the single exon probes described in this Example shown to be expressed at detectable levels in human breast cancer cells, and with about ⅔ of the probes identifying novel genes, single exon microarrays of the present invention that include such probes provide exceptionally high informational content for such studies.

[1368] For example, diagnosis, grading, and/or staging of a disease can be based upon the quantitative relatedness of a patient gene expression profile to one or more reference expression profiles known to be characteristic of a given breast disease, or to specific grades or stages thereof.

[1369] In one embodiment, the patient gene expression profile is generated by hybridizing nucleic acids obtained directly or indirectly from transcripts expressed in the patient's breast to the genome-derived single exon microarray of the present invention. Reference profiles are obtained similarly by hybridizing nucleic acids from individuals with known disease. Methods for quantitatively relating gene expression profiles, without regard to the function of the protein encoded by the gene, are disclosed in WO 99/58720, incorporated herein by reference in its entirety.

[1370] In another approach, the genome-derived single exon probes and microarrays of the present invention can be used to interrogate genomic DNA, rather than pools of expressed message; this latter approach permits predisposition to and/or prognosis of breast disease to be assessed through the massively parallel determination of altered copy number, deletion, or mutation in the patient's genome of exons known to be expressed in human breast. The algorithms set forth in WO 99/58720 can be applied to such genomic profiles without regard to the function of the protein encoded by the interrogated gene.

[1371] Table 12, presented herewith in electronic format and incorporated herein by reference in its entirety, presents expression, homology, and functional information for the genome-derived single exon probes that are expressed significantly in BT474 cells, human epithelial cells isolated from a solid, invasive ductal carcinoma of the breast and available commercially from American Type Culture Collection under catalogue number HTB-20.

### EXAMPLE 14

### Genome-derived Single Exon Probes Useful For Measuring Expression of Genes in HBL 100 Cells

[1372] Table 13, presented herewith in electronic format and incorporated herein by reference in its entirety, presents expression, homology, and functional information for the genome-derived single exon probes that are expressed significantly in HBL 100 cells, a hormone-sensitive human breast cancer cell line.

[1373] All patents, patent publications, and other published references mentioned herein are hereby incorporated by reference in their entireties as if each had been individually and specifically incorporated by reference herein. While preferred illustrative embodiments of the present invention are described, one skilled in the art will appreciate that the present invention can be practiced by other than the described embodiments, which are presented for purposes of illustration only and not by way of limitation. The present invention is limited only by the claims that follow.

The application's sequence listing, which the Patent Office published only in electronic form, follows.

SEQUENCE LISTING (49117 sequences)

SEQ ID NO: 1 - DNA, 466 bp, Homo sapiens
  MAP TO AC007372.4; EXPRESSED IN ADULT LIVER, SIGNAL = 1.3; EXPRESSED IN BRAIN, SIGNAL = 0.95; EXPRESSED IN HEART, SIGNAL = 1.1; EXPRESSED IN PLACENTA, SIGNAL = 1.7; EXPRESSED IN BT474, SIGNAL = 1.7; EXPRESSED IN HELA, SIGNAL = 2.5; EXPRESSED IN LUNG, SIGNAL = 1.7; EXPRESSED IN FETAL LIVER, SIGNAL = 1.2; EXPRESSED IN HBL100, SIGNAL = 1.7; EXPRESSED IN BONE MARROW, SIGNAL = 1.8
tcatatggcccaagtggaagagcagcttgcacagcagcctggaccttttgcagaaccttctccggttctggattccactcaaaaatggcagccttttgaatcactagataaaggggctggagtagcccacccaaatgaggaatgtgttgcctccaaaatccaaatagacccactaggcgttgtgcctctttcttggttgtaggaggggccaaatgcagcaacttatcctttaccttagaaagaatatctctacaggccccacaccactggacccctagaaattttactaaggtagaaggtccctgaattttagtcggacttatttcccatcctctgacacacaaatgtctcaccaataagtccagtgtgtttgctacttcttgctcactggatccaatcagcataatgtcatcagtgtaatggaccagtgtgatatcttgcagaagcaaaaagcaatcaaggttgc

SEQ ID NO: 2 - DNA, 475 bp, Homo sapiens
  MAP TO AC007372.4; EXPRESSED IN HELA, SIGNAL = 4.8; EXPRESSED IN ADULT LIVER, SIGNAL = 1.5; EXPRESSED IN BRAIN, SIGNAL = 1.5; EXPRESSED IN BT474, SIGNAL = 2.2; EXPRESSED IN FETAL LIVER, SIGNAL = 1.7; EXPRESSED IN LUNG, SIGNAL = 2.3; EXPRESSED IN HEART, SIGNAL = 1.9; EXPRESSED IN PLACENTA, SIGNAL = 2.9; EXPRESSED IN BONE MARROW, SIGNAL = 1.2; EXPRESSED IN HBL100, SIGNAL = 1.6
ggcatttgagccactttctcacgtaacttacttatgccttcaggacctgctcgagctcaatcatgtatataccacttccatttgatgatacaatgctgctgtgcctgaaccactttatggctagatgggtcagaaagcatccagttcatgataggcaattcaggttgcatggtgacttgatgacccatagtcaaacattcagtttccaccaaggcccaggaacaggcaaagagctgtctctcaaaaggagagtagttatctgcagaagatggcagggccatgctccaaaatcctacaggcctctgctgtgattcacctatgagggcctgccaaaggctccaaacagcatctctatctgccactaacacctcaagcatgattggatctgttgggtcatatggcccaagtggaagagcagcttgcacagcagcctggaccttttgcagaaccttctccggttctggattccactcaa

SEQ ID NO: 3 - DNA, 454 bp, Homo sapiens
  MAP TO AC007372.4; EXPRESSED IN BT474, SIGNAL = 0.75; EXPRESSED IN HBL100, SIGNAL = 0.8; EXPRESSED IN LUNG, SIGNAL = 0.77; EXPRESSED IN HELA, SIGNAL = 1.4; EXPRESSED IN ADULT LIVER, SIGNAL =   1; EXPRESSED IN BRAIN, SIGNAL = 1.6; EXPRESSED IN PLACENTA, SIGNAL = 1.4; EXPRESSED IN BONE MARROW, SIGNAL = 0.89; EXPRESSED IN FETAL LIVER, SIGNAL = 1.2; EXPRESSED IN HEART, SIGNAL = 1.5
gcccaatgccatttgagtagtgaaagaagtatggagctgttagagattcatgttcttccgatagataaactcctgtctttcagtaagccaatagggctctgttgaaatatggattcagttcttaatttccttgcctttatataactttttaaaacaataagctctcttataatcatacctttaaccagctaatctagttttctttcatctcttgctgaaattcttctccagccaatgccggacttcttgaaggttgtaggagaaggggccctttcctcccagataagcaattttctgtctctgcacaatgcacacacgttcaaaggctaccccgtaagctatgttggcgttattgtccatgcggtcagccacaactcggcactggggcggcaaggagaaacgctccagaagctgctgggctgctgcacatcgatcttcctggttctggtgcttc

SEQ ID NO: 4 - DNA, 471 bp, Homo sapiens
  MAP TO AC007363.3; EXPRESSED IN BONE MARROW, SIGNAL = 2.6; EXPRESSED IN HBL100, SIGNAL = 1.8; EXPRESSED IN ADULT LIVER, SIGNAL = 1.8; EXPRESSED IN BRAIN, SIGNAL = 1.9; EXPRESSED IN BT474, SIGNAL = 1.9; EXPRESSED IN LUNG, SIGNAL = 2.3; EXPRESSED IN HELA, SIGNAL = 2.5; EXPRESSED IN PLACENTA, SIGNAL = 2.5; EXPRESSED IN FETAL LIVER, SIGNAL = 2.3; EXPRESSED IN HEART, SIGNAL = 2.5
gacaataccttccttgtcccactggcccaccaagccccagaaagcagcctcagcaccaggctgcttggcaagcccagcttacccttcagatgggcagccatggctgggatccggacgtcgtcgtaggacctcccgtcggtgatgaggatcattaacttcctcttgttgggcttggacttcttgaagagctgctccagggcgaagttgatggcagcccccgtgctggtgccaccactccagtagcccaccctcttgatggcgttgaggatgtcaggcttgctgctgtacttgtcgaacccaaactccagccgctgttcgtaggtgtactgcacggccccgatgcgcgtgtccgtgtcggaaatctcaaactctttggtgaggttggtcacaaactggaggacggtgcggaagttgcccgtccccacactgctggagccgtcgatgacgaagccaatgtcagccgagttcaag

SEQ ID NO: 5 - DNA, 451 bp, Homo sapiens
  MAP TO AC007263.3; EXPRESSED IN BONE MARROW, SIGNAL = 4.8; EXPRESSED IN BRAIN, SIGNAL =   5; EXPRESSED IN PLACENTA, SIGNAL = 7.6; EXPRESSED IN BT474, SIGNAL =   4; EXPRESSED IN LUNG, SIGNAL =   6; EXPRESSED IN HELA, SIGNAL = 5.1; EXPRESSED IN ADULT LIVER, SIGNAL = 4.7; EXPRESSED IN HEART, SIGNAL = 3.3; EXPRESSED IN HBL100, SIGNAL = 4.1; EXPRESSED IN FETAL LIVER, SIGNAL = 9.1
ttgaacacctactccatgccagctcctggggacatgagctgaatcagatcgtcagtgtcttcagagagctcacagtctagctccataaataactaacttataataccctgtgtttcatggaaaggagacagcataagacagataggatctgctctcagcatggagggaggcaggaagaagacaggaggagcagtattttcaagacagcataaaagtttgcaaagaaaacaagggagtgagggacattccaagcaggggcaactgagtagcaatgacagaggtcaaaggcgctctggtgtctccaagggaccatgagcaacttggtattgtcagagcgaaaaaaactaaaagacaaggggtggcaggagaagctggagcaagtggagccaattgtttagtgctaaagaacctggaagtggcacaggtcacagggagccaggagtcattttga

SEQ ID NO: 6 - DNA, 476 bp, Homo sapiens
  MAP TO AC007263.3; EXPRESSED IN HBL100, SIGNAL = 8.3; EXPRESSED IN FETAL LIVER, SIGNAL =   7; EXPRESSED IN HELA, SIGNAL = 8.1; EXPRESSED IN ADULT LIVER, SIGNAL = 7.5; EXPRESSED IN PLACENTA, SIGNAL = 8.8; EXPRESSED IN LUNG, SIGNAL = 9.5; EXPRESSED IN HEART, SIGNAL = 3.4; EXPRESSED IN BRAIN, SIGNAL = 9.2; EXPRESSED IN BT474, SIGNAL = 7.6; EXPRESSED IN BONE MARROW, SIGNAL = 6.1
gatcaccacaagtcatgtcctctgtacagagatagttcaataaatgtatctgtttacaactcctttcccttcctgtgatgtttccctttaacaaagagggtggttctccaccctccatttagaactgtttcacctcttactcttgcatgagatagggaagaagaagaaagggccccagtagcctcagtctctgggtctctgacatgatacagtgcagagttagaggttagacctgtgtggtgataatggtggtggtgatggtggtggtggcggtggtggtagtggtggtggtggtggtggtggtggtggtggtggtggtggtggtggtcgtggtggtggtgttggtgttggtggtgttggtgttggtgttggtgatggtggtggtggtggtggtcgtggtggtggtagtgatggtggtggtggtggtgcatgtgtgttggcatgggcatgggagcaggagcccgaagaatagcata

SEQ ID NO: 7 - DNA, 493 bp, Homo sapiens
  MAP TO AC007263.3; EXPRESSED IN BT474, SIGNAL = 3.3; EXPRESSED IN HBL100, SIGNAL = 1.1; EXPRESSED IN FETAL LIVER, SIGNAL = 1.6; EXPRESSED IN HELA, SIGNAL = 1.3; EXPRESSED IN ADULT LIVER, SIGNAL = 1.4; EXPRESSED IN PLACENTA, SIGNAL = 1.1; EXPRESSED IN BONE MARROW, SIGNAL = 2.6; EXPRESSED IN LUNG, SIGNAL = 1.6; EXPRESSED IN HEART, SIGNAL = 1.4; EXPRESSED IN BRAIN, SIGNAL =   1
tagcaggggttccatagaggcggcagagggaggcaacaggatcagaggggtacagtctgcctttctgttttgggcctcgccagctcatcatttctttgtgatgtctttactaggagccttcacgtaaatgggtccagtcatgcctcccagtaagaagccagaaagctcaggaattagtgtctccagtggactgagtcagtgttacgggggcagcggtttctccaaggcccttcaggaagacgatgacctcgacttttctctgcctgacatccgattagaagagggggccatggaagatgaagagctgaccaacctgaactggctgcacgagagcaagaacttgctgaagagctttggggagtcggtcctcaggagtgtcagccccgtccaggacctggacgatgacacccccccatcccctgcccactctgacatgccctacgatgccaggcagaaccccaactgcaaacccccctactccttcagctgcctc

SEQ ID NO: 8 - DNA, 465 bp, Homo sapiens
  MAP TO AC007253.2; EXPRESSED IN PLACENTA, SIGNAL = 1.6; EXPRESSED IN HBL100, SIGNAL = 1.6; EXPRESSED IN FETAL LIVER, SIGNAL = 1.1; EXPRESSED IN LUNG, SIGNAL = 1.3; EXPRESSED IN BT474, SIGNAL = 1.4; EXPRESSED IN BONE MARROW, SIGNAL =   2; EXPRESSED IN HELA, SIGNAL = 1.7; EXPRESSED IN ADULT LIVER, SIGNAL = 1.1; EXPRESSED IN BRAIN, SIGNAL = 1.2; EXPRESSED IN HEART, SIGNAL = 1.4
aggttcccttgaggaaggaccacactataccactgacaatttatgctgttaatctttctcccatcctttcccaaggagaactctggcctttttaccagggtaactgtgcactggggaaagggaaatgatagaccttttggggactactggacattggctctgagcagacattaattccgtggaacccaaaacatcactgtggtcctccagttaaagtagcggcttatggagatcaggtcattaatggagttttagcagaggtccgacttagagggttccaataatgggtccccggactcatcctgtggtcatttccccagtgccagaatgcataattagcacagacatacttagcaactggcagaacccccacattggctccccaactggtggggtgagggctgttatggtgggaaaggccaaatggaagccattagaggtgcctctacctagaaaaatagtaaa

SEQ ID NO: 9 - DNA, 466 bp, Homo sapiens
  MAP TO AC007252.2; EXPRESSED IN BONE MARROW, SIGNAL = 6.6; EXPRESSED IN HBL100, SIGNAL = 4.7; EXPRESSED IN ADULT LIVER, SIGNAL = 4.2; EXPRESSED IN BRAIN, SIGNAL = 6.1; EXPRESSED IN BT474, SIGNAL = 4.9; EXPRESSED IN PLACENTA, SIGNAL = 6.7; EXPRESSED IN HEART, SIGNAL =   6; EXPRESSED IN HELA, SIGNAL = 4.6; EXPRESSED IN LUNG, SIGNAL = 5.1; EXPRESSED IN FETAL LIVER, SIGNAL = 4.7
agctagacagacaggcccagaataggccggatcattcagtttttttgttttttgtttttttttttttttttgctgattatataaaagatcctctgtcctctgacctttgcctgagaaagaatgttaccttaaggccatatgaatattttctatatatctggccataaagaaaagatgttttcatacaaaatttacctcttacttgcttcatatcctgccattcacattgcagctactctttggtgaagatctttttcaattattttggggagcttgttgttttttaatgtagggttcaagtcctgtagtgaaatctgtttcatatttgcaatcagttttcagctcctggaagaatcccaaattggtaagtccctgtaagtgaaaaagaaaaaaaaaacagaatgtagttatgcaacctgagtttatagacgatgagagaagataactcaaagaaggattggcaaaa

SEQ ID NO: 10 - DNA, 474 bp, Homo sapiens
  MAP TO AC007243.2; EXPRESSED IN HELA, SIGNAL = 2.2; EXPRESSED IN BT474, SIGNAL = 3.1; EXPRESSED IN BONE MARROW, SIGNAL = 4.7; EXPRESSED IN HBL100, SIGNAL = 2.7; EXPRESSED IN FETAL LIVER, SIGNAL = 3.1; EXPRESSED IN LUNG, SIGNAL = 3.2; EXPRESSED IN ADULT LIVER, SIGNAL = 2.9; EXPRESSED IN BRAIN, SIGNAL = 3.8; EXPRESSED IN PLACENTA, SIGNAL = 4.2; EXPRESSED IN HEART, SIGNAL = 3.1
tccaaaataacaagtagaaaaacaggctcgttgtgataatacaattatctggttcattgtgataatacaacagagtaatatgtaccattatatatagtcatgtatatgtataaagtttcttttttaagacactttcctgtaatatttttaaagctttccatatcaaagtaagagcttgcatttcttaatgataatatagcataagcaaaatgtgctggaattacaataatgcagacataaatctattttcatttaatttttctatagagatacaatacggcacgacaaagcaagttatttccaagggcactgcccctgacccctccagatctcacgtcctcacatttcaaaacaacctcagcctggactttatcgtccatatcactatcagcgttttgggcaaagctgttaaacaagtctctaggaagttccaaactttcccacattttcctgtcttcttctgacccctccaaa

SEQ ID NO: 11 - DNA, 471 bp, Homo sapiens
  MAP TO AC007243.2; EXPRESSED IN PLACENTA, SIGNAL =   1; EXPRESSED IN BT474, SIGNAL = 0.97; EXPRESSED IN LUNG, SIGNAL = 1.1; EXPRESSED IN HELA, SIGNAL = 1.4; EXPRESSED IN ADULT LIVER, SIGNAL = 0.84; EXPRESSED IN BRAIN, SIGNAL = 1.5; EXPRESSED IN HEART, SIGNAL = 0.92; EXPRESSED IN BONE MARROW, SIGNAL = 0.75; EXPRESSED IN FETAL LIVER, SIGNAL = 0.9; EXPRESSED IN HBL100, SIGNAL = 0.93
gcttgtgtcaaccagctcagttagacccccttccgtatcacaaggacagggggatttctgtatcctaggatttcttgctttggtgtactggaagaatcagatcacatgtgggcttggagaatgagtgcaaggttttattgagtagaagtacctctcagcacatgtgggagccagatgggagatggttttcccctggaccaagtggctggacttttctctgactgctccagccaaactccatgtccttccgctggtcgatggcctgcaggtgcccatcagcgtgctcgtctgctggcgtgctctcaatgaccagccacttgtgtcttcttccccggatgtgttcctctccacatctagctgcttctgtgtgtctgcccactagggtctcgggtttttatcaagatgggggcatggtgggccagggtagtcctagaaaatgcaacatttgggcaggaaagcaggagtggctgt

SEQ ID NO: 12 - DNA, 475 bp, Homo sapiens
  MAP TO AC007182.3; EXPRESSED IN PLACENTA, SIGNAL = 1.6; EXPRESSED IN BT474, SIGNAL = 6.7; EXPRESSED IN BONE MARROW, SIGNAL = 0.94; EXPRESSED IN HBL100, SIGNAL = 4.7; EXPRESSED IN FETAL LIVER, SIGNAL =  13; EXPRESSED IN LUNG, SIGNAL = 3.6; EXPRESSED IN HELA, SIGNAL = 4.8; EXPRESSED IN ADULT LIVER, SIGNAL = 3.9; EXPRESSED IN BRAIN, SIGNAL = 3.6; EXPRESSED IN HEART, SIGNAL = 1.9
gggcagcaggtttaagtttcatagttcacatgttcccaccacacaagtcaaatcaaggcatgaaaataaaagggaaaaaggggaaggctggaaaagggagcctggaagaggttgcaggtaggggaaggagacacagtgggcttccgagaagctggcaatttcttgacttggatggagttacgtagtattcactttaaaattattctttaaattgtacgtacatgttatatacttttcagtatgcatatctttaaattttaaaaattaaaaaaagaggctaaaagtgaataaaagggcagatgatggaatagaaaagaaattaaagaggagagacgacgaaggaagaagatggccaaggtggaaaacgagaaagtcctggaggtgataatgctggcctcagtttctcttcttctgtctggatactggttctacttctagataccggagcccgaccagcatacccaggatggagaaa

SEQ ID NO: 13 - DNA, 464 bp, Homo sapiens
  MAP TO AC007182.3; EXPRESSED IN PLACENTA, SIGNAL =   1; EXPRESSED IN FETAL LIVER, SIGNAL = 0.98; EXPRESSED IN LUNG, SIGNAL = 0.88; EXPRESSED IN HELA, SIGNAL = 0.69; EXPRESSED IN BONE MARROW, SIGNAL = 1.1; EXPRESSED IN ADULT LIVER, SIGNAL = 1.5; EXPRESSED IN HEART, SIGNAL = 1.6
caaagggagtcctaggggaggaggtgggctccccatccttcttgttctggaagttcttcatccccttgtttctctggtctggtcttcagcttctttatgactggctatctcccactgggatttgagtttgctgtggagctcacgtacccagaatcagaaggcatctcctccggcctcctcaacatatctgcacaggtagagctcgtatttcctgtttgtttcctggctgggaaggcattgcatcatggcagctcagttcttcctcatgagttagttgactgggcccttgtttcctatcttctttatgcctttccaggtatttgggatcatctttaccatctcccagggccagattattgacaactatggaaccaagcctgggaacatcttcctgtgtgtgttccttactcttggagcagccctcactggtgagttggagcctgagggcaagatgaggctcaggt

SEQ ID NO: 14 - DNA, 452 bp, Homo sapiens
  MAP TO AC007182.3; EXPRESSED IN PLACENTA, SIGNAL = 6.7; EXPRESSED IN LUNG, SIGNAL = 9.5; EXPRESSED IN HELA, SIGNAL =  14; EXPRESSED IN BT474, SIGNAL = 7.3; EXPRESSED IN HBL100, SIGNAL =  17; EXPRESSED IN FETAL LIVER, SIGNAL =  14; EXPRESSED IN BRAIN, SIGNAL =  11; EXPRESSED IN BONE MARROW, SIGNAL =  10; EXPRESSED IN ADULT LIVER, SIGNAL = 5.4; EXPRESSED IN HEART, SIGNAL = 7.9
gactcactgctccaaatggctagggaggcctcaggaaacttacaatcatggtggaaggggaaacaggcacatcttacatggtggtaggcaagagagcgagagagagagcgtctgaaggaggaactgtcaaacatttttctaaccatcaggtcttgtgagaactcactaccatgagaataccatgggagaaactgcccccatgatccagtcacctcccaccaggccccttccttggcacatggggattacaattcgagatgagattttggtggggacacagagccaaaccaaatcaatggctaagaacagtagctgaggggtttggacctgcttccttcctctgagagggctgacaccttgaagttctttaagcagggacggtggggtcaatgcaacgccaaggaccatgaatgtgagtacatcatgcaggtcgggcagaggagagatcacag

SEQ ID NO: 15 - DNA, 460 bp, Homo sapiens
  MAP TO AC007182.3; EXPRESSED IN PLACENTA, SIGNAL = 3.3; EXPRESSED IN BT474, SIGNAL = 1.4; EXPRESSED IN LUNG, SIGNAL = 1.6; EXPRESSED IN FETAL LIVER, SIGNAL = 2.8; EXPRESSED IN BONE MARROW, SIGNAL = 0.66; EXPRESSED IN HELA, SIGNAL = 0.72; EXPRESSED IN ADULT LIVER, SIGNAL = 3.9; EXPRESSED IN BRAIN, SIGNAL = 0.72; EXPRESSED IN HEART, SIGNAL = 1.3
cggagtcctcaccacttctccaggattccagaggagactgtggcgatggtgaatgaaggtcccaaccaggaagagagcgatgacacccctgtgccggagtccgcactccaagcggaccccagcgtctcggtccatcccagcgtctcggtccatcccagcgtctccatcaaccccagcgtctctgtccaccccagcagttcggcccaccccagtgccttagcccaacccagtggcttggctcaccccagtagctcgggccctgaggacctcagcgtgatcaaggtgagcaggcgccgttgggccgtggtcctggtgtttagctgctactccatgtgcaactcctttcagtggatccagtacggctccatcaataacatcttcatgcacttctacggtgtcagtgcctttgccattgactggctgtccatgtgctacatgctgacttacatccctctgctcc

SEQ ID NO: 16 - DNA, 461 bp, Homo sapiens
  MAP TO AC007132.2; EXPRESSED IN PLACENTA, SIGNAL = 9.9; EXPRESSED IN BONE MARROW, SIGNAL =  11; EXPRESSED IN LUNG, SIGNAL = 9.4; EXPRESSED IN HELA, SIGNAL = 7.1; EXPRESSED IN ADULT LIVER, SIGNAL = 6.9; EXPRESSED IN BT474, SIGNAL = 5.7; EXPRESSED IN HBL100, SIGNAL =  10; EXPRESSED IN FETAL LIVER, SIGNAL = 8.8; EXPRESSED IN BRAIN, SIGNAL =  11; EXPRESSED IN HEART, SIGNAL = 8.3
ctgcataatgacatttcagtggattatggaacacatatatgaaggtgatcccataatggagctagaaaattcctatcaactggtgacatcgtagctctagtaacgccacagcaccatgcattatttacctgtttttggtgatgctgttgtcaataaaccacgattgtataatacatacaattatgtatgtattatagtatgtactatactttttttgtcattactttagagtgtacttctactcataaaaaataaagttaattttgaaacagtctcaggcaggtccttcaggaagtattccagaagaaagcattgttatcataggagaggacatctccacgggtgttattgtccctgaagactttccggtgggacaagatacagaggtggaagacagtgatatgcatgatcttgaccttgtgtaggcctaggataatgtgtgtgtttgtgtctttgttttt

SEQ ID NO: 17 - DNA, 352 bp, Homo sapiens
  MAP TO AC007103.4; EXPRESSED IN BONE MARROW, SIGNAL = 1.4; EXPRESSED IN HBL100, SIGNAL = 1.8; EXPRESSED IN FETAL LIVER, SIGNAL = 1.3; EXPRESSED IN LUNG, SIGNAL = 1.2; EXPRESSED IN ADULT LIVER, SIGNAL = 0.77; EXPRESSED IN BRAIN, SIGNAL = 1.1; EXPRESSED IN BT474, SIGNAL = 1.2; EXPRESSED IN HELA, SIGNAL = 0.85; EXPRESSED IN PLACENTA, SIGNAL = 1.3; EXPRESSED IN HEART, SIGNAL = 1.3
aatgcagaatcactgggagccctgagcttgttttcttgcaactagacagtcctatttgggggtgacaggagacagtgacagatcatcaggtgttagattcttataagaagcatgcaacctagatcccttgcatgcatatttcacaatagggttcacactcctatgaaaatctaatgccacctctgatctctggtctaacaggaggtagagctcaggtggtaaagtgagcgatggggagtggctgtaaatacagataaagcttggctcagtcatctcctgttgtgaggtctcgttcctagcaggccacaaacccttactaatctgtggcccaagggtggggatccctgttata

SEQ ID NO: 18 - DNA, 477 bp, Homo sapiens
  MAP TO AC007092.3; EXPRESSED IN HBL100, SIGNAL = 9.9; EXPRESSED IN FETAL LIVER, SIGNAL = 9.6; EXPRESSED IN BRAIN, SIGNAL =  14; EXPRESSED IN BT474, SIGNAL = 7.5; EXPRESSED IN PLACENTA, SIGNAL =  15; EXPRESSED IN HEART, SIGNAL = 7.9; EXPRESSED IN ADULT LIVER, SIGNAL = 7.1; EXPRESSED IN HELA, SIGNAL = 9.2; EXPRESSED IN LUNG, SIGNAL =  10; EXPRESSED IN BONE MARROW, SIGNAL =  11
ccaaatactggcagatcagtgagtatctgggctaatactatccttatttgattaggataatccagcgagacactgactcatgccttcagatactgccttttaaccaatcaatatttttagggttatggttttcagaaggcaggtgatagttttggagatgataacatcccaagctgctgctgacattgagatgcatatttaacatgttcctgggatgacagaatacagcagtgttggaatctccccctagaaatacacatgcacacacacatacacacacacacacacacacacacacacacagccactaacctttaaattcttgaagccccagtacagatttagcaaattgcctcttattaatgtcaatgaacatttgaaaatgtaagaagaattgggactgaatacttttcccttggatggtcctgtcttttcagcgtcgagaaactcctgagaaggaaagggaagaagcagctc

SEQ ID NO: 19 - DNA, 474 bp, Homo sapiens
  MAP TO AC007032.2; EXPRESSED IN BONE MARROW, SIGNAL = 5.1; EXPRESSED IN HBL100, SIGNAL = 7.9; EXPRESSED IN ADULT LIVER, SIGNAL =  11; EXPRESSED IN BRAIN, SIGNAL = 1.2; EXPRESSED IN HEART, SIGNAL = 1.8; EXPRESSED IN BT474, SIGNAL = 8.7; EXPRESSED IN FETAL LIVER, SIGNAL =  13; EXPRESSED IN PLACENTA, SIGNAL = 2.4; EXPRESSED IN HELA, SIGNAL = 2.7; EXPRESSED IN LUNG, SIGNAL =  12
catagtttgcttttggataaagtgtatacaaacttgctgtcaatcactatacttacgtaatatttctccctatgtatacacaggccccgtgtttatgacgtagacacttgttttgtatcttattttggtaggccaggtcagcaattggacattttataataaaatataatactttgtcttccacaaaaacaataacataaaaacctcctttcttattaatttggtgagccaacctactattgcttaaaaaaaccaatcagcatagatacatacctgaccatattcctcaaggtctccttttccttcctccagtgtaacaaaattccctgctggcgtcctatgtaaagataatcggccctttttggaccttttgttgggatcagcaactgggtccttgaagacgttaatctgaaatccaaattaagaaagttagacaagtagaagactaatcatcagaaatgtctaaacactccc

SEQ ID NO: 20 - DNA, 463 bp, Homo sapiens
  MAP TO D83253.1; EXPRESSED IN BONE MARROW, SIGNAL = 1.8; EXPRESSED IN FETAL LIVER, SIGNAL = 4.3; EXPRESSED IN HELA, SIGNAL = 3.4; EXPRESSED IN ADULT LIVER, SIGNAL =   3; EXPRESSED IN BRAIN, SIGNAL = 6.7; EXPRESSED IN HEART, SIGNAL = 2.5; EXPRESSED IN PLACENTA, SIGNAL = 3.2; EXPRESSED IN BT474, SIGNAL =  14; EXPRESSED IN HBL100, SIGNAL =   5; EXPRESSED IN LUNG, SIGNAL = 4.2
caacccaaaggggtctcttctaattctcctaaaccaggctctgaggatgcaaattacaagcgagtctcctgtaattcccccaaaccggttcttgaggatgtgaaaccaacttattgggctcaatcccatttggtcacaggatactgtacgtatcttcctttccagagatttgatatcacccagacaccgccagcatacataaacgtgttaccaggtttgccccagtacaccagcatatatacacccttggccagcctttctcctgaatatcagctaccaagatcagtaccagtggtgccgtcttttgtagccaatgacagagcagataaaaatgctgctgcctattttgagggtcatcatttgaatgctgagaatgttgctggtcaccagattgcctctgaaacacagatccttgagggctctttgggaatatctgtaaagtcacactgcagcacaggtgatg

SEQ ID NO: 21 - DNA, 474 bp, Homo sapiens
  MAP TO AB000882.1; EXPRESSED IN BONE MARROW, SIGNAL = 2.8; EXPRESSED IN LUNG, SIGNAL = 3.9; EXPRESSED IN ADULT LIVER, SIGNAL =   4; EXPRESSED IN PLACENTA, SIGNAL = 3.1; EXPRESSED IN BT474, SIGNAL =  10; EXPRESSED IN HBL100, SIGNAL =  12; EXPRESSED IN FETAL LIVER, SIGNAL = 6.1; EXPRESSED IN HELA, SIGNAL = 5.8; EXPRESSED IN BRAIN, SIGNAL = 2.9; EXPRESSED IN HEART, SIGNAL = 3.4
tccctggtactgctttttctgttctgttatatttgcttttcgtttttatgttttgtatctgtttttctttccaggtaaaagtttcctggtttagggaaagtgggaactggggatggaaaagaggtggtgaaggctgtgctcgtgattaagtcttgctttttttttcccccctccagctcttctgttagaaatagtatctttgttttcctttgctgttcctcaatcccctactcttcaccccttgttttcacctattttgcgagaacccatccagatcccccttcccttcttcccctgccggcccagttatggcagagaacgatgtggacaatgagctcttggactatgaagatgatgaggtggagacagcagctgggggagatggggctgaggcccctgccaagaaggatgtcaagggctcctatgtctccatccacagctctggctttcgtgacttcctgctcaagccagagt

SEQ ID NO: 22 - DNA, 474 bp, Homo sapiens
  MAP TO AB000882.1; EXPRESSED IN PLACENTA, SIGNAL = 0.84; EXPRESSED IN BT474, SIGNAL = 1.1; EXPRESSED IN HBL100, SIGNAL =   6; EXPRESSED IN FETAL LIVER, SIGNAL = 2.3; EXPRESSED IN LUNG, SIGNAL = 2.7; EXPRESSED IN HELA, SIGNAL =   4; EXPRESSED IN ADULT LIVER, SIGNAL = 1.7; EXPRESSED IN BRAIN, SIGNAL = 1.4; EXPRESSED IN BONE MARROW, SIGNAL = 2.1; EXPRESSED IN HEART, SIGNAL = 1.5
tttctcacctggaccctctgccgctgatgttttcttcttgcaacaagggacacagagaataataataataacaaaacatggcatagcagcagaaacatatggaaagtctgtccgttgactctgaagcaccagcgccttccctgaaaaaaagggacttgttatacactgggcagagagccacagccgtccctgctgttcctaccctggcctgaccctctccagggtcaccccaggctcaccagagggcacagggtgagtgccgtgattcccgctgtgttccatgtagcaggtgaacctctgctcctctccttggcgaatcctggtggccacccaggtctggtaggttccattcccatcaggcaggacatccccccactgctgggtgttgtggctcaaagataccccatcctgacgccaggtcagtgtgatattccggggatagaagctggaagccctgcatgtcacggtgatgtt

SEQ ID NO: 23 - DNA, 467 bp, Homo sapiens
  MAP TO AB008681.1; EXPRESSED IN BT474, SIGNAL = 1.3; EXPRESSED IN HBL100, SIGNAL = 1.4; EXPRESSED IN BRAIN, SIGNAL = 1.7; EXPRESSED IN HEART, SIGNAL = 1.5; EXPRESSED IN ADULT LIVER, SIGNAL = 1.7; EXPRESSED IN PLACENTA, SIGNAL = 1.5; EXPRESSED IN BONE MARROW, SIGNAL = 1.1; EXPRESSED IN FETAL LIVER, SIGNAL = 1.6; EXPRESSED IN LUNG, SIGNAL = 1.2; EXPRESSED IN HELA, SIGNAL = 1.3
gcttaggcctaggggcagctgtgatgggctgcagaatgaggtgggggctggtgccagctggcacacgtaaattaagaggtgtgggacggatgggtggcctacttccaggggtgagtgcaggaggttggtgaccccaacccaccacccggcctccctccctcagggtggcctggcacccaggactgggattaggggttggggtggtggtcccaggggcatgctcagtggttctcttttctctggggcacaggctctgggcgtggggaggctgagacacgggagtgcatctactacaacgccaactgggagctggagcgcaccaaccagagcggcctggagcgctgcgaaggcgagcaggacaagcggctgcactgctacgcctcctgggccaacagctctggcaccatcgagctcgtgaagaagggctgctggctagatgacttcaactgctacgataggtaccccaa

SEQ ID NO: 24 - DNA, 465 bp, Homo sapiens
  MAP TO AB023051.1; EXPRESSED IN HEART, SIGNAL = 5.6; EXPRESSED IN BT474, SIGNAL =  51; EXPRESSED IN BONE MARROW, SIGNAL =  51; EXPRESSED IN HBL100, SIGNAL = 1.1e+02; EXPRESSED IN FETAL LIVER, SIGNAL =  30; EXPRESSED IN LUNG, SIGNAL = 6.6; EXPRESSED IN HELA, SIGNAL =  23; EXPRESSED IN ADULT LIVER, SIGNAL =  15; EXPRESSED IN PLACENTA, SIGNAL =   9; EXPRESSED IN BRAIN, SIGNAL =  17
gtgtaccagtggaggaaggccttccggcggaacatggcagtgaactgctccgagatgcgcttgaagagctcctggatggctgtgctattgccaatgaaggtgactgccatcttgaggccacgaggtgggatgtcacagacggctgtcttgacattgttggggatccattccacaaagtagctgctgttcttgttctgcacgttaagcatctgctcatcgacctccttcatggacatccgaccacggaagacagcagccacggtgaggtatcggccgtggcgggggtcacaggcagccatcatgttcttggcatcgaagacctgctgggtgagttccggcactgtgagagctcgatactgctggcttccacggctggtgagaggggcaaagccaggcataaagaaatggagacgtgggaaggggaccatgttgactgccaacttgcggaggtcagcattgagctgg

SEQ ID NO: 25 - DNA, 471 bp, Homo sapiens
  MAP TO AB023051.1; EXPRESSED IN HBL100, SIGNAL =  44; EXPRESSED IN BRAIN, SIGNAL = 8.6; EXPRESSED IN BT474, SIGNAL =  28; EXPRESSED IN PLACENTA, SIGNAL = 8.6; EXPRESSED IN HEART, SIGNAL = 6.1; EXPRESSED IN ADULT LIVER, SIGNAL = 7.2; EXPRESSED IN HELA, SIGNAL =  19; EXPRESSED IN LUNG, SIGNAL = 8.3; EXPRESSED IN FETAL LIVER, SIGNAL =  22; EXPRESSED IN BONE MARROW, SIGNAL =  13
tctagatccaccaggatggcacgaggaacatatttgccacctacagagaataaagttaagagctgtgaaatctggcagaagggaaggtttatagatatactggaaatgggagacagcagggatcagagacttgtcattccaggtcccgccaccaggtggcagcagacgtctttggccccgacggtggttcacgaaagggacaaaatgacagattcacccaaaggggataaggcgtgcccagaaatggaaagagatcccagataagtgggagacagggaagggaacctgagctgcccgggctcctgcccttacctgtggcttcattgtagtacacagagatgcggtccagctgcaggtcgctgtccccgtggtaggtgccggtggggtcgatgccatgttcatcactgatcacctcccagaactgccgagggggagcaacgagaccacaacaggtcaagtcccagccaacta

SEQ ID NO: 26 - DNA, 487 bp, Homo sapiens
  MAP TO AC000052.8; EXPRESSED IN HBL100, SIGNAL = 2.9; EXPRESSED IN HEART, SIGNAL = 2.6; EXPRESSED IN BT474, SIGNAL = 2.5; EXPRESSED IN BONE MARROW, SIGNAL = 4.2; EXPRESSED IN HELA, SIGNAL = 2.8; EXPRESSED IN ADULT LIVER, SIGNAL = 2.8; EXPRESSED IN BRAIN, SIGNAL = 4.2; EXPRESSED IN PLACENTA, SIGNAL = 7.3; EXPRESSED IN FETAL LIVER, SIGNAL = 3.4; EXPRESSED IN LUNG, SIGNAL =   3
gagcacttgccaggggacgcctggggcgcccctcctcccagaagctcccgcggaagactggagcaggccacctggctgcggataatgggaaccacagagtgagagaactccacatcggcctgaaggaagagcatgtgaaggtagaaatccaggagagtgaagaagcactgtaaaagatgcttgcagaagccacctggggattggaggaggttgtggtggatgagagccctgatttggaaatacatttaacaatgtgtgatgaggatcccccacgcctgaggaagactcagaaacagagcctcatcaggaagaggaagaggaggaagaagaagaagaagaggaagaggaagaggaggaggaggaggaggaagaaaagaagaagaagaagaaacagtttctccactggaggtgggagctgccattatgatgattccgcagttaatggagaagtttaacttggatctatcaacagttacacaggccttcc

SEQ ID NO: 27 - DNA, 452 bp, Homo sapiens
  MAP TO AC000052.8; EXPRESSED IN BONE MARROW, SIGNAL = 1.4; EXPRESSED IN HBL100, SIGNAL = 1.2; EXPRESSED IN FETAL LIVER, SIGNAL = 1.8; EXPRESSED IN ADULT LIVER, SIGNAL = 1.7; EXPRESSED IN BRAIN, SIGNAL = 2.8; EXPRESSED IN BT474, SIGNAL = 1.1; EXPRESSED IN LUNG, SIGNAL = 2.5; EXPRESSED IN PLACENTA, SIGNAL = 2.3; EXPRESSED IN HEART, SIGNAL = 1.3; EXPRESSED IN HELA, SIGNAL = 1.2
ctgactcaggcatgttcttcacattaatactgtcatttcagctactgagttattttttctcctcttttttttttttttgcagcagagccgttgcctggccttgaagagaaaccaccaggtgttggtacttcagagggggtctacctcacacaactacctcaccccacacctcccctgcagactgactgcaccaggcagagctcaccacaagaaagggaaacagtgggcccggagctcaaaagcagctgctccgaatctgcggacaactgtaaagcaatgaagggcaagaatccccggccctcggatagcagctaccccggcccagccgcccaagggtgcgtgagagacctctccacggtggcagacaggggcgctctatccgagaacggagtcattggggaagcatctccttgtggatcggaggggaagggccttggtagcagtggttccga

SEQ ID NO: 28 - DNA, 483 bp, Homo sapiens
  MAP TO AC000052.8; EXPRESSED IN BT474, SIGNAL = 1.4; EXPRESSED IN HELA, SIGNAL = 1.5; EXPRESSED IN ADULT LIVER, SIGNAL = 5.7; EXPRESSED IN PLACENTA, SIGNAL = 1.7; EXPRESSED IN BONE MARROW, SIGNAL = 1.7; EXPRESSED IN HBL100, SIGNAL = 1.2; EXPRESSED IN FETAL LIVER, SIGNAL = 2.8; EXPRESSED IN LUNG, SIGNAL = 1.6; EXPRESSED IN BRAIN, SIGNAL = 3.6; EXPRESSED IN HEART, SIGNAL = 1.8
atcttcccttagcctgcctgcccctgtacagaacgcatttcccgcctcggacttgcctctggcagtcaagaggctgcaggtgctgcagggcagaggaaggagctgggacggcggaacagatggcaacagctcttttgtcccctgctgtccctcacccacgctcacggggcacaaaagaagggatgagtccccgtggctcctctcactgtaagccccacagctcacagcaaagctcattgtctcaccttgggtggcagccccagggcagctcggagctcagtgtttctccttcctcttctgcagagacattcctttctccatcatctacttcccactgtttgccaaccttaacaacctggggttcaacgagctcgccggtaaggcgtcctttgcacattccttcgtgtcaggctgtgtggcaggttccatagctgcggtcgcagtgacgcctctagatggtaaggagttgggagacgtgtcctt

SEQ ID NO: 29 - DNA, 465 bp, Homo sapiens
  MAP TO AC000353.21; EXPRESSED IN PLACENTA, SIGNAL = 1.8; EXPRESSED IN BT474, SIGNAL = 2.9; EXPRESSED IN HEART, SIGNAL = 2.3; EXPRESSED IN HELA, SIGNAL = 3.3; EXPRESSED IN LUNG, SIGNAL = 2.8; EXPRESSED IN HBL100, SIGNAL = 1.7; EXPRESSED IN BONE MARROW, SIGNAL = 2.8; EXPRESSED IN FETAL LIVER, SIGNAL = 2.6; EXPRESSED IN BRAIN, SIGNAL = 2.6; EXPRESSED IN ADULT LIVER, SIGNAL = 2.6
gatgtcaccagcaccacttgccagctcacttgtgcctcatgctccctgtttcacagatgtgggaggcaaaggagtcaaggccagctacacagggaggctgcacaggcccccggcttccggctcccacaggtgtctgcccagcccagatctgcgcgggtgggaggcaccttggttaggaagggctgagcctcttgcactgatttgcaagctttcaacctggcctccaatctcaaactggcctccaggccgtgggcctgatggggagctgctggcattgccgcagggctcatccccaccagcggaggagatattcgtagctgaggaaggtgacagcattgacgggaaaggcgcgggcactgttgatggtgaccccccggaagaagactcccagtccttcctgccggatgctgctcaccatgcagtccagcatcccctggtacactctgcgtctcagtccatccatct

SEQ ID NO: 30 - DNA, 472 bp, Homo sapiens
  MAP TO AC000353.21; EXPRESSED IN BONE MARROW, SIGNAL = 3.5; EXPRESSED IN HBL100, SIGNAL = 4.6; EXPRESSED IN BRAIN, SIGNAL = 5.3; EXPRESSED IN HEART, SIGNAL = 4.3; EXPRESSED IN PLACENTA, SIGNAL = 2.9; EXPRESSED IN BT474, SIGNAL = 3.7; EXPRESSED IN FETAL LIVER, SIGNAL =   4; EXPRESSED IN LUNG, SIGNAL = 4.4; EXPRESSED IN HELA, SIGNAL = 5.5; EXPRESSED IN ADULT LIVER, SIGNAL = 4.9
cagaatccctgcctttcctcgagcctggactaaatctcctcgccagcttccttctacactatgtccctctgtctgtgaccaacctctgccacgaagcctgggtcccagcagtttcaagtttctgttttggaagggtggctttcgcggggtaccccatcttccccgggactgccttgataatcccctgctcgggtgaaaggggcaggcgtgggctgcccatttgttccttgggggatgctgctgctgcctcccaaaaccctaatgcctgtgcccattctctggactcaggctgggctgcaagggccccctggtctggtcctacctgcagctggcagcttcgggggccgccacagcgtatttcagctccttcagtgcctattgcgtcttccggttcctgatgggcatgaccttctctggcatcatcctcaactccgtctccctggtgagtccagccgaggagaggccaggaagg

SEQ ID NO: 31 - DNA, 491 bp, Homo sapiens
  MAP TO AC000353.21; EXPRESSED IN BONE MARROW, SIGNAL =   3; EXPRESSED IN HBL100, SIGNAL = 1.1; EXPRESSED IN ADULT LIVER, SIGNAL = 1.8; EXPRESSED IN HEART, SIGNAL = 1.9; EXPRESSED IN PLACENTA, SIGNAL = 1.2; EXPRESSED IN BT474, SIGNAL = 2.6; EXPRESSED IN LUNG, SIGNAL = 1.4; EXPRESSED IN HELA, SIGNAL =   2; EXPRESSED IN BRAIN, SIGNAL = 2.4; EXPRESSED IN FETAL LIVER, SIGNAL = 1.8
ctgtctaggcacgcagatcctgtgcacagcccaggcagcgctgggcaaaggctgcctggccagctccttcatctgtgtgtacctgtttaccggcgagctgtaccccacggagatcaggtgggtgcatggggggagatgctgcaggttgagacctgttgggctcaccgaggcaggacccctggtccctcctgccctgtcctctgacactcagggcgtggccctcttgggcccctaggggtgcaggttgctgcactgacccatccccatccacacacctcccacaggcagatggggatgggctttgcctctgtccacgcccgcctcgggggcctgacggcgcccctggttaccacacttggggaatacagcaccatcctgccacccgtgagctttggggccaccgcaatcctggctgggctggccgtctgcttcctgactgagacccgcaacatgcccctggtggagaccatcgcagccatggagaggaggtg

SEQ ID NO: 32 - DNA, 421 bp, Homo sapiens
  MAP TO AC000353.21; EXPRESSED IN FETAL LIVER, SIGNAL =  93; EXPRESSED IN LUNG, SIGNAL = 1.7; EXPRESSED IN PLACENTA, SIGNAL = 2.1; EXPRESSED IN BT474, SIGNAL = 1.7; EXPRESSED IN HEART, SIGNAL = 1.4; EXPRESSED IN BRAIN, SIGNAL = 1.7; EXPRESSED IN ADULT LIVER, SIGNAL = 1.4; EXPRESSED IN HELA, SIGNAL = 1.2; EXPRESSED IN HBL100, SIGNAL = 1.5; EXPRESSED IN BONE MARROW, SIGNAL = 1.5
acttcctctttcagcgggtccagtctcacccggtgcctgcgcaagtcctcatctaatctcttttccctcctgcgctcctttcctagctcttccggcctcagattactctacccgctcaatctttcctccccgcacaggtgccccggagaggccatggagctgagcagcaagaagaagcttcacgccctgtccctggccgagaagatccaggtgctggaactcctggatgagtccaagatgtcccagtcggaggtggcccggcgcttccaggtttcccagccccagatctcgcgcatctgcaagaataaggagaagctgctggcggactggtgcagcggcacagccaaccgagagcgcaagcgcaagcgggagtccaagtacagcgggatcgacgaggctctgctctgctggtaccacattg

SEQ ID NO: 33 - DNA, 488 bp, Homo sapiens
  MAP TO AC002470.5; EXPRESSED IN HEART, SIGNAL = 0.97; EXPRESSED IN ADULT LIVER, SIGNAL =  15; EXPRESSED IN PLACENTA, SIGNAL = 0.89; EXPRESSED IN BT474, SIGNAL = 0.77; EXPRESSED IN BONE MARROW, SIGNAL = 0.87; EXPRESSED IN LUNG, SIGNAL = 0.88; EXPRESSED IN HELA, SIGNAL = 0.64; EXPRESSED IN HBL100, SIGNAL = 0.74; EXPRESSED IN FETAL LIVER, SIGNAL =  23; EXPRESSED IN BRAIN, SIGNAL = 0.82
atcataacatctgcgtggggtgggagcaaaggcccgctggatcagctagagaaaggaggggaaactgctcagtctgcagatccccagtgggagcagttaaataacaaaaacctgagcatgcctcttctccctgccgacttccccaaggaaaacaccgtcaccaacgactggattccagagggggaggaggacgacgactatctggacctggagaagatattcagtgaagacgacgactacatcgacatcgtcgacagtctgtcagtttccccgacagactctgatgtgagtgctgggaacatcctccagctttttcatggcaagagccggatccagcgtcttaacatcctcaacgccaagttcgctttcaacctctaccgagtgctgaaagaccaggtcaacactttcgataacatcttcatagcacccgttggcatttctactgcgatgggtatgatttccttaggtctgaagggagagacccatga

SEQ ID NO: 34 - DNA, 473 bp, Homo sapiens
  MAP TO AC002470.5; EXPRESSED IN PLACENTA, SIGNAL =   4; EXPRESSED IN BT474, SIGNAL = 3.7; EXPRESSED IN LUNG, SIGNAL = 7.1; EXPRESSED IN ADULT LIVER, SIGNAL = 4.4; EXPRESSED IN HEART, SIGNAL = 3.9; EXPRESSED IN BONE MARROW, SIGNAL = 4.7; EXPRESSED IN BRAIN, SIGNAL = 4.7; EXPRESSED IN HELA, SIGNAL =   4; EXPRESSED IN FETAL LIVER, SIGNAL = 4.6; EXPRESSED IN HBL100, SIGNAL = 3.9
aggaaaggtctgcagcacagcagccccatgcagccatgatggggtgtgaagcgttaactacctgcaggctgtggggtgaagctggggctggaggccggggcaggtgtccagggctgaggcccaggtgtcctggccttgctcctggtagctgtctggaaccccagggggccccaaagctgtgaggagctgggtgggagcagggtaggagctactggtgtccagctggcaggtcaggacacccctgggcaccctcacctcgctgtcggagctgggctggacgacctcccaggtctggaagtccacgtcatagcagtgcagctcgttgggcagcgtgttgtcggccgcacccccaaacacatagaggtggcggtcaaaggccaccatggtatgcccgtagcgccgctgcgggggtggtggggagccccggagcaggtgttcagttgggatgcgtgtccacctgggggtacacaaca

SEQ ID NO: 35 - DNA, 473 bp, Homo sapiens
  MAP TO AC006230.11; EXPRESSED IN PLACENTA, SIGNAL = 4.6; EXPRESSED IN BT474, SIGNAL = 9.5; EXPRESSED IN HBL100, SIGNAL =  24; EXPRESSED IN FETAL LIVER, SIGNAL = 4.4; EXPRESSED IN LUNG, SIGNAL = 3.3; EXPRESSED IN HEART, SIGNAL = 2.4; EXPRESSED IN ADULT LIVER, SIGNAL = 1.9; EXPRESSED IN BRAIN, SIGNAL = 4.2; EXPRESSED IN BONE MARROW, SIGNAL = 4.9; EXPRESSED IN HELA, SIGNAL = 5.6
taccaactggctcttggaggaggccgctctttggcgtaaattgcaatcgattagggatcgtttctcagaatcaagttagaagtgagagttcagataagtgaggccgccattgctgctttgaacacctcagaaggggagaatggatttatcaggagtgaaaaagaagagcttgctgggagtcaaagaaaataataaaaagtccagcactagggccccttcacctaccaaacgcaaagaccgctcagatgagaagtccaaggatcgctcaaaagataaaggggccaccaaggagtcgagtgagaaggatcgcggccgggacaaaacgcgaaagaggcacagcgcttccagtggtagcagcagtaccaggtctcggtccagctcgacttccagctcaggctccagcaccagcactggctcaagcagtggctccagctcttcctcagcctccagccgctcaggaagctccagcacct

SEQ ID NO: 36 - DNA, 473 bp, Homo sapiens
  MAP TO AC006160.9; EXPRESSED IN BT474, SIGNAL =  29; EXPRESSED IN FETAL LIVER, SIGNAL =  30; EXPRESSED IN HELA, SIGNAL =  20; EXPRESSED IN PLACENTA, SIGNAL = 9.3; EXPRESSED IN BONE MARROW, SIGNAL = 9.3; EXPRESSED IN HBL100, SIGNAL =  37; EXPRESSED IN LUNG, SIGNAL =  14; EXPRESSED IN ADULT LIVER, SIGNAL =  10; EXPRESSED IN BRAIN, SIGNAL =  15; EXPRESSED IN HEART, SIGNAL =   8
tcctggtctcaagttccctgcactaaatgcctggtgaagccacagaaaccattcttgctacagagcaggagttgccacagccccaggtggagaccgggtctggaacagaagctgacagtgataaatcagtaccagagctcgaggaacaggattccacagagataccacacaagcagcccagctggcagcagcagctgaaatcaatgagtgtcaatcagtaaagcaaaacagagttagagtgaaaagaaggcacgtaaggctatgtccaaactcggtcttccgtagataacaggggttactacagtcactactggaaatctaagaatatcttctttgtcatcacaaaaccagatgtctacaagaatcctgcttcggatacctatgtgtgtgtttttggggaagccaagatcaaggatttatcttaacaagcatgggtagcacctgctaagacacagagtgagctgtctcaaaca

SEQ ID NO: 37 - DNA, 460 bp, Homo sapiens
  MAP TO AC006160.9; EXPRESSED IN LUNG, SIGNAL = 1.2; EXPRESSED IN HELA, SIGNAL =   1; EXPRESSED IN PLACENTA, SIGNAL = 2.6; EXPRESSED IN FETAL LIVER, SIGNAL = 1.4; EXPRESSED IN BRAIN, SIGNAL =   1; EXPRESSED IN HEART, SIGNAL = 0.97; EXPRESSED IN BT474, SIGNAL = 0.91; EXPRESSED IN BONE MARROW, SIGNAL = 0.94; EXPRESSED IN HBL100, SIGNAL = 0.89; EXPRESSED IN ADULT LIVER, SIGNAL = 1.9
gagtgtgttttctggggctcccctgcagggctgctctccatcacttccacctgaagtctgtccccatgctcaggtttctccttctgagatgggagggtgctgagaaggggtcccatagtgggggtttgtcctggactccacaactcaagagacttcagctcttcttcccacaggtgtccttagatcacaatttctccccacccagatctcccaaactgggcagcgatgagggaaataaaccccagagcccaaggggtgccatccctggagctgggcaagcctggctgtgctttcatccaccacaggttcctggaggagactcagcaagcccagcgggccagggaggtggagacactgcgccaggaacaccggaaggagatgcaggccatggtggcagatttcagtagtgcccaggcccagctccaggcccggctggctgccctggaagccgagtaagtga

SEQ ID NO: 38 - DNA, 454 bp, Homo sapiens
  MAP TO AC006111.2; EXPRESSED IN PLACENTA, SIGNAL = 0.89; EXPRESSED IN LUNG, SIGNAL = 1.2; EXPRESSED IN HELA, SIGNAL = 2.7; EXPRESSED IN BRAIN, SIGNAL = 1.2; EXPRESSED IN HEART, SIGNAL = 1.4; EXPRESSED IN BT474, SIGNAL = 7.9; EXPRESSED IN HBL100, SIGNAL = 3.6; EXPRESSED IN FETAL LIVER, SIGNAL = 2.2; EXPRESSED IN BONE MARROW, SIGNAL = 2.2; EXPRESSED IN ADULT LIVER, SIGNAL = 1.6
ctgaggcccatacaacttggttagggctttaaaaaaatacacagcctctcaagaagctgggccagctccagaagccaccgtggcaggagcactggacagacccctgatatctaaaccaggaggcaccttcctccagtcaccagggtgctcccacaaggctcttctcgggggtggctgagcccaggtcaactgacgaaaacccaaaggaagccctcgctgcggggcaggagaggcgtgcggggagtggaaaccagccccacgcctagagagcaggggatgccgacctggggacctgtcctcaaacttctcctccttgtagtgatccacgactatgtccgtctccacagagatcagcttcttcttgtcaaactcacgaaggtgcagcagggtgagctcatcaaactgctcaaagcagaagagaacctgcaggtggccaagagcagctccatcagac

SEQ ID NO: 39 - DNA, 479 bp, Homo sapiens
  MAP TO AC006111.2; EXPRESSED IN BONE MARROW, SIGNAL = 1.2; EXPRESSED IN ADULT LIVER, SIGNAL = 1.6; EXPRESSED IN BRAIN, SIGNAL = 1.7; EXPRESSED IN BT474, SIGNAL = 2.6; EXPRESSED IN HBL100, SIGNAL = 2.2; EXPRESSED IN FETAL LIVER, SIGNAL = 2.1; EXPRESSED IN LUNG, SIGNAL = 1.2; EXPRESSED IN HELA, SIGNAL = 1.1; EXPRESSED IN PLACENTA, SIGNAL = 1.7; EXPRESSED IN HEART, SIGNAL = 1.2
caggtcaaacccagaaggtgacgggggtttttgaagattggccattaggtctcactcgtgccaaccctcacgcccacgggccagaggatacatgaggccactgaccccatcgcatccatccggttacctctgtgagctcaaggagctgtcactgccatccacagaggtggccacggattcttgagaggctgggatctgggcgtcatcattgaggcctggaggtgcctccttggtgggcgacctgcttgggggtgtgatgctttcatgatgcttcctttgatgtcgggggcccttggtcttagcaggtcccttgggcctatgggccccaggtcctgtggtggcctcctgctgggcatggacccctgcccttgaaggcttgtaggtctgggaggcgagggtctggcagtgaggcgcctgcaacagcggctgtgaggactggctctcgtcctcggagtctgagtccagggtctggtgagtgt

SEQ ID NO: 40 - DNA, 450 bp, Homo sapiens
  MAP TO AC006111.2; EXPRESSED IN BONE MARROW, SIGNAL = 5.3; EXPRESSED IN ADULT LIVER, SIGNAL = 4.5; EXPRESSED IN HEART, SIGNAL = 4.4; EXPRESSED IN PLACENTA, SIGNAL = 5.8; EXPRESSED IN BT474, SIGNAL = 4.4; EXPRESSED IN HBL100, SIGNAL = 6.2; EXPRESSED IN FETAL LIVER, SIGNAL = 5.9; EXPRESSED IN LUNG, SIGNAL = 6.9; EXPRESSED IN HELA, SIGNAL = 4.7; EXPRESSED IN BRAIN, SIGNAL = 6.8
cctgcagaaggctgggacggtgcacatcaggtacagggccctgtcagcctgcacttggctcagcatccagcccagaagggcctggtcctcggggaacatctgctccaaacacaccttgatctcctcctcgttaaagccccggatctccgtcatccggtccaccaggccccctgggatctggccagatgcactgggacgggaggtgatccagatggaaacttccggaaagaggttgccacggatgatgttggtgatcaggtggtccaccgggatctccttctttgggtccgtgcaggccacggtgttggagaagtccagaggcgtcctgcactcatccaagccgtccaggatcaggagggccctggctgggactgccaccgccaggctgggctccccgacgtgcgggaagaccgagcagatgagtcggtcggcacacagcttctcgtgggt

SEQ ID NO: 41 - DNA, 456 bp, Homo sapiens
  MAP TO AC006111.2; EXPRESSED IN ADULT LIVER, SIGNAL =  11; EXPRESSED IN FETAL LIVER, SIGNAL =  17; EXPRESSED IN LUNG, SIGNAL =  17; EXPRESSED IN HELA, SIGNAL =  20; EXPRESSED IN HEART, SIGNAL =  11; EXPRESSED IN PLACENTA, SIGNAL =  12; EXPRESSED IN BONE MARROW, SIGNAL =  15; EXPRESSED IN BRAIN, SIGNAL =  15; EXPRESSED IN BT474, SIGNAL =  13; EXPRESSED IN HBL100, SIGNAL =  18
acagagaagcttggtggtggggaggggacggcttctgctctctcctctgccccttccccagcccctgccccctgccctggtatccacctgagcttccggcagtagagcagctggggcagcaggctctgaaggacgccctggctgaggctcagggacaggttggcctcctgggcacaggcgtcggacacctgcaggaggtaggccagggcagcgcggtgcgcgggaccagtcagcctggccagggccccgctctccatggcctcctccacgctgcgggccagctcggtgtgctgcagctcatgcaggcagtgcaacacgttgatggcccgtgcacagactgcggcatcggggcgcaggcagccctgcaggagctcagccacctgggtccggtaggcctggtgctcgccttgggccagcagggagccggccaggagggcattgaccctcggagacaag

SEQ ID NO: 42 - DNA, 460 bp, Homo sapiens
  MAP TO AC006052.5; EXPRESSED IN HEART, SIGNAL =   3; EXPRESSED IN PLACENTA, SIGNAL = 2.9; EXPRESSED IN BT474, SIGNAL = 3.2; EXPRESSED IN BONE MARROW, SIGNAL = 2.4; EXPRESSED IN LUNG, SIGNAL =   3; EXPRESSED IN HELA, SIGNAL = 2.8; EXPRESSED IN ADULT LIVER, SIGNAL = 2.1; EXPRESSED IN BRAIN, SIGNAL = 5.1; EXPRESSED IN HBL100, SIGNAL = 2.6; EXPRESSED IN FETAL LIVER, SIGNAL = 2.4
aatggtcttaccatgttccccattatcctgaagcagctggattgatagaacattggaatggccttttgaagtcacaattacaatggcaactaggtgacaatactttgcaggactggggcaaagttgtccagaaggccgtgtatgctctgaatcagcatcaaatatggtactgtttctcccatagccaggattcacgggtacaggaatcaaagggtggaagtggaagtggcaccactcaccatcacccttagagattcactagcaaaatttttgcttcctgttcctgaaacgttatgttctcctggcctggagatcttagttccagagggaggaatactgccaccaggagaaacaacgattccattaaactataagttaagattgccatctggacactttgggctcctcctacctttaagtcaacaggctaaaaaggaagttacaatgttgattggggtga

SEQ ID NO: 43 - DNA, 482 bp, Homo sapiens
  MAP TO AC006052.5; EXPRESSED IN HBL100, SIGNAL = 1.5; EXPRESSED IN FETAL LIVER, SIGNAL = 1.1; EXPRESSED IN BRAIN, SIGNAL = 2.8; EXPRESSED IN BT474, SIGNAL = 1.5; EXPRESSED IN BONE MARROW, SIGNAL = 2.4; EXPRESSED IN HELA, SIGNAL = 2.2; EXPRESSED IN ADULT LIVER, SIGNAL = 1.4; EXPRESSED IN PLACENTA, SIGNAL = 2.1; EXPRESSED IN LUNG, SIGNAL = 1.9; EXPRESSED IN HEART, SIGNAL = 1.9
ctccagttaaagcaggagcctatggaagtcacataattaatagcgttttagctcaggtccaacttacagtgggtccagtgggtccgcggacttgtcttgtggtcatttccccagtgtcagagggcataatcggcatagacatacttagcagctggcagaacccccatattggctccctgactggtagggtgagggctattatggtgggaaaggccaaatggaagccattagagctgcctgtacctagaaaaatagtaaatcaaaagcaatattgcatctctagaggaattgtggagattcgtgctaccaccaaggacttgaaagatgcagggttggtgattcccaccaaatacccattcaactctcccatttggcctctgcagaagacaggtgggtcttggagaatgacaatgaattatcgtgagcttaaccaagtggtgactccaattgcagctgctgtaccaggtgtgatttcattgctt

SEQ ID NO: 44 - DNA, 499 bp, Homo sapiens
  MAP TO AC006052.5; EXPRESSED IN HEART, SIGNAL = 1.4; EXPRESSED IN PLACENTA, SIGNAL =   2; EXPRESSED IN FETAL LIVER, SIGNAL = 1.8; EXPRESSED IN LUNG, SIGNAL = 1.5; EXPRESSED IN HELA, SIGNAL = 1.6; EXPRESSED IN ADULT LIVER, SIGNAL = 1.9; EXPRESSED IN BRAIN, SIGNAL = 1.4; EXPRESSED IN BT474, SIGNAL = 1.5; EXPRESSED IN BONE MARROW, SIGNAL = 2.5; EXPRESSED IN HBL100, SIGNAL = 1.7
ttttggggtttctggagttggctgcttaatatgattagacctcaaaatgctaaagactctacttctaatagtatagagaacactgatagtcattggcatggacgttttagagagttatgcaaaataaatacatttgacactcctgattcattgcctgtgagaggcaaggagtttagtgactgtatacataatacctttggccatatgtggagaaccaaggaacatagtgaagctagttgtttgctcctaaattcagtggacaaaatgatgacagaaaatgataaacacaggaattctatctcctggctttagaagcagatactgagcctcaaatctgctaagattgccctgagtgagagtcttatctccagtagagaaagagctgaaattgtgaagaaacagacaaaagctcttatcacgtgagtggccaaactgcaatgaaaggtgcatgtacagcctcatcaggtgtctagtgttaaagtgagggcattgattggaa

SEQ ID NO: 45 - DNA, 465 bp, Homo sapiens
  MAP TO AC005973.2; EXPRESSED IN PLACENTA, SIGNAL = 1.5; EXPRESSED IN HBL100, SIGNAL = 1.4; EXPRESSED IN FETAL LIVER, SIGNAL = 1.3; EXPRESSED IN LUNG, SIGNAL = 1.6; EXPRESSED IN HELA, SIGNAL = 1.3; EXPRESSED IN BRAIN, SIGNAL = 2.2; EXPRESSED IN BT474, SIGNAL =   2; EXPRESSED IN BONE MARROW, SIGNAL = 1.9; EXPRESSED IN ADULT LIVER, SIGNAL = 1.2; EXPRESSED IN HEART, SIGNAL =   1
attaagagccgatcgcacagtgtgagacactggttaggggaagggttggggcaaacgccaggacccctccccacaaaacactcaaaggatgagatgctgcagttcatgggggctggagtgcggggccatccatgaggcaggaggcccctctgggtccagggacaggggaggctgggtagaccggagggagggtagctggcaaggagagatgctgggcactgatactgagtcctagtgaacagcccggagacagggattgcggggagggaaggcgggcaggggggcgtttctcacccagagctggtcatcgtttcccggggggctcttcttgatgaaggctccgtagtaggtggcgatgttgcggtggtgagagtactttttcagcatgttgatctcctgtttgatctcttcctcctcgtcctaagcagatgggaggagctgagccctgagactcccccaacactc

SEQ ID NO: 46 - DNA, 467 bp, Homo sapiens
  MAP TO AC005973.2; EXPRESSED IN HEART, SIGNAL = 3.6; EXPRESSED IN BT474, SIGNAL = 8.4; EXPRESSED IN BONE MARROW, SIGNAL = 7.8; EXPRESSED IN HELA, SIGNAL = 5.2; EXPRESSED IN BRAIN, SIGNAL = 2.4; EXPRESSED IN PLACENTA, SIGNAL = 5.2; EXPRESSED IN FETAL LIVER, SIGNAL =   5; EXPRESSED IN LUNG, SIGNAL = 6.6; EXPRESSED IN ADULT LIVER, SIGNAL = 4.6; EXPRESSED IN HBL100, SIGNAL = 8.5
gctgcttgttcatccttgttctctcttctacctgtgatgtgaagggatgtcaagcaggccagctcttgcctccctgttctcaaaactgagggtcccacctgccctaactactcccgccctatgctctgtgctgtgtgctcctttcccctacttggtgcctgctactgtgaactactacttcttgtggctctccaggcctcaggcagtgggactgcagtctcaggaggcaaaggaggcagtgagtacctctcgggcccaggctggtttgtcagcgggattcatgccccgaccataatggtacaggggcttcctgtccccaggcaggagctgctgctgctgctgtttctgaagctgctgctgctgttgctgctgctgcagggacttgaggtaggcatgctcctgctgcagctgcctctggagacgttctgactgccgctgctcctccagctgcttccgcttgtattcct

SEQ ID NO: 47 - DNA, 481 bp, Homo sapiens
  MAP TO AC005973.2; EXPRESSED IN ADULT LIVER, SIGNAL = 1.3; EXPRESSED IN BRAIN, SIGNAL = 1.9; EXPRESSED IN HEART, SIGNAL = 0.97; EXPRESSED IN PLACENTA, SIGNAL = 1.5; EXPRESSED IN BT474, SIGNAL = 2.5; EXPRESSED IN HELA, SIGNAL = 1.7; EXPRESSED IN LUNG, SIGNAL = 2.2; EXPRESSED IN FETAL LIVER, SIGNAL =   2; EXPRESSED IN HBL100, SIGNAL = 2.9; EXPRESSED IN BONE MARROW, SIGNAL = 2.2
gatggtgacagcgccaaggagctgagcccctcctccctcccccactcaccacacctgtacctgagatggtgatgagcaggttgagcccctccagcacatccatctgctggaagcgtcgccgcccaatgagtccatacaccttgccctgcccacttcggtccagcaacatcagcccgttctccgtgcccaccagcaggttgacccctgcaacaggagcccttgggcaggtcagaggctcagccaggccctcacctaaccaggagcacaagagccacgccagagcctcctcagctgtccctgccctggcttaccccaaagggctgcacagaggatctcggagttgaatcgcttcttgtacttccggatctcaggggtctcactgtgggcccgggtgttggtgggattcacgttgaccacagaacccttcctcacgtcgtactgcagctggtcgagccgagtgccctctccacccactagggct

SEQ ID NO: 48 - DNA, 448 bp, Homo sapiens
  MAP TO AC005973.2; EXPRESSED IN BT474, SIGNAL = 3.7; EXPRESSED IN HELA, SIGNAL = 5.9; EXPRESSED IN PLACENTA, SIGNAL = 4.9; EXPRESSED IN BONE MARROW, SIGNAL = 5.7; EXPRESSED IN FETAL LIVER, SIGNAL = 8.6; EXPRESSED IN LUNG, SIGNAL =   5; EXPRESSED IN ADULT LIVER, SIGNAL = 4.4; EXPRESSED IN BRAIN, SIGNAL =  15; EXPRESSED IN HEART, SIGNAL = 5.1; EXPRESSED IN HBL100, SIGNAL = 6.4
ttgctgccactagtccactgtctttgcactcactctctgccatgcccatccttgtccccctccccactcacagacatgtccaacaacagccccgagtatgctttggttttcaccatctcgggtgctatggccaccatggtctccagtggcctgggtgctgcctgtggcatggccaagaatggcaccggcatcatggccatgtctgtcatgtggccagagctgatccacatgaagtccatcatcccagtggtcatggctggtatcatcaccatctatggcctagtggcggctgtcccccctgccaactccctgaatgatgacaacagtctctatagcagtttcctccagctgggcgctggcctgagtggcctggcagccggctttgccatcgtcatcgtgggggacactggcaagtgtggcactgcccagcagccccgactatttgtag

SEQ ID NO: 49 - DNA, 464 bp, Homo sapiens
  MAP TO AC005921.3; EXPRESSED IN BT474, SIGNAL =   3; EXPRESSED IN HELA, SIGNAL = 3.4; EXPRESSED IN HEART, SIGNAL = 1.4; EXPRESSED IN PLACENTA, SIGNAL = 2.2; EXPRESSED IN HBL100, SIGNAL = 6.5; EXPRESSED IN FETAL LIVER, SIGNAL =   2; EXPRESSED IN LUNG, SIGNAL = 4.5; EXPRESSED IN ADULT LIVER, SIGNAL = 1.2; EXPRESSED IN BONE MARROW, SIGNAL = 1.5
caatccaaagaccaaaagcctattatttaattaacttcctttctttgcttgttagatgagatttggatttgatgtgtctgttttcttggccctggtctgctcatgaaagccttctacagggggaagctgtgggcaggttcctatagcgactctttgggagaactctcacagggctgagtaattgcttagttctgcctgcttcgttcccttctgcttcataggtactacaaaatagttgttgtccacagtggtgagccccgcagtgagtgaaaacaagttctggaagttcagtgtgctgtcttggcactggtccatgtccttcattgttatgtctgcagccagagggtctttttgattctccaaaaatccaaggaactcctttcccatgagtactttcaggccctccttcattaagtagcctttatccccggcaaatctgtgaaacgtaaacaacacggtttcca

SEQ ID NO: 50 - DNA, 458 bp, Homo sapiens
  MAP TO AC005921.3; EXPRESSED IN HEART, SIGNAL = 0.85; EXPRESSED IN ADULT LIVER, SIGNAL =  47; EXPRESSED IN BRAIN, SIGNAL = 2.3; EXPRESSED IN BONE MARROW, SIGNAL = 3.4; EXPRESSED IN HBL100, SIGNAL =   8; EXPRESSED IN FETAL LIVER, SIGNAL = 3.2; EXPRESSED IN HELA, SIGNAL = 3.2; EXPRESSED IN PLACENTA, SIGNAL = 2.3; EXPRESSED IN BT474, SIGNAL =  12; EXPRESSED IN LUNG, SIGNAL = 2.3
tgattttcttaactcttgagtgccagaaatttgggaagaatattcctgaggattagacaaataatgataccttgtgtatatacatggtgttggaatgtctacatttcccttaagggcatcaattccataagttggtctacagataacttcacattagttgaccattgtttaacaatgctttaaagttacatttgcataagaatccaacttgatttttctaggaaaagttaaggaaaagaaccgaagaacctgatcgtgatgagcgtctaaaaaaggagaagcaagaaagagaagaaagagaaaaagaacgggagagagaaagggaagaaagagaaaggaaaagacgaagggaagaggaagaaagagaaaaagaaagggctcgtgacagagaaagaagaaagagaagtcgttcacgaagtagacactcaagccgaacatcagacagaagatgcagcagg

SEQ ID NO: 51 - DNA, 496 bp, Homo sapiens
  MAP TO AC005921.3; EXPRESSED IN BONE MARROW, SIGNAL = 2.1; EXPRESSED IN ADULT LIVER, SIGNAL =  19; EXPRESSED IN BRAIN, SIGNAL = 0.76; EXPRESSED IN BT474, SIGNAL =  13; EXPRESSED IN HBL100, SIGNAL = 4.3; EXPRESSED IN LUNG, SIGNAL = 9.2; EXPRESSED IN HELA, SIGNAL = 2.5; EXPRESSED IN PLACENTA, SIGNAL = 1.8; EXPRESSED IN FETAL LIVER, SIGNAL = 8.2; EXPRESSED IN HEART, SIGNAL = 1.4
ggcgtctatgctgctttaggaattctgcaaggtgagcttgtgggggtgtccagaaggggctccaatatcccttcttctctgggctgccaggccccccaaaccgtgcccttgcatccaagcctccctaacccactctggtcaacccgtgtctctgattctgcccctttgtgcccgctcactagtccaggtgagccagcgccctctgccttctccaacagggttcttggtgatgctggcagccatggccatggcagcgggtggcatccaggctgcccgtgtgttgcaccaggcactgctgcacaacaagatacgctcgccacagtccttctttgacaccacaccatcaggccgcatcctgaactgcttctccaaggacatctatgtcgttgatgaggttctggcccctgtcatcctcatgctgctcaattccttcttcaacgccatctccactcttgtggtcatcatggccagcacgccgctcttcactgtggtcatc

SEQ ID NO: 52 - DNA, 468 bp, Homo sapiens
  MAP TO AC005921.3; EXPRESSED IN FETAL LIVER, SIGNAL =   1; EXPRESSED IN ADULT LIVER, SIGNAL = 1.2; EXPRESSED IN PLACENTA, SIGNAL = 1.4; EXPRESSED IN BONE MARROW, SIGNAL = 1.3; EXPRESSED IN HBL100, SIGNAL = 2.9; EXPRESSED IN LUNG, SIGNAL = 1.4; EXPRESSED IN HELA, SIGNAL = 1.3; EXPRESSED IN BRAIN, SIGNAL =   3; EXPRESSED IN BT474, SIGNAL = 6.9; EXPRESSED IN HEART, SIGNAL = 1.2
attaaatcccacccctctggacaccaactcccctgttgcagaggctgtttgctgatgaggggttaccttgcatattaaatggaaatgctccagtgaagaaaaatggctggaatgctggcgctggtcctgcatacgtcccattttgaggctccagagacattggtggcttggacgggacagaagaaaacagggagcggctctgactcactggtggctgacaaacaggacccggttttgtgctttctggtgttctgagtatggcagagggggccgacacatcaccattctgaactagtgccaaagaggtgtggtcccggggaaaggtccctaacaggggaggttccccagggggaagcaatggaggtgagccatctgcagggggtgatgcagggggtgtggaggggcccccattctgcatctgggctgaatcctctgctgtgggtgtatagataaaagggaaggctgggt

SEQ ID NO: 53 - DNA, 460 bp, Homo sapiens
  MAP TO AC005883.6; EXPRESSED IN BRAIN, SIGNAL = 5.8; EXPRESSED IN HEART, SIGNAL = 4.1; EXPRESSED IN HBL100, SIGNAL =  55; EXPRESSED IN HELA, SIGNAL =  28; EXPRESSED IN ADULT LIVER, SIGNAL =  11; EXPRESSED IN BT474, SIGNAL =  37; EXPRESSED IN BONE MARROW, SIGNAL =  25; EXPRESSED IN FETAL LIVER, SIGNAL =  28; EXPRESSED IN PLACENTA, SIGNAL = 9.8; EXPRESSED IN LUNG, SIGNAL =  14
tcaggctagaaccatggagggtgtagaagagaagaagaagaaggttcctgctgtgccagaaacccttaagaaaaagagaaggaatttcgcagagccgaagatcaagcacctgagaaagaagtttgcccaaaagatgcttcaaaaggcaaggaggaagcttatctatgaaaaagcaaagcactatcacaaggaatataggcagttgtacagaactgaaattcaaatgccaaggatagcaagaaaagctggcaacttctatgtacctgcaaaacccaaattggcgtttgtcatcaggatcagaggtgtcaatggtgtaagcccaaagatccgaaaggtgttgcagcttcttcgcctttgtcaaatcttcaatgaaacctttgtgaagctcaacaaggcttcaattaacatgctgaggattgtagagccatacattgcatgggggtgcccaaatctgaagtca

SEQ ID NO: 54 - DNA, 462 bp, Homo sapiens
  MAP TO AC005632.2; EXPRESSED IN FETAL LIVER, SIGNAL = 2.7; EXPRESSED IN LUNG, SIGNAL = 3.2; EXPRESSED IN HEART, SIGNAL = 2.1; EXPRESSED IN BONE MARROW, SIGNAL = 2.4; EXPRESSED IN HELA, SIGNAL = 4.3; EXPRESSED IN ADULT LIVER, SIGNAL = 2.6; EXPRESSED IN BRAIN, SIGNAL = 3.1; EXPRESSED IN PLACENTA, SIGNAL = 2.7; EXPRESSED IN BT474, SIGNAL = 5.6; EXPRESSED IN HBL100, SIGNAL =  12
aggaaggggtctttaggaggtgattaggattagatgagatcatgagagcagagccttcctgaatgggatgaatgcccttttaagagttccgagagaccttgcttctctctaccttctgccatgcaaggatacaacaagaggtcagcagcctgtacctagaaagagggtcctcaccagaactcataaatttctattgttctgtgtctggaattggtgggttcttggtctctctgacttcaggaatgaagctacaaacctttgcggtgagtgttacagttcataaaggcggcctgtctggaggtgttagttccttctggtgggttcctggtcttgctggcctcaggagtgaagctgcagacctttgcggtgagtgttacagctcttaaaggtggcacggacccaaagcgtgagcagcagtaagatttattgcaaagaacgaaagaacaaagcttcctcagcatg

SEQ ID NO: 55 - DNA, 490 bp, Homo sapiens
  MAP TO AC005632.2; EXPRESSED IN BT474, SIGNAL =  13; EXPRESSED IN BONE MARROW, SIGNAL =  11; EXPRESSED IN HELA, SIGNAL = 8.6; EXPRESSED IN ADULT LIVER, SIGNAL = 9.6; EXPRESSED IN BRAIN, SIGNAL =  13; EXPRESSED IN PLACENTA, SIGNAL =  16; EXPRESSED IN HEART, SIGNAL = 8.1; EXPRESSED IN LUNG, SIGNAL =  12; EXPRESSED IN FETAL LIVER, SIGNAL =  12; EXPRESSED IN HBL100, SIGNAL =  11
tactagaggccaaggcagggccgggacacgagaacgcgctccgggcggatgcgcgctccctttgtcccgcctcccagcggcccgctcattggacggagggagggcgccgggggagaaagcgacgcggccgctcgtaagtgctccggatggaaactggtgcagggggcagcggcgttccgcggccggaagggaagggggaggtgccgaggctgcgcgccggctgctcctccccacccccagcctttgccctgaagggggctggatgggcaaggcggccgcgatggctcgagctcgggcggtggcggcggtggccggaggcggcggtgcctcctcctcctcgccccggcgccggcggtgatccgagcgagcggccgcggcccccgatgagactgctggcgggctggctgtgcctgagcctggcgtccgtgtggctggcgcggaggatgtggacgctgcggagcccgctcacccgctccctgtacgtgaacat

SEQ ID NO: 56 - DNA, 489 bp, Homo sapiens
  MAP TO AC005632.2; EXPRESSED IN PLACENTA, SIGNAL = 1.2; EXPRESSED IN BONE MARROW, SIGNAL = 4.9; EXPRESSED IN LUNG, SIGNAL = 1.4; EXPRESSED IN HEART, SIGNAL = 0.88; EXPRESSED IN BT474, SIGNAL = 2.2; EXPRESSED IN HBL100, SIGNAL = 2.8; EXPRESSED IN FETAL LIVER, SIGNAL = 1.6; EXPRESSED IN HELA, SIGNAL = 1.3; EXPRESSED IN ADULT LIVER, SIGNAL = 0.9; EXPRESSED IN BRAIN, SIGNAL = 1.1
ttcaatatccacgataattgggtaaaccttttctgtaagatcttatccagtcttctaatcttgttttaagagaattctcttttaaaatgtactatagcctttctagtgggaaattaacaattcacaggaaaagaatgtaaacaatttttacctgcacagtagactaatcaacttatgcctttgcaaggcattagtaagaggcatccagaataagaggagatacaagtctttggaaggtgtatgtgattggtccccgttttcccagccttaccctgtgatttcctcatgtctttggtggctaaagcacaactgccatgctgaacactggtgaactcagggctggtcacattgttaaccctcagctcttgccccaatgacttccgaccataagtattttccccagatcccccattgacaccgtagccacctacaaacagccatgtgtacgtcatttaaatatgattgttcgtttcattcagtcaatttcct

SEQ ID NO: 57 - DNA, 489 bp, Homo sapiens; identical to SEQ ID NO: 56
  MAP TO AC005632.2; EXPRESSED IN HEART, SIGNAL =   3; EXPRESSED IN BONE MARROW, SIGNAL =  13; EXPRESSED IN BRAIN, SIGNAL = 3.5; EXPRESSED IN PLACENTA, SIGNAL = 3.1; EXPRESSED IN BT474, SIGNAL = 8.8; EXPRESSED IN HBL100, SIGNAL =  18; EXPRESSED IN FETAL LIVER, SIGNAL =  10; EXPRESSED IN LUNG, SIGNAL = 3.6; EXPRESSED IN HELA, SIGNAL =   9; EXPRESSED IN ADULT LIVER, SIGNAL = 4.8

SEQ ID NO: 58 - DNA, 382 bp, Homo sapiens
  MAP TO AC005632.2; EXPRESSED IN BRAIN, SIGNAL = 0.97; EXPRESSED IN HEART, SIGNAL = 0.9; EXPRESSED IN PLACENTA, SIGNAL = 1.2; EXPRESSED IN BT474, SIGNAL = 3.6; EXPRESSED IN BONE MARROW, SIGNAL = 6.9; EXPRESSED IN ADULT LIVER, SIGNAL =   1; EXPRESSED IN HELA, SIGNAL = 2.7; EXPRESSED IN LUNG, SIGNAL = 2.3; EXPRESSED IN FETAL LIVER, SIGNAL =   3; EXPRESSED IN HBL100, SIGNAL = 3.9
gactatctcagcagtgttttcccattatacaaataccttccctcatctctgatgtcagtttcctgttgtcattttcataatggcagtaagttagaaatataaccattttgagtattactgcatatgaccaattttaatattttttttgccataggaaaaacatcatagttattggaaatttgttttataactggaaacagaaagccttactttatatagttgaagtcagctttcaggttgagggaagtgctactggtactctttttcaagtcatggatagcgttctgccattcctgcacagcagcccaatcggcagttgagatgtagcactcacatgctttgtttcctaaataatttataacctcaggggaagagtcagtcg

SEQ ID NO: 59 - DNA, 457 bp, Homo sapiens
  MAP TO AC005301.16; EXPRESSED IN PLACENTA, SIGNAL = 2.5; EXPRESSED IN BT474, SIGNAL = 1.1; EXPRESSED IN FETAL LIVER, SIGNAL = 0.8; EXPRESSED IN LUNG, SIGNAL = 5.5; EXPRESSED IN ADULT LIVER, SIGNAL = 0.8; EXPRESSED IN BRAIN, SIGNAL = 1.5; EXPRESSED IN HEART, SIGNAL = 5.8
gtgtgtgttttgaagtgggggggcatgctatttggggacagatgttaaacagtgacatctcacttgggtgtggaatggtccgtgggatctcaagttcaggtggaacagaggagattctgtgggaatatggaagtagtcatacactgtagggctcagaagtgtccataggttctttctgaaccattttaatttcttcgctcttttctgcagccactgtgatggtgtcaccctcacctgtgaagcctgccaggagccgggaggcctggtggtacctcccacagatgccccggtgagccccaccactctgtatgtggaggacatctcagaaccgctgttgcacgatttctactgcagcaggctactggacctgatcttcctgctggatggctcctccaggctgtccgaggctgagtttgaagtgctgaaggcctttgtggtggacatgatggagcggctg

SEQ ID NO: 60 - DNA, 474 bp, Homo sapiens
  MAP TO AC005301.16; EXPRESSED IN HEART, SIGNAL = 2.6; EXPRESSED IN LUNG, SIGNAL = 3.7; EXPRESSED IN BRAIN, SIGNAL =   1; EXPRESSED IN PLACENTA, SIGNAL = 1.9
ttgggaactcctggaaagtgagctcgcagtctgctgacaccagaaaactacgtctgggtctctgtgtggacagagcccgagagcttgcttcctggaatgtccctctgtccccattcttatgggggctggaaggggggttgtgggtggtatgaccttcaggtgcctgcagggtgggaaggagggtctcttggatccttctgggctgaataaccccagtttgaccagctgacggctggcctatctcttgcctggttcccaggtgcctctggactcatcccctgccacctgccataacaacatcatgaagcagacgatggtggattcctcctgtagaatccttaccagtgacgtcttccaggactgcaacaagctggtgaggaccttgagggtagtgggaagcagatggtcccaaggcttggcccagtggtatggacacagagtgtgaccttctaacgtggacactacccttgtgtc

SEQ ID NO: 61 - DNA, 469 bp, Homo sapiens
  MAP TO AC005301.16; EXPRESSED IN BT474, SIGNAL = 0.79; EXPRESSED IN HEART, SIGNAL = 2.8; EXPRESSED IN PLACENTA, SIGNAL =  24; EXPRESSED IN FETAL LIVER, SIGNAL = 0.85; EXPRESSED IN LUNG, SIGNAL = 5.6; EXPRESSED IN ADULT LIVER, SIGNAL = 0.67; EXPRESSED IN BRAIN, SIGNAL = 0.91; EXPRESSED IN BONE MARROW, SIGNAL = 1.2
atcagcaagatcgaccgccctgaagccttccgcatcgccctgctcctgatggccagccaggagccccaacggatgtcccggaactttgtccgctacgtccagggcctgaagaagaagaaggtcatcgtgatcccggtgggcattgggccccatgccaacctcaagcagatccgcctcattgagaagcaggcccctgagaacaaggccttcgtgctgagcggtgtggatgagctggagcagcaaagggaagagatcgttagctacctctgtgaccttgcccctgacgcccctcctcctactctgcccccccacatggcacaagtcactgtgggcccggggctcttggggctttcgaccctggggcccaagaggaactccatggttctggatgtggcatttgtcctggaaggatcggacaaaattggtgaagccaacttcaacaggagcaaggagttcatggaggaggtga

SEQ ID NO: 62 - DNA, 471 bp, Homo sapiens
  MAP TO AC005301.16; EXPRESSED IN ADULT LIVER, SIGNAL = 1.3; EXPRESSED IN BRAIN, SIGNAL = 1.5; EXPRESSED IN HEART, SIGNAL = 1.5; EXPRESSED IN BONE MARROW, SIGNAL = 1.3; EXPRESSED IN HBL100, SIGNAL = 1.2; EXPRESSED IN HELA, SIGNAL = 1.7; EXPRESSED IN PLACENTA, SIGNAL = 1.6; EXPRESSED IN BT474, SIGNAL = 1.1; EXPRESSED IN FETAL LIVER, SIGNAL = 1.3; EXPRESSED IN LUNG, SIGNAL = 1.8
ttttcatgtttgtctttaatagcattgctgatgacattttccctgttatcagttacttatggggccattcgctgcaatatactggccatccagatcagcaatgatgatactaccattaagctaccgccgatagaattcttctgtgtcgtgatgtggcgttttttggaggttatctcacgtgtagtgactctggcatttttcattgcatctctgaaactgaagagcctacccgttttgttaatcatatattttgtatcattgttggcaccgtggctggagttttggaaaagtggagctcatcttcctggcaacaaagaaaataattccaatatggtgggtacagtactgatgcttttcttgatcacactgctatatgctgccatcaacttctcctgctggtcagcagtgaaactgcagttgtcagatgacaaaataattgacgggagacagaggtggggccatagaatccta

SEQ ID NO: 63 - DNA, 463 bp, Homo sapiens
  MAP TO AC004882.2; EXPRESSED IN LUNG, SIGNAL = 1.5; EXPRESSED IN HELA, SIGNAL = 3.1; EXPRESSED IN PLACENTA, SIGNAL = 0.85; EXPRESSED IN BONE MARROW, SIGNAL = 1.1; EXPRESSED IN FETAL LIVER, SIGNAL = 2.5; EXPRESSED IN ADULT LIVER, SIGNAL = 3.1; EXPRESSED IN BRAIN, SIGNAL = 1.2; EXPRESSED IN HEART, SIGNAL = 0.82; EXPRESSED IN BT474, SIGNAL = 2.1; EXPRESSED IN HBL100, SIGNAL = 1.9
ttttatagaggggaagctaaggcttcgatagttgaagcaacttgctctctcctcacacacagtccagcatgcccccagcttgggaccctctaaaggcagcacagagctgaccagttgcttgaggctgtctattccccaaaaaaactttttccctgagtataaaagcaaagaagggaggtttcctgctgccccagcctctcagatagggccaaggagggacaagcgaagagggaaaagcgccactcagacacatacctcctcttcctccgagttctccggatgtgatgatgcttgactgactgcctctgctgtcaccgtgaccccgttaggctccccattaggctcctcaatcaccgatgggtctttagcatctgtggctttccgtctgtccaccccttcccatgcactctcgactgcctggaggatgtaggcagtccgcgtctcgtccctgtgaggacttgtt

SEQ ID NO: 64 - DNA, 483 bp, Homo sapiens
  MAP TO AC004882.2; EXPRESSED IN BONE MARROW, SIGNAL = 2.9; EXPRESSED IN HBL100, SIGNAL =  12; EXPRESSED IN ADULT LIVER, SIGNAL =   7; EXPRESSED IN BRAIN, SIGNAL =   6; EXPRESSED IN PLACENTA, SIGNAL = 3.2; EXPRESSED IN HEART, SIGNAL = 9.5; EXPRESSED IN HELA, SIGNAL = 3.8; EXPRESSED IN LUNG, SIGNAL = 3.2; EXPRESSED IN FETAL LIVER, SIGNAL = 8.9; EXPRESSED IN BT474, SIGNAL = 7.8
agcagctgtttgcccagagctggagcctcagcttgaagatgatgctcaaggtactcttcatggaccaccattcgctgttggcaagaaacggctttacttacaaaacagactctttaccttctgctgtgtttgaagtatgtttagtcagcatgctcaggaaataaatgtgaattgcccttgagacctgcttctacattggttgctttgttaactctacctgatcttcacttgtcagtaatttgagaccacttcaaagccctctgcaaacaccccaaaggcagaatctgctattttgagttttccattaacttccaaagaattctggttttcaaaacaggagccagagttggagatattacagtcaactttggcttctaagccagtaattccattcttaaatacctcactgtcttggccatggggaagcactatggcctcagctgggggaaagaccctggcctaggggtcttagccactccccac

SEQ ID NO: 65 - DNA, 453 bp, Homo sapiens
  MAP TO AC004882.2; EXPRESSED IN LUNG, SIGNAL = 0.83; EXPRESSED IN PLACENTA, SIGNAL = 0.9; EXPRESSED IN BT474, SIGNAL = 1.4; EXPRESSED IN HBL100, SIGNAL = 1.3; EXPRESSED IN FETAL LIVER, SIGNAL = 4.6; EXPRESSED IN HELA, SIGNAL = 0.93; EXPRESSED IN BRAIN, SIGNAL = 1.3; EXPRESSED IN BONE MARROW, SIGNAL = 0.94; EXPRESSED IN ADULT LIVER, SIGNAL = 2.8; EXPRESSED IN HEART, SIGNAL = 1.5
actgcatggctagctttcccctattttagctgttggctcaaacatcacctccttctagggccttcctcctgtccacagagccttcagtcagcgttgttggggaaagagctcacctaccagcctgctcctctgagggcccagtggctcaggcctccctctcttttgatcctcaaagagcccagacctagactgtcactgacccacaggagtctttgatgataagaaagatcagagagcagggctccaggagcctggcccccagccagcggcacccacctcggaacatgtcgtaccagaccttcttggccttgaggtgctgcagcccgttcaggtgcttcttgcggttgtggaggttgtcctggaaggagcggtcgcagtagtcacagaagtatcgcttccccatggccactcagagcaggtgctttgctgcctgggaagccacaaagagctcag

SEQ ID NO: 66 - DNA, 479 bp, Homo sapiens
  MAP TO AC004882.2; EXPRESSED IN HEART, SIGNAL = 1.6; EXPRESSED IN BT474, SIGNAL = 1.4; EXPRESSED IN FETAL LIVER, SIGNAL = 1.4; EXPRESSED IN HELA, SIGNAL = 1.5; EXPRESSED IN ADULT LIVER, SIGNAL = 7.9; EXPRESSED IN PLACENTA, SIGNAL = 1.6; EXPRESSED IN BONE MARROW, SIGNAL = 1.8; EXPRESSED IN HBL100, SIGNAL = 1.6; EXPRESSED IN LUNG, SIGNAL = 1.9; EXPRESSED IN BRAIN, SIGNAL =   2
tggagttctgttctggagccagtgaatggctgggcccacactgtaaaggggggatgaccacttcaggcttgtgtccactggacatttcacctctcagagggccatgggctccctggggaggccggtgttggtcaaggactctctgggggaatggagcaagtgttttccagccccccagaatctagaggcctgtcaccgggtctgtatggccgtggggtgctgggtgggggctgcggtggctctcagagcaccgtgttgtccccctccgcaagtgcgacatgcagaagctgacggtggatgagctgaagcggctgctctacgacaccttctgcgagcacctgtccatgaaggacatagagaacatcatcatgacggaggaggagagccacctgggcacagccgaggagtgtcccgtggatgtggagagtgagtggctggccctggaaccccacgggtgggcccagtgacttggccagggg

SEQ ID NO: 67 - DNA, 446 bp, Homo sapiens
  MAP TO AC004882.2; EXPRESSED IN HELA, SIGNAL = 1.6; EXPRESSED IN BRAIN, SIGNAL = 1.1; EXPRESSED IN HEART, SIGNAL =   1; EXPRESSED IN BT474, SIGNAL = 0.87; EXPRESSED IN BONE MARROW, SIGNAL = 0.97; EXPRESSED IN LUNG, SIGNAL =   1; EXPRESSED IN ADULT LIVER, SIGNAL = 0.98; EXPRESSED IN FETAL LIVER, SIGNAL = 0.92; EXPRESSED IN HBL100, SIGNAL = 2.7; EXPRESSED IN PLACENTA, SIGNAL = 0.62
aaggtgctcttgttactccccatgggtgcagcccgaagggcccttctgaaaagttggggaatgtggcttgtcatttcttgtcagagggtcatggagggcactcagcagcagggccccaggagtccgagactctggtttgtcccatctcagtgttcaaggcagatctgggcgggagaacagcacatgatcccacttcagctaagagcactgtgccctccagatgcggtctgaggagacagctgacctgttggctgaaaaggcccagatcaccgaggaggaggcaaaacttctggcccagaaggccgcagaggctgagcaggaaatgcagcgcatcaaggccacagcgattcgcacggaggaggagaagcgcctgatggagcagaaggtgctggaagccgaggtgctggcactgaagatggctgaggagtcagagaggaggtgagggg

SEQ ID NO: 68 - DNA, 469 bp, Homo sapiens
  MAP TO AC004882.2; EXPRESSED IN BONE MARROW, SIGNAL = 0.68; EXPRESSED IN FETAL LIVER, SIGNAL = 0.85; EXPRESSED IN LUNG, SIGNAL = 0.82; EXPRESSED IN HELA, SIGNAL = 1.8; EXPRESSED IN BRAIN, SIGNAL = 0.89; EXPRESSED IN HEART, SIGNAL = 1.1; EXPRESSED IN HBL100, SIGNAL = 1.5; EXPRESSED IN ADULT LIVER, SIGNAL =   1; EXPRESSED IN PLACENTA, SIGNAL = 0.69; EXPRESSED IN BT474, SIGNAL = 0.7
aatgcctttttctatccgggtcaagactcaacaggtttttattgtttgttcatttgttcattcaccactagactgtttttcaagtggcacagctttcaactctgcaactggtttagaaggacggggtggggggcaataagaatgaccctggctacctaaaggaaagggaaggaaaaaggtcccaaaaggggagactggagatggggcatctttgggcccttgtggcaccctaggtctcgagccctgtgattcaatgactgtttttcttcacccctcgcagatggagcggcagcgcctcgctcgagagaagcagatgagggaggaggctgaacgcacgagggatgagttggagaggaggctgctgcagatgaaagaagaagcaacaatggccaacgaagcactggtgatttctgaggggctggggttccaggaggctacttggggacttccttggcttttctggagcttg

SEQ ID NO: 69 - DNA, 472 bp, Homo sapiens
  MAP TO AC004832.2; EXPRESSED IN BT474, SIGNAL = 1.9; EXPRESSED IN HELA, SIGNAL = 0.73; EXPRESSED IN ADULT LIVER, SIGNAL = 5.5; EXPRESSED IN BONE MARROW, SIGNAL = 4.1; EXPRESSED IN HBL100, SIGNAL =   3; EXPRESSED IN FETAL LIVER, SIGNAL = 3.7; EXPRESSED IN LUNG, SIGNAL = 5.3; EXPRESSED IN BRAIN, SIGNAL =  10; EXPRESSED IN PLACENTA, SIGNAL = 2.1; EXPRESSED IN HEART, SIGNAL = 1.8
tggacttttccatctgcatcagtaacatcaccccagcagatgccggcacctactactgtgtgaagttccagaaagggagccctgacgtggagttgaagtctggagcaggcactgagctgtctgtgcgtgccaaaccctctgcccccgtggtatcgggccccgcagcgagggccacacctgaccacacagtgagcttcacctgcgagtctcatggcttctcacccagagacatcagcctgaaatggttcaaaaatgggaatcagctctcagacttccagaccaacgtggaccccgcaagagagagcgtgtcctacagcatccacagcacagccaatgtggtgctgacccgcggggacattcactctcaagtcatctgcgaggtggcccacgtcaccttgcggggggactcttttcgtgggactgccaacttgtctgagactatccaagttccacccaccttggaggttactca

SEQ ID NO: 70 - DNA, 482 bp, Homo sapiens
  MAP TO AC004832.2; EXPRESSED IN FETAL LIVER, SIGNAL =   2; EXPRESSED IN LUNG, SIGNAL = 0.79; EXPRESSED IN HEART, SIGNAL = 1.2; EXPRESSED IN BT474, SIGNAL = 1.2; EXPRESSED IN BONE MARROW, SIGNAL = 1.2; EXPRESSED IN HELA, SIGNAL = 0.89; EXPRESSED IN ADULT LIVER, SIGNAL = 6.7; EXPRESSED IN PLACENTA, SIGNAL = 0.92; EXPRESSED IN BRAIN, SIGNAL = 1.8; EXPRESSED IN HBL100, SIGNAL = 1.9
atcccacctcatccctatgctaggcctttcagacccacaacctgggtcctggatccactggatttggatccttagaggaaaggtctgacaatgcccactgagccctgatggtctccagaatgggcatctgttggtacccaggagagggaggtagagaaagatactgatgaacctggagtaaggccctgtggtccaggcaaggtatggatgcctgctgaccaggtggctcctctgtgtctttgcccaggtgatccaacagtatctgtcagggggtatgtgtggctatgacctggatggctgcccagtctggtacgacataattggacctctggatgccaagggtctgctgttctcagcctccaaacaggacctgctgaggaccaagatgcgggagtgtgagctgcttctgcaagagtgtgcccaccagaccacaaaggtgagtggaccaccatggctagaaatgagttgaccacagcagaggc

SEQ ID NO: 71 - DNA, 472 bp, Homo sapiens
  MAP TO AC004832.2; EXPRESSED IN FETAL LIVER, SIGNAL = 1.9; EXPRESSED IN LUNG, SIGNAL = 2.2; EXPRESSED IN PLACENTA, SIGNAL = 1.1; EXPRESSED IN BONE MARROW, SIGNAL =   3; EXPRESSED IN HBL100, SIGNAL = 1.7; EXPRESSED IN HELA, SIGNAL = 0.62; EXPRESSED IN ADULT LIVER, SIGNAL = 3.7; EXPRESSED IN BRAIN, SIGNAL =  10; EXPRESSED IN HEART, SIGNAL = 1.5
catgagggcagagaaccaggtgaatatcacctgccaggtgacgaaattctacccccagagactacagttgacctggttggagaacggcaatgtgtcccggacagaaacggcctcaactcttacagagaacaaggatggcacctacaactggatgagctggctcctggtgaatgtatctgcccacagggatgatgtgaagctcacctgccaggtggagcatgacgggcagtcagcggtcagcaaaagccatgacctgaaggtctcagcccacctgaaggagcagagctcaaataccgccgctgagaacactggacctaatgaacagaacatctatattgtggtgggcgtggtgtgcaccttgctggtggccctactgatggaggctctctacctcgtccgaatcagacagaagaaagcccagggctccacttcttctacaaggttgcatgaacccgagaagaatgccagaaaa

SEQ ID NO: 72 - DNA, 472 bp, Homo sapiens
  MAP TO AC004032.7; EXPRESSED IN HELA, SIGNAL = 2.9; EXPRESSED IN ADULT LIVER, SIGNAL = 0.78; EXPRESSED IN BRAIN, SIGNAL =   1; EXPRESSED IN BONE MARROW, SIGNAL = 0.75; EXPRESSED IN FETAL LIVER, SIGNAL = 0.78; EXPRESSED IN LUNG, SIGNAL = 1.2; EXPRESSED IN HEART, SIGNAL = 1.3; EXPRESSED IN PLACENTA, SIGNAL = 0.83; EXPRESSED IN HBL100, SIGNAL = 0.94
gtttgctaactgcagaagggttaacactggtaacatactgtggcagacaagtttcttttttaaaaaaacttttgaggttccccccctttaaattaaccctttccggtccatatgccactaagcaggtaccaacctagagaaaaaaaaaaaactcatccactcagcaatagtggccctttcaaattaacagaggggtggggtaaggttgagggggaaggaaacagacagggggagaggaagggcctggtagaggaggggatctttcttgtcattcaagttagggcagccacgaatgtcccaaatctgttggagatgtcagaatgcagggaccgccaggtgggcacggaggctcgagccttggcgtcacccacgtcgtctgtgcagtggacagacaggcactgcaagtggctgccaggctgggatgctgaggccttgtttgcagggaggtcgtgggctgtggagagagaaggaa

SEQ ID NO: 73 - DNA, 467 bp, Homo sapiens
  MAP TO AC006333.3; EXPRESSED IN BONE MARROW, SIGNAL = 4.1; EXPRESSED IN HBL100, SIGNAL = 3.2; EXPRESSED IN FETAL LIVER, SIGNAL = 2.8; EXPRESSED IN ADULT LIVER, SIGNAL = 2.1; EXPRESSED IN BRAIN, SIGNAL = 2.7; EXPRESSED IN BT474, SIGNAL = 2.9; EXPRESSED IN LUNG, SIGNAL =   3; EXPRESSED IN PLACENTA, SIGNAL = 3.9; EXPRESSED IN HEART, SIGNAL = 3.3; EXPRESSED IN HELA, SIGNAL = 2.5
ttgtacctcggcagacaaaggttaaatgtttcagtataaagttatctagagaaaataagggaaactatacaacttgcattcacttatctagtgagaacggtagtttatttaatttcttgattttctttatggcaagtagatatttgacttttttcttttagtgcactgaaatatcttatcccagtaacatctaaaaatgcaattcggaaaagtgggctaacaccaattcactcagcagcagatggacaaaatgcacagtgtctagaactgctcattgaaaatggttttgatgtcaacactctacttgctgaccacatttcccagagctatgacgatgagaggaagactgcgctgtattttggcgtttctaataatgacgttcattgcacagaagtccttctggctgcaggtgcagacccaaacttagatcccctcaactgtctacttgttgcagtgagggccaataa

SEQ ID NO: 74 - DNA, 467 bp, Homo sapiens
  MAP TO AC006333.3; EXPRESSED IN PLACENTA, SIGNAL = 0.62; EXPRESSED IN HEART, SIGNAL =  42
tgtctagctgacgtctgatgcttaaaacagcccatgccttcacccctctctgcattgtcacagccctgtatcaccactcttaaaaggctcccacagccactcctagcaccagttgttgaccagcctgccacttgcctccctgcctgcttctggccgccttgaatgcctggtccttcaagctccttctgggtctgacaaagcagggaccatgtctacctttggctaccgaagaggactcagtaaatacgaatccatcgacgaggatgaactcctcgcctccctgtcagccgaggagctgaaggagctagagagagagttggaagacattgaacctgaccgcaaccttcccgtggggctaaggcaaaagagcctgacagagaaaacccccacagggacattcagcagagaggcactgatggcctattgggaaaaggagtcccaaaaactcttggagaaggagaggctgg

SEQ ID NO: 75 - DNA, 489 bp, Homo sapiens
  MAP TO AC006333.3; EXPRESSED IN BRAIN, SIGNAL = 0.7; EXPRESSED IN HEART, SIGNAL =  31
tgtcaattctgacaactctaagccaaagatatttaaaagtcaaatagagaacataaatttgaccaatggcagcaatgggaggaacacagagtccccagctgccattcacccttgtggaaatcctacagtgattgaggacgctttggacaagattaaaagcaatgaccctgacaccacagaagtcaatttgaacaacattgagaacatcacaacacagacccttacccgctttgctgaagccctcaaggacaacactgtggtgaagacgttcagtctggccaacacgcatgccgacgacagtgcagccatggccattgcagagatgctcaaagtcaatgagcacatcaccaacgtaaacgtcgagtccaacttcataacgggaaaggggatcctggccatcatgagagctctccagcacaacacggtgctcacggagctgcgtttccataaccagaggcacatcatgggcagccaggtggaaatggagat

SEQ ID NO: 76 - DNA, 467 bp, Homo sapiens
  MAP TO AC006343.2; EXPRESSED IN FETAL LIVER, SIGNAL = 0.85; EXPRESSED IN LUNG, SIGNAL = 0.82; EXPRESSED IN HELA, SIGNAL = 0.87; EXPRESSED IN PLACENTA, SIGNAL =  17; EXPRESSED IN BT474, SIGNAL = 0.72; EXPRESSED IN BONE MARROW, SIGNAL = 0.79; EXPRESSED IN HBL100, SIGNAL = 0.7; EXPRESSED IN ADULT LIVER, SIGNAL = 1.5; EXPRESSED IN BRAIN, SIGNAL = 0.78; EXPRESSED IN HEART, SIGNAL = 1.1
cttctttactgctttggggggttggcacccctaccccccatattgttcagggtcaattgtacacacagatatacacatacgtatatgtgtatatccacatagactaggaaccccatagacacaaacacagacagacacagacacacacactgagggaagccactgaccctcccccaggccccctgggtcttcctcaccttgcccaggtgatggcctgctcctcctgccagcctgggggcagcacctggtcggccatggagtggatctgcaggcggtacgtgcgcttgtggccccaggggttctcctgggggctggtaaagagcaggtacttaggcagcttccttttgaagcggaaggccgcctggcgctcccaggagtactgcgtctgctccagagttggctggaccacgcggtgtcttgggctccaggggttggtgatgttttctagcttcatctgcagtgtctgg

SEQ ID NO: 77 - DNA, 482 bp, Homo sapiens
  MAP TO AC006390.8; EXPRESSED IN HBL100, SIGNAL =  51; EXPRESSED IN FETAL LIVER, SIGNAL =  38; EXPRESSED IN HEART, SIGNAL =  15; EXPRESSED IN BONE MARROW, SIGNAL =  17; EXPRESSED IN ADULT LIVER, SIGNAL =   6; EXPRESSED IN PLACENTA, SIGNAL =  12; EXPRESSED IN BT474, SIGNAL =  31; EXPRESSED IN LUNG, SIGNAL =  15; EXPRESSED IN HELA, SIGNAL =  33; EXPRESSED IN BRAIN, SIGNAL =  15
tccctaaacatgaggtttttgagtatttccaaacaacttaaattgtgatagttaattttatgtgtcaacttggtggggccgtggtgctcagatatgcggtcaaacattattctggctttctgcctggggatgctgccaagaaagcatcattaaagtctctcttcccatgggcgtcatgtctaagccagtctcctaaagatcctgaacaggtgcggaagctctacatcaggggcttgagctttgaaacaactgatgagagtctgatgggccattttgagcaatggggaaggctcactctcacagactgtgtggtctgagagatccaaacaccaacagctccaggggctttgggtttgtcaccaatgccactgtggaggaggtggaggcagccatgaatgcaaggccacacaaggtgaatggaagagttgtgaaaccaaagagagctgtctcaagagaagattctcaaagagcaggtgtccact

SEQ ID NO: 78 - DNA, 487 bp, Homo sapiens
  MAP TO AC006390.8; EXPRESSED IN HBL100, SIGNAL = 0.96; EXPRESSED IN FETAL LIVER, SIGNAL = 1.1; EXPRESSED IN BRAIN, SIGNAL = 2.3; EXPRESSED IN PLACENTA, SIGNAL = 1.1; EXPRESSED IN BT474, SIGNAL = 1.9; EXPRESSED IN BONE MARROW, SIGNAL = 1.1; EXPRESSED IN LUNG, SIGNAL = 1.4; EXPRESSED IN HELA, SIGNAL = 0.9; EXPRESSED IN ADULT LIVER, SIGNAL = 1.6; EXPRESSED IN HEART, SIGNAL = 1.9
cattcttgaccctctctggggctttcaatgtgtcattgtgtcagatccctctccccttcaggttttcacggtgctcctcatgcctccgccctctgggatccctttgccgtcttccggtgtggaagctttggctgctggccggctggcctcgaaggagtccaggtgagatttagggagctccccctggatggccaggcctggcggggctggccccgtctcactcctctgaccttctatgggactctctcttctgacctcttccagttctgcagctgcctgttcctttgtcagtttaattatttccctcccaaggctgtttacttcttcctcagaaggtaactggggtaatgaaggatgaaagagcttgcattggttcccgcggctctgatttgctggggagttgacagcgggcctcccagcatcctcaggcgctgtcaacgcctcagcagcggcacaactttcatcttcttcttgcttctgagcctcc

SEQ ID NO: 79 - DNA, 495 bp, Homo sapiens
  MAP TO AC006432.15; EXPRESSED IN PLACENTA, SIGNAL = 2.2; EXPRESSED IN LUNG, SIGNAL = 3.2; EXPRESSED IN HBL100, SIGNAL = 2.2; EXPRESSED IN FETAL LIVER, SIGNAL = 2.3; EXPRESSED IN HELA, SIGNAL = 2.9; EXPRESSED IN BRAIN, SIGNAL = 3.7; EXPRESSED IN BT474, SIGNAL = 2.3; EXPRESSED IN BONE MARROW, SIGNAL = 3.2; EXPRESSED IN ADULT LIVER, SIGNAL = 2.3; EXPRESSED IN HEART, SIGNAL = 3.1
ttagggacccctccagactcaccctatgtatctcttcaactggctgtttatttgtatcatgtaaaataccctttgtaataaaccagtaaacataagtgtttccctgagttgtgtgagcactctagcaaattaatcaaacacaaagaagaggtcataggaaccccaacttgaagctggtgggtcagatgttctagagacctggacttgctatcttgggaaggaggggacagtcttgggagactgagcctacaacctgtgggatctgatgctatctccaggtaggcggtgtcacaattgaactggaggacacctagctggtgtcccctccagaactgcttgcttgcttggtgtgtggggagaaattcccctgtatgtggtcatagaagtcttccatgttgatggttgctgtggtgtgagagcagaagaaaaacacattggaggtggtttttccacacacaggcacttactatgaatggagcttgcaggactggaagt

SEQ ID NO: 80 - DNA, 467 bp, Homo sapiens
  MAP TO AC006432.15; EXPRESSED IN BRAIN, SIGNAL = 1.9; EXPRESSED IN BT474, SIGNAL = 1.9; EXPRESSED IN BONE MARROW, SIGNAL = 2.1; EXPRESSED IN HELA, SIGNAL = 1.9; EXPRESSED IN ADULT LIVER, SIGNAL = 1.8; EXPRESSED IN HEART, SIGNAL = 1.8; EXPRESSED IN PLACENTA, SIGNAL = 1.7; EXPRESSED IN HBL100, SIGNAL = 2.3; EXPRESSED IN FETAL LIVER, SIGNAL = 1.5; EXPRESSED IN LUNG, SIGNAL = 1.6
acagctgttctgggctgaagtctgggtgttttctgtccctgctgggtggtgctggatatgactcgtggaaggagctgcctgtggggcattcccttgaacttctggagctgtgggtgacttgggaatccctgggtccctcgatagatgcctgacatgggacattgctgtcctgcctcggctttgtgcattgggagccactccctttccctcagcctctcaggccctggcgtgccttgatgttagagaatgctgtgggatgttttggttccctctttgaagtgcctttctttctctctgctagatttatcactgtagtcggacacactcccagctggcccagtttgtgcatgaggtgaagaagagcccctttggcaaggatgttcggctggtctccctcggctcccggcaggtaaacagtagccagtatttccaccaggggccatcctgctcctttccccacaactttg

SEQ ID NO: 81 - DNA, 469 bp, Homo sapiens
  MAP TO AC006440.3; EXPRESSED IN BONE MARROW, SIGNAL = 0.67; EXPRESSED IN LUNG, SIGNAL =   1; EXPRESSED IN ADULT LIVER, SIGNAL =   1; EXPRESSED IN BRAIN, SIGNAL = 0.69; EXPRESSED IN PLACENTA, SIGNAL = 0.82; EXPRESSED IN HBL100, SIGNAL = 2.5; EXPRESSED IN FETAL LIVER, SIGNAL = 0.79; EXPRESSED IN HELA, SIGNAL = 0.69; EXPRESSED IN HEART, SIGNAL = 1.5
ttggggaggaagtgactagcattcgagataatttttttcaatgttcagacatttgtgtcaacagattgaagaaggatttactgaatatgcccaactattttgaatattaggaggtttgcataaccaccaccccaacaaatgagagtatttcgagggtgaggtaataatgatgtaaaaataaaaattttcaacttggacaaattagagaaaaattaagctgtacatgagttgtcatgacgacaaggatgttctgttgatgaactgtcctcctcattgtccaatcagatagtagagctgaagctggagcatgaacaggagaagacgcacctattacagcagcataacgcagagaaggatagcctagtccgagaccatgaacgggaaattgaaaacctggaaaaacagcttcgcgctgccaatatggagcacgaaaatcaaattcaggagttcaagaaacgagatgcacagg

SEQ ID NO: 82 - DNA, 480 bp, Homo sapiens
  MAP TO AC006440.3; EXPRESSED IN PLACENTA, SIGNAL = 5.6; EXPRESSED IN LUNG, SIGNAL = 6.4; EXPRESSED IN HEART, SIGNAL = 4.7; EXPRESSED IN HBL100, SIGNAL = 5.7; EXPRESSED IN BT474, SIGNAL = 4.5; EXPRESSED IN BONE MARROW, SIGNAL = 7.1; EXPRESSED IN FETAL LIVER, SIGNAL = 6.5; EXPRESSED IN HELA, SIGNAL = 5.2; EXPRESSED IN ADULT LIVER, SIGNAL =   6; EXPRESSED IN BRAIN, SIGNAL = 6.5
aaggagtgtagagggctgggggcattttcttgagaaccatagtgatggaaaaccagtgggattccagaagggaccttgaagctctgcaaactcagctagaccatatgactgaggcccacactcatataccacccagtcatctccagggggcgctatgcaagtaagatgccagcatctcccaccagtttccactttagccagtagcatcagagaccctcgcatgcgtgtgcagcctcccccactactagaaccacaatgatactctacatgaagggtccctccactgatttatcagggtcaagaacaagattaaatatgattgtcaggcaaaagaagattttcacaagtggatagaagaggtgactagcataagcactgaaccagctttcaactgggcttaaaaaatgacttaatcctcttcaaacttaaccagattcaatgaagaaagtcaatgagccttccttgaactgccgtgtcttc

SEQ ID NO: 83 - DNA, 484 bp, Homo sapiens
  MAP TO AC006482.2; EXPRESSED IN FETAL LIVER, SIGNAL = 8.7; EXPRESSED IN LUNG, SIGNAL = 8.3; EXPRESSED IN PLACENTA, SIGNAL =  13; EXPRESSED IN HEART, SIGNAL = 6.4; EXPRESSED IN BRAIN, SIGNAL =  11; EXPRESSED IN ADULT LIVER, SIGNAL = 6.1; EXPRESSED IN HELA, SIGNAL = 7.5; EXPRESSED IN HBL100, SIGNAL = 8.9; EXPRESSED IN BONE MARROW, SIGNAL =  12; EXPRESSED IN BT474, SIGNAL = 9.5
gcagcatgaaaatggactaatacagtaaattggtaccagtagagcaggcactgctgaaaagatacccaaaaacgtggaagcaactttggaactgggtaacaggcagaggttagaacagtttggagggctcagaagaagacaggaaaatgtgagaaaatttggaactccctagagacttgttgaatggctttggtcaaaatgctgataatgatatgaacaatgacatccaggctgaggtggtctgtgatggagatgaggaacctgttgggaactggagcaaaggtgattcttgttatgtttcagcaaagagaccggtggcattttgcacctgacctacagatttgtggaactttgaacttgagatagatgatttagagcatctggcagaagaaatttctaagcagcaaagcattcaagaggtaacttgggtactgttaaaggcattcagttttaaaaggaaagcagagcataaaattttggaaaa

SEQ ID NO: 84 - DNA, 421 bp, Homo sapiens
  MAP TO AC006482.2; EXPRESSED IN HEART, SIGNAL = 0.96; EXPRESSED IN PLACENTA, SIGNAL = 1.1; EXPRESSED IN BT474, SIGNAL = 0.72; EXPRESSED IN BONE MARROW, SIGNAL = 0.99; EXPRESSED IN LUNG, SIGNAL = 0.78; EXPRESSED IN HELA, SIGNAL = 0.82; EXPRESSED IN ADULT LIVER, SIGNAL = 0.78; EXPRESSED IN BRAIN, SIGNAL = 1.6; EXPRESSED IN HBL100, SIGNAL = 0.8; EXPRESSED IN FETAL LIVER, SIGNAL = 0.91
caacctttacattctagcctgcttatttccttactcacatgctaatgttttcttaaataggagagaaagtgttggggctatagctactttctaaagaattgtgtttaaccaaccattattacacccctgagtgtgtgtcacaaacgtgaacttcaatttacatgtgtgttgtggccaaaaacaggttgaaaactacttatctaaaccacaatcccatttatcacttctatatcatagcaagtagctccatgtctgttctcactagccagacagtaagcatcccaagaacaagaaccatatttccccgtttccttgtattgatcacagttgaatctgatactactagaaggaatcattattggcagaggtagggaatctgtttattcctcttaagggccactgacccatggaggaggaaaat

SEQ ID NO: 85 - DNA, 370 bp, Homo sapiens
  MAP TO AC006483.2; EXPRESSED IN PLACENTA, SIGNAL = 0.69; EXPRESSED IN HBL100, SIGNAL = 1.1; EXPRESSED IN FETAL LIVER, SIGNAL = 0.76; EXPRESSED IN LUNG, SIGNAL = 0.8; EXPRESSED IN HELA, SIGNAL = 0.99; EXPRESSED IN BRAIN, SIGNAL = 1.6; EXPRESSED IN BT474, SIGNAL =   2; EXPRESSED IN ADULT LIVER, SIGNAL = 0.86; EXPRESSED IN HEART, SIGNAL = 1.1
cctaggttccctcccagaaccatgtccacatacatctgcaccctcctccccaggcagcacaccacccatgcttttctgccccttgcttctgtccctcaatgcatcctgcagacggcgccagtcaggacttggagttcctgccacctttatatcagcacacagggttccactgcagggctgtgcccagtcctcaaagactgagatctagcttgtttctcatctcctgcccccacgcctgctcacctgatagtccttttgcagcaacacggtgtggatgaggctcttgtcaaggcacagggctgcaagcttccgacaggtacgccggacgttcagaatcagatctgtgctggggacgtgactcaggatgtga

SEQ ID NO: 86 - DNA, 452 bp, Homo sapiens
  MAP TO AC006483.2; EXPRESSED IN BRAIN, SIGNAL =  18; EXPRESSED IN HEART, SIGNAL =  48; EXPRESSED IN BONE MARROW, SIGNAL =  81; EXPRESSED IN ADULT LIVER, SIGNAL =  28; EXPRESSED IN PLACENTA, SIGNAL =  24; EXPRESSED IN BT474, SIGNAL =  85; EXPRESSED IN HBL100, SIGNAL =  78; EXPRESSED IN FETAL LIVER, SIGNAL =  37; EXPRESSED IN LUNG, SIGNAL =  45; EXPRESSED IN HELA, SIGNAL =  40
actggctcgtgtgacaaggccatgaggctggtgtaaagcggccttggagtgtgtattaagtaggtgcacagtaggtctgaacagactccccatcccaagaccccagcacacttagccgtgttctttgcactttctgcatgtcccccgtctggcctggctgtccccagtggcttccccagtgtgacatggtgtatctctgccttacagatcatgtttgagaccttcaacaccccagccatgtacgttgctatccaggctgtgctatccctgtacgcctctggccgtaccactggcatcgtgatggactccggtgacggggtcacccacactgtgcccatctacgaggggtatgccctcccccatgccatcctgcgtctggacctggctggccgggacctgactgactacctcatgaagatcctcaccgagcgcggctacagcttcaccaccac

SEQ ID NO: 87 - DNA, 478 bp, Homo sapiens
  MAP TO AC006512.12; EXPRESSED IN LUNG, SIGNAL = 5.5; EXPRESSED IN BRAIN, SIGNAL = 2.2; EXPRESSED IN PLACENTA, SIGNAL = 6.6; EXPRESSED IN BONE MARROW, SIGNAL = 3.8; EXPRESSED IN HBL100, SIGNAL = 6.6; EXPRESSED IN FETAL LIVER, SIGNAL =  11; EXPRESSED IN HELA, SIGNAL = 3.5; EXPRESSED IN ADULT LIVER, SIGNAL = 6.9; EXPRESSED IN BT474, SIGNAL = 5.9; EXPRESSED IN HEART, SIGNAL =   2
ccattgctttgtgaatataaggcaatatgaatagtaggctcaggaagaagatgtggccaaggaaatagatggatttatacacctgtggagagagaggccactaaggtagacaggcctggagtgtcctttgcaacctttgaggttgcagtgagtccctcccagtctcacaagcaggccttcacttgccttaagccatttgtcccacgtgaagaggcagaaggcagtcatggagtaacccatgaagagccagtggatggtctgttgcaccaaatagtagaagggctggaggacagtaatggcggccagcttgctcagggtggggctctcttgaatgagcctggcagcctggggagggaggaggagctcatcagcatcttgtcccttatattccccttcacccccaccctggaggcctacctgtctttccacaataacaatgaggaattccatctggaagcagaccaggtatcctgagtgc

SEQ ID NO: 88 - DNA, 486 bp, Homo sapiens
  MAP TO AC006552.7; EXPRESSED IN HELA, SIGNAL =  11; EXPRESSED IN HEART, SIGNAL = 5.1; EXPRESSED IN FETAL LIVER, SIGNAL = 9.6; EXPRESSED IN LUNG, SIGNAL = 9.4; EXPRESSED IN ADULT LIVER, SIGNAL = 8.6; EXPRESSED IN BRAIN, SIGNAL = 4.5; EXPRESSED IN PLACENTA, SIGNAL = 8.1; EXPRESSED IN BT474, SIGNAL =  12; EXPRESSED IN BONE MARROW, SIGNAL =  14; EXPRESSED IN HBL100, SIGNAL =  31
ggacgtggagaacttttgtgtctagctcagggattgtacacgcaccaatcagcaccctgtcaaaacggaccaatcagctctctgtaaaatggaccaattggctctctgtaaaatggaccaatcagcaggatgtgggtgaggccagataagagaataaaagcagggtgcctcaggtagaagtggcaatctgctcggtcgtcttccacgctgtggatgctttgttctttcactctttgcaataaatgttgctgctgctcactctttgggtccacactgcctttgtgagctgtaacactcacctcgaaggtctgcagtttcacttctgaagctagtgagaccacgaacccaccaggaggaacgaacaactccagacgcaccgccttaagagctgtaacactcaccgcgaaggtctgcagcttcactcctgagccagcaagaccacaaacccaccagaaggaagaaactccgaacacatccgaacatcag

SEQ ID NO: 89 - DNA, 427 bp, Homo sapiens
  MAP TO AC006581.16; EXPRESSED IN HEART, SIGNAL =  13; EXPRESSED IN PLACENTA, SIGNAL =  41; EXPRESSED IN BRAIN, SIGNAL =  23; EXPRESSED IN HELA, SIGNAL =  25; EXPRESSED IN FETAL LIVER, SIGNAL =  28; EXPRESSED IN HBL100, SIGNAL =  46; EXPRESSED IN BONE MARROW, SIGNAL =  17; EXPRESSED IN BT474, SIGNAL =  71; EXPRESSED IN ADULT LIVER, SIGNAL =  15; EXPRESSED IN LUNG, SIGNAL =  29
ttctgggattgttcctatagccacctacacacagatccagccccattcactgattcagcaacagcaacagatccacctccagcagaaacaggtggtgatccagcagcagattgccatccaccaccagcagcagttccagcaccggcagtcccagctccttcacacagctacacacctccagttggcgcagcagcagcagcagcaacaacagcaacagcagcaacagcagcagccgcaagccaccaccctcactgcccctcagccaccacaggtcccacctactcagcaggtcccaccttcccagtcccagcagcaagcccaaaccctggtcgttcagcccatgcttcagtcttcacccttgtctcttccacctgatgcagcccctaagccaccaattcccatccaatccaaaccacctgtagcacct

SEQ ID NO: 90 - DNA, 465 bp, Homo sapiens
  MAP TO AC006581.16; EXPRESSED IN FETAL LIVER, SIGNAL = 0.88; EXPRESSED IN LUNG, SIGNAL = 2.6; EXPRESSED IN PLACENTA, SIGNAL = 1.8; EXPRESSED IN BONE MARROW, SIGNAL = 1.3; EXPRESSED IN HBL100, SIGNAL = 1.9; EXPRESSED IN ADULT LIVER, SIGNAL = 0.85; EXPRESSED IN BRAIN, SIGNAL = 2.1; EXPRESSED IN HEART, SIGNAL = 2.6; EXPRESSED IN BT474, SIGNAL = 1.5; EXPRESSED IN HELA, SIGNAL = 0.66
agaaagcccaaaagtcatggacgagaagagcagtcttggaggtgagtaactgacttctaatgctgttggagagcacacagagtagaggaatgttctgagtgagctaaaagataaaactggttgagtagaaaatgggccagaagttggtggacaaatgaatagatccaaaaacagggaatccaggtgaattgtcaagggtggacatagattattatggaagatcatgctggctcaactaatagatggatcaatatgtcatctcatgtctgttgcttaatctgtgtttgttttccagaaaaagctgaatcagtggctaatgtgaatgctaatactccaagcagtgaactagtagccttgacccccgccccttcagtaccgcctcctacactagccatggtgtctagacaaatgggtgactcaaaacccccacaggccatcgtgaagccccagattctcacccacatc

SEQ ID NO: 91 - DNA, 487 bp, Homo sapiens
  MAP TO AC006581.16; EXPRESSED IN PLACENTA, SIGNAL = 1.6; EXPRESSED IN BT474, SIGNAL = 1.6; EXPRESSED IN HBL100, SIGNAL = 2.9; EXPRESSED IN LUNG, SIGNAL = 2.3; EXPRESSED IN HELA, SIGNAL = 1.2; EXPRESSED IN ADULT LIVER, SIGNAL = 1.2; EXPRESSED IN HEART, SIGNAL = 1.6; EXPRESSED IN BONE MARROW, SIGNAL = 2.4; EXPRESSED IN FETAL LIVER, SIGNAL = 1.3; EXPRESSED IN BRAIN, SIGNAL =   3
aacaggccaggctgctatccatctcaaagaggtagaaacaatcttggactttgccacgctcctcagacacagggttaaaattgtcctgatgatgagatggcataacacattcaggtggttaagtgttttgactcctgtccaacaaaataaaaaacccaaaaaacatctgctccttcctggttcagcagcctattttccatggaagatgcgtgtctgacacagagagaaactgagctcctagttttctaatgtccatcccaacgtatcgtgtcccctctggatattctccccaacctcaggtcagtcctttcagtctcctccctcggcttatacaacacagggtgcctcaccgctagggtgtgtcgattgcaggagatcatcaccactgcacgacgctgctccttgccacagtggttgtcatattcatcaccccctttatagatcagcatgatccaattacctgaggagggacaaggaaaatggagct

SEQ ID NO: 92 - DNA, 452 bp, Homo sapiens
  MAP TO AC007033.3; EXPRESSED IN PLACENTA, SIGNAL = 1.8; EXPRESSED IN BT474, SIGNAL = 2.3; EXPRESSED IN HEART, SIGNAL = 3.5; EXPRESSED IN ADULT LIVER, SIGNAL = 2.9; EXPRESSED IN HELA, SIGNAL = 2.1; EXPRESSED IN LUNG, SIGNAL = 1.6; EXPRESSED IN FETAL LIVER, SIGNAL = 3.2; EXPRESSED IN BONE MARROW, SIGNAL = 1.5; EXPRESSED IN BRAIN, SIGNAL = 2.5; EXPRESSED IN HBL100, SIGNAL = 3.8
cagtgcactaatgacacagcatcattgtcaagagctcagcaccctcaccacctccagcaccaaagcacttttagctcccagtggcatgttctaggtattgcacaggacaattcagaagcataatccaagtccttcaggaagtccaaatttaaaaagctcaagcgctggcaaaaattttaatttaaaattattactctagcagtgcgaggacaaaactaggtggttggtctaatttgtattttttcaagtcagttgctatggttttaaaaattcatgtagaagaatctctctgttaaacacacagagagagagacagaagaagaagaaggaggaggaggaggagaaggaggagaaagaggaggagcagcaaaatcatttacatggttattcagttcagtgtaactgacttgggtgagcaatgaatagaccacaccgctgagtcttcaaggttg

SEQ ID NO: 93 - DNA, 451 bp, Homo sapiens
  MAP TO AC007041.3; EXPRESSED IN BT474, SIGNAL = 6.8; EXPRESSED IN BONE MARROW, SIGNAL = 9.6; EXPRESSED IN HBL100, SIGNAL = 7.1; EXPRESSED IN HELA, SIGNAL =  10; EXPRESSED IN ADULT LIVER, SIGNAL = 7.8; EXPRESSED IN PLACENTA, SIGNAL = 8.2; EXPRESSED IN FETAL LIVER, SIGNAL = 8.3; EXPRESSED IN LUNG, SIGNAL = 8.4; EXPRESSED IN BRAIN, SIGNAL =  11; EXPRESSED IN HEART, SIGNAL = 8.1
acattgctcaggctggtctcaaactcctgggctcaagtgatcttgtcacctcagcctcccaatctgctggaattatgggcaaaagcccccatgcctggccatgataaccttaagcataaaaatggaaaccataccaatatatctgccaaaggatatccatcgattttaatttttcctccagttataacatacgggaggaaatgaaagcccaaggaggttaaatgtgtagcctaaacacaaagacaaacagttatctgagtgttacatgctgtattaccttgtgcatgattatctttctctgagcaggttcagccatatcaatcatcttttgaaccacgtaattggcatactggtccttcatcatggtgtataaggcactgtgaggaccatcattctggcagcaaacctcgtcaatcagtaaagctctctcagcacgggaggcatgagtaac

SEQ ID NO: 94 - DNA, 482 bp, Homo sapiens
  MAP TO AC007041.3; EXPRESSED IN BT474, SIGNAL = 4.3; EXPRESSED IN BONE MARROW, SIGNAL = 2.5; EXPRESSED IN HEART, SIGNAL = 1.5; EXPRESSED IN LUNG, SIGNAL = 3.2; EXPRESSED IN PLACENTA, SIGNAL = 2.4; EXPRESSED IN HBL100, SIGNAL = 2.4; EXPRESSED IN FETAL LIVER, SIGNAL = 2.3; EXPRESSED IN HELA, SIGNAL = 1.4; EXPRESSED IN ADULT LIVER, SIGNAL = 2.1; EXPRESSED IN BRAIN, SIGNAL = 3.5
tgcattagtcctctgaaagagctattagggaaaatatttaacacaaagattagtgtcaaaatctttcatttctaattagaaatctgaataaaacattttaaacattttttctttgggaggactttctcaaatacaggacactttaatcaataaaacatttagtactcaaaaacccctaccattcttttcaatgccacatagcacttcaggctaaaccagtatacagttaagaggaccttcttaaagaaagaacatgcttttacctgctgctgggaattgtagtcaaaaaggcctacagtagctcctgaagagtccattggtacctgattaccaggatagtcaaactgtaaggattccagaccaacttgttccatggcatccagattctgagtttcaggatttgaaaattcttcaacaagtggtttattagctgtaggattaggaagaggccccagtccttctgagggattagtattggggcc

SEQ ID NO: 95 - DNA, 462 bp, Homo sapiens
  MAP TO AC007051.3; EXPRESSED IN LUNG, SIGNAL = 1.4; EXPRESSED IN HELA, SIGNAL = 1.6; EXPRESSED IN BRAIN, SIGNAL = 1.7; EXPRESSED IN PLACENTA, SIGNAL = 0.9; EXPRESSED IN HBL100, SIGNAL = 1.9; EXPRESSED IN ADULT LIVER, SIGNAL = 0.82; EXPRESSED IN HEART, SIGNAL =   1; EXPRESSED IN BT474, SIGNAL = 1.5; EXPRESSED IN BONE MARROW, SIGNAL = 1.2; EXPRESSED IN FETAL LIVER, SIGNAL = 2.2
aaaagaaggcatgcaaaatgaaataatgtatttgcttcctcttctctagtttactcaagatgccagcctaaaaaataagctcaaactacaagctttaatttatccagttcttcaagctttagattttaacacaccatcttatcagcaaaatgtgaacaccccaatcctgccccgctatgtcatggtgaagtattgggtggactacttcaaaggcaactatgactttgtgcaggcaatgatcgttaacaatcacacttcacttgatgtggaagaggctgctgctgtcagggcccgtctaaactggacatccctcttgcctgcatccttcacaaagaactacaagcctgttgtacagaccacaggcaatgccaggattgtccaggagcttcctcagttgctggatgcccgctccgccccactcattgcagaccaggcagtgctgcagctcctcccaaagaccta

SEQ ID NO: 96 - DNA, 466 bp, Homo sapiens
  MAP TO AC007051.3; EXPRESSED IN HBL100, SIGNAL = 2.7; EXPRESSED IN BT474, SIGNAL = 2.6; EXPRESSED IN BONE MARROW, SIGNAL = 1.8; EXPRESSED IN FETAL LIVER, SIGNAL =  33; EXPRESSED IN LUNG, SIGNAL = 2.1; EXPRESSED IN HELA, SIGNAL = 2.5; EXPRESSED IN ADULT LIVER, SIGNAL = 5.8; EXPRESSED IN BRAIN, SIGNAL = 2.3; EXPRESSED IN PLACENTA, SIGNAL = 1.4; EXPRESSED IN HEART, SIGNAL = 1.6
gcctatgaccttctactttggctttaagaatgtggaactactgttttccagtttggtgatcaatacagctggagaaatggctggagcttttgtggcagtgattatactagcagtgttctatgaaggactcgatagcccaagagagcctgctgtgtaagtcacaagtcagcttttgctacaattccatgcctgtcccaggaccaaatggaaccatccttatgtagacacacaaaactgttgggcagcagatgctgagctttcctcacctcctgcaaacagtgctgcacatcatccaggtggtcataagctacctcctcatgctcatcttcatgacctacaatgggtacctctgcattgcagtaacagcaggggccggtacaagatacttcctcttcagctggaagaaggcagtggtagtggacatcacagagtattgccattgacgtcaaactctatggcatggcct

SEQ ID NO: 97 - DNA, 467 bp, Homo sapiens
  MAP TO AC007051.3; EXPRESSED IN PLACENTA, SIGNAL = 1.8; EXPRESSED IN BT474, SIGNAL = 0.9; EXPRESSED IN FETAL LIVER, SIGNAL = 1.1; EXPRESSED IN LUNG, SIGNAL = 3.4; EXPRESSED IN ADULT LIVER, SIGNAL = 1.1; EXPRESSED IN BONE MARROW, SIGNAL =   1; EXPRESSED IN HBL100, SIGNAL = 0.97; EXPRESSED IN HEART, SIGNAL = 1.1
aggtgagtgcagataaggggtgcatggatcctgagggcaaggagaggagcttctttcagtttccctcctttccaacgactactttgagacaagagctgtccctgggcagtaggaaaggggagggacagttgcaggttcaatagatgtgggtggggccaaggccacagaacccagaaaaacaactcattcgctttcatttcctcactgactataaaagaatagagaaggaagggcttcagtgaccggctgcctggctgacttacagcagtcagactctgacaggatcatggctatgatggaggtccaggggggacccagcctgggacagacctgcgtgctgatcgtgatcttcacagtgctcctgcagtctctctgtgtggctgtaacttacgtgtactttaccaacgagctgaagcaggtcagtgcagtgcagtgcactcagtcttcgaggcgcttagcaaatgtct

SEQ ID NO: 98 - DNA, 466 bp, Homo sapiens
  MAP TO AC007092.3; EXPRESSED IN HBL100, SIGNAL = 0.9; EXPRESSED IN HEART, SIGNAL = 0.78
tgccatgattgtaagtttcctgaggcctccccacccatgtggaatagtcagtcaattaaacctcttttctttataaattacccagtctcaggtagttcttcataacagtgtgaaagtgaacaaatacaaaaaattggtaccaggagagtggggtgcttctataaagatatctgaaaatgtggatatctttggatatccagcaactttggaactgggtaatgggcagtggttggcacagtttggagagctcagaagaagacaggaagatgtggcaaactttggaacttcctagagacttgttgagtggttttgaccaaaatgctgatagtgatatggacaatgaagtccaggctgaggtggtcccagatggagatgaggaacttactgggaactggaataaaggtctctcttgctaggcttcagatgagagactggcaatattttgcccctgccctagagatgtgtg

SEQ ID NO: 99 - DNA, 398 bp, Homo sapiens
  MAP TO AC007132.2; EXPRESSED IN BONE MARROW, SIGNAL = 2.9; EXPRESSED IN HBL100, SIGNAL = 2.4; EXPRESSED IN ADULT LIVER, SIGNAL = 3.4; EXPRESSED IN BRAIN, SIGNAL = 3.2; EXPRESSED IN PLACENTA, SIGNAL = 5.5; EXPRESSED IN BT474, SIGNAL = 1.9; EXPRESSED IN LUNG, SIGNAL =   2; EXPRESSED IN HELA, SIGNAL = 2.5; EXPRESSED IN HEART, SIGNAL = 2.3; EXPRESSED IN FETAL LIVER, SIGNAL = 2.2
ttcacatgtacccccaaacctaaaataaaagttaaaaaaataaaacacaaaatgattgtatattgatatggtttggctgtgtcctcaccaaaatctcaacttgaattgtatctcccagaattcccatgtgttgtgggagggacccgggggaggtagcttaatcatgggggctggtctttcctgtgttcttctcatgatagtgaataagtctcacgaataagtctcacgagatctgatgggtttatctggggtttctgtttttgcttcttcctcattttctcttgccacagccatgaaagaagagcctttgcctcccgccatgattctgaagcctccccggccatgtggaactgcaagtccaattaaacctttttttgttcccagtttgggtatgtgtt

SEQ ID NO: 100 - DNA, 452 bp, Homo sapiens; identical to SEQ ID NO: 14
  MAP TO AC007182.3; EXPRESSED IN BONE MARROW, SIGNAL = 4.3; EXPRESSED IN ADULT LIVER, SIGNAL = 4.9; EXPRESSED IN PLACENTA, SIGNAL = 3.2; EXPRESSED IN BT474, SIGNAL = 3.1; EXPRESSED IN LUNG, SIGNAL = 4.6; EXPRESSED IN HELA, SIGNAL = 5.7; EXPRESSED IN BRAIN, SIGNAL = 4.4; EXPRESSED IN HEART, SIGNAL = 3.9; EXPRESSED IN HBL100, SIGNAL = 4.1; EXPRESSED IN FETAL LIVER, SIGNAL = 3.8

SEQ ID NO: 101 - DNA, 475 bp, Homo sapiens; identical to SEQ ID NO: 12
  MAP TO AC007182.3; EXPRESSED IN PLACENTA, SIGNAL = 1.3; EXPRESSED IN HBL100, SIGNAL = 5.3; EXPRESSED IN LUNG, SIGNAL = 1.7; EXPRESSED IN HEART, SIGNAL = 1.3; EXPRESSED IN BT474, SIGNAL =   4; EXPRESSED IN BONE MARROW, SIGNAL = 2.1; EXPRESSED IN FETAL LIVER, SIGNAL = 6.9; EXPRESSED IN HELA, SIGNAL = 3.6; EXPRESSED IN ADULT LIVER, SIGNAL = 2.9; EXPRESSED IN BRAIN, SIGNAL = 2.5

SEQ ID NO: 102 - DNA, 459 bp, Homo sapiens
  MAP TO AC007281.3; EXPRESSED IN FETAL LIVER, SIGNAL = 0.64; EXPRESSED IN HELA, SIGNAL = 0.68; EXPRESSED IN ADULT LIVER, SIGNAL = 0.69; EXPRESSED IN HEART, SIGNAL = 6.1; EXPRESSED IN LUNG, SIGNAL = 0.83; EXPRESSED IN BRAIN, SIGNAL = 1.3; EXPRESSED IN PLACENTA, SIGNAL = 0.68
tgtttatgtggtgcctgacggagagacaaggaagattaagcatttgcgtgtcttctttgtgacagcagcctggagcatctttgcctacacctggctttacattattttgtctgtcatatctcctggtgttgtggaggtctgggaaggtttgcttactttcttcttctttcccatctgtgttgtgttcgcttgggtagcggataggagacttctgttttacaagtatgtctacaagaggtatcgagctggcaagcagagggggatgattattgaacatgaaggagacaggccatcttctaagactgaaattgaaatggacgggaaagtggtcaattctcatgttgaaaatttcttagatggtgctctggttctggaggtggatgagagggaccaagatgatgaagaagctaggcgagaaatggctaggattctgaaggaacttaagcagaagcatccaga

SEQ ID NO: 103 - DNA, 467 bp, Homo sapiens
  MAP TO AC007281.3; EXPRESSED IN PLACENTA, SIGNAL = 1.3; EXPRESSED IN FETAL LIVER, SIGNAL = 1.2; EXPRESSED IN LUNG, SIGNAL = 1.1; EXPRESSED IN HELA, SIGNAL = 1.1; EXPRESSED IN BT474, SIGNAL = 1.3; EXPRESSED IN BONE MARROW, SIGNAL = 0.83; EXPRESSED IN HBL100, SIGNAL = 1.2; EXPRESSED IN ADULT LIVER, SIGNAL = 0.91; EXPRESSED IN BRAIN, SIGNAL = 1.9; EXPRESSED IN HEART, SIGNAL = 1.7
ttgattttatttttgcttttctatgcttacatatgagatatctggggtcctaggtattctgaagccttgtggtgacccttgaaaccaaggccacaccatttttccatgacaaatttcctgagataaagatgggcttaggaggatcgctaaacttggaaatttgagctctctgtcccctaccagctttgtgcctttcagccagttactgaggttctgagtcaactttctcacctgtaaaatgaggaagatggtcatggtgctgttggtgatggtgattttggatatattggtaatggtggtagtgatggttgtggttggaatggtggtggttctagatatgttggaggtggtagtgatggtgatgctgatggtgttggtggtgatagtgttggagatgatggcggtagtggtgattatttttggtgttggtggtggtggtggtgatgatggtgatggcactaagattt

SEQ ID NO: 104 - DNA, 473 bp, Homo sapiens
  MAP TO AC007372.4; EXPRESSED IN BONE MARROW, SIGNAL = 1.7; EXPRESSED IN HBL100, SIGNAL = 0.79; EXPRESSED IN FETAL LIVER, SIGNAL = 0.83; EXPRESSED IN ADULT LIVER, SIGNAL = 0.73; EXPRESSED IN BRAIN, SIGNAL = 2.3; EXPRESSED IN BT474, SIGNAL = 0.86; EXPRESSED IN LUNG, SIGNAL = 0.81; EXPRESSED IN HELA, SIGNAL = 1.4; EXPRESSED IN PLACENTA, SIGNAL = 1.8; EXPRESSED IN HEART, SIGNAL = 1.7
tgatatggttacttactcagcccaatgccatttgagtagtgaaagaagtatggagctgttagagattcatgttcttccgatagataaactcctgtctttcagtaagccaatagggctctgttgaaatatggattcagttcttaatttccttgcctttatataactttttaaaacaataagctctcttataatcatacctttaaccagctaatctagttttctttcatctcttgctgaaattcttctccagccaatgccggacttcttgaaggttgtaggagaaggggccctttcctcccagataagcaattttctgtctctgcacaatgcacacacgttcaaaggctaccccgtaagctatgttggcgttattgtccatgcggtcagccacaactcggcactggggcggcaaggagaaacgctccagaagctgctgggctgctgcacatcgatcttcctggttctggtgcttc

SEQ ID NO: 105 - DNA, 475 bp, Homo sapiens
  MAP TO AC007381.2; EXPRESSED IN PLACENTA, SIGNAL = 4.9; EXPRESSED IN BONE MARROW, SIGNAL = 9.9; EXPRESSED IN LUNG, SIGNAL = 8.9; EXPRESSED IN HELA, SIGNAL = 9.7; EXPRESSED IN BRAIN, SIGNAL = 3.9; EXPRESSED IN HEART, SIGNAL =  10; EXPRESSED IN BT474, SIGNAL = 7.7; EXPRESSED IN HBL100, SIGNAL = 9.3; EXPRESSED IN FETAL LIVER, SIGNAL = 6.2; EXPRESSED IN ADULT LIVER, SIGNAL = 5.8
ggtaatggttctttggccttgtatagcttttaaaatccttcagctgaagcatctcagctccaatcgccagcaaagcctgagcacccttgagaccctggtgcagataatcatcatccactcagtgacaagaagctgagcgccgcttcggtaccaaggagaccgaatgtggcagggcaccaaggtgccatcttagatgcatccaggcagcagcagcacacagggaggtgtatgtgtttgcaagttgttgggttttttttcctccttctccttcttcttcttcatcttctccctctgttctctcaccctgctcagagaatcctctttcttgagagggatgccgttaactcagctgctcttagcatgcttccttttccctgtgcctgccgggccaaattcagccctgcagtcaatactgttggaaaagaaaatgacattaatttgtgtaaaagtgtaatccaaaggtgggtgagtgatt

SEQ ID NO: 106 - DNA, 494 bp, Homo sapiens
  MAP TO AC007393.3; EXPRESSED IN BONE MARROW, SIGNAL = 1.3; EXPRESSED IN BRAIN, SIGNAL = 1.2; EXPRESSED IN HEART, SIGNAL = 0.99; EXPRESSED IN PLACENTA, SIGNAL = 1.1; EXPRESSED IN BT474, SIGNAL = 2.2; EXPRESSED IN HBL100, SIGNAL = 1.5; EXPRESSED IN LUNG, SIGNAL = 1.1; EXPRESSED IN HELA, SIGNAL = 1.6; EXPRESSED IN ADULT LIVER, SIGNAL = 1.1; EXPRESSED IN FETAL LIVER, SIGNAL =   1
ggtgtgtgtgtgtgtgtgtgtgtgtgtgtgtgtgtatggtaatcacctgacaggttcttcttgtccactgcacagatagagccaatttactgagagctgagacagtggtattgcaatagagaaagaagtcaataattgcagggccagccaagcagaaagaagggagtttttactcaaatcagcctgcctgaaaatttagaggctaggatttttcaaggatagtttggtgggcagggggctagaaaatgggaaatgctgctttattgggtcagggatgaaatcacagggggtcaaatctgtctccttttgctgagtcagttcctacctggtagtcacaagaccagatgaggccagtttcttggtatgggttaccagtccagatggcgccagctggtccatcagaatgcagggtctgggaagtacctcaaacaccaatcttagggttcacaatagtagtgttatctataggagaaattaaggttacaaatcttgtg

SEQ ID NO: 107 - DNA, 445 bp, Homo sapiens
  MAP TO AC007401.2; EXPRESSED IN PLACENTA, SIGNAL = 2.1; EXPRESSED IN BT474, SIGNAL = 1.9; EXPRESSED IN HBL100, SIGNAL = 3.6; EXPRESSED IN HELA, SIGNAL = 4.4; EXPRESSED IN ADULT LIVER, SIGNAL = 1.9; EXPRESSED IN HEART, SIGNAL = 1.1; EXPRESSED IN BONE MARROW, SIGNAL = 1.7; EXPRESSED IN FETAL LIVER, SIGNAL = 1.8; EXPRESSED IN LUNG, SIGNAL = 1.8; EXPRESSED IN BRAIN, SIGNAL = 2.2
aaaactccccaactctcgtgccaacttggacaacactcttttatgcactctttgttagttatccccacctgcccagttcccttattaggccgagatattttaaccaaattatctgcttccctgactattcctggactacagccacatctcattgccgcccttctccccaacccaaagcctccttcgtgtcttcctctcatatccccccaccttaacccacaagtatgggacatctctactccttccctggcaaccgatctcatgcccattaccatcccattaaaatctaatcacctttaccccactcaacgccaatatcccatcccacagcatgctttaaaaggattaaagcctgttaccactcgcctgctacagcatgggcttctaaaacctataaactctccttaccattcccccattttacctctcctaaaacgagacaagg

SEQ ID NO: 108 - DNA, 467 bp, Homo sapiens
  MAP TO AC007401.2; EXPRESSED IN HBL100, SIGNAL = 2.2; EXPRESSED IN FETAL LIVER, SIGNAL = 3.5; EXPRESSED IN HELA, SIGNAL = 1.2; EXPRESSED IN BRAIN, SIGNAL = 0.73; EXPRESSED IN BT474, SIGNAL =   2; EXPRESSED IN BONE MARROW, SIGNAL = 1.7; EXPRESSED IN LUNG, SIGNAL = 1.9; EXPRESSED IN ADULT LIVER, SIGNAL = 2.7; EXPRESSED IN PLACENTA, SIGNAL = 2.1; EXPRESSED IN HEART, SIGNAL = 1.1
tttcctagctgtgtgttgccggccttgtcactttatctctctgtctacattttctcatttccaaaatgactactactcattagagttgtttgagaattaaatgaattcatagatgcagatgtttagaactgtacctggcatacagcaaatgctcagtaaacatgattaatatcatagttattgtgattatcattgttttctgaagccagagacacagaaagacaaaattactcaagtaacatgtagtagaatttgcactcctgtctcatctattaggagttccagatgctttccactctgccaatgacaactggggttctggggcacaacccagcaccttagaggatacaaccgaaaggacaataggtcatgctcaaccaacagggtgctctgtgaccaaggtgctggaaaagcccctcccacactcctaccccaggtaagagccaagctcagggtttctggcttac

SEQ ID NO: 109 - DNA, 473 bp, Homo sapiens
  MAP TO AC007421.11; EXPRESSED IN PLACENTA, SIGNAL =  11; EXPRESSED IN BT474, SIGNAL =  28; EXPRESSED IN BONE MARROW, SIGNAL = 8.5; EXPRESSED IN HBL100, SIGNAL =  45; EXPRESSED IN FETAL LIVER, SIGNAL =  28; EXPRESSED IN LUNG, SIGNAL =  13; EXPRESSED IN HELA, SIGNAL =  19; EXPRESSED IN BRAIN, SIGNAL = 5.7; EXPRESSED IN HEART, SIGNAL = 4.4; EXPRESSED IN ADULT LIVER, SIGNAL =  15
cctgagaggcactgatgtccccttggagagggaatcaccttggatcctcccttctgcctttgctatcagttccctctactcaccagcaggtcagtggtaatcaaaactctgctagagccagaacgaaactccctcataatcacgtctcgttccttttggtccatatctccatgctggaagagaaaacaaatatgcagcagaccaggtaggcacctgggttccaggaaccctggcttcaagtaggacacttctgacgggcagacccacaacaggctggcagcgggcaaacacaccatggcggatacagtgaaatctcgagcatgcatcttctcggtgagccagtccaccttcctccgggtgttgatgaagatgactgcctgggtgatggtcagggtttcatacaagtcacatagtgtgtccagcttccactcctggaggttgggggacaaaaatcagtcaggggctatacccaa

SEQ ID NO: 110 - DNA, 469 bp, Homo sapiens
  MAP TO AC007541.9; EXPRESSED IN HELA, SIGNAL = 2.1; EXPRESSED IN FETAL LIVER, SIGNAL =   2; EXPRESSED IN LUNG, SIGNAL = 0.96; EXPRESSED IN ADULT LIVER, SIGNAL = 1.4; EXPRESSED IN HEART, SIGNAL = 1.4; EXPRESSED IN BT474, SIGNAL = 1.5; EXPRESSED IN BONE MARROW, SIGNAL = 0.63; EXPRESSED IN BRAIN, SIGNAL = 0.89; EXPRESSED IN PLACENTA, SIGNAL = 0.68; EXPRESSED IN HBL100, SIGNAL = 0.91
atttaagtcccaggacggtggaaactagctagtagattgcagccatgttgtggaagctgctgctgagatcccagtcctgcaggctgtgttctttcagaaagatgcgatcacctccaaaatacagacctttcttagcatgcttcacctatacaactgataaacagtcgagcaaagaaaatacaagaacagtggaaaagctctataaatgttcagttgacattaggaaaattcgtagattaaaaggatgggtacttttagaggatgaaacctatgttgaagaaattgcgaatattttacaagaactaggtgccgatgagactgctgtagccagtattttggaacgctgcccggaagcaattgtctgtagtccaaccgctgttaacacccagagaaaactctggcagttggtctgcaaaaatgaggaagagttaatcaagttaatagagcagtttccagaatctttctttac

SEQ ID NO: 111 - DNA, 473 bp, Homo sapiens
  MAP TO AC007541.9; EXPRESSED IN HBL100, SIGNAL = 1.7; EXPRESSED IN FETAL LIVER, SIGNAL = 2.4; EXPRESSED IN BRAIN, SIGNAL = 1.5; EXPRESSED IN HEART, SIGNAL = 1.9; EXPRESSED IN ADULT LIVER, SIGNAL = 1.5; EXPRESSED IN HELA, SIGNAL = 1.2; EXPRESSED IN LUNG, SIGNAL = 1.3; EXPRESSED IN BONE MARROW, SIGNAL = 0.78; EXPRESSED IN BT474, SIGNAL = 3.1; EXPRESSED IN PLACENTA, SIGNAL = 1.6
ttttgacagctgcacctaatgtttttcataatcctgttgagaagaataagcaaatggtaagaattctccaagagagttatctagatgtaggtggctctgaggccaacatgaaagtttggctactaaaattgttaagccaaaacccatttattttgttaaattctcccacagctataaaggaaacactagaatttctccaggagcaaggtttcaccagctttgaaattctccagcttctatccaaactcaaaggatttctttttcaactttgcccaagaagtatacagaatagtatttccttctctaaaaatgcttttaaatgcacagatcatgacctgaagcaattagttttgaaatgtcctgcccttttatattattctgttccagttttagaagagagaatgcaaggattattgagagaaggaatttccatagctcagataagagagacgccaatggttcttgaattaaca

SEQ ID NO: 112 - DNA, 478 bp, Homo sapiens
  MAP TO AC007541.9; EXPRESSED IN BONE MARROW, SIGNAL = 0.64; EXPRESSED IN HBL100, SIGNAL = 3.4; EXPRESSED IN BRAIN, SIGNAL = 1.5; EXPRESSED IN HEART, SIGNAL = 1.8; EXPRESSED IN PLACENTA, SIGNAL = 1.9; EXPRESSED IN BT474, SIGNAL = 4.6; EXPRESSED IN FETAL LIVER, SIGNAL = 2.6; EXPRESSED IN LUNG, SIGNAL = 1.6; EXPRESSED IN HELA, SIGNAL = 2.7; EXPRESSED IN ADULT LIVER, SIGNAL = 2.4
aaacataccatatcttcagttacaaccgagtaagtgtaacattttaccagataaaaacctggaacttaagtatgagaaaccttcatatactgtgctcgtattggtctcttctttttagatgaaagccagtcatcaatactttcaacacagcagtttagaagataaacgtccaaaacagttgacttggttgtagtccataatttagcaattcaatgccactggcattacagtgctgtggagcgcaagtgtatctctatatttcagtcagatttgtctttcttctttcctgttaagggcactttgtttacaacagcagacccaacagctgtaacacctccagccacagcagagacaccccctttcaccagccctattcccatggaaggcacagttgtaacagctgttttggtcacttccagactctttccaccaatccaagccacaccaccaatggtggcaccaacagctccctttgtaa

SEQ ID NO: 113 - DNA, 486 bp, Homo sapiens
  MAP TO AC007552.4; EXPRESSED IN PLACENTA, SIGNAL = 4.3; EXPRESSED IN BT474, SIGNAL =   3; EXPRESSED IN LUNG, SIGNAL =  10; EXPRESSED IN HELA, SIGNAL = 5.5; EXPRESSED IN BRAIN, SIGNAL = 4.6; EXPRESSED IN BONE MARROW, SIGNAL = 3.7; EXPRESSED IN HBL100, SIGNAL =   4; EXPRESSED IN FETAL LIVER, SIGNAL = 3.6; EXPRESSED IN ADULT LIVER, SIGNAL =   3; EXPRESSED IN HEART, SIGNAL = 2.6
tgtcactgtgcagaccatttctggaactagtgccttaaggatcagagctagttttctgcaaagatttcttaagttcagccaagatgtctttctgcccaaaccaacctggggaagtcgcacacccatcttcagggatactggcatgcagctacaaggttatcgatactatgaccgcaagacttgcggttttgacttcacagacactgtggaggacatttcaaaaacaccagagcaaagtcttcttcttctgcatgcttgctcccataatcccacaggagtggaccctggtcccaagcagcagaaggaaatagcaacagtggtgaagaaaacaaaaatctctttgcactcttcgacatggcctaccaaggctttgccagtggcaatggtaacaaggatgcctgggctgtgcgccactctgccaattatacgccattgtcgctgccaatcatacaccaagaacatggtcttacacagtgagggtgtggc

SEQ ID NO: 114 - DNA, 475 bp, Homo sapiens
  MAP TO AC007561.2; EXPRESSED IN BT474, SIGNAL = 0.97; EXPRESSED IN BONE MARROW, SIGNAL = 0.7; EXPRESSED IN HELA, SIGNAL = 1.4; EXPRESSED IN PLACENTA, SIGNAL = 0.6; EXPRESSED IN HBL100, SIGNAL = 1.2; EXPRESSED IN FETAL LIVER, SIGNAL = 1.4; EXPRESSED IN LUNG, SIGNAL =   1; EXPRESSED IN ADULT LIVER, SIGNAL = 2.4; EXPRESSED IN BRAIN, SIGNAL =   1; EXPRESSED IN HEART, SIGNAL = 0.94
agtttggtttccagtggtggttggattcagctgccaaaaacccaaattaggaaaggttttgttgatagcccataagaggacactctggaagatggattgaagtttattgccaaccccggacaataaatagacatatatacaacccagagaaaaagcgtgtgcaaatatatatgtgtaaatatatatatgtgtgtgtgtgtgtaaatatatatatgtgtgtgtaaatatatatatatatatttatgtatgtatgtatgctgtgttttaccaaaataaatgtgtttctcacagtctttgccatggacaaaatgatcaaaaccagctgctccgtggagttcttcattgaaaggaagagagaggtggagttggcagtgaagcgggatctgcagacacacttcagcatcaagctgacttatcactcctctggaaacggttaacatgcctggtccagccacccgtcatgtggatgtgatgt

SEQ ID NO: 115 - DNA, 482 bp, Homo sapiens
  MAP TO AC007561.2; EXPRESSED IN HEART, SIGNAL = 0.86; EXPRESSED IN BONE MARROW, SIGNAL = 0.65; EXPRESSED IN HBL100, SIGNAL = 0.7; EXPRESSED IN FETAL LIVER, SIGNAL = 1.1; EXPRESSED IN LUNG, SIGNAL = 2.1; EXPRESSED IN ADULT LIVER, SIGNAL = 0.76; EXPRESSED IN PLACENTA, SIGNAL = 1.6
gcggtcctaggagggtaatcatcccctgtgcggctgcatctcccttcctcctgcgactcgcttttctgtcctgtccataccttcggtattctggatcggtttgatcgagattatggcattcagtttccaaaggaaaaaaaaatgtaatcttccccagcccctcttgctggaatgaaacgtcagataggattcaggtgcaatccgtcatgcctcggagcagcacttttggtggttcatcttgaccttgtgcttaaggccatcgtagagctcgaagttgtagttctccagtgtggtgcagcttcgggagctcaggcccgagtaggaacaggtgcagtagagcaggaggcctgcacaggtggcccccaggaggacgcccagtgagctcatggcgatgatggtgatgaggatgggatccagggtgtacagccagctcttttctttgtcggtcgagggggcgccagaccctgaggttgcagaagaag

SEQ ID NO: 116 - DNA, 466 bp, Homo sapiens
  MAP TO AC007563.1; EXPRESSED IN FETAL LIVER, SIGNAL =  12; EXPRESSED IN PLACENTA, SIGNAL = 1.9; EXPRESSED IN BT474, SIGNAL = 3.1; EXPRESSED IN BONE MARROW, SIGNAL = 0.89; EXPRESSED IN HBL100, SIGNAL = 1.2; EXPRESSED IN LUNG, SIGNAL = 1.6; EXPRESSED IN ADULT LIVER, SIGNAL = 8.3; EXPRESSED IN BRAIN, SIGNAL = 1.3; EXPRESSED IN HEART, SIGNAL = 2.2
aaggaaagaacatcaagaaaccacatgtccagtctatttcacagccagagatactgactgccccaaaggtcactaactatgttccacaactatgtttgtggaaagaaaagtgctttgcctacaggtcacaccagatgagggtcttattaggatgccctcctccagctgagaccccactttccttgtcctcccaccccttccaccagacctgaccctcactgaccctggcagggggtggtcgcagcttcttgggctcctccaggccaaggtgatgcttgccacccttgcccatctgccggtgctgctcagtgaccttctcccggaacacggccagctccttcatacccgacttgaggggcttccggccagcactgcctcccccgcccaacatgttcatggtgctgtccacgtggttctccaccaggcctccttctgagtggtcatcgccattgtctgccaagagagg

SEQ ID NO: 117 - DNA, 487 bp, Homo sapiens
  MAP TO AC007632.4; EXPRESSED IN BRAIN, SIGNAL = 2.2; EXPRESSED IN HEART, SIGNAL = 1.8; EXPRESSED IN PLACENTA, SIGNAL = 1.6; EXPRESSED IN BT474, SIGNAL = 1.5; EXPRESSED IN HBL100, SIGNAL = 1.6; EXPRESSED IN FETAL LIVER, SIGNAL = 2.8; EXPRESSED IN LUNG, SIGNAL = 2.4; EXPRESSED IN ADULT LIVER, SIGNAL = 2.7; EXPRESSED IN BONE MARROW, SIGNAL = 2.8; EXPRESSED IN HELA, SIGNAL = 3.3
tgctatgttgcctagtttggtctcaaactcctagcttctactaattcttttcccttaacctcccaaagcactgtgattactggtgtgagccactgtaccttgcctttcttttatttttaattaataattgttttggtaaaaattaataacaaaatccctgattttttcgcttcataattttccatccactgaccccaccctaccccttgcctgtaagtctccaccccacacgttcttataatcttaaccagtgtcatgaatgacatctttaacagccatccatctccagctgggaaccaagctctcaccaggaacgtgaattggccgacacctggatctggaacttcccagctccaaagctgtgagaaataaaagtctgttgtttaaacttcccagtctgtggtattttcttatggtagcctgaacagaataagacagggcactagctattttaaaaatcaccaggtggttctaatatgtagccagg

SEQ ID NO: 118 - DNA, 480 bp, Homo sapiens
  MAP TO AC007642.4; EXPRESSED IN PLACENTA, SIGNAL = 1.2; EXPRESSED IN HBL100, SIGNAL = 3.4; EXPRESSED IN LUNG, SIGNAL = 1.3; EXPRESSED IN BRAIN, SIGNAL = 1.6; EXPRESSED IN BT474, SIGNAL = 1.7; EXPRESSED IN BONE MARROW, SIGNAL = 1.8; EXPRESSED IN FETAL LIVER, SIGNAL = 2.7; EXPRESSED IN HELA, SIGNAL = 3.4; EXPRESSED IN ADULT LIVER, SIGNAL = 1.8; EXPRESSED IN HEART, SIGNAL = 2.2
gaaaagccacttgaagaaaaggaagaaggagaagcttcagttgataggttgattagtgacctctcattgatagactgattactggccttcctggtggaggccatgggggtcttggaagaggtcgagggggcggtgggcgtggagtggccaggaagatgggtttgattctcctggcactcatgagtatgatataagagcagtgcaagccacacagctggcctgaagcaccaggacagacatgtgggcggcagatgtcacaactggggaactgtcaaaggtggattaacagagtccccaaaatttacattcagaaacaattatcttatcattgcagtgacttgcatcaatcaaatataactaaggaaacccttgaaggtgaagaacatgcggtggcaggcattgaaaaggaggagaatgaagctgaggaggtaaaggcagaggctccaaaagggatgactttgagtgagtggaaggctgtcc

SEQ ID NO: 119 - DNA, 445 bp, Homo sapiens
  MAP TO AC007642.4; EXPRESSED IN PLACENTA, SIGNAL = 0.91; EXPRESSED IN HBL100, SIGNAL = 1.4; EXPRESSED IN FETAL LIVER, SIGNAL =   2; EXPRESSED IN LUNG, SIGNAL = 1.4; EXPRESSED IN BRAIN, SIGNAL = 1.4; EXPRESSED IN BT474, SIGNAL = 1.1; EXPRESSED IN BONE MARROW, SIGNAL =   1; EXPRESSED IN HELA, SIGNAL = 1.8; EXPRESSED IN ADULT LIVER, SIGNAL = 1.4; EXPRESSED IN HEART, SIGNAL = 1.4
gcactactgtagactttgtaaatgccatacactgtaggctatactaaatttatataaaaacttttcttcaataataaattaactttagcttgctataacttttttgctttataaacttgtacttttttaaaaagctttttgacccttttataaacccttagtttaaaacacaaatatactgcacagtgatcaaaaatattttctttctttatatccttattctataagctttttttaatatttaattttttaactttttaaactaaaaactaacacacaaatctacatatcaacctagtcctacacagggtcaggaccatcactatcttctacctctggatcttgtcccactagaaggtcttcaggggcaacagcacacaaggagctgtcatctatgataacaatgccttcttctggaatacatccagaagaacctacctgaggc

SEQ ID NO: 120 - DNA, 480 bp, Homo sapiens
  MAP TO AC007652.1; EXPRESSED IN BT474, SIGNAL = 1.2; EXPRESSED IN BONE MARROW, SIGNAL =   2; EXPRESSED IN HBL100, SIGNAL = 1.5; EXPRESSED IN FETAL LIVER, SIGNAL = 1.6; EXPRESSED IN HELA, SIGNAL = 1.7; EXPRESSED IN ADULT LIVER, SIGNAL = 1.5; EXPRESSED IN PLACENTA, SIGNAL = 1.7; EXPRESSED IN LUNG, SIGNAL = 2.1; EXPRESSED IN BRAIN, SIGNAL = 2.4; EXPRESSED IN HEART, SIGNAL = 1.9
gcttccacaagagcccaggggagccgccccggaggcctgcccccagaccgccaccaccaatgccgcaagaagcttcccacaagactcctcgccatcatctttcagcccctctgccgttccctaaggacagggacttttagaatacaagtctaaaagaattgctgatcacttccctccctgccacgaatctccctgaaacaatggacacagagacagctacttgttggactaggaggaagggaaatgagaacatgcagggagataaggaaaacataactgaatgttgttggctctctgcttccccaaaccctggccaggattcacagaccaagcagcatgcaaggcctcactcgaccctaccagcaggaccattcccagccccactcctcactccctagctgagtcctgcagcagggactcttttcactttattctgagaaccctgactccacaggggcctgaaaagcagcagcactctgg

SEQ ID NO: 121 - DNA, 482 bp, Homo sapiens
  MAP TO AC007653.1; EXPRESSED IN PLACENTA, SIGNAL = 0.73; EXPRESSED IN BT474, SIGNAL = 0.76; EXPRESSED IN BONE MARROW, SIGNAL = 0.68; EXPRESSED IN HBL100, SIGNAL = 0.87; EXPRESSED IN FETAL LIVER, SIGNAL = 0.74; EXPRESSED IN LUNG, SIGNAL = 0.85; EXPRESSED IN HELA, SIGNAL = 1.1; EXPRESSED IN ADULT LIVER, SIGNAL = 0.7; EXPRESSED IN BRAIN, SIGNAL = 0.87; EXPRESSED IN HEART, SIGNAL = 1.5
  unsure 73
ttttccacattggcactcatagagtcaacagaactcgcctcgtgaagaccttacttagcacagtctgtatccngtgtacaacaaaatagttcatgaaattcaaccatattttaaaacattcagcattaatagtcctctcattgagttaaggtattttaagcaaaattttccagtctgtaacgaagagacttcttgaaatacagtcaagggatttaacagtaaatcatttatgttctgactatttggattacaaatctaattttttttttctcttgtagctctgttctggaaggggtgaaggaattatatctggaagctgcccaccaaaatggagatatgatcgacccagacctgcagacaggtctaggggttctgttccacctgagtggagaatttaatagagcaatagatgcatttaacgctgccttaactgttcggccagaggtaagacagcacagcacagcaagaaaccacagcgttct

SEQ ID NO: 122 - DNA, 384 bp, Homo sapiens
  MAP TO AC007653.1; EXPRESSED IN HEART, SIGNAL = 0.94; EXPRESSED IN PLACENTA, SIGNAL = 0.79; EXPRESSED IN BONE MARROW, SIGNAL = 0.67; EXPRESSED IN HBL100, SIGNAL = 1.8; EXPRESSED IN FETAL LIVER, SIGNAL = 0.99; EXPRESSED IN ADULT LIVER, SIGNAL = 0.91; EXPRESSED IN BRAIN, SIGNAL =   2; EXPRESSED IN BT474, SIGNAL = 0.66; EXPRESSED IN LUNG, SIGNAL = 0.6
  unsure 229
  unsure 232
  unsure 234
  unsure 352
ggtagctgttcattgacgagtgaaagtcatttgacaaaactgtccgtgaagattttttagtaattcacctggccatggtctccatccatgagcactgcataaatttttagccatcttcctttctctgcagagaaatacaggaatgctctgtcattgtgccttgtactgggttgttagaaagttctgattttgtcatcaggactattcactatggaaccgcctcggggcngancncttggcgaacggagaccgcagcgaggaagccgtggaggcctatacgcgagcactggagattcagccaggattcatccggtccagatacaacctaggaataagctgcatcaacctgggncgcctacaggtgaagtacagcaacaggccaag

SEQ ID NO: 123 - DNA, 384 bp, Homo sapiens; identical to SEQ ID NO: 122
  MAP TO AC007653.1; EXPRESSED IN BRAIN, SIGNAL = 2.4; EXPRESSED IN HEART, SIGNAL = 0.86
  unsure 229
  unsure 232
  unsure 234
  unsure 352

SEQ ID NO: 124 - DNA, 468 bp, Homo sapiens
  MAP TO AC007722.1; EXPRESSED IN PLACENTA, SIGNAL = 1.1; EXPRESSED IN LUNG, SIGNAL = 0.88; EXPRESSED IN HBL100, SIGNAL =   2; EXPRESSED IN FETAL LIVER, SIGNAL = 1.1; EXPRESSED IN HELA, SIGNAL = 0.98; EXPRESSED IN BRAIN, SIGNAL = 1.6; EXPRESSED IN BT474, SIGNAL = 2.2; EXPRESSED IN BONE MARROW, SIGNAL = 1.1; EXPRESSED IN ADULT LIVER, SIGNAL =   1; EXPRESSED IN HEART, SIGNAL =   1
  unsure 403
aaaatccagcaaacacaaacgtaaacacaaggctgacacagaagagaaaagctctaaggcagagtcaggggagaaatctaagaagcgcaagaaacgaaaacgaaagaagaataagtcatcagccccagcagattctgaacgaggacccaaaccagaaccccctgggagtggcagtcccgcaccaccaagaagaaggcggagagctcaagatgactcccagcggagatccctcccagctgaagaggggagcagtggcaaaaaggatgaaggtgggggtggtagcagctcccaagaccatggtgggaggaaacacaaaggtgaacttccaccttcatcctgccagcgaagagcaggcaccaaacggagcagccggtctagccatcggagccaacccagtagtggnagatgaggatagtgatgatgcttcctcacaccggctgcaccagaagtctccatcccagtacagtg

SEQ ID NO: 125 - DNA, 468 bp, Homo sapiens
  MAP TO AC007732.1; EXPRESSED IN FETAL LIVER, SIGNAL = 2.3; EXPRESSED IN LUNG, SIGNAL = 1.6; EXPRESSED IN PLACENTA, SIGNAL = 1.1; EXPRESSED IN BT474, SIGNAL =   5; EXPRESSED IN BONE MARROW, SIGNAL = 2.4; EXPRESSED IN HBL100, SIGNAL = 2.7; EXPRESSED IN HELA, SIGNAL = 2.5; EXPRESSED IN ADULT LIVER, SIGNAL = 1.3; EXPRESSED IN BRAIN, SIGNAL =   2; EXPRESSED IN HEART, SIGNAL = 0.95
  unsure 265
tttaacaaggtcttacttatttttccctttatctttcctttacaggcaatacctggtattacatgaaattttaaggaattaaatggggaattaacgccttacacctttttggcctgagttttcctaaccccctttttgttcgcccaccagaaaagacaatctcacagaccactgctgggtaagtcaggaaaaaaaacacagctcttcctctctagcctccaccttgcaccccagagccccactgcccacttaagccaggtttccnatttggaccacacacccgctccaggaagacgtctctcttggtgaatttgcgcactgctgtgagtgtgtcctgcacaatacccatgacaggccgattgctctggggggtgacaatcatgcgaggaaccatggccagctcctggatctctgctcgcgtctccagagactgtggcaggtgcaagttcatctcatccccgtcaaagt

SEQ ID NO: 126 - DNA, 463 bp, Homo sapiens
  MAP TO AC007732.1; EXPRESSED IN ADULT LIVER, SIGNAL = 3.6; EXPRESSED IN PLACENTA, SIGNAL = 3.7; EXPRESSED IN BT474, SIGNAL =   5; EXPRESSED IN BONE MARROW, SIGNAL = 5.5; EXPRESSED IN HBL100, SIGNAL = 4.8; EXPRESSED IN LUNG, SIGNAL = 4.3; EXPRESSED IN HELA, SIGNAL = 4.1; EXPRESSED IN HEART, SIGNAL = 3.2; EXPRESSED IN FETAL LIVER, SIGNAL = 3.8; EXPRESSED IN BRAIN, SIGNAL = 4.4
  unsure 236
  unsure 254
  unsure 276
ctctcatcctcacaccaccccaggaggcaggactgcccactatcatttatagattcagaaacacgtttgtggcctttaaccatgtgaaaggactcattaaagatcatacagctagtaagtagcaggggaattttcaaacccaggtcgatccacccatccccacctacaggtcttcctccctttagacacctcgccctccagctaagaggcagagccctggagccactgacctggtntacgggcagagccctgcnatcacaacagcaggccgcacgngagagcgggggcacaggcagcactgtgacaatcatccactctggccgtgcatagcggggctccatgcccagcacaaaacactcctcatctgagatgcgtttgaagatctcatgcactcgctctggactcagcaggatcttcttctcctgagagtcctcattaacgtgcttccattccgcatacagct

SEQ ID NO: 127 - DNA, 468 bp, Homo sapiens
  MAP TO AC007733.1; EXPRESSED IN BONE MARROW, SIGNAL = 1.3; EXPRESSED IN FETAL LIVER, SIGNAL = 1.9; EXPRESSED IN LUNG, SIGNAL = 1.5; EXPRESSED IN HELA, SIGNAL = 2.2; EXPRESSED IN ADULT LIVER, SIGNAL = 1.5; EXPRESSED IN BRAIN, SIGNAL = 0.74; EXPRESSED IN HEART, SIGNAL = 1.1; EXPRESSED IN PLACENTA, SIGNAL = 1.8; EXPRESSED IN BT474, SIGNAL = 1.7; EXPRESSED IN HBL100, SIGNAL = 2.5
ttgtccaatcagtaggatttaggaaatacaggatcagataggaacaaagctgtacgttaaaactacctggggaaataaagggtggggtgtgtggagctaaataacactaagaagcaaaacaaaagaaaataagtaaactattacatatgtagagatgttgaaaaaaaattaaaggtgacataatgttgcaaaaaaaagtcaggtctattttaaaataaagattttgggaagttttaggagaaacataagagtaaaaatgaaaaaacatagggaaataaaaatgacaacatgggacacatatgatattaatgcatgctaagaagataattatttcactcaccaaagaggttctgagcagtagcatcagatccttctttaggcacaggggcacagtgacaaatatgattttcaagaccctgactctagggaaacactgagtgcccagagaaactgtggcagtggtataaa

SEQ ID NO: 128 - DNA, 481 bp, Homo sapiens
  MAP TO AC007741.1; EXPRESSED IN BT474, SIGNAL =   1; EXPRESSED IN BONE MARROW, SIGNAL = 1.2; EXPRESSED IN HEART, SIGNAL = 1.6; EXPRESSED IN PLACENTA, SIGNAL = 1.1; EXPRESSED IN BRAIN, SIGNAL =   2; EXPRESSED IN ADULT LIVER, SIGNAL = 1.4; EXPRESSED IN HELA, SIGNAL = 1.4; EXPRESSED IN LUNG, SIGNAL = 1.2; EXPRESSED IN FETAL LIVER, SIGNAL = 0.93; EXPRESSED IN HBL100, SIGNAL = 0.97
gttcaccagttaaccagggccttgcttgctgcttcttaagagacaggaacatttgtgttaaaataatgtattgctaggtgtgattccaagatatcctaatttgtatcatcagaggtgtgacttaggagtttttatttgaaagatgcccttcatgtgattctgaagtgttctgtacttgcttgttttggtgaaaattgtttaattcatgttgtagtatgttcttgcattgctgtgaagaaatacctgaggctgggtaatttatataaaaaaagaggtttaattgactcacacttctgcaggctgtacaggaactgtaacagcttctgcttctggggaggcctcaggaagcttccaatcatggcagaagacaaagggggaatgaagtgtcccacctaaggggagcaagagagaagcaggaggtgctacacacttctaaacaaccagatcttgagagggctctatcacgaaaacagcaccaagg

SEQ ID NO: 129 - DNA, 483 bp, Homo sapiens
  MAP TO AC007741.1; EXPRESSED IN BRAIN, SIGNAL = 2.3; EXPRESSED IN HEART, SIGNAL =   2; EXPRESSED IN BONE MARROW, SIGNAL = 3.4; EXPRESSED IN HBL100, SIGNAL =  22; EXPRESSED IN ADULT LIVER, SIGNAL =  13; EXPRESSED IN PLACENTA, SIGNAL =  18; EXPRESSED IN BT474, SIGNAL =  52; EXPRESSED IN FETAL LIVER, SIGNAL = 8.7; EXPRESSED IN LUNG, SIGNAL = 5.6; EXPRESSED IN HELA, SIGNAL =  17
aactaccagtccctgggctctgtccaggtgcccagctaagacgctcggccagtcagcagcatgaccagtatctctgcaggggctgggggctctggttcccagatctccatgtccccctccaccagcttctggggtggcatggggtctggggccctggccgtggggatggccagggttctggcaggatggaagacatccagaacaagaaggagaccatgcaaagcctgaatgactgcctggcctcctacctggacagagtgaggagactggataccaagaatcggaagctggagagcaaaatccgggagcacctggagaagaagggaccccaagtcagagactggagccattacttcaagaccgtggaggacctgagggctcagatcttcgcaaatactgtggacaatgcccgcatcgttctgcaagtcgacaatgcccatcttgctgatgactttagagtcaagtatgtgacagagctggcca

SEQ ID NO: 130 - DNA, 479 bp, Homo sapiens
  MAP TO AC007741.1; EXPRESSED IN LUNG, SIGNAL = 6.5; EXPRESSED IN HEART, SIGNAL = 0.92; EXPRESSED IN PLACENTA, SIGNAL =  14; EXPRESSED IN BT474, SIGNAL =  57; EXPRESSED IN HBL100, SIGNAL =  21; EXPRESSED IN FETAL LIVER, SIGNAL =  15; EXPRESSED IN ADULT LIVER, SIGNAL =  14; EXPRESSED IN BONE MARROW, SIGNAL = 1.5; EXPRESSED IN HELA, SIGNAL =  20
ctctgggttgactgtggaggtagatatccccaaatctcaggaccttgccaagctcatggcagacatctgggcccaatatgatgagctggctcggaagagccaagaggagctgggcaagtactggtctcagcagattgaggagagtatcacagtagtcaccatgcagtccaccgaggttggagctgctgagatgatgctcatggagctgcttggagatcaacctggactccatgagaaatctgaaggctagcttggagaatggcctgagggaggtggaggcccgctatgccctgcagatggagcagttcaacaggatcctgctgcacctggagtcagagctggcacagacctgggcagagggacagtgccaggcccaggagtacgaggccctgctgagcatcagggtcaagctggaggctgagatcgccacctaccaccacctgctggaagatgtgaggacttcaatcttagcgatgccc

SEQ ID NO: 131 - DNA, 474 bp, Homo sapiens
  MAP TO AC007751.3; EXPRESSED IN PLACENTA, SIGNAL = 6.3; EXPRESSED IN HBL100, SIGNAL = 5.5; EXPRESSED IN FETAL LIVER, SIGNAL = 6.2; EXPRESSED IN BRAIN, SIGNAL = 7.5; EXPRESSED IN BT474, SIGNAL = 5.3; EXPRESSED IN BONE MARROW, SIGNAL =   6; EXPRESSED IN HELA, SIGNAL = 5.7; EXPRESSED IN ADULT LIVER, SIGNAL = 5.7; EXPRESSED IN HEART, SIGNAL = 5.4; EXPRESSED IN LUNG, SIGNAL = 5.4
tcattttctctttgcctgccaccatgtaagacgtgcctttcgcctcccaccatgattgtgaggcatccccaggcacgtggaaccatgagtccattaaacctctttccttcataaattacccagtctcaagtatgtcattatcaacagcatgaaaatggactaatacagtaagcaggtaccattagagtggggtgctactgtaaaggtacctgaaaatgtggaagcaactttggaactgggtaacagtccagagatttggacagtctggacggctcagaagaagacagcaaaatgtgggaaagtttggaacttcctagagacttgttgaatggctttgaccaaaatgctgataatgatatagacaatgaaatccaggctgaggtagtctcagatggagataagtaacttgttgggaagtggagcaaagctgactcttgttattttttagcaaagagactggcaacattttgtccc

SEQ ID NO: 132 - DNA, 453 bp, Homo sapiens
  MAP TO AC007751.3; EXPRESSED IN BT474, SIGNAL =  40; EXPRESSED IN HELA, SIGNAL =  11; EXPRESSED IN ADULT LIVER, SIGNAL = 8.5; EXPRESSED IN HEART, SIGNAL = 2.4; EXPRESSED IN PLACENTA, SIGNAL =   9; EXPRESSED IN BONE MARROW, SIGNAL =  37; EXPRESSED IN HBL100, SIGNAL =  58; EXPRESSED IN FETAL LIVER, SIGNAL =  14; EXPRESSED IN LUNG, SIGNAL = 9.8; EXPRESSED IN BRAIN, SIGNAL = 5.2
ggatccaccatgagttgacagtgtcattaggaaaagatcacattctaaagaaaagatactttagcctcactggctgctcttaaaagccatctctgcattgttctcagtcctgctcccttctcacagcagccacctccacagcaggaaactctgcagcttgatcaccagagtccctgaactctctctttctttttaatcccctgcatcggatcactggcatgctccaccgtgaagcagccgtggacaccagctccgagatcaccaccaagggcataaaggagaaggaagttatggggaggcagaaaatggaagagatgtccctgctaatgggaaggctaattaggaaaatcaggatcagaaggctggcaatgagagagatgaaaaagaagaagaaggaagtggggaggaagaggaagagaaataagaagataatggtgaggaacaggatggaga

SEQ ID NO: 133 - DNA, 480 bp, Homo sapiens
  MAP TO AC007841.1; EXPRESSED IN HBL100, SIGNAL =  11; EXPRESSED IN LUNG, SIGNAL =  36; EXPRESSED IN BRAIN, SIGNAL =  11; EXPRESSED IN BT474, SIGNAL =  11; EXPRESSED IN PLACENTA, SIGNAL =  15; EXPRESSED IN HEART, SIGNAL = 6.7; EXPRESSED IN ADULT LIVER, SIGNAL = 9.9; EXPRESSED IN HELA, SIGNAL = 9.9; EXPRESSED IN FETAL LIVER, SIGNAL =  12; EXPRESSED IN BONE MARROW, SIGNAL =  13
ctcattttctcttgctgccgccctgtaagaagtgcctttcacctcccaccatgattctgaggcctcccagtcatgtggaactgtaagtccaattaaacctcttttttttcccagtctcgggtatgtctttatcagcagtgtgaaaacagactaatacagtaaattggtaccagtagagtgggacgctgttgaaaagataccccaaaatgtggaagcgaccttggaattggtgacaggcatatgttggaacagtttggagggctcagaaaaagacaggaaaatgtgggaaagtttggaacttcctagagacttgttgaatggctttgacaaaaacactgataatgatacggacaatgaaatcccggctgatgtggtctcagatggagatgaggaacttgttgggaactggagcaaaggtgactcttgttatgttttaggaaagagactggaggcattttgcccctgccctagagatttgtg

SEQ ID NO: 134 - DNA, 446 bp, Homo sapiens
  MAP TO AC007842.1; EXPRESSED IN BRAIN, SIGNAL =   1; EXPRESSED IN HEART, SIGNAL = 1.5; EXPRESSED IN PLACENTA, SIGNAL = 1.2; EXPRESSED IN BONE MARROW, SIGNAL = 2.2; EXPRESSED IN HELA, SIGNAL = 2.8; EXPRESSED IN BT474, SIGNAL = 2.5; EXPRESSED IN ADULT LIVER, SIGNAL = 2.1; EXPRESSED IN LUNG, SIGNAL = 1.4; EXPRESSED IN FETAL LIVER, SIGNAL = 2.6; EXPRESSED IN HBL100, SIGNAL = 4.2
tcttccaatgtgagttatcccctttcgtctaggatgagatcccagcactgtccgtgtcccggccccagaccggcctgtccttcctgggccctgagcctgaggacctggaggacctgtacagccgctacaaggtacattcgacccccaacccagaccttgcacaggacctgacatctcatactcttccccactttccaccactctctggatcagcaagtctggagccatccccttctgtcccctctctgctcgcagaagctgcagcaagagctggagttcctggaggtgcaggaggaatacatcaaagatgagcaaaagaacctgaaaaaggaatttctccatgcccaggaggaggtgaagcgaatccaaagcatcccgctggtcatcggacaatttctggaggctgtggatcagaatacagccatcgtgggctctaccacaggtgt

SEQ ID NO: 135 - DNA, 465 bp, Homo sapiens
  MAP TO AC007842.1; EXPRESSED IN BONE MARROW, SIGNAL = 0.85; EXPRESSED IN LUNG, SIGNAL =   1; EXPRESSED IN HELA, SIGNAL = 1.1; EXPRESSED IN HEART, SIGNAL = 1.5; EXPRESSED IN PLACENTA, SIGNAL = 0.7; EXPRESSED IN BT474, SIGNAL = 1.4; EXPRESSED IN HBL100, SIGNAL = 1.2; EXPRESSED IN FETAL LIVER, SIGNAL = 0.85; EXPRESSED IN ADULT LIVER, SIGNAL =   1; EXPRESSED IN BRAIN, SIGNAL = 1.3
tttctactatgaggtacaacccccatccctgccccaacacagaaaaatagcattatagcatttgtttactctttgcttttttttttttttttttttgcagatttggaatacaagtatattaccaagaatttgctttcagaaaagaatgtttgcaaaatctatttatctcaattgcagacaggggaaaaaagtaaaaacaccatccatgaggacaccattttcagaaatggtttgcagtgtaaacatgaatttgagagacaagagagacatcagatgggatgcgttagtcaaatgctaatccaaaaacaaatatctcatcctctacatccaaaaattcatgctagagagaaatcatatgaatgtaaggaatgtagaaaggcctttagacaacagtcataccttattcaacatctgagaattcacactggtgagagaccctataaatgtatggaatgtggaaaggcc

SEQ ID NO: 136 - DNA, 485 bp, Homo sapiens
  MAP TO AC008101.6; EXPRESSED IN HBL100, SIGNAL = 2.2; EXPRESSED IN FETAL LIVER, SIGNAL =   2; EXPRESSED IN PLACENTA, SIGNAL = 2.3; EXPRESSED IN BT474, SIGNAL = 1.9; EXPRESSED IN LUNG, SIGNAL = 2.4; EXPRESSED IN HELA, SIGNAL = 1.9; EXPRESSED IN ADULT LIVER, SIGNAL = 1.9; EXPRESSED IN BRAIN, SIGNAL = 2.9; EXPRESSED IN HEART, SIGNAL = 2.3; EXPRESSED IN BONE MARROW, SIGNAL = 2.2
ttttcacatgtagtttttaggtaaaggacatctctttcagttgattcctacagccaagactagctttgatcctgggagattcagaaacctcaagatgggtagctggcttgagtaacatcctagataatagtcccagtcaaaaaccccattgaggttgaaggactggaaactgacctgtgtgaaaaagagctatcagtgcaggaaaagactcatgctgattttgaccttcctctggcccttttccctcaactgcttggtggggagtagcgaggagaaggagcatgtggcaccctcattggaggctggagcactgctgcagaaagtgatctcttactcatacttcaagacacagcctaagtatgaccacctgtatggacccttccctaatgcccaggatcaagaaaagaatgtggccaccttccaaggctcagagtagctgtgcaatgacttgtgtcaaaacccgatccagagcagcagtgatgaaa

SEQ ID NO: 137 - DNA, 468 bp, Homo sapiens
  MAP TO AC008133.1; EXPRESSED IN BT474, SIGNAL = 1.7; EXPRESSED IN HELA, SIGNAL = 2.3; EXPRESSED IN PLACENTA, SIGNAL = 1.8; EXPRESSED IN HBL100, SIGNAL =   2; EXPRESSED IN FETAL LIVER, SIGNAL = 1.7; EXPRESSED IN LUNG, SIGNAL = 2.4; EXPRESSED IN ADULT LIVER, SIGNAL = 1.9; EXPRESSED IN BRAIN, SIGNAL = 2.6; EXPRESSED IN BONE MARROW, SIGNAL = 1.8; EXPRESSED IN HEART, SIGNAL =   2
  unsure 42
caggaacaccctcactttggggcatctgcatttgctattaanccgctatgagaattctccttgctcacatatccacatgactcactgcctccctgcatcaactcttcactcagatattaccttctcaatgaggtctcccctgactaccctgtttaaaattgccaccctcacccctactcttcatccctcatctttgaatgctttgctgcttagaaatttcttccaccagatactctaaatcgtctctctcaagttcaaagttccacagatctctagggtggggacaaaataccaccagtctctttgctaaagcctagcaagagtgacctttgctccagctttcaacaagttcctcatctccatctgagaccacctcagcctggacttcattgtccatgtcactgtcagcattttggtcaaagccatttgatgagtctctaggaatttccaaacttcccccatcttcct

SEQ ID NO: 138 - DNA, 486 bp, Homo sapiens
  MAP TO AC008151.1; EXPRESSED IN PLACENTA, SIGNAL = 5.8; EXPRESSED IN BT474, SIGNAL = 4.5; EXPRESSED IN LUNG, SIGNAL = 6.4; EXPRESSED IN HELA, SIGNAL = 5.7; EXPRESSED IN HEART, SIGNAL = 6.3; EXPRESSED IN BONE MARROW, SIGNAL = 6.7; EXPRESSED IN HBL100, SIGNAL = 4.4; EXPRESSED IN FETAL LIVER, SIGNAL = 4.6; EXPRESSED IN ADULT LIVER, SIGNAL = 5.3; EXPRESSED IN BRAIN, SIGNAL = 7.6
tccctctctctcctctctctctcttctctctctatctccctttcttgactcacacataggcccccagggccctaaagcagtgatgcttgaacctgagagttatgcaggtatcccagcttctgcagtcaactcctccctcttgagcttctcccaagttgcccttcaagcaggggaaggagatagataggatcccagcctctccatgatactactccccaaccccctccacccacatctgccacagaacgcctgccttcttcagaaaaacaaacacccatttgccccccggctcaggctacacaacacccagaggaaccagatgcccaccagccctacaaacacttgttccaggtttgtgctcatcagggacaccctgttgcacaaagaagaaactgacctggtacctcccttggcggggaatccattcctggggagaagatgagaggagaacaatgagaacatacaggagaaggagctgaacaccgt

SEQ ID NO: 139 - DNA, 464 bp, Homo sapiens
  MAP TO AC008170.1; EXPRESSED IN BONE MARROW, SIGNAL =   9; EXPRESSED IN FETAL LIVER, SIGNAL =  13; EXPRESSED IN LUNG, SIGNAL = 7.6; EXPRESSED IN BRAIN, SIGNAL = 4.9; EXPRESSED IN PLACENTA, SIGNAL = 8.1; EXPRESSED IN BT474, SIGNAL =  13; EXPRESSED IN HBL100, SIGNAL =  14; EXPRESSED IN HELA, SIGNAL =  10; EXPRESSED IN ADULT LIVER, SIGNAL = 7.8; EXPRESSED IN HEART, SIGNAL = 3.7
cattgtgctaggggaatgatgtagaagcagaaggtcacttgactgcagtgaaccaacaccagcgaggaagccaagcctatcccagagagaccagatattagaaattcatcctttgaatgtcacgtgagcctttgagattggaattcaatactagaacagagaaggaatttcagtaatgaatgagatggaattttccttccatcccagaaggcctgaagttagaattgtattggtattatcaacattttcctagctttaccttcataatctctcatttttgtttttccacagaggtgaatcacttcaaagagaaggaccagattctcatggaccccactgccatgctggccagacatcttgctgccattgttttcctgttatttactcccaaacaggtaaatttccagatcttaaaaggagttatgctataaataagtttttgtatgtgtgttagtgtgtgtgca

SEQ ID NO: 140 - DNA, 492 bp, Homo sapiens
  MAP TO AC008278.1; EXPRESSED IN PLACENTA, SIGNAL =  24; EXPRESSED IN BRAIN, SIGNAL =  17; EXPRESSED IN HELA, SIGNAL =  17; EXPRESSED IN LUNG, SIGNAL =  22; EXPRESSED IN FETAL LIVER, SIGNAL =  19; EXPRESSED IN HBL100, SIGNAL =  19; EXPRESSED IN BONE MARROW, SIGNAL =  28; EXPRESSED IN BT474, SIGNAL =  19; EXPRESSED IN HEART, SIGNAL =  15; EXPRESSED IN ADULT LIVER, SIGNAL =  12
acggaccttgccttctgtcatatttatagtgtgagttagagccagattcaaatccaagactaatattataaagttcacatcctttccaactcccctcaatgcacctgagcagtaagagtgcaatggttacacaaacaatagtacattcaatgtattatgtagccactatagtatttataagaaaaatgcttatgttaaataaaaatacagaatcgtatatagaccaaaacatttacagaaaaaagaaatgaaccaaaatgttagcgatgactttctctggaagtgggactataaataaaaagtaaggaggagtggggattactctagtctgaaatttccatgtaactaacaggaaaagatatgctaagaatgaggtataaattagccacacgtggtggtgcatgcctgtagtcacagctactcaggaggctgaagtgggaggacagcttgaggccaggaggcaggaattggggtgagccgagattatgccac

SEQ ID NO: 141 - DNA, 492 bp, Homo sapiens; identical to SEQ ID NO: 140
  MAP TO AC008271.1; EXPRESSED IN BT474, SIGNAL = 8.8; EXPRESSED IN BONE MARROW, SIGNAL =  12; EXPRESSED IN HBL100, SIGNAL =  11; EXPRESSED IN HELA, SIGNAL =  12; EXPRESSED IN BRAIN, SIGNAL =  13; EXPRESSED IN PLACENTA, SIGNAL = 9.3; EXPRESSED IN FETAL LIVER, SIGNAL =  10; EXPRESSED IN LUNG, SIGNAL =  12; EXPRESSED IN ADULT LIVER, SIGNAL = 8.6; EXPRESSED IN HEART, SIGNAL = 9.4

SEQ ID NO: 142 - DNA, 469 bp, Homo sapiens
  MAP TO AC008272.1; EXPRESSED IN LUNG, SIGNAL = 1.7; EXPRESSED IN HELA, SIGNAL = 1.5; EXPRESSED IN ADULT LIVER, SIGNAL = 1.3; EXPRESSED IN PLACENTA, SIGNAL = 1.2; EXPRESSED IN BONE MARROW, SIGNAL = 1.6; EXPRESSED IN FETAL LIVER, SIGNAL = 1.4; EXPRESSED IN BRAIN, SIGNAL = 1.6; EXPRESSED IN HEART, SIGNAL = 4.3; EXPRESSED IN BT474, SIGNAL = 1.3; EXPRESSED IN HBL100, SIGNAL = 1.3
gcatctgagagcatcagtgaactctcagaagaaaaaaatggtcatttaaggaccgacatcctctaaatttttgtcacacaggtttgcaaactaaagacagccatactgagtgagttgtccattgcaaggtagaacacagcctttgaactaccagtgaagaagatactccccaaactaattaccctgcttttagcacattacatgcgagcaaaaatgagctcacctcttcatccagactcctgccccagggctgctggccctccccagcttctgttgcaggaactgcttaggtctcatgcttctcagggctcccctcaagcccttcagtgtctgtaggcttctcacgaggctgctcctgagcttgcctctctgccctcgactggctgaatgtcctttctgcttcttgaaggtctgctagggtgacaccctgggaaaatatcacaagatcagggctgtttcacactaacca

SEQ ID NO: 143 - DNA, 447 bp, Homo sapiens
  MAP TO AC008272.1; EXPRESSED IN PLACENTA, SIGNAL = 3.1; EXPRESSED IN BT474, SIGNAL = 3.4; EXPRESSED IN BONE MARROW, SIGNAL = 2.8; EXPRESSED IN HBL100, SIGNAL = 2.9; EXPRESSED IN FETAL LIVER, SIGNAL = 2.3; EXPRESSED IN LUNG, SIGNAL = 2.4; EXPRESSED IN HELA, SIGNAL = 1.7; EXPRESSED IN ADULT LIVER, SIGNAL = 1.4; EXPRESSED IN BRAIN, SIGNAL = 1.9; EXPRESSED IN HEART, SIGNAL = 2.2
ttctctcttcaactccttctttgtctcttcctctctttttaactctctctttgactttctgtgtctgtccctctttctctctgactccttctctttgtccctctgttccttcctctctctctctctttctctgactttctttttctctccttcttgctggtctttccctacctctgccagtcactcatgctgctgttctcccctcttcttcccattttgatggctttggcagtgtaagagtgccacctacttgtgtttttgcattgcatgcaataattctataatttccttgtggcatttaacaggggttcccccagaggttaggaactccctctctttccatattgcagcatgggcatgtaggattagataagcatatttgctatctgtatacacatttattctttttccctttcccagttctaaggctcgggtaagtgccactag

SEQ ID NO: 144 - DNA, 495 bp, Homo sapiens
  MAP TO AC008272.1; EXPRESSED IN BONE MARROW, SIGNAL = 3.9; EXPRESSED IN HBL100, SIGNAL = 2.6; EXPRESSED IN LUNG, SIGNAL = 2.8; EXPRESSED IN ADULT LIVER, SIGNAL = 2.2; EXPRESSED IN PLACENTA, SIGNAL = 3.5; EXPRESSED IN BT474, SIGNAL = 2.6; EXPRESSED IN FETAL LIVER, SIGNAL = 2.6; EXPRESSED IN HELA, SIGNAL = 2.2; EXPRESSED IN BRAIN, SIGNAL = 3.4; EXPRESSED IN HEART, SIGNAL = 2.8
ctgaaaacaacccaaatgtccataacaggtaactagataaagaaatgttggtgtattcatacaatgaaatactattccgccaaaaaaaaaaaaaaaaaaaaaaaaagtctatggatacatacaacaatatgaatgaatgttaaagtaattatgctgaataaaagaagccacaccaaaataaactacttattgtattattacattggtatatgcctctagacaattaaaaccaatctgtatgacagaaaggagatcagtggttgcctgagaagagggtacatggagagagacaggaaggagagattacaaaggagcacaaggataccttttgggatgatgtttatgttcactatattgatcggcttcatgggtatatacgtatgtcaaaacttatcaaattgtacactagatacatatgctgtttattttatgtcacttatacttcaaaatgctgttaaaactctcaccaaattaggtatgcaaggaatgttcctc

SEQ ID NO: 145 - DNA, 467 bp, Homo sapiens
  MAP TO AC009222.1; EXPRESSED IN HBL100, SIGNAL = 1.7; EXPRESSED IN HELA, SIGNAL = 1.9; EXPRESSED IN ADULT LIVER, SIGNAL = 1.4; EXPRESSED IN HEART, SIGNAL = 0.96; EXPRESSED IN PLACENTA, SIGNAL = 0.88; EXPRESSED IN BRAIN, SIGNAL = 1.4; EXPRESSED IN FETAL LIVER, SIGNAL = 1.5; EXPRESSED IN LUNG, SIGNAL = 1.5; EXPRESSED IN BONE MARROW, SIGNAL = 1.8; EXPRESSED IN BT474, SIGNAL = 2.8
  unsure 143
gacaaccccacaaccagtggcatacctaactaaggaaaccgatgtagtagcaaaaggctggtctcactgtttacaggtagttgtggtggtggccagcttagtatcataggctatcaaaataatacaaggaaaggatctcaccnatctggactactcatgttgtaaatggcatactaggtaccaaaggaaatttatggctatcagacacccacctgcttagataccaagtgctactccttgagggactggtgcttcaaatatgcacatgtgtgaccctcaaccctgctacttttctcccagaggatgtggaaccaatagagcatgactgccaacaaattgtggcccagacttatgccacccgagaggatctcttagaagtccccttagctaatcctgaccttaacctatataccagtggaagtttatttgtggagaatgggatatgaagagcaggttatgccatagtt

SEQ ID NO: 146 - DNA, 477 bp, Homo sapiens
  MAP TO AC009222.1; EXPRESSED IN HBL100, SIGNAL = 7.7; EXPRESSED IN LUNG, SIGNAL = 8.8; EXPRESSED IN BRAIN, SIGNAL =  10; EXPRESSED IN BT474, SIGNAL = 8.7; EXPRESSED IN PLACENTA, SIGNAL =  11; EXPRESSED IN HEART, SIGNAL = 7.3; EXPRESSED IN ADULT LIVER, SIGNAL = 6.3; EXPRESSED IN HELA, SIGNAL = 6.6; EXPRESSED IN FETAL LIVER, SIGNAL =   8; EXPRESSED IN BONE MARROW, SIGNAL = 9.3
tcagcaggcttgaatttcttctcagaaaatgggtttttcttttctatcacattgtcaggctgcaaattttctgaacttttatgctctgcttcccttttaaacataagttccaattccaaactgtgtctttgtgaataaataaaactgaatgattttaacagcaccctagtcacctcttgaaagctttgctgcttagaaatttttttcaccagataccctaaattatctctctcaagttcaaagttccacagatgtctagggcaggggcaaaatgctgccagcctctttgctaaaacatagcaagaatcaccttttctccagttcccaaaaagatccttatctccatctgagaccacctcagcctggacttcattgtccatatcactatcagaattttggtcaaagccattcaacaagtctataggaagttccaagttttcccacatctgcctgtcttctgagccctccaaatctctc

SEQ ID NO: 147 - DNA, 479 bp, Homo sapiens
  MAP TO AC009223.1; EXPRESSED IN BRAIN, SIGNAL = 8.9; EXPRESSED IN HBL100, SIGNAL =  71; EXPRESSED IN HEART, SIGNAL = 9.1; EXPRESSED IN BT474, SIGNAL =  24; EXPRESSED IN BONE MARROW, SIGNAL =  54; EXPRESSED IN FETAL LIVER, SIGNAL =  35; EXPRESSED IN HELA, SIGNAL =  35; EXPRESSED IN ADULT LIVER, SIGNAL = 6.7; EXPRESSED IN PLACENTA, SIGNAL =  13; EXPRESSED IN LUNG, SIGNAL =  14
ccctgtcacttctctggctctcctctcttgctaagctttgtttcctaattaaaattttctgccactgccatagctactgcttctactggaaccgccatcaccacctttgtttcatggtttggcaaagtattggcctccaccaccataagggccagagcttctgcatccaaagtttcctcccttcatgggtccaaaatttgaagagtgattgttgcaattgccaaaatcattgtagcttccaccacctccaaaattgcttccatcattaccaaatccattatagccatccccactgccaccgtatccactaccactatggctgccaccaaagccaccacaaccattgaagtttcctccatgaccaaagttgtcattcccactgaaaagacctccatgaccaccaccaaagtttccggaacaacttcgacctctttggctggatgaacactagccatctctcactttgacagggctttcct

SEQ ID NO: 148 - DNA, 477 bp, Homo sapiens
  MAP TO AC009233.1; EXPRESSED IN BRAIN, SIGNAL =   9; EXPRESSED IN LUNG, SIGNAL = 7.1; EXPRESSED IN HELA, SIGNAL = 7.7; EXPRESSED IN ADULT LIVER, SIGNAL = 6.8; EXPRESSED IN PLACENTA, SIGNAL = 6.1; EXPRESSED IN BT474, SIGNAL =  11; EXPRESSED IN BONE MARROW, SIGNAL = 6.6; EXPRESSED IN HBL100, SIGNAL =  24; EXPRESSED IN HEART, SIGNAL = 4.8; EXPRESSED IN FETAL LIVER, SIGNAL = 7.9
aagggaataaaagctggctaccccagccagctgcggcaacccactcggatccccttccacactctgaaatctttgttttttcgcttttcacaataaatcttgctgctgcacactatttgggtatgcaccacctttaagagctgtaacacttactgcaaaggtccacagcttcattcttgaagtcagcaagaccacaaactcaccaaaaagaagaaactccagacacatctgaacatctgaaggaataaactccagatatatcatctttaagagctggaacacacatcatgaaggtctgtggcttgattcttgaagtcagtgaaactaagaacccaccggaaggaatcaactccagacacatcttggtgaccgtgaagggacacatcttggtgactgtggcaggacaattgccaagcagtgagtaccatcctacccctttcacttgctattctgtcctatttttccttagaatctggg

SEQ ID NO: 149 - DNA, 485 bp, Homo sapiens
  MAP TO AC009233.1; EXPRESSED IN PLACENTA, SIGNAL =  28; EXPRESSED IN HELA, SIGNAL =  24; EXPRESSED IN HEART, SIGNAL =  11; EXPRESSED IN BONE MARROW, SIGNAL =  26; EXPRESSED IN HBL100, SIGNAL =  79; EXPRESSED IN FETAL LIVER, SIGNAL =  24; EXPRESSED IN ADULT LIVER, SIGNAL =  19; EXPRESSED IN BRAIN, SIGNAL =  20; EXPRESSED IN BT474, SIGNAL =  33; EXPRESSED IN LUNG, SIGNAL =  24
gtttgtgagtgcaccaatcgacactctgtatctagatgctctggtggggccttggagaacctgtgtgtggaaactgtatctaactaatctgatggggacttggagaacctttgtatctagctcagggattgtaaacgcaccaatcagtgccctgacaaaacaggccactgggctctaccaatcaggatgtgggtggggccagataagagaataaaagcaggctgcagagccagcattggcaacccgctggggtccccttccacactgtggaaggtttcttctttcgctctttgcagtaaatcttgctactgctcactctttgggtccacgctgcttttatgagctgtaacactcaccgcgaagatctgcagcttcactcctgagccaagcaagaccacgagcccaccgggaggaaggaacaactccagatgcgctaccttaagagttgtgacaccgcgagggtccgcggcttcattcttgaagtc

SEQ ID NO: 150 - DNA, 470 bp, Homo sapiens
  MAP TO AC009241.1; EXPRESSED IN BT474, SIGNAL = 1.8; EXPRESSED IN BONE MARROW, SIGNAL = 3.5; EXPRESSED IN FETAL LIVER, SIGNAL = 2.7; EXPRESSED IN ADULT LIVER, SIGNAL = 3.5; EXPRESSED IN BRAIN, SIGNAL = 3.5; EXPRESSED IN PLACENTA, SIGNAL = 3.2; EXPRESSED IN HBL100, SIGNAL = 2.9; EXPRESSED IN LUNG, SIGNAL = 3.4; EXPRESSED IN HELA, SIGNAL = 3.5; EXPRESSED IN HEART, SIGNAL =   3
tgagcaaaataaatattgtcagtgtcttaagtcactgaattcagaggttgttggttataccagcagttctcaacctttttggcattagggataggtttcaccgaggacaatttttccatgtaccaggaggaggagcgcagatggtttggggatgaaactgttccacctcagatcatcaggcattggattctcataaggagcgcccaaccgagatccctcgcatgcactgttaatagggttcgtgctcctatgagaatttaatgctgccactgatctgacagaaggcagagctcaggcggtaatgctcactcaccagctgctcaccttctgctgtgcagccggttcctaaaaggcaacaaatcatactggtccacggcccgggagttggggacccctgggttatacagccatagtatctggaacacagccaagaggtaacttgaactaagccttggaaacaagaaactaag

SEQ ID NO: 151 - DNA, 459 bp, Homo sapiens
  MAP TO AC009291.1; EXPRESSED IN BT474, SIGNAL = 6.1; EXPRESSED IN HBL100, SIGNAL = 3.2; EXPRESSED IN HEART, SIGNAL = 2.4; EXPRESSED IN PLACENTA, SIGNAL = 2.1; EXPRESSED IN BRAIN, SIGNAL = 2.1; EXPRESSED IN ADULT LIVER, SIGNAL = 1.2; EXPRESSED IN HELA, SIGNAL =   2; EXPRESSED IN LUNG, SIGNAL = 1.9; EXPRESSED IN FETAL LIVER, SIGNAL = 2.6; EXPRESSED IN BONE MARROW, SIGNAL = 4.4
  unsure 56
  unsure 72
  unsure 109
  unsure 135
  unsure 136
cgaagatggggtttgtcatctcttagccacaatcatagctctgagtcagattcagnaaaattttaaccaagnaatctgaaggtagaaatacaggaccatggttatcttncctcacttagaaatagatgcacaccnntttgttctctagaaggaggcgagagggaagagatgaatcttcaaggatacctacctctgatacatcatctagatctcatatttttagaagagaatcaaatgaagtggttcaccttgaagcacagaatgatcctcttggagctgctgccaacagaccacaagcatctgcagcatcaagcagtgccacaacaggtggctctacatcagattcggctcaaggtggaagaaatacaggaatatcagggattcttcctggttccttattccggtttgcagtccctccagcacttgggagtaatttgaccgacaatgtcatgatcacag

SEQ ID NO: 152 - DNA, 471 bp, Homo sapiens
  MAP TO AC009300.1; EXPRESSED IN ADULT LIVER, SIGNAL = 2.1; EXPRESSED IN BRAIN, SIGNAL = 3.1; EXPRESSED IN HEART, SIGNAL = 2.4; EXPRESSED IN BONE MARROW, SIGNAL = 2.3; EXPRESSED IN LUNG, SIGNAL = 2.6; EXPRESSED IN HELA, SIGNAL = 2.7; EXPRESSED IN PLACENTA, SIGNAL =   3; EXPRESSED IN BT474, SIGNAL = 2.2; EXPRESSED IN HBL100, SIGNAL = 1.7; EXPRESSED IN FETAL LIVER, SIGNAL = 2.1
ggcaaagaggaagacagcacatattacatggctggaagaggaggaagagagagagaaagcaaatgtgctacacacttttaaaaaaccagatctcatgagaactcactatcacaagaacaggaagggggaagtccaccccacgatccaatcacctcccactaggcccctctttcaacactggggattacaattcaacatgagatttgggtggagacaaaaaccatttttccttcctaggcctctgggcctgtgatgggaggggcttccacaaacgtccctgacatgccctggagacattttccccattgttttggtgattaagattcagcctcttgttacttgtgcaaatttctgcagcaggcatgggcttgaatttctccccaccaagtgcgtttttcttctctatcacatcatcagcctacaaactttccaaacttttatgctctgcttcctcttgaacactttgccact

SEQ ID NO: 153 - DNA, 496 bp, Homo sapiens
  MAP TO AC009300.1; EXPRESSED IN FETAL LIVER, SIGNAL =  93; EXPRESSED IN LUNG, SIGNAL =  43; EXPRESSED IN HELA, SIGNAL =  62; EXPRESSED IN PLACENTA, SIGNAL =  38; EXPRESSED IN BT474, SIGNAL =  94; EXPRESSED IN HEART, SIGNAL =  16; EXPRESSED IN BRAIN, SIGNAL =  26; EXPRESSED IN ADULT LIVER, SIGNAL =  16; EXPRESSED IN HBL100, SIGNAL = 1.4e+02; EXPRESSED IN BONE MARROW, SIGNAL =  39
aaagaacaggtgcccatttaactatgaaaaagatatttgttggtggcattaatgaaaacactgaagaacatcatctaagagattattttgaacagtttggaaatattgaagtgactgaaatcataactgaccaaggcagtgacaaaaaaaaggggctttgcctttgtaacctttgatgaccatgactccatggataagactgtcattcagaaataccatactgtgaatggccacaactgtgaagttaggaaagccctgtcaaagtgagagatggctagtgttcatccagccaaagaggtcgaagttgttccggaaactttggtggtggtcatggaggtcttttcagtgggaatgacaactttggtcatggaggaaacttcaatggttgtggtggctttggtggcagccatagtggtagtggatacggtggcagtggggatggctataatggatttggtaatgatggaagcaattttggaggtggtggaagctacaa

SEQ ID NO: 154 - DNA, 474 bp, Homo sapiens
  MAP TO AC009301.1; EXPRESSED IN PLACENTA, SIGNAL = 7.6; EXPRESSED IN BT474, SIGNAL =  14; EXPRESSED IN HBL100, SIGNAL =  27; EXPRESSED IN LUNG, SIGNAL = 8.8; EXPRESSED IN HELA, SIGNAL =  16; EXPRESSED IN FETAL LIVER, SIGNAL =  19; EXPRESSED IN HEART, SIGNAL = 7.4; EXPRESSED IN BONE MARROW, SIGNAL =   9; EXPRESSED IN ADULT LIVER, SIGNAL = 3.7; EXPRESSED IN BRAIN, SIGNAL = 8.3
gatttcaaggttaccgtggggtgatgttccaagcagaggtcacagctatcaggctgtgacattgcaaaacacaggctgggggtttctcacccccaccgatttcctctagaatgttctgtagccgcagtatcacaggacattaataaaatcaattattggataaaaatctctggtctccaaagcttcattttatgctattagcaggagaatgctgtttttaaaaaggaggtaacagagagagagagatcaattactggataagctcaccatggtgcccagatgaacatgcacactggccagcagcccctcttaacctgccacgtgggccaagcccctgcactgctgtctgtggagcctgccctgggccaccctggtcaggtttcccgagtgcaggaggtgcattctactcagtaatgggatgggcagctctcagctcagtgcccttagttagtacccatgcagcttgagacactt

SEQ ID NO: 155 - DNA, 456 bp, Homo sapiens
  MAP TO AF095901.1; EXPRESSED IN PLACENTA, SIGNAL = 1.7; EXPRESSED IN BT474, SIGNAL = 2.7; EXPRESSED IN LUNG, SIGNAL = 1.9; EXPRESSED IN BRAIN, SIGNAL = 1.4; EXPRESSED IN BONE MARROW, SIGNAL = 2.8; EXPRESSED IN HBL100, SIGNAL = 3.3; EXPRESSED IN FETAL LIVER, SIGNAL = 2.4; EXPRESSED IN HELA, SIGNAL = 2.5; EXPRESSED IN ADULT LIVER, SIGNAL = 1.5; EXPRESSED IN HEART, SIGNAL = 1.6
cccactgagtttttgtgttggtatttcatagctgagggtagagcctgaggagaagtgttgtttgaaataatccgaatttctctgctgatatccattaggttatcaaaaccagagatgacttacagagctttacacacagacatgcctataaatgggaggatgagagtgataggtgggcaaggggctgtgagagggactaattagccttcatatatcctaatcccccatttttgtatctcatggtcatccctgtagaccggacaggaacatgagcttatcgagagcatgcccctgttggaatggtttgctaacaactataaaaaatttggagctacgttggaaattgtcacagataaatcacaagaagggtctcagtttgtgaaaggatttggtggaattggaggtgagtagcaaatcagcaaaccaaacttaaaaccagggtctcaggtcaaggtc

SEQ ID NO: 156 - DNA, 497 bp, Homo sapiens
  MAP TO AF111168.2; EXPRESSED IN PLACENTA, SIGNAL =  13; EXPRESSED IN BT474, SIGNAL = 0.85; EXPRESSED IN BONE MARROW, SIGNAL = 0.92; EXPRESSED IN HBL100, SIGNAL = 0.82; EXPRESSED IN FETAL LIVER, SIGNAL = 0.75; EXPRESSED IN LUNG, SIGNAL = 0.92; EXPRESSED IN ADULT LIVER, SIGNAL = 0.96; EXPRESSED IN BRAIN, SIGNAL =   1; EXPRESSED IN HELA, SIGNAL = 0.97; EXPRESSED IN HEART, SIGNAL = 1.4
agggagtaacctcctgggtcctgggaggcgtggcattccctggggtcagggctgctggctcagtgacagtccaacatccatgttggtgtagctctgcctgcaggtgggttctggggagcagtcgtgcctcctcctcttccctcagaggcctaggatctggggaggctgaagcctgaggaagagagagggaaggtgaggtgacaggttagggcttacccaacagggacccagaaaaggctggccaggcagagccaggagctgctggcccttctgtagctctcacctgggtatcagggttaggggtactcaaggttgtgttggccaatcccggcagcttctgcagctccagccgcaacggagtaacctctggggtcctgggaggggtggcgttgcctggggtcatggctgctggctcagtgacagtccagcatccatgttggtgtggctctgcctgcaggtgggttctggggagcagtggtgcctcctcctcttccttc

SEQ ID NO: 157 - DNA, 450 bp, Homo sapiens
  MAP TO AF111169.2; EXPRESSED IN HELA, SIGNAL =  12; EXPRESSED IN BT474, SIGNAL =  15; EXPRESSED IN ADULT LIVER, SIGNAL = 5.5; EXPRESSED IN HEART, SIGNAL = 3.6; EXPRESSED IN PLACENTA, SIGNAL = 5.6; EXPRESSED IN FETAL LIVER, SIGNAL =  18; EXPRESSED IN LUNG, SIGNAL = 8.3; EXPRESSED IN BRAIN, SIGNAL =   3; EXPRESSED IN BONE MARROW, SIGNAL =  19; EXPRESSED IN HBL100, SIGNAL =  38
tgatgtgtggactctccaggtgacagggattttttttttttagagagaaaatgctcttttttttttttagttcccaagttttattcaagaactcatacaaaatattccagataaatgaaatttaatcctcttcttcatcctggttaatctagaagtaatgtaattcgtaactctctttgctgttagcaagtatgcgcaaccagtcacatagattatttttcttcaaatttttttggtgagatacttcaaataccttttggagaaagtcaccttggatgtcacagtgatcttgctcttgctcctttcgttggtcaccacccctccaccaaggttcccagcttttccattcactttgatcctttcttgcaaaaactgctcaaaattggcagcatccatgattccatcttctacagggtgggtgcaatcaagagtgaacttcagaaccttctt

SEQ ID NO: 158 - DNA, 471 bp, Homo sapiens
  MAP TO AF118808.1; EXPRESSED IN FETAL LIVER, SIGNAL = 1.2; EXPRESSED IN LUNG, SIGNAL = 0.87; EXPRESSED IN PLACENTA, SIGNAL =   1; EXPRESSED IN HEART, SIGNAL = 1.1; EXPRESSED IN BRAIN, SIGNAL = 1.2; EXPRESSED IN ADULT LIVER, SIGNAL = 1.4; EXPRESSED IN HELA, SIGNAL = 0.94; EXPRESSED IN HBL100, SIGNAL = 6.3; EXPRESSED IN BONE MARROW, SIGNAL = 0.74; EXPRESSED IN BT474, SIGNAL = 4.1
ggaatcccagagagcaaaatcagaagatcatgtaaggaatatttttaaggaaactgaagagatgagtaaaactgagggaaagttagagaattgctggagaaaatatgcagtagaaggagttaagaactcattctcccagaagagcaatttcagagaaattaccatgaggtatgtgaaaaccctctctagagagaatggccagaagttcaatgctgttggagaaaactgcattacagactcaaatcctgccaaacatcttagagggtctagagaggagagtctccatccaagtgtgtcaagtgtagaaaacttgcaacaacatgaggacctcattaacctccagagtttccaattaggagaaagagcctatcagacagatgtgttagtgaaagtgcccagacagagctcagttcttagtgagaatcagaggatgaataatccagagagatggtttgagagtactgggtgtgg

SEQ ID NO: 159 - DNA, 471 bp, Homo sapiens; identical to SEQ ID NO: 158
  MAP TO AF118808.1; EXPRESSED IN FETAL LIVER, SIGNAL = 0.84; EXPRESSED IN HEART, SIGNAL = 1.2; EXPRESSED IN BRAIN, SIGNAL = 0.88; EXPRESSED IN PLACENTA, SIGNAL = 0.79; EXPRESSED IN BT474, SIGNAL = 3.8; EXPRESSED IN BONE MARROW, SIGNAL = 1.2; EXPRESSED IN HBL100, SIGNAL = 1.4; EXPRESSED IN LUNG, SIGNAL = 0.7; EXPRESSED IN HELA, SIGNAL = 0.75; EXPRESSED IN ADULT LIVER, SIGNAL = 0.98

SEQ ID NO: 160 - DNA, 482 bp, Homo sapiens
  MAP TO AF118808.1; EXPRESSED IN BT474, SIGNAL = 7.1; EXPRESSED IN FETAL LIVER, SIGNAL = 2.4; EXPRESSED IN PLACENTA, SIGNAL = 2.4; EXPRESSED IN BONE MARROW, SIGNAL = 2.4; EXPRESSED IN HBL100, SIGNAL = 6.7; EXPRESSED IN LUNG, SIGNAL = 2.6; EXPRESSED IN HELA, SIGNAL = 3.9; EXPRESSED IN ADULT LIVER, SIGNAL = 2.4; EXPRESSED IN BRAIN, SIGNAL = 5.4; EXPRESSED IN HEART, SIGNAL =   3
gaagccctatgtgtgcagtgtatgtgggaaggccttcagccagagctcagtccttagtaaacacaggagaattcacacaggtgagaagccctatgagtgtaatgagtgtggaaaagcctttagagtgagctcagatcttgctcagcatcacaagatacatacaggagagaagcctcacgaatgtcttgagtgtcggaaagccttcactcaactctcacatctcattcagcaccagcggatccacacgggagaaaggccatatgtgtgtccgttgtgtgggaaagccttcaaccatagcactgttctgcggagccaccagagggtacacactggggagaagcctcacaggtgcaatgagtgtgggaaaaccttcagtgtgaagaggacactgctgcagcaccagaggatccacaccggggagaacccctacacgtgcagcgagtgtgggaaggccttcagcgaccgctcagtcctcattcagc

SEQ ID NO: 161 - DNA, 467 bp, Homo sapiens
  MAP TO AF118808.1; EXPRESSED IN PLACENTA, SIGNAL = 4.7; EXPRESSED IN BONE MARROW, SIGNAL = 1.6; EXPRESSED IN FETAL LIVER, SIGNAL =   2; EXPRESSED IN LUNG, SIGNAL = 1.3; EXPRESSED IN HELA, SIGNAL = 2.3; EXPRESSED IN BRAIN, SIGNAL = 1.4; EXPRESSED IN HEART, SIGNAL = 1.5; EXPRESSED IN BT474, SIGNAL = 3.9; EXPRESSED IN HBL100, SIGNAL = 3.8; EXPRESSED IN ADULT LIVER, SIGNAL = 1.6
acagctcagccctcattcagcaccagggcgtgcacacaggcgacaagccctacgcctgccacgagtgtgggaagacctttggtcgcagctccaacctcatccttcaccagcgagtccacactggagagaagccctatgaatgtactgaatgtggaaaaaccttcagccagagctcaaccctcattcagcatcagaggattcataatgggctgaagccccatgaatgtaaccagtgtggtaaagccttcaaccgaagctcaaatctcattcaccaccagaaagttcatactggggaaaaaccctacacctgtgttgaatgtggtaagggcttcagccaaagctcacacctcattcagcatcagataatccacacgggcgagcgcccctacaaatgcagtgagtgtgggaaagccttcagtcagcgttcggtcctcatccagcaccagaggattcacactggggtgaag

SEQ ID NO: 162 - DNA, 475 bp, Homo sapiens
  MAP TO AF165138.1; EXPRESSED IN BT474, SIGNAL = 0.86; EXPRESSED IN HBL100, SIGNAL = 0.69; EXPRESSED IN BRAIN, SIGNAL = 1.2; EXPRESSED IN PLACENTA, SIGNAL = 0.89; EXPRESSED IN BONE MARROW, SIGNAL = 2.5; EXPRESSED IN FETAL LIVER, SIGNAL = 1.2; EXPRESSED IN LUNG, SIGNAL = 1.5; EXPRESSED IN HELA, SIGNAL = 0.83; EXPRESSED IN ADULT LIVER, SIGNAL = 1.1; EXPRESSED IN HEART, SIGNAL = 1.2
tttcactgcattttctcaacatcaatctctattgtcactgctaaatactattaaggtatagtccaagggatattatatcaagacttgtccttgcataaaaaagtaataaaagagaaataagagctcttctaggaaaacaggttttcctttgcttgcaagacttgtatttttaagcaatgcaacacaaatactgatccactcccttcggtgtttccatttacatgcttccaaaagcaaacagaacacagatttgctcacctgcagatgaatcctctctaggaactcctgcagagtcttggattttttgctgttactccttcggtttgcctttattttcttgggggctgcttcctcttctgagatgacatccacataaatgaatttgaagtttcccactttattgttcaacattcctgtccacatccccattggtgttttgcaaataatgtctatgatgtctcctttctaagggcaa

SEQ ID NO: 163 - DNA, 450 bp, Homo sapiens
  MAP TO AJ239321.2; EXPRESSED IN HBL100, SIGNAL = 2.8; EXPRESSED IN FETAL LIVER, SIGNAL = 2.9; EXPRESSED IN LUNG, SIGNAL = 2.6; EXPRESSED IN HELA, SIGNAL = 2.7; EXPRESSED IN BRAIN, SIGNAL =   4; EXPRESSED IN BT474, SIGNAL = 3.4; EXPRESSED IN PLACENTA, SIGNAL = 4.2; EXPRESSED IN HEART, SIGNAL = 2.6; EXPRESSED IN ADULT LIVER, SIGNAL = 2.7; EXPRESSED IN BONE MARROW, SIGNAL = 3.9
cagccagcttgaatttctcctcagaaaatgggtttttcttttctatcacatcatcaggctacaaatttaccaaacttgtatgatctgcttcccttttaaacataaatttcaactccaaaccatacctttctgaataaatgaaactgaatgtttttaacagtacccaagtcacttcttgaatgctttgctccttagaaatttattgcaccagatgccctaaatcatctctctcaagttcaaagttccacaaatctttagggcaggggaaaaatgctgccagtctctttgctaaagtataacaagagtcacctttgcttcagttcccaacaagttcctcatctccatctgagaccacttcagcctggactttattgtccatatcactatcagtattttggtcagagccattcaataagtctctaggaagttccaaactaccatgttgttttt

SEQ ID NO: 164 - DNA, 470 bp, Homo sapiens
  MAP TO AJ239321.2; EXPRESSED IN BONE MARROW, SIGNAL =  14; EXPRESSED IN ADULT LIVER, SIGNAL = 8.3; EXPRESSED IN BRAIN, SIGNAL =  30; EXPRESSED IN PLACENTA, SIGNAL =  27; EXPRESSED IN BT474, SIGNAL =  57; EXPRESSED IN HBL100, SIGNAL =  15; EXPRESSED IN FETAL LIVER, SIGNAL =  24; EXPRESSED IN LUNG, SIGNAL =  17; EXPRESSED IN HELA, SIGNAL = 7.3; EXPRESSED IN HEART, SIGNAL =  18
ctggagacaaaccctacaaatgtaaagattgtggcaaaatttttaagtggtcttcgaaccttactatacatcagagaattcatagtggagagaaaccctacaaatgtgaagaatgtggcaaagcctttaagcaatcttcaaaactgaatgaacatatgagagctcatactggagagaaattctacaaatgtgaagaatgtggcaaagcttttaagcacccttcaggccttactctacataagagaattcatactggagagaacccttacaaattcgaagaatgtgataaagccttttattgggttttaagctttactaaacatatgataattcataggggagagaaaccctacaaatatcaagaatgtggcaaagcttttaagtggtcttcaaaccttactatacacaagagaattcatacgggagagaaaccctgcaaatgtgaagaatgtggcaaagcttgtaagcag

SEQ ID NO: 165 - DNA, 473 bp, Homo sapiens
  MAP TO AL020993.1; EXPRESSED IN BT474, SIGNAL = 8.4; EXPRESSED IN HELA, SIGNAL = 7.1; EXPRESSED IN ADULT LIVER, SIGNAL = 1.9; EXPRESSED IN PLACENTA, SIGNAL = 2.9; EXPRESSED IN BONE MARROW, SIGNAL = 1.4; EXPRESSED IN HBL100, SIGNAL = 8.8; EXPRESSED IN FETAL LIVER, SIGNAL = 4.5; EXPRESSED IN LUNG, SIGNAL = 5.1; EXPRESSED IN BRAIN, SIGNAL = 4.6; EXPRESSED IN HEART, SIGNAL = 3.6
agtccagctttggcattagctaagctgcatgaccttaagcaacccatgttaaacctctgagcctgtatcttccagcctgcaccaacagggcggaggaggaagcagggccagggaaggcgcccggcacacacagcttggcttacgaaggggaagacccgactgtgcaaggacacggaataagcacgagcttgggggcagacggggtggggactttctcactagaaaagagcctgggggcctccatcagggtagggggtgagagggctccagagagctgggccccagccagtggccccgggtgcacactgctccaggcctggctccctcaccaatgcccaggtgcgtgttgatggaagcgtagcgggccgtgccggtcaggttcttgttttcccggtagggaatgtgctggtgggtgcgggcgtcccggtacttcttggccaggccgaagtcgatgatgtagaccaggttgccct

SEQ ID NO: 166 - DNA, 473 bp, Homo sapiens; identical to SEQ ID NO: 165
  MAP TO AL020993.1; EXPRESSED IN FETAL LIVER, SIGNAL = 2.8; EXPRESSED IN HELA, SIGNAL = 6.7; EXPRESSED IN HEART, SIGNAL = 2.3; EXPRESSED IN PLACENTA, SIGNAL = 2.7; EXPRESSED IN BT474, SIGNAL =   7; EXPRESSED IN BONE MARROW, SIGNAL = 1.7; EXPRESSED IN HBL100, SIGNAL = 8.4; EXPRESSED IN LUNG, SIGNAL = 3.2; EXPRESSED IN ADULT LIVER, SIGNAL = 1.4; EXPRESSED IN BRAIN, SIGNAL = 4.7

SEQ ID NO: 167 - DNA, 468 bp, Homo sapiens
  MAP TO AL023513.1; EXPRESSED IN LUNG, SIGNAL = 0.68; EXPRESSED IN ADULT LIVER, SIGNAL =   1; EXPRESSED IN HEART, SIGNAL =   1; EXPRESSED IN PLACENTA, SIGNAL = 1.4; EXPRESSED IN HELA, SIGNAL = 0.62; EXPRESSED IN FETAL LIVER, SIGNAL = 0.75; EXPRESSED IN HBL100, SIGNAL = 0.68; EXPRESSED IN BONE MARROW, SIGNAL = 0.69; EXPRESSED IN BT474, SIGNAL = 0.63
ctgggtcaccttggtgaaagtttgggaaccctggcactagcccctggaaaaacagtaaggtataaacagatatgacccacattctcatggagcctggggcctatttggaaaggagggtggagagacaggtctatgaaggaaatcacaatgaatcgtcagcaccacctcctccaggaagtcctccctgatttcctaggccgggttgtgtttctgtcctcagaattcccatggaacctacagtgacatctgtcaccacagctgctgcagtttattgaaatgatctgtttatatgtttgtagaatcacattccctagagtaagaaagagaaagaattttaaaatatatatatagaataaacacataactcacctgctaggattgtctccagttgatccttgaatcccccaagcccaggaggctcgacaaatgatgttactattactgtcgttgatattgttagcaaaatga

SEQ ID NO: 168 - DNA, 444 bp, Homo sapiens
  MAP TO AL023913.5; EXPRESSED IN HBL100, SIGNAL =  44; EXPRESSED IN BRAIN, SIGNAL =  11; EXPRESSED IN BT474, SIGNAL =  43; EXPRESSED IN BONE MARROW, SIGNAL =  12; EXPRESSED IN HELA, SIGNAL =  27; EXPRESSED IN ADULT LIVER, SIGNAL =  12; EXPRESSED IN PLACENTA, SIGNAL =  12; EXPRESSED IN FETAL LIVER, SIGNAL =  28; EXPRESSED IN LUNG, SIGNAL =  12; EXPRESSED IN HEART, SIGNAL =  17
taggggaggaccatgtgaagatggaggcagagattggagttgtgcagctacaagccaagggatgcctggagacatcagaaactagaagagagcttttcacaagatggtgccaaagatgaagaaggaagcttccgtccctcctaaagccaaggccaaagcaaaggctttgaaggccaagaaggcagtgctgaaaggtgtccacagccacatacacacacacataaagaaaatctgcacgacccccgcccaccaagacactgtgacttcagaggcagcccaaatatcctcgaaagagcacccccaggagaaacaagcttggccactatgtcatcatcaagtttctgctgaccactgagtctcccatgaagaagacagaagacaacagcacacctgtgttcattgtggatgttaaagccaacaagcaccagatcaaacaggctgtga

SEQ ID NO: 169 - DNA, 454 bp, Homo sapiens
  MAP TO AL023913.5; EXPRESSED IN FETAL LIVER, SIGNAL = 1.2; EXPRESSED IN LUNG, SIGNAL = 1.5; EXPRESSED IN PLACENTA, SIGNAL = 1.3; EXPRESSED IN BT474, SIGNAL = 1.4; EXPRESSED IN BONE MARROW, SIGNAL = 1.3; EXPRESSED IN HBL100, SIGNAL = 1.5; EXPRESSED IN ADULT LIVER, SIGNAL = 1.7; EXPRESSED IN BRAIN, SIGNAL = 2.6; EXPRESSED IN HEART, SIGNAL = 1.2; EXPRESSED IN HELA, SIGNAL = 1.8
catatttgaccccttggcagctttgacgtatgcagtaaatttattcacttttcccatcttctagcatcctttctactaccttaattttaaggaataagtttgttgttactattgtgccttagaataacttccaaaagccactggctacttatagagcctgttctcaggcttgtgaaaaggttaaagaactactcatatttactgtcatcactgttcttgctccttaattgctctcaccaaacctccagagatgcttttatggataaaattatctgacagccaaccaaggcaaccaggatgaatgtatctgcattgctactatgtggacatagagagaggtggaggaggtggcagaggtgatggaagtgatgatgatgatgttggcagaggagatggatggtcaggtggtggtggtgatggtggcagtgggagcggtggtggtgatggaggtgat

SEQ ID NO: 170 - DNA, 463 bp, Homo sapiens
  MAP TO AL031121.5; EXPRESSED IN HELA, SIGNAL =   3; EXPRESSED IN HEART, SIGNAL =   3; EXPRESSED IN BT474, SIGNAL = 2.3; EXPRESSED IN ADULT LIVER, SIGNAL = 2.8; EXPRESSED IN BRAIN, SIGNAL = 3.5; EXPRESSED IN PLACENTA, SIGNAL = 2.6; EXPRESSED IN BONE MARROW, SIGNAL = 3.3; EXPRESSED IN HBL100, SIGNAL = 2.2; EXPRESSED IN FETAL LIVER, SIGNAL =   5; EXPRESSED IN LUNG, SIGNAL = 3.5
tctggctgtactgaattccatcctctgttatctacccaagaagttaatttctataattattccactttctactgcaattttcatgctagaaataaattcctttttgcccccacatccccttatgggtattgcctcttctctgcttctctcttcaacagaactccttccaagggctatgagtgctttccatggccacgtcctcaacactgaccccgtcccctctgcaacccactccagttatcttctgtctccttctctccattgaaatgcctcatgtcagggcccctggcagccttggtgttgccaaacccaaggtcctgttctttgtcctcctcttactcaaactcccagcaacactcaccccaaccatctgctctgataacagccttgtccacctgctcctccagctcctcccagctcacaggtcgctccctcatctcctgggctggctcctcctccctct

SEQ ID NO: 171 - DNA, 460 bp, Homo sapiens
  MAP TO AL031122.3; EXPRESSED IN BONE MARROW, SIGNAL = 3.9; EXPRESSED IN HBL100, SIGNAL =   3; EXPRESSED IN LUNG, SIGNAL = 2.7; EXPRESSED IN ADULT LIVER, SIGNAL = 1.8; EXPRESSED IN HEART, SIGNAL = 1.6; EXPRESSED IN PLACENTA, SIGNAL =   2; EXPRESSED IN BT474, SIGNAL = 2.1; EXPRESSED IN FETAL LIVER, SIGNAL = 2.2; EXPRESSED IN HELA, SIGNAL = 2.4; EXPRESSED IN BRAIN, SIGNAL = 1.7
tcacatgactcttacttaatcaaaacctagaaatgattaagcttagtgaggaaggcatgttgaaagtcgagagaggccaaaagctagtcctcttgcatcagttagccaacttggaaatgcaaaggataagttcttgaagaaaattaaaagtgctactccagggaacacacaaatgataagcaaaggagccttaatgctcatgtggagaaagttttagtggtgtggatagaagatgaagccagccacaacattcccttaagccaaagcctaatccagagcaaggccctaagtcttcaattacatatacaggctcagagaggtgaggaagctgcagaagaaaattggaagctagcagagtttggtccagaggttttaaggaaagaagctgtctccataacagaaaagtgcaaggtaaagcagcgagtgctgatatagaagctgcagcaagttatcccgaaga

SEQ ID NO: 172 - DNA, 451 bp, Homo sapiens
  MAP TO AL031431.8; EXPRESSED IN FETAL LIVER, SIGNAL = 3.5; EXPRESSED IN LUNG, SIGNAL = 3.6; EXPRESSED IN HELA, SIGNAL = 3.2; EXPRESSED IN ADULT LIVER, SIGNAL = 2.9; EXPRESSED IN BT474, SIGNAL = 3.3; EXPRESSED IN PLACENTA, SIGNAL = 4.3; EXPRESSED IN HEART, SIGNAL = 2.9; EXPRESSED IN BRAIN, SIGNAL = 3.6; EXPRESSED IN HBL100, SIGNAL = 3.4; EXPRESSED IN BONE MARROW, SIGNAL = 3.9
ttagactatggctcccaccctgagactgcattgcctgtgacgtgcattagaaatgcctgttttcaggctcatccacacctctccgagactgactcaggatgaggcccaggtgggtattttgacagagcttctcaggggattataaggattcccagcctgttggagagctactgtcctagaatttagatctagtatttagatccccactgtcttactcttctctgagtcaggactccacaagaacctgacaagtcttcccaatttatttgcaagttgggggtggatttagggtacctacatcatagcatttttttccccaaacatctgagcaaattgcattatttctcgggtttctagaagtactgccacatccgcctggcaggctccaaggatccccgggcctatttcaagaccaagacatggtggctgggcctgttcctgatgcttctgg

SEQ ID NO: 173 - DNA, 493 bp, Homo sapiens
  MAP TO AL031671.11; EXPRESSED IN PLACENTA, SIGNAL = 4.4; EXPRESSED IN BT474, SIGNAL = 3.9; EXPRESSED IN BONE MARROW, SIGNAL = 5.9; EXPRESSED IN HBL100, SIGNAL = 4.2; EXPRESSED IN FETAL LIVER, SIGNAL = 4.5; EXPRESSED IN HELA, SIGNAL = 5.1; EXPRESSED IN ADULT LIVER, SIGNAL = 2.9; EXPRESSED IN LUNG, SIGNAL = 5.8; EXPRESSED IN HEART, SIGNAL = 3.8; EXPRESSED IN BRAIN, SIGNAL = 4.9
caggcctctctatttcctgagacataacaatattaaaattaggccaattaataactccacaatggtctctacgtgttcaagtgataggaagggttctatgtctctcactttaaatgaaaagctggaaatgattacagttaggaaggcatgtcaacagcaaagatatgccaaaagctaggcctcttgtgccagttagccaagatatgaatgcaaaggaaaagttgttgagggaaattaaaagtgctactctagtgaacacatggatgataagaaagcaaaacaaccttattgctgatatggagaaaattttagtggtctgggcagaagatcaaactagccaccacattcccttaagccaaaaacctaaccagagaaaggctctagctccctccaatattatgaaggctgaaagaggtgagaaagctgcagaagaaaagttggaagttagcagaaattatttcatgaggtttaaagaaagaagccatctccgtaa

SEQ ID NO: 174 - DNA, 448 bp, Homo sapiens
  MAP TO AL034371.16; EXPRESSED IN HBL100, SIGNAL = 9.7; EXPRESSED IN BRAIN, SIGNAL =   6; EXPRESSED IN PLACENTA, SIGNAL = 6.8; EXPRESSED IN HEART, SIGNAL = 4.3; EXPRESSED IN ADULT LIVER, SIGNAL = 2.9; EXPRESSED IN HELA, SIGNAL = 4.3; EXPRESSED IN LUNG, SIGNAL = 5.1; EXPRESSED IN FETAL LIVER, SIGNAL = 4.2; EXPRESSED IN BONE MARROW, SIGNAL = 4.9; EXPRESSED IN BT474, SIGNAL = 6.3
acatggtaaaagggggaaggcagctctctcaggcctctgttatgaggtactagtaccacgaatgagggcttgggcctcatgaacgaaccacctcttaaaggccccacctccttagaccatcacattgggagtcaggatttcaacattggagttttggggcaacacagaccatagaagtggtagactgctgcctttgagaactaatccttgctttccttaccacactgcaggtgagctgatcaaccttgccatgtactgtgagaggataaggaggaaattttggccagagtggcaccacgatgatgacaataccatctatgagtctgaggagagcagcgaaggcagcaaaacccacaccccgctgctggattttagcttttactcaaggacagagacctttgaagatgagggagcagaaaacagtttttccagaaccccagacacagat

SEQ ID NO: 175 - DNA, 467 bp, Homo sapiens
  MAP TO AL034402.9; EXPRESSED IN PLACENTA, SIGNAL =  36; EXPRESSED IN BONE MARROW, SIGNAL = 1.5e+02; EXPRESSED IN ADULT LIVER, SIGNAL =  34; EXPRESSED IN BRAIN, SIGNAL =  44; EXPRESSED IN HEART, SIGNAL = 1.2e+02; EXPRESSED IN BT474, SIGNAL = 1.3e+02; EXPRESSED IN HBL100, SIGNAL = 1.3e+02; EXPRESSED IN FETAL LIVER, SIGNAL =  46; EXPRESSED IN LUNG, SIGNAL =  68; EXPRESSED IN HELA, SIGNAL =  77
tccatcaccagtccacacccactgccagatcaccatgaatgatgatatcactgctctcgtcttcaacaaaggctctggcatgtgcaaggctgccttcatgggcgatgatgccccccagttgtcttcccctccatcatgtggtgcccgtggcaccagggcgtgatgctgggcatgggtcagaaggactcctacatgagcgatgaggtccagagcaagagaggcatcctgaccccaccctgaaatgccccatggagcacagcattgtcaccaaatgggatgacatggagatctggcaccataacttttacaacaagctatgtgcggctcccgaggagcaccccatgctgctgaccgaggcccccctgagccccaaggccaaccatgagaagatgacccagatcatgtttgagactttcaatgccccagccatgtacttgaccatccaagctggtatgcctctggcagta

SEQ ID NO: 176 - DNA, 480 bp, Homo sapiens
  MAP TO AL034402.9; EXPRESSED IN ADULT LIVER, SIGNAL =  48; EXPRESSED IN BRAIN, SIGNAL =  13; EXPRESSED IN HEART, SIGNAL = 1.1e+02; EXPRESSED IN BT474, SIGNAL = 2.6e+02; EXPRESSED IN BONE MARROW, SIGNAL = 3.2e+02; EXPRESSED IN HBL100, SIGNAL = 2.6e+02; EXPRESSED IN FETAL LIVER, SIGNAL = 1.1e+02; EXPRESSED IN HELA, SIGNAL =  75; EXPRESSED IN PLACENTA, SIGNAL =  56; EXPRESSED IN LUNG, SIGNAL = 1.2e+02
atcaccctggacttcgagcaggagatggccactgcagcctctagctcctccctggagaagagctaggagctgctcaacggccaggtcatcaccatcagcaaccagtggttccactgccccagtacctcttccagccttccttcctgggcatggaatcctatggcatccacgaaactaccttcacctccatcatgaagtgtgatgtggacatctgcaaagacctgtacgccaatacagtgctgtctggcggcactaccatgtaccctggcattgccgacaggatgcagaaggagatcactgtcctgacttccagcacagtaaagatcaagatcattgctcctcctgtgcataaatactctgtgtgtttcgatggctccatcctggcctccctgtccacctcccagcagatgtggatcagcaagcaaaaataccaagaggccggccccttcatcacccacagcaagtgcttctaggcggact

SEQ ID NO: 177 - DNA, 460 bp, Homo sapiens
  MAP TO AL034402.9; EXPRESSED IN BONE MARROW, SIGNAL = 9.3; EXPRESSED IN HBL100, SIGNAL =  21; EXPRESSED IN PLACENTA, SIGNAL = 7.2; EXPRESSED IN FETAL LIVER, SIGNAL = 9.1; EXPRESSED IN HELA, SIGNAL =  10; EXPRESSED IN ADULT LIVER, SIGNAL = 9.7; EXPRESSED IN BRAIN, SIGNAL = 7.7; EXPRESSED IN BT474, SIGNAL = 9.8; EXPRESSED IN HEART, SIGNAL = 4.3; EXPRESSED IN LUNG, SIGNAL =  11
aatcagcgctctgtgtctagctaaatgtttgtaaacgcaccaatcagcactctgtcaaaacggaccaatcagcactctgtaaaatggacaaatcagctctctgtaaaatgggccaatcagcaggatgtgggtggggccaaataagggaataaaagcaggccaccagagccagcagcagcaacctgctctgggtcccattctgtactgtggaagctttgttctttggctcttcacaataaatcttgctactgctcactgtttgggtctgcgctccctttatgagctgtaacgctcaccgtgaaggtctgcagcttcactcctgaagccacagaaaccatgaacccaccaggaggaatgaacaactccggacgcatcacctttaagagctataacactcaccgcaaatgtctgcagcttcactcctgacgtcagcgagaccacaaacccaccagaaggaaga

SEQ ID NO: 178 - DNA, 360 bp, Homo sapiens
  MAP TO AL034403.17; EXPRESSED IN BONE MARROW, SIGNAL = 2.6; EXPRESSED IN ADULT LIVER, SIGNAL = 1.6; EXPRESSED IN BRAIN, SIGNAL = 1.8; EXPRESSED IN PLACENTA, SIGNAL = 2.3; EXPRESSED IN HELA, SIGNAL = 2.2; EXPRESSED IN LUNG, SIGNAL = 2.3; EXPRESSED IN FETAL LIVER, SIGNAL = 2.6; EXPRESSED IN HBL100, SIGNAL = 2.5; EXPRESSED IN BT474, SIGNAL = 2.7; EXPRESSED IN HEART, SIGNAL = 2.5
aatacagtcatgtgccgcagaagaatgacttggttaaagactgtccacatatacgattgtggtcccgtaagattatagtaccacatttttactgtaccttttctatgtttggatacacaaatgcattggaacctggaacaacatgggtttgaactgcatgggtctatttatatgtggattttttcaataaaagttacactgagtgttcctgcctctcctgcctccccttccacctcctccacctcttctgcctctgccacctctgagacagcaagaccaaccctttcctcttcctcctcctcctgagcctgttcaatgtgaagacaaggaggatgaagacctctatgataatccaagggc

SEQ ID NO: 179 - DNA, 475 bp, Homo sapiens
  MAP TO AL034553.12; EXPRESSED IN PLACENTA, SIGNAL = 2.4; EXPRESSED IN BT474, SIGNAL = 7.7; EXPRESSED IN BONE MARROW, SIGNAL = 4.4; EXPRESSED IN FETAL LIVER, SIGNAL = 2.9; EXPRESSED IN HELA, SIGNAL = 2.8; EXPRESSED IN ADULT LIVER, SIGNAL = 2.3; EXPRESSED IN BRAIN, SIGNAL =   3; EXPRESSED IN HBL100, SIGNAL = 4.2; EXPRESSED IN LUNG, SIGNAL = 2.9; EXPRESSED IN HEART, SIGNAL =   2
ttccagaagcaagggaaccgatccttggtgggagtcccatgctcttcttgtcttgaggtttgggagcaattagcatcaagggtttggatcggggaaccactacatttgtgtgcccaatcatggcagtgacctgatagcctatacgttcatggtcttcgatgacatgctgtaccaaagcttcataggactttggcatgaaaaggcatcgcttgcagtgaatactactctcttctcgggcattcgagcctaaggggactgccccattgagtgatttttctcctgcctttgctatgtaaggtgctgccacatgctgaaaatgttccctgtaaatgtgcttcctaactatttcataaagaggatctcggtaagtgcacttcttacagtaataaacagcttgctctacactgtcagcctgcttaggtttaaggccatcatttttgtttttatctttgaaagtgctgaggctgctacttgg

SEQ ID NO: 180 - DNA, 490 bp, Homo sapiens
  MAP TO AL035461.11; EXPRESSED IN BT474, SIGNAL = 1.3; EXPRESSED IN BONE MARROW, SIGNAL = 0.97; EXPRESSED IN FETAL LIVER, SIGNAL = 1.7; EXPRESSED IN HELA, SIGNAL = 1.2; EXPRESSED IN PLACENTA, SIGNAL = 0.59; EXPRESSED IN HBL100, SIGNAL = 1.1; EXPRESSED IN LUNG, SIGNAL = 0.96; EXPRESSED IN ADULT LIVER, SIGNAL = 1.3; EXPRESSED IN BRAIN, SIGNAL = 0.81; EXPRESSED IN HEART, SIGNAL = 1.9
ttttctttgggttctttatagctgtaaatacatcactaaccgtatctctaaatgtgtatttgggttcatcccacaaaggggccttgtgaaaataccgagaaataaccagaaggacttgagggggaaagaaaataaatgtgcatttattttaagaccagttgctaatttaaaagcgaaatgtataccagcaaaagaatgagaatgtttgggggtaagaaacagaagacattttgttaacattttatgagagtataattgttattctggtatatcttaagcttcagaatatctgctttgttcctgttatgacatttatatatataaaaaaaaacttctattttcagttggatggatttattgctcgaaactgggccaatcaaagatcagctttgggaagtgctcttgatccacttgctgataaaatacttatcagtatcttatatgttagcttgacctatgcagatcttattccaggtaagaacgcgtcatg

SEQ ID NO: 181 - DNA, 499 bp, Homo sapiens
  MAP TO AL035541.12; EXPRESSED IN BT474, SIGNAL = 0.84; EXPRESSED IN FETAL LIVER, SIGNAL =  20; EXPRESSED IN LUNG, SIGNAL = 0.94; EXPRESSED IN ADULT LIVER, SIGNAL =  19; EXPRESSED IN HEART, SIGNAL = 1.1
ggccaggtggacatttactccactaggacctggtctgtaggagaggggctgccttttttttaatcaggaatctagttggcagagcttttgtgcacacacctcatttaaagcttgggctggcccactaatgtcacaaaattcaagtctgtatggttctgaccattgcattcatcttctcaagagtctgaaactacccgaaggccttcattcacctttctccaccaactcccaggagacgcaggggagccctgcctgcagggtgctgggacaggcagcgggggccgagcttaccagttgtcatacttcttcagccgcctgaggatgccctcttcctccatctggcccagaagccgcccattctcctcctcagagccgtcacagatgtggatgtgatcaggctgacacagctcagcgttattctcgagaaactccctcactgcctggggtaggctgtccaggcttccctggacaactttggccgagaggttcaggccgtttt

SEQ ID NO: 182 - DNA, 456 bp, Homo sapiens
  MAP TO AL035563.18; EXPRESSED IN ADULT LIVER, SIGNAL =  30; EXPRESSED IN BONE MARROW, SIGNAL =  93; EXPRESSED IN BRAIN, SIGNAL = 8.2; EXPRESSED IN HEART, SIGNAL =  12; EXPRESSED IN PLACENTA, SIGNAL =  40; EXPRESSED IN BT474, SIGNAL =  78; EXPRESSED IN HBL100, SIGNAL = 1.1e+02; EXPRESSED IN LUNG, SIGNAL =  53; EXPRESSED IN HELA, SIGNAL =  60; EXPRESSED IN FETAL LIVER, SIGNAL =  84
ggagactggtgctctcaagcctagcgtggatactgcacctttgctcaagtcaacatcacaactgaagtctgctgaaatgcactattaagctttgagtgaagctcttcctggggacacagtgggcttcaatgtcaacaacatgtctgtcaaatatgcttattgtggcaacctggttggtgacagcacaaatgacccatcaatggaagcagctggcttcactgctcaggtgattaccctgaaccatcaaggccaaatcaatactggctgtgccactgtgctggattgtcacatggctcttattgcttgcaagtttgctgagctgatggagaagattggtcaccattctggtgagaaggtggaagatgaacccaaattcttcaaatcgggtgatgccgccattgttgatatggttctgtgtgtagagagcttctctgaccgttttcttctgggtccctt

SEQ ID NO: 183 - DNA, 482 bp, Homo sapiens
  MAP TO AL035603.11; EXPRESSED IN HBL100, SIGNAL =  32; EXPRESSED IN ADULT LIVER, SIGNAL = 7.9; EXPRESSED IN FETAL LIVER, SIGNAL =  27; EXPRESSED IN LUNG, SIGNAL =  20; EXPRESSED IN HELA, SIGNAL =  50; EXPRESSED IN HEART, SIGNAL = 8.3; EXPRESSED IN PLACENTA, SIGNAL = 5.6; EXPRESSED IN BT474, SIGNAL =  27; EXPRESSED IN BONE MARROW, SIGNAL =   8; EXPRESSED IN BRAIN, SIGNAL = 7.5
tcttctagaattttacagtttgaggtgttacatttaaatcttttatccattttgagttaatgtttggctgtttccgtgccgagcgcagccatggctcctggtcccaagaagcatctgaaatgggtggcagctccaaagtactagatgctggatacattgaccagtgtgtttgctcttcatcaatccaccagtcctcacaagcttagagagtgtctccccctcatcattttcctaaggaacagacttaagtatgccctgagaagaaatgaaaaagatttgcatgcagcagttcattaagatagatggcaaggtccaaactgatataacctaccctgctagatttatggatgtcatcagcattgacaagggacacaatttctgtctgatctatgacaccaagggttgctttggtgtacattgtattacacctgaggaggtcaagtacaagttatgcaaagtgagaaaaatcttagtgggcacaa

SEQ ID NO: 184 - DNA, 462 bp, Homo sapiens
  MAP TO AL035652.5; EXPRESSED IN LUNG, SIGNAL = 1.6; EXPRESSED IN HEART, SIGNAL = 1.1; EXPRESSED IN BRAIN, SIGNAL = 1.1; EXPRESSED IN ADULT LIVER, SIGNAL = 1.2; EXPRESSED IN HELA, SIGNAL = 1.3; EXPRESSED IN HBL100, SIGNAL = 2.5; EXPRESSED IN BONE MARROW, SIGNAL = 1.9; EXPRESSED IN BT474, SIGNAL = 1.6; EXPRESSED IN PLACENTA, SIGNAL = 1.7; EXPRESSED IN FETAL LIVER, SIGNAL = 3.5
aagagcagggaggtacatggccaatatgatttcatctgtcttaaatccttaatatccagtagccactgtgggacaggtctgcccatccttaattactatattattggctggagttactgactggtttttaggtcactgaagcaccaagattcctgtacagagctactgagcaaagtacttgttcacaattttcagtctaactaaaacctttaagaaaatttagactttgagaactctaagtctttagcatagaatgatgtgaaattactgatgttaatgttgtgtcataagaaccaagaagaaagttaaatgaaccaatcacaattccagaattctccagaggtttaataaattctgtagtaccagtttctcttccttgctcatctgtttccgagcttccgtctgggctttgaaatactggctcatctgggtaaaatcacatttgcttaggttggtgataat

SEQ ID NO: 185 - DNA, 471 bp, Homo sapiens
  MAP TO AL035652.5; EXPRESSED IN ADULT LIVER, SIGNAL = 1.6; EXPRESSED IN PLACENTA, SIGNAL = 3.4; EXPRESSED IN BONE MARROW, SIGNAL = 2.8; EXPRESSED IN LUNG, SIGNAL = 2.7; EXPRESSED IN HELA, SIGNAL = 1.7; EXPRESSED IN BT474, SIGNAL = 2.8; EXPRESSED IN HBL100, SIGNAL = 3.2; EXPRESSED IN FETAL LIVER, SIGNAL = 3.9; EXPRESSED IN BRAIN, SIGNAL = 3.6; EXPRESSED IN HEART, SIGNAL = 2.9
acaggcagttttcccaacacgacttacataataatctgtcctttccgtatggttttaaatgcatctgtactctcttcgtatgctaaattcccacctatacataggtctgcttctacagtccattctgttcacagtggtggaaaccagtttgagatccaatagatttagaaccagttaatgatttcactagaagttggaaaacttacttcagaaagttactctagagaaattgtttaaagtatttccccccaaatatcaggatattaattttaataactcaatactcttgcttcgtaaggatatgcaataaaaaaggtggcattttaacccagtgctgagatgttaccatttccacttctgttcctcttctttcttcggcttctttttcttgttatctggctcaggaacttttttatctttatctttattcttgggttttttcaatttaccatcctacaaagaaacatggtg

SEQ ID NO: 186 - DNA, 455 bp, Homo sapiens
  MAP TO AL035681.13; EXPRESSED IN PLACENTA, SIGNAL = 1.3; EXPRESSED IN HEART, SIGNAL = 1.1; EXPRESSED IN BONE MARROW, SIGNAL = 2.3; EXPRESSED IN BT474, SIGNAL = 2.6; EXPRESSED IN BRAIN, SIGNAL =   2; EXPRESSED IN ADULT LIVER, SIGNAL = 1.4; EXPRESSED IN HELA, SIGNAL = 2.8; EXPRESSED IN LUNG, SIGNAL = 1.9; EXPRESSED IN FETAL LIVER, SIGNAL = 2.1; EXPRESSED IN HBL100, SIGNAL = 3.8
tgggactggcactaactgtggcccctcattacctatcatcccctcctgagaaagaaagggcagggcacaaagggatgcccaatacaaacatggaaagtgcaggggagcttgctcctgggcaaatgatctctgagcctcattgttagaataggcccaatgatacctcacagagctgctgggacaaataatggagacaatgtagcagaaagagcctgacaaccagtaagagttcagtacactccctctcctcccctggacacaccagtgcacaacttccagaaactcaccatcttctgcagtgttgagtttgaggctcttgcctttgaaactcagctgtcccccggccacctgagtcttggcaagtgtctctgccagcttggcaatgtcttccgaggccatgttgactaggctggtgggctcccctggagatctgcagactgaggaggccaaagttg

SEQ ID NO: 187 - DNA, 469 bp, Homo sapiens
  MAP TO AL035701.13; EXPRESSED IN HEART, SIGNAL = 1.3e+02; EXPRESSED IN PLACENTA, SIGNAL =  58; EXPRESSED IN BONE MARROW, SIGNAL = 3e+02; EXPRESSED IN HBL100, SIGNAL = 2.6e+02; EXPRESSED IN ADULT LIVER, SIGNAL =  68; EXPRESSED IN BRAIN, SIGNAL =  68; EXPRESSED IN BT474, SIGNAL = 3.1e+02; EXPRESSED IN FETAL LIVER, SIGNAL =  92; EXPRESSED IN LUNG, SIGNAL = 1e+02; EXPRESSED IN HELA, SIGNAL = 1.2e+02
ggacagtttcttttcaaaggcttattccagtatcgtgaggctagcatgaggtatatgcatttgccaggggcaaatttatacttctgaattaacccatgcagcaaatgctatgcatctgctcgcagtccatttgcggtggatgatggaggggcccgactcgttgtactcctgcttgctaatccacatctgctggaaggtggacagtgaggccaggatggagccaccgatccacacaaagtacttgcactctgggggcacgatatcttgatcttcatggtgctggatgccagggcagtgatctccttctgcatcctattggggatgccagggtacatggtggtgacgccagacagcactgtgttggcgtacaggtctttggggatgtccatatcacacttcatgatggagttgaaggtactttcatggatgccacaggattccatgcccaggaaggaaggctggaacagtg

SEQ ID NO: 188 - DNA, 450 bp, Homo sapiens
  MAP TO AL035702.7; EXPRESSED IN HBL100, SIGNAL = 1.5; EXPRESSED IN LUNG, SIGNAL = 1.8; EXPRESSED IN HELA, SIGNAL = 2.2; EXPRESSED IN ADULT LIVER, SIGNAL = 5.8; EXPRESSED IN BRAIN, SIGNAL = 2.2; EXPRESSED IN HEART, SIGNAL = 2.2; EXPRESSED IN PLACENTA, SIGNAL = 1.7; EXPRESSED IN BT474, SIGNAL = 1.9; EXPRESSED IN BONE MARROW, SIGNAL = 1.7; EXPRESSED IN FETAL LIVER, SIGNAL = 3.6
gctttccctaatgtttcccccacctgctgctatactatctcatccattcttccatcctggtatttagtctacctataaaactgttgttttgatcaaatctaatactcaaggaccagggacaagggcccatgtcagaccaaaattctatccccaagggtgatgaaggctgggctgtcagagacccaggccctcaggccagtgatctccacattctttgaccccagctgtggtccagatcagtggtcagaccttcatgcgatttgaccaagtgatgacatggtcctcggccctgctgtactgccgcagccaccacacggatctggccgacctgcagatggtgacggatgagacaggcaaggaggccttgagatccatcatgagtgagactgaagcctggattggcctctacctcaatgcaaactccggatctctgagctggtccagtgacct

SEQ ID NO: 189 - DNA, 475 bp, Homo sapiens
  MAP TO AL035702.7; EXPRESSED IN HBL100, SIGNAL = 1.1; EXPRESSED IN ADULT LIVER, SIGNAL =   1; EXPRESSED IN BRAIN, SIGNAL =   1; EXPRESSED IN PLACENTA, SIGNAL = 1.6; EXPRESSED IN HEART, SIGNAL =   1; EXPRESSED IN HELA, SIGNAL = 0.76; EXPRESSED IN LUNG, SIGNAL = 0.92; EXPRESSED IN FETAL LIVER, SIGNAL = 0.94; EXPRESSED IN BT474, SIGNAL = 0.61
catttttaaaaccgagttctcctctaagatttctcaagtaaaccaccaagttttaattttttctaattgttatggttaaagaaaaacagattatcttcataggaagtgcccaaggtctcatatttaggatattttaagagatacagtcaattatcacatttgtactcagtaccacaaggataaaaatggcttttgctgccattccttcagggttctgtggatcatctcaattctttgtcttgctaactagcccacatctgctgccaggtgatgtctaacctgctgatgatgcttttcatctggctatctttttcttcctgctgtcttcggagccgctcctcgctgtcctccagtcgggccttgtattccagcagcagcttctgcatctgctgctcctgcaccagcaagcggcgttcatattcctccagtcgccggctggaaactctcaggcgctccttcagtttagtaatttctt

SEQ ID NO: 190 - DNA, 463 bp, Homo sapiens
  MAP TO AL049540.11; EXPRESSED IN HEART, SIGNAL =  12; EXPRESSED IN PLACENTA, SIGNAL =  20; EXPRESSED IN FETAL LIVER, SIGNAL =  57; EXPRESSED IN ADULT LIVER, SIGNAL =  29; EXPRESSED IN BT474, SIGNAL =  72; EXPRESSED IN BONE MARROW, SIGNAL =  87; EXPRESSED IN HBL100, SIGNAL = 1.8e+02; EXPRESSED IN LUNG, SIGNAL =  21; EXPRESSED IN HELA, SIGNAL =  52; EXPRESSED IN BRAIN, SIGNAL =  12
aaaggtggccttggtgaagtttcccagggtggcagtgcagctgcggcgtagcagtcatagatacccgccatcagcagcagcttttgggcatggggactgagacgatgccagtgcccctgggtgcagggatgaagtgcaccagcacagagccacagtggcctgtcaccttacaagggacggtgtggggcttgccgatcttgctcccccagtagcctctgcacatggggacaatggagagctagcccaggatgatggccccgcggatggcgtggccacctccttggagcacttaacacccagaccgacataccattatagtcaccgatgacaataaatcccttgagcctggtgcgctggctggcgtgggtctgcttttgtactggcatgatcttcaaaacctcatccttgagagaagcccccaggaaaaagtcaatgatctcaaactctttgatggccaggaaga

SEQ ID NO: 191 - DNA, 471 bp, Homo sapiens
  MAP TO AL049540.11; EXPRESSED IN ADULT LIVER, SIGNAL = 1.5; EXPRESSED IN BRAIN, SIGNAL = 1.7; EXPRESSED IN HEART, SIGNAL = 1.7; EXPRESSED IN PLACENTA, SIGNAL = 1.6; EXPRESSED IN BT474, SIGNAL = 1.3; EXPRESSED IN BONE MARROW, SIGNAL = 1.9; EXPRESSED IN HBL100, SIGNAL = 1.9; EXPRESSED IN LUNG, SIGNAL = 1.8; EXPRESSED IN HELA, SIGNAL = 1.8; EXPRESSED IN FETAL LIVER, SIGNAL = 1.4
ctattccccacctctccctcttgtcctacacttgttccatatcactcatttacattacccgcaactatttaagtgtatggcccttgcaataaacatttgctttttatataagaaaagtattccccccatactacatttcactatgtcaggcagcttcaggcttaaaagagaggaacagcctgagaatccttgggccctaacatacctgaagatgacagccatagcctccaagcctaccagatttcccgccaactgcaggctcatgcagcaagaggaggcctggccttgtggtccctctgagttctgatccacagtctcctttgtccttaggcccaactgtgtcaatgtgctggtcaccaccactcaactaattcctgccctggccaaagtcctgctatatggcctggggtctgtgtttcctattgagaacatctacagtgcaaccaagacaggtagggagaagccacacct

SEQ ID NO: 192 - DNA, 458 bp, Homo sapiens
  MAP TO AL049540.11; EXPRESSED IN FETAL LIVER, SIGNAL = 4.7; EXPRESSED IN ADULT LIVER, SIGNAL =   3; EXPRESSED IN BRAIN, SIGNAL = 3.7; EXPRESSED IN PLACENTA, SIGNAL = 3.1; EXPRESSED IN BT474, SIGNAL =  14; EXPRESSED IN BONE MARROW, SIGNAL = 4.3; EXPRESSED IN HBL100, SIGNAL =   3; EXPRESSED IN LUNG, SIGNAL = 4.3; EXPRESSED IN HELA, SIGNAL = 4.3; EXPRESSED IN HEART, SIGNAL = 2.8
gcctgagaagagatcaagggttctgcaaagatcaaaggttcaaaatgcccatggctcaagttttagctatgtgcctgcacactgctcacctgtgtgtaagacacaattgtttttgagtgaaagtgtccagaagccaggcaagctcccttgacaattagccctgagacccctgaagtccacaggggagaccaatgccaagccactgcagcccaggacgggaggcagccccacagggcattacctgactgggtgcaggacttcatgtgctcaggccagtgggcttgctggcaggggtagtcacagtagctagtgttccaacagcagtaaaagatggcctccttcttgcagttggcgcaccactgcttcttcttggtctcatccaccgcctgctgcttctccaactccagctgcttcttcacctcggcgatgagccggtcccgctcctgctccaggctctg

SEQ ID NO: 193 - DNA, 466 bp, Homo sapiens
  MAP TO AL049591.12; EXPRESSED IN PLACENTA, SIGNAL = 1.9; EXPRESSED IN BT474, SIGNAL = 1.9; EXPRESSED IN LUNG, SIGNAL = 2.1; EXPRESSED IN BRAIN, SIGNAL = 2.4; EXPRESSED IN HBL100, SIGNAL = 2.6; EXPRESSED IN FETAL LIVER, SIGNAL = 1.9; EXPRESSED IN HELA, SIGNAL = 4.2; EXPRESSED IN ADULT LIVER, SIGNAL = 1.9; EXPRESSED IN BONE MARROW, SIGNAL = 1.3; EXPRESSED IN HEART, SIGNAL = 1.7
ggaaggaagtcccagtcctcctgcaggttcaggaggcctcgggttatcctcaaactcacccttctggtcgaccttctggccccctgcatatgtgaagcccagcttcacacagatgatgaagggcagtgggtagattggaaccctgggcttttcctgagattcccctagcagtagaggcccgtgagcttgttctcatcaatgtcacaaaacagaccaaccttacgctgcaatccagcctgcacccctgcttgcccccagttcccgatggtgaagatcacccagtgcgtgaggacgagaaagtgggagcagcaaggccagatggtggcctccaagacagagtgtgtggtcgtgtgctggtggtagcagtagaggaggaggctctgctccacgtcgacaaccccaccgacttttccgaagtggtcaaagaaaaacagcaggtcttctggcagccctgcaagagggaaag

SEQ ID NO: 194 - DNA, 456 bp, Homo sapiens
  MAP TO AL049610.9; EXPRESSED IN HELA, SIGNAL =  13; EXPRESSED IN PLACENTA, SIGNAL = 7.7; EXPRESSED IN LUNG, SIGNAL = 4.2; EXPRESSED IN ADULT LIVER, SIGNAL = 4.9; EXPRESSED IN BRAIN, SIGNAL = 4.8; EXPRESSED IN HEART, SIGNAL = 2.9; EXPRESSED IN BT474, SIGNAL = 7.3; EXPRESSED IN BONE MARROW, SIGNAL = 3.9; EXPRESSED IN HBL100, SIGNAL =  28; EXPRESSED IN FETAL LIVER, SIGNAL = 8.9
caggacaaaaatggtgagctgtctgtagacgctcacagggctttgcggtggtactcagcagaagccactttgtaatcactggcagtaaagagagatgcagaattctttgccagatattttaggaaatcatgcaaatagcccaacaataatgcaaggcttttctcatcaaggggcgtataggccaacattgctccaattcttacaaataatctcagtaggtgtggtgctccataaacctgggacattggagcatcagggtgagccaagaggatttcagcatactggggcctctcaaatttgtagagcagctgagtgcccaacatcacattgaaatattcttttattcctgccacaacttcattaaccgcatattccttattatcaacatttccctgcgatttcttgcaatttgcatactcctccagaattgcatctacatttttcttggcagggagt

SEQ ID NO: 195 - DNA, 372 bp, Homo sapiens
  MAP TO AL049631.7; EXPRESSED IN PLACENTA, SIGNAL = 2.2; EXPRESSED IN BT474, SIGNAL = 2.1; EXPRESSED IN BONE MARROW, SIGNAL = 3.2; EXPRESSED IN HBL100, SIGNAL = 2.4; EXPRESSED IN LUNG, SIGNAL = 2.8; EXPRESSED IN ADULT LIVER, SIGNAL = 3.4; EXPRESSED IN BRAIN, SIGNAL = 2.8; EXPRESSED IN FETAL LIVER, SIGNAL = 2.9; EXPRESSED IN HELA, SIGNAL = 2.2; EXPRESSED IN HEART, SIGNAL = 3.3
caaaattaatgcaaaaacaacccatggtgagcaaattgccaaaattttaaataaaggcgggatcccaccctgcctcactcgctttaccctagtcccgccccagtcttttacatcctccgcgccccgcccaccacgtcccccaaaaaccaagggcggaggcagcgcccgtgagccccctacgtggcttttagctccggtgaaagggtcccgggatgaactgggcgcctccggggcaagccacttaccgcgccacaacgtcgggatattgagattcatcgaaaaagttctctagctcctgcagctgaaactgcgtgaacgcggtgcggcggcggcgtttcctctctgggggctgtggtccctcagcggtttgtg

SEQ ID NO: 196 - DNA, 489 bp, Homo sapiens
  MAP TO AL049642.5; EXPRESSED IN PLACENTA, SIGNAL = 5.6; EXPRESSED IN BT474, SIGNAL = 6.5; EXPRESSED IN BONE MARROW, SIGNAL = 6.6; EXPRESSED IN HEART, SIGNAL = 4.8; EXPRESSED IN ADULT LIVER, SIGNAL = 7.2; EXPRESSED IN HELA, SIGNAL = 8.2; EXPRESSED IN LUNG, SIGNAL = 7.8; EXPRESSED IN HBL100, SIGNAL = 5.9; EXPRESSED IN BRAIN, SIGNAL =   8; EXPRESSED IN FETAL LIVER, SIGNAL = 7.4
attttccacattgtcctggctattaatatttggctcttctttacttatgcaagtttatgcagccttgaattcctccccaggaattgtgtttttcttttctgccacattgttgtgctacaaattttccaaacatttatgctctgcttcccttttaaatataagttccagtttcagataatctgtttgctcatgcatataagcacataatgttacaagcagccagaccacatcctgaatgctttgctgcttagaaattttaagttccacacatctctagagcaggggcatgatgtcaccagtctctttgctaaagcatagcaagagtgacctttactccagtttccaataagtttctcatccccatctgagtctacctcactctgggcttcactgtcaatatcatcatcagcattttggtctaaaccattcaacaggtctctaggaagttccaaacttttcctcattttttctgtcttcttttgagccccc

SEQ ID NO: 197 - DNA, 487 bp, Homo sapiens
  MAP TO AL049642.5; EXPRESSED IN HBL100, SIGNAL = 4.4; EXPRESSED IN HELA, SIGNAL = 6.9; EXPRESSED IN HEART, SIGNAL = 6.4; EXPRESSED IN PLACENTA, SIGNAL = 5.3; EXPRESSED IN BT474, SIGNAL = 5.1; EXPRESSED IN BONE MARROW, SIGNAL = 6.5; EXPRESSED IN FETAL LIVER, SIGNAL = 5.8; EXPRESSED IN LUNG, SIGNAL = 5.5; EXPRESSED IN ADULT LIVER, SIGNAL = 5.9; EXPRESSED IN BRAIN, SIGNAL = 8.9
atcaggggtttccacttttgcatcttcctcattttctattgctgccatcatgtaagaaatgcctttcaccttccaccatgattctgaggcctccccagccatatggaactttaagtccaattaaacctctttttcttcctaatttcgagtatgccttttatcagcagtatgaaaatggaccaatacagtaaattggtaccagtagagtggggcattgcttaaaagataactgaaaatgtggaagcaactttggaactgggtaacaggcagtggttggaacagtttagagggctcaggagaagacaggaaaatgtggaaaagtttagaacctctgagagacttgctgaatggctttgacaaaaatgctgatagtgatatgaacaataaggtccaggctgaggaggtatcaaatggagaagagtaagttgttgggaactggagtaaaagtgactcttgttctgttttagcaaagagaatgatggcattt

SEQ ID NO: 198 - DNA, 477 bp, Homo sapiens
  MAP TO AL049651.2; EXPRESSED IN FETAL LIVER, SIGNAL = 1.7; EXPRESSED IN LUNG, SIGNAL = 1.5; EXPRESSED IN PLACENTA, SIGNAL = 5.1; EXPRESSED IN HELA, SIGNAL = 1.6; EXPRESSED IN HEART, SIGNAL = 1.5; EXPRESSED IN BRAIN, SIGNAL = 1.8; EXPRESSED IN ADULT LIVER, SIGNAL = 1.7; EXPRESSED IN HBL100, SIGNAL = 2.7; EXPRESSED IN BONE MARROW, SIGNAL = 1.6; EXPRESSED IN BT474, SIGNAL = 1.8
cagaatatttggggaaaagcagatctttttaaaagaaatactacccatcatctcactactaaaaaataactatgttagttactaaaattgttcttcctatatgtctatacgcacttttgaaaagtaaatttccacagaaaagttgtaacaatagttcaaagactttcatgtactcctttctcacattcacttgtttacattttccattatgtgattctcttcctgtctaaaacacttgacagtaagttatagacatcctgcaaacttactctctaaatatttcagctggcttttcttaagaacaaggacattctcttacataaagaaaattgtaaggttcttgtatcggttcgaatcccgagagcgtgccaacagacaacacgaggcgatgtggagcaacatgctgttttaatgagcgcctgggtgcaggcgggctgaggcctaaaatggcgtcagccccaagtgaggacaggacaa

SEQ ID NO: 199 - DNA, 488 bp, Homo sapiens
  MAP TO AL049690.17; EXPRESSED IN BT474, SIGNAL =  11; EXPRESSED IN FETAL LIVER, SIGNAL = 6.7; EXPRESSED IN PLACENTA, SIGNAL = 4.2; EXPRESSED IN BONE MARROW, SIGNAL =  11; EXPRESSED IN HBL100, SIGNAL = 8.9; EXPRESSED IN LUNG, SIGNAL =  12; EXPRESSED IN HELA, SIGNAL =  12; EXPRESSED IN ADULT LIVER, SIGNAL = 6.3; EXPRESSED IN BRAIN, SIGNAL =   9; EXPRESSED IN HEART, SIGNAL =  16
aaaagctacaattactcttctttgaggaaaagtaattatgaaaatcaaatatcaaaagagaacaaaacaaggacattacagaaatgttgtgactctggcacctatagctacagcaagcacttaacaaagccaaacccctgtgcagattaacataaatgccctcactaacagtccatttctctattacctaatacagtacgtccaactttcatcaaaaaatttcaagacctgctaataagtaaacagataaaaaacaaaatgaaacattctgaagagaggcagcaatgaagcaatcatcacaaccagattcggatatgaatcagataatcctggaattatcagacctgaaattcaaagtaattataattaataggctaaggccgctaatggacaaaggagacaacatgcaggaagagataggtaatataagcagagagatggaaactcttaaaaagaatctaattagaagcactgtaagagaaatgcag

SEQ ID NO: 200 - DNA, 466 bp, Homo sapiens
  MAP TO AL049710.18; EXPRESSED IN ADULT LIVER, SIGNAL = 4.3; EXPRESSED IN BRAIN, SIGNAL = 2.4; EXPRESSED IN HEART, SIGNAL = 3.1; EXPRESSED IN PLACENTA, SIGNAL = 1.3; EXPRESSED IN BT474, SIGNAL = 4.6; EXPRESSED IN FETAL LIVER, SIGNAL = 3.5; EXPRESSED IN HELA, SIGNAL = 5.4; EXPRESSED IN LUNG, SIGNAL = 1.6; EXPRESSED IN HBL100, SIGNAL = 4.1; EXPRESSED IN BONE MARROW, SIGNAL = 1.7
cagcatccctgaagtgtgtgatttccctaggatggtttgggcagaaagacatctcagctgaactttaaaactctttacagaaaactggttctgatccttaaggccccagttcgagaaatagcctgcacagtgacaaaccagtcgcttttcaacacttcgctgttcttacccagggctagtcctgcagatgtcttgcaaaattcagccagtaccccaatgagcaggtattccttgtccaaattttttgtggcagtctgggcctctgccttgcagatgttagacagcagataaagctttctgttgttgtcctggttggcaccaattaccagattcacctttttgctatcaatgtctctcttaaaggctttggtgactcccaggataggatctggaagtcccatgtccacgtgggcccgccagaagctagtcctgttggaggctgccatggcaaggcccagttggaagg

SEQ ID NO: 201 - DNA, 456 bp, Homo sapiens
  MAP TO AL049712.12; EXPRESSED IN BONE MARROW, SIGNAL = 4.2; EXPRESSED IN HBL100, SIGNAL =   9; EXPRESSED IN FETAL LIVER, SIGNAL = 2.7; EXPRESSED IN ADULT LIVER, SIGNAL = 1.2; EXPRESSED IN PLACENTA, SIGNAL = 0.84; EXPRESSED IN BT474, SIGNAL = 3.5; EXPRESSED IN LUNG, SIGNAL = 0.87; EXPRESSED IN HELA, SIGNAL = 3.1; EXPRESSED IN BRAIN, SIGNAL = 1.5; EXPRESSED IN HEART, SIGNAL = 0.83
ggcaacagtccttattctcccatttttgagtcccctgtgacgcaccgcttccccaattagggctgacaggctgggggctacttggctcatcttggagcgcaggtaagtgtgtaggctctggcggtattcagataaagacaccacacgactggagaagctctcgatgtttatcaagtcaatggcagatatgtccatgcctaggaaaaaccaagtgtgaatgcaagaggccagctatttagagccccataccttatgcaggttgccaggctctgcactgacccatggaggaccgtgaggcatccagaatagccttagccttggccccatccattgtcagctcctccagcttctccagcttgtcctcattcagttcccttcggtttccaataaactgggcaagacggcagtatgtggcattgtcgttgatgatcttcaccagctccggaaagtgatacc

SEQ ID NO: 202 - DNA, 487 bp, Homo sapiens
  MAP TO AL049712.12; EXPRESSED IN HBL100, SIGNAL = 2.2; EXPRESSED IN FETAL LIVER, SIGNAL = 2.7; EXPRESSED IN LUNG, SIGNAL = 2.3; EXPRESSED IN HELA, SIGNAL = 2.1; EXPRESSED IN BRAIN, SIGNAL =   2; EXPRESSED IN PLACENTA, SIGNAL = 3.7; EXPRESSED IN BT474, SIGNAL = 2.4; EXPRESSED IN HEART, SIGNAL = 2.2; EXPRESSED IN ADULT LIVER, SIGNAL = 2.3; EXPRESSED IN BONE MARROW, SIGNAL = 3.3
attacaggcatgcaccaggacatttggcttctaaatcacatccttaacatctctgtgaccccgactctcatcctcaccttgattccgacctgaaccaaacactcagcctgctctctcccaaaccccaaccttgatcatcaccctaattctcaacctcaccctcaccctagcccccattctcacttcatcacctcaatctgaccatcactctcactttcaatctggccctgacattcaccctcacattcacccctttctgactctgaccttgaccctcaatctcactctgagtctgactcccctcctcctttcacagccgctgaccctgacactcatccttactccaatcctcctgatgatgcagatacggatcatcgccctgactgtgtgacgctcactctggtaccatcacctgagcctgtctctcactctcatgttgaacctcgaagtctaaggttgaagttcatgcccaagatcaaagtcaagg

SEQ ID NO: 203 - DNA, 404 bp, Homo sapiens
  MAP TO AL049742.7; EXPRESSED IN HEART, SIGNAL = 9.3; EXPRESSED IN PLACENTA, SIGNAL =  12; EXPRESSED IN BT474, SIGNAL =  27; EXPRESSED IN BONE MARROW, SIGNAL =  51; EXPRESSED IN LUNG, SIGNAL =  14; EXPRESSED IN ADULT LIVER, SIGNAL =  21; EXPRESSED IN BRAIN, SIGNAL = 9.3; EXPRESSED IN HBL100, SIGNAL =  57; EXPRESSED IN FETAL LIVER, SIGNAL =  33; EXPRESSED IN HELA, SIGNAL =  28
tctgtccatctatccctggcccccagcccatgtggttttggcagcaataaggtgtgtggggtaatgactcctgaaattaaaatggtgtgtgtatgtgaaggaaaggcgggcaaagctgtggggagcggtggagtggaaggaacaaaggaggtcagtactgggaacgctgaaggtgggaggccatttcataacattacttgttgatgaaattgccatggataccttctttgcccatcagcaggcctagcgtcttggcagtcatggtgacaatgacgttgaaggtgggggctccaccgatgctcttcatacaaagatccgtggtcaattccccatcctgcagcagtgagtccaggaccacagtatatttctggccccccagtgtcagcccattcatgacaaagctt

SEQ ID NO: 204 - DNA, 480 bp, Homo sapiens
  MAP TO AL049780.2; EXPRESSED IN HEART, SIGNAL = 1.5; EXPRESSED IN PLACENTA, SIGNAL = 2.2; EXPRESSED IN BRAIN, SIGNAL =   5; EXPRESSED IN ADULT LIVER, SIGNAL = 2.7; EXPRESSED IN HELA, SIGNAL =   2; EXPRESSED IN FETAL LIVER, SIGNAL = 2.5; EXPRESSED IN HBL100, SIGNAL = 1.4; EXPRESSED IN BONE MARROW, SIGNAL = 1.7; EXPRESSED IN BT474, SIGNAL = 3.9; EXPRESSED IN LUNG, SIGNAL = 1.6
actgacacttccttggagcgccccagctcactgaatagcctgtgtagaataagcgtgttggagtgacacaccagaaactccagcctgtgttctttgagtttgcctttgcatcactgtttctctgatgaaggggtggcagttttttcacaggtaggctgtgatatgttgttaaccacaactgtcttgcccactagagggtgctgaagtcatgagagagggaaaactatagcaaaaagaagggaatttgggaggaagcaaatactgcaaacagactaatgagattctttctcatatacataggagctggaaaatgcagaatttatccccatgcctgacagcccatctcctctcagtgcagcgttttcagaatctgagaaagataccctgccctatgaagagctgcaaggactcaaagtggcctctgaagctcctttggaacacaaaccccaagtagaagcctcggtaactgagctttttgcc

SEQ ID NO: 205 - DNA, 454 bp, Homo sapiens
  MAP TO AL049780.2; EXPRESSED IN FETAL LIVER, SIGNAL = 1.9; EXPRESSED IN PLACENTA, SIGNAL = 1.9; EXPRESSED IN BT474, SIGNAL = 2.6; EXPRESSED IN BONE MARROW, SIGNAL = 1.6; EXPRESSED IN HBL100, SIGNAL = 1.9; EXPRESSED IN LUNG, SIGNAL = 1.9; EXPRESSED IN ADULT LIVER, SIGNAL = 1.6; EXPRESSED IN BRAIN, SIGNAL = 3.1; EXPRESSED IN HEART, SIGNAL = 1.9; EXPRESSED IN HELA, SIGNAL =   2
ttatgaatcaggtggtccaggccatagcaaaatgacagagccatctttacaaaacaaagacagctcttgctcagaatcaaagatgttagaacaagagacaattgtagcatcagaagctggagaaaatgagaaacataaaaaatctttcctggaacatagctctttagaaaatccgtgtggaaccagtttagaaatgtttttaagcccttttcagacaccatgtcactttgaggagagtgggcaggatctagaaatatggaaagaaagtactactgttaatggcatggctgccaacatcttgaaaaataatagaattcagaatcaaccaaagagatttaaagatgctactgaagtgggatgccagcctctgccttttgcaacaacattatggggagtacatagtgctcagacagagaaagagaaaaaaaaagaatctagcaattgtggaagaaga

SEQ ID NO: 206 - DNA, 382 bp, Homo sapiens
  MAP TO AL049842.5; EXPRESSED IN FETAL LIVER, SIGNAL =  20; EXPRESSED IN LUNG, SIGNAL = 0.66; EXPRESSED IN PLACENTA, SIGNAL = 0.82; EXPRESSED IN BONE MARROW, SIGNAL = 0.67; EXPRESSED IN ADULT LIVER, SIGNAL =  16; EXPRESSED IN HEART, SIGNAL = 0.94; EXPRESSED IN BT474, SIGNAL = 0.71
ctattgtggccagttggaagaaaaaacactggccttttgagttgccatagttcttacactggttctttctcatttttgtgggctgatactccttcaatttttgaagtttctgtcctttggatgttttcttttttatcttctttgatgtcttttggggtttgattgtggtatagggtggtttcagtcaactgaatttattcctgaaatattttaggggctcaaggctcaactcaagactcctgagttgcgtgctttaactctggggggctggtattgggccctgagctttgttctcttgcctcttgaggttatgaatttactgccctgcagggaccaaagtgttcctggactgcttataataacactccaataagtggtgcca

SEQ ID NO: 207 - DNA, 466 bp, Homo sapiens
  MAP TO AL049872.3; EXPRESSED IN PLACENTA, SIGNAL = 4.5; EXPRESSED IN BONE MARROW, SIGNAL = 5.4; EXPRESSED IN HBL100, SIGNAL = 4.2; EXPRESSED IN FETAL LIVER, SIGNAL = 4.3; EXPRESSED IN LUNG, SIGNAL =   5; EXPRESSED IN HELA, SIGNAL = 3.7; EXPRESSED IN BT474, SIGNAL =   3; EXPRESSED IN BRAIN, SIGNAL = 4.7; EXPRESSED IN HEART, SIGNAL = 4.3; EXPRESSED IN ADULT LIVER, SIGNAL = 3.3
tatattccctgtccaggcccttccatagtgtctaatggcacatatttatgtaacagctgatttggataagggtcaactgatacccacaaagattaaaaccacaatttactattgtgttagtacagtgttgaaaccaaataaaataaccaggagtaaaaatataactactcctaataaaatataggttgtaaaaagtgatttccattataagaaatctaaagggaaagcccactatatagctattgcttctgcagtaattgtcaaaacacctctaagagtacattaacttccatgaaatctaagaataattggaatcaattcttcagcaatgaatacaacacacatcagaatgtctttaccttgcatacttagctgaatagccctgcggagatctgcttcctcatcttccatgtcaatttcttggcgacttagtgccagagccctctgcaaatcctcctcatcttcg

SEQ ID NO: 208 - DNA, 472 bp, Homo sapiens
  MAP TO AL049873.2; EXPRESSED IN PLACENTA, SIGNAL =  11; EXPRESSED IN BT474, SIGNAL =  54; EXPRESSED IN HBL100, SIGNAL = 1e+02; EXPRESSED IN LUNG, SIGNAL =  19; EXPRESSED IN BRAIN, SIGNAL =  23; EXPRESSED IN BONE MARROW, SIGNAL =  44; EXPRESSED IN FETAL LIVER, SIGNAL =  44; EXPRESSED IN HELA, SIGNAL =  39; EXPRESSED IN ADULT LIVER, SIGNAL =  20; EXPRESSED IN HEART, SIGNAL =  17
ttctgccaaaacagaagaacagaactatggcatatagttttcaatccatcttctgccttagcacaggtgaatgacagaaaacagtgacattgcatatccctaatgccagtgcacaatggggcacaattctcactgggcatagggaacacattgcctttagggaggtataagagaacctcagggtggtggtagtgtacatttgaaaaagccccgcctttccaacttggacgcggcagaatggttcccgcaaagaagggtggcgagaagaaaacgggccgttgccatcaacgaagtggtaacccgagaatataccatcaacattcacaagcgcatccatggagtgggcttcaagaaacgtgcaccttgggcactcaaagagattcggaaatttgccatgaaggagatgggaactccagatgtgcgcattgacaccaggctcaacaaagctgtctgggccaaaggaataaggaat

SEQ ID NO: 209 - DNA, 469 bp, Homo sapiens
  MAP TO AL049873.2; EXPRESSED IN BRAIN, SIGNAL = 4.7; EXPRESSED IN HEART, SIGNAL = 3.5; EXPRESSED IN PLACENTA, SIGNAL = 6.5; EXPRESSED IN ADULT LIVER, SIGNAL = 6.7; EXPRESSED IN HELA, SIGNAL =  11; EXPRESSED IN LUNG, SIGNAL = 8.8; EXPRESSED IN FETAL LIVER, SIGNAL = 8.9; EXPRESSED IN HBL100, SIGNAL =  15; EXPRESSED IN BONE MARROW, SIGNAL = 6.5; EXPRESSED IN BT474, SIGNAL = 8.6
actcttgagccgtggagaacaactaattctacaggaaaaagtggaaggctaatctgagccacccagtgatggcggcaggggtcttcaggactagctgctggtctgtaggcgctaaattgcagactgctcctgcaggaagccttcagggcctgggaggcctttatctggctcaaaagctagggctacttctcgaaggacttccaaatgctcctcagcagctgatagtgactggtcaatccactccaggccccccgtcagatggcaggcattccttgtcaccagcaccaggcgactgacagacaggagcagggtagtcgtccctgtgtccaggagcttggggtccaacggagggtacatcgacttcacaacatcatctaccctggggctgttccacttggccaccacaatcatgtcgctgacaatggctgaagtcttcatcttggccccagagcccattgtcatggcaaca

SEQ ID NO: 210 - DNA, 473 bp, Homo sapiens
  MAP TO AL049873.2; EXPRESSED IN BRAIN, SIGNAL =   9; EXPRESSED IN HBL100, SIGNAL =  15; EXPRESSED IN HELA, SIGNAL =  17; EXPRESSED IN ADULT LIVER, SIGNAL = 7.1; EXPRESSED IN HEART, SIGNAL = 4.7; EXPRESSED IN BT474, SIGNAL =  11; EXPRESSED IN BONE MARROW, SIGNAL = 9.4; EXPRESSED IN LUNG, SIGNAL =  12; EXPRESSED IN PLACENTA, SIGNAL =   6; EXPRESSED IN FETAL LIVER, SIGNAL =  11
gatcttggtagcagcccctcccatcacagaccctaaggcctaggcagaaaaaaatcgtttcctgggctgagccctgggccctgggcccagggcccagctgctgtgtgcagcctcaggacttggtgccctatgtcccagccgttccagctccagccatggctaatagaggccaagctacagctcagaccaccacttcagagggtacagctcagaccactactttagagagtgcaagccccaagccttggcagcttctacatgatgttgggcctgtgggtgcacagaagtcaagaattgtggtttgggaacctccacctagatttcagaggaggtatggaaaggcctgaatgtccaggtagaagtctgctgcaggggtggagtcctcatagagaacctctgctaaggcagtgtgaaaaggaaatgtggggttggagcccccacacagagttcccactggggtactgcctagtgga

SEQ ID NO: 211 - DNA, 405 bp, Homo sapiens
  MAP TO AL050310.5; EXPRESSED IN BONE MARROW, SIGNAL = 1.8; EXPRESSED IN ADULT LIVER, SIGNAL = 1.9; EXPRESSED IN HEART, SIGNAL = 1.1; EXPRESSED IN PLACENTA, SIGNAL = 6.1; EXPRESSED IN HBL100, SIGNAL =   1; EXPRESSED IN FETAL LIVER, SIGNAL = 4.8; EXPRESSED IN HELA, SIGNAL = 1.2; EXPRESSED IN BRAIN, SIGNAL = 0.72; EXPRESSED IN BT474, SIGNAL = 1.2; EXPRESSED IN LUNG, SIGNAL = 1.1
  unsure 77
  unsure 86
  unsure 88
  unsure 94
  unsure 345
  unsure 359
aagcaaaaaccaacaaatgctaaaaagaaaaatgttgatactttttcctagtttgatttcaaaccatgaattttcantgaattatnangaaaanacaagtagttctagatactagcagataagcataacttccttgttttatttttaatcaaaatacatgtcgacagtcctcctatacaagctctttgaaagctgttttgcattgtatacattcacaacatcaccaaactcgctgcagtgcctagagctgtgttctcacctgcagggataaatgccggctgtgggagctgcaggttagtcagagcctgttggcagtggaaaacagtgggattaaagaccggggtnggcaccattgggcnttttccagtgctgatctctttggtatcagttgcagtgtaccaggct

SEQ ID NO: 212 - DNA, 470 bp, Homo sapiens
  MAP TO AL050310.5; EXPRESSED IN BT474, SIGNAL = 0.72; EXPRESSED IN BONE MARROW, SIGNAL = 1.5; EXPRESSED IN HELA, SIGNAL = 0.83; EXPRESSED IN ADULT LIVER, SIGNAL = 1.5; EXPRESSED IN PLACENTA, SIGNAL = 3.3; EXPRESSED IN HBL100, SIGNAL = 0.76; EXPRESSED IN FETAL LIVER, SIGNAL = 4.4; EXPRESSED IN LUNG, SIGNAL = 1.1; EXPRESSED IN HEART, SIGNAL = 0.92
  unsure 41
  unsure 71
  unsure 106
  unsure 221
  unsure 225
  unsure 269
  unsure 315
tgggagaaagagcacagtaggttaaaagcattagtaaggcnttttaaataattatctttagaaaatcttangtaaataaagtagaataaataggttctttcttttnccagcttataaccttgactgttcatattaaggtcctctcatgaccatccatgagtatggttacaggatattagacaaattgaggaatatacaaagcatttactctgaaacaggcncacnaagtgcaggccttttcttaccatggcagaggcagctgaatggtntcatctgatgatgagctgccttgagtctggcttgcaagtgtgcagngaggatgaaagtacttgcatttctcccgcgagcatcgacctttgatgtaatccatgcagattgtcacagtattatcactcgcttcaatcatggaagcatcagtagggtgagcatagcggcaatcattctccccacgggtacaatttccacgctga

SEQ ID NO: 213 - DNA, 458 bp, Homo sapiens
  MAP TO AL050311.13; EXPRESSED IN HEART, SIGNAL = 4.8; EXPRESSED IN HELA, SIGNAL =   5; EXPRESSED IN ADULT LIVER, SIGNAL = 4.1; EXPRESSED IN BRAIN, SIGNAL = 5.5; EXPRESSED IN PLACENTA, SIGNAL = 4.4; EXPRESSED IN BT474, SIGNAL = 3.4; EXPRESSED IN BONE MARROW, SIGNAL = 4.8; EXPRESSED IN HBL100, SIGNAL = 3.8; EXPRESSED IN FETAL LIVER, SIGNAL = 3.1; EXPRESSED IN LUNG, SIGNAL =  12
tgatatattgcccccactccaggattgttcagtcagtgctctgggctgggaacattcccttctgtggagattggatgcctgagctgtcctgagctgtcccaggctccagattcttcttctttattaggagaaatcttcccctgttctgagtacacagttaacttccttgtactgcttaagcatgtgcatcttatggcacctggccagcctgactagtgtatctgccctcaatagggagagaatgagtcttcacctgtagcaagaggaggggtgtgctgtccatcactctgtgtcacctattgggaggaaccttccacccatgggagactgacacacactaaatacactgatctttctataccttttttcttttctggtggttggcatggttatgatctttgccatcttccatatggtagaaatcctcactaaagattggttgctggaccttcctattc

SEQ ID NO: 214 - DNA, 475 bp, Homo sapiens
  MAP TO AL050321.8; EXPRESSED IN FETAL LIVER, SIGNAL = 1.3; EXPRESSED IN LUNG, SIGNAL = 0.64; EXPRESSED IN HELA, SIGNAL = 0.69; EXPRESSED IN ADULT LIVER, SIGNAL = 3.3; EXPRESSED IN HEART, SIGNAL = 0.87; EXPRESSED IN BT474, SIGNAL = 0.61
gctcttgcttttggtattttctcattttatttatacacatgttcacaaactggtttctatgaaacctgagtctgaataataatcttattttagagggtcgaagatttttgactgtgtgctttgataacctcatgaatgctgatgactggctttcttcacttggtttacaaggaaaccattccattgggccatgctgggaagggctagctcagcttcattcctcctccaggttgttcaggggagcccagacacaggtgataaatcataaacatagacaacttacctgaatcagatgatagatcatgaaagttgcaatccctgctcttctccattcagggtggacgaacagaaatgaaatgtaagcttcattgtatttcacatcaggaaccatgaagccaaaggcaatgatgacttttttataaagaacaacaacactgaagtctgggtactgcagacactcagacaggtcaatgcc

SEQ ID NO: 215 - DNA, 470 bp, Homo sapiens
  MAP TO AL050331.11; EXPRESSED IN BT474, SIGNAL =   4; EXPRESSED IN HBL100, SIGNAL = 3.4; EXPRESSED IN HELA, SIGNAL = 1.9; EXPRESSED IN ADULT LIVER, SIGNAL = 1.9; EXPRESSED IN PLACENTA, SIGNAL = 1.5; EXPRESSED IN BONE MARROW, SIGNAL = 1.5; EXPRESSED IN FETAL LIVER, SIGNAL = 2.6; EXPRESSED IN LUNG, SIGNAL = 2.4; EXPRESSED IN BRAIN, SIGNAL = 9.2; EXPRESSED IN HEART, SIGNAL = 2.5
ggaacctgaaggatctggcgctctccactggctgccttggtgggcctcgaattcctctacggggcccttcacccatcaggtagtattgtaggggattgggccacagttctcctttgataatctctgcaattctgtcgaattctagaaggctgtggtctgaaaaccagttgaagaaactagggatagtgttcccttcccggtttctgtggatatgagcctgggggtcttggcctcggtgccagcggattggagtggaaagagacaccacccggccagaggatctgcgttcatattccttgacaagcccctcatttcggaagtaggggttgccctgaaagatgaacttgaatttgcagcctgctctggggtgtttaagctcctccacctccaaattgatcatgtacctcagcatgtcttcatcttggccactgatcataggtgacagctgggggtggtttcgaaaggcagta

SEQ ID NO: 216 - DNA, 470 bp, Homo sapiens; identical to SEQ ID NO: 215
  MAP TO AL050331.11; EXPRESSED IN PLACENTA, SIGNAL = 1.3; EXPRESSED IN BT474, SIGNAL =   3; EXPRESSED IN BONE MARROW, SIGNAL = 1.8; EXPRESSED IN HBL100, SIGNAL = 3.4; EXPRESSED IN FETAL LIVER, SIGNAL =   2; EXPRESSED IN LUNG, SIGNAL = 2.1; EXPRESSED IN ADULT LIVER, SIGNAL = 1.5; EXPRESSED IN BRAIN, SIGNAL = 8.3; EXPRESSED IN HEART, SIGNAL =   2; EXPRESSED IN HELA, SIGNAL =   2

SEQ ID NO: 217 - DNA, 467 bp, Homo sapiens
  MAP TO AL050331.11; EXPRESSED IN HELA, SIGNAL =   2; EXPRESSED IN BT474, SIGNAL = 4.6; EXPRESSED IN ADULT LIVER, SIGNAL = 2.5; EXPRESSED IN HEART, SIGNAL = 1.6; EXPRESSED IN PLACENTA, SIGNAL =   2; EXPRESSED IN FETAL LIVER, SIGNAL = 3.1; EXPRESSED IN LUNG, SIGNAL = 2.7; EXPRESSED IN BRAIN, SIGNAL = 3.5; EXPRESSED IN BONE MARROW, SIGNAL = 3.1; EXPRESSED IN HBL100, SIGNAL = 4.9
ctaatcatggcggacaactgggggtggtttcgaaaagcagtcatccagaagcccgggatattctgaatgatgtagttcctccgctccaggtagtgtcgacgcatccgcccaaacttgtgctccagctgttggaaggccctgtcggcctgagcattcacagtgtccagttccagctggatggcctccagagggtccatgcggagagcctcatgcaaaggccagggcccttcttcctccctcgcctcctcctccaatctatcctcctccgccacttctatttcttcaccttctggcggctgctcctctacctccatctgctcctccattacctccttctccgccaggccttccttcaccacctcagcgctctccctctcagccacggctgctgagacggtggcgcactttcctgtcttcacctcctccgcctcagcctccgcccccgccgtcagctcagacgcggatct

SEQ ID NO: 218 - DNA, 456 bp, Homo sapiens
  MAP TO AL050401.5; EXPRESSED IN BT474, SIGNAL =  32; EXPRESSED IN FETAL LIVER, SIGNAL =  23; EXPRESSED IN LUNG, SIGNAL =  35; EXPRESSED IN PLACENTA, SIGNAL =  12; EXPRESSED IN BONE MARROW, SIGNAL =  28; EXPRESSED IN HBL100, SIGNAL =  30; EXPRESSED IN HELA, SIGNAL =  34; EXPRESSED IN ADULT LIVER, SIGNAL =  18; EXPRESSED IN BRAIN, SIGNAL =  24; EXPRESSED IN HEART, SIGNAL =  29
attttctaccccatagcgcctctttgcccaccccattttctgatggcttgaatatacttaatttcagctgtcctgatttatttcattttccttgacaatgtaaaggttgagcttcctgaatgccaggtttatgtaaattaacctgaacctatgggtttatagaaaatcaacatgttaattttatgcaaagtgatgcaaaagatcattcccctgctttctcagagggaaaaaaatctgattactttctcaaacggacattcaaagcagcataaataatcaagaatgtgaaaatggcagacaaagctcttaccaagagcagcaaaaagggcaccaaatccaaagtggtagatccaagaagcctgatgatacaagtgatttctaataaaatccatgaaaagtcagagaatatgacaatccccatcataaaattcaaggaataaaagtgcaaagataaaa

SEQ ID NO: 219 - DNA, 458 bp, Homo sapiens
  MAP TO AL050401.5; EXPRESSED IN ADULT LIVER, SIGNAL =  11; EXPRESSED IN BRAIN, SIGNAL = 7.7; EXPRESSED IN PLACENTA, SIGNAL = 7.2; EXPRESSED IN BT474, SIGNAL =  40; EXPRESSED IN BONE MARROW, SIGNAL =  13; EXPRESSED IN HBL100, SIGNAL =  25; EXPRESSED IN LUNG, SIGNAL =  14; EXPRESSED IN HELA, SIGNAL =  18; EXPRESSED IN HEART, SIGNAL =  24; EXPRESSED IN FETAL LIVER, SIGNAL =  11
ctagccagcttccttgcatcttcaccagcatcagagaggactatgatgagcgtgtgctgccatccatcactaccaagatcctcaagtcggtggtgtctcactttgatgctggagaactaatcacccagagagagctgctctccaggcaggtgagtgacaatcttacggagtgagcagccacctttgggctcatcctggacgatgtgtccttgacacatcccaccttcgggaaggagttcacagaagcagtggaagccaaagaggtggatcagcaggaagcagagagggccagatttgtggtggaaaaggctgagcagcagaaaatagcagccatcatctctgctgagggtgactccatggaagccaagctgatccccaactcactggccaccgcaggggacggcctgatcgagctgagcgtgctggaagctgcagaggacatcacataccagctctca

SEQ ID NO: 220 - DNA, 482 bp, Homo sapiens
  MAP TO AL078593.9; EXPRESSED IN FETAL LIVER, SIGNAL = 0.68; EXPRESSED IN HEART, SIGNAL = 1.3; EXPRESSED IN ADULT LIVER, SIGNAL = 0.78; EXPRESSED IN PLACENTA, SIGNAL = 2.2; EXPRESSED IN LUNG, SIGNAL = 1.3
aatttgcaaaatgtagttttaccctatttgtttgctaaatgtatcagataccaagcgtttgcattttacagatgaaaaatgtaaaaccttgagaattaaggtttcatttcagtgactttagcctggcctatgtcaagtgtctgctttcctcagcctgaaggaagcccatgaaactagagctctttttcttagtgtcagtgccgccaagggttgctctgagcttcacatcactcccatgcttttctgcctttaacagtttcacaaccaaagaggagctggggaagacagtgcctcagctactgactcctgggctgatgggcgaatcttcagaatcctttagtgcctcagaagatgaaggccacagggaataccaagccaatgactctgactcggacgggcctatcttgtacaccgatgatgaggacgaagacgaagatgaggatggcagtggagaaagtaagactgttttcaagaggcaggga

SEQ ID NO: 221 - DNA, 474 bp, Homo sapiens
  MAP TO AL078593.9; EXPRESSED IN BT474, SIGNAL = 3.6; EXPRESSED IN HBL100, SIGNAL = 4.4; EXPRESSED IN BRAIN, SIGNAL = 4.6; EXPRESSED IN PLACENTA, SIGNAL = 3.9; EXPRESSED IN BONE MARROW, SIGNAL = 4.5; EXPRESSED IN FETAL LIVER, SIGNAL = 3.9; EXPRESSED IN LUNG, SIGNAL = 4.2; EXPRESSED IN HELA, SIGNAL = 5.1; EXPRESSED IN ADULT LIVER, SIGNAL = 3.8; EXPRESSED IN HEART, SIGNAL = 4.1
tctatgatccaccctctcagcaaaataaactgcagctatcactttccaaacgatgaagtgatacttctaagttttttcatggtgtcccaatatttttcagaacattaaaaagaaatagcgcttcagtcctctcaaaatgaactgcatccaactcaaagtctttttttccttaggttaattaagattctcctcctgcatgaggagaaagaatttggtctgggctctatttaaagtccatgccatgtgtaacctgagtgccactggctaaaagcctctctctctgcatttctgctctttttcaatcctcaggtgctttggcaagtaaaatacgccggagggatactcttgctatcaaacttggcaacagaccatctaagaaagaactagaggacaaaaacatcttgcagcgtacatctgaagaagagaggcaggaaatccgacaacaaattggaaccaagttagtcaggtaattgc

SEQ ID NO: 222 - DNA, 476 bp, Homo sapiens
  MAP TO AL078612.8; EXPRESSED IN HBL100, SIGNAL = 7.7; EXPRESSED IN FETAL LIVER, SIGNAL = 2.9; EXPRESSED IN PLACENTA, SIGNAL = 2.8; EXPRESSED IN BT474, SIGNAL = 4.5; EXPRESSED IN LUNG, SIGNAL = 2.2; EXPRESSED IN ADULT LIVER, SIGNAL = 2.7; EXPRESSED IN HEART, SIGNAL = 1.5; EXPRESSED IN BONE MARROW, SIGNAL =   2; EXPRESSED IN BRAIN, SIGNAL = 1.6; EXPRESSED IN HELA, SIGNAL = 6.1
tcttaaatcgtgtcctgcccacaaagttctgcaatcttaggaaatgtgacttaatgtaagtctgtggctcacagctgactttccaggaaagttggggcctaataattttactgtgggttatcacggtattagctcaagtttacaggtctccactgtaggacaagaaggaaaagtcaataaagacatggccacatgggtcaatgctatcgccgaaaaagcaaacaaaaccgatcttatgtaaactgtctcccttcaatcagtgattccagaagaatgggaaataccttgtttttgtctgattcatataccagatgcctggcctcagcctgtgcatgatcataatcttgagggaggatccagtggcgaatctcatctttgtctaacttcccgtccttgttcagatcccggaattcgttaaactgctcccgttctgataaaacccagtctggctcagggccattctcctcatgggaaaa

SEQ ID NO: 223 - DNA, 448 bp, Homo sapiens
  MAP TO AL078622.6; EXPRESSED IN LUNG, SIGNAL =  11; EXPRESSED IN PLACENTA, SIGNAL = 5.8; EXPRESSED IN BT474, SIGNAL = 5.4; EXPRESSED IN HBL100, SIGNAL =   8; EXPRESSED IN FETAL LIVER, SIGNAL = 6.5; EXPRESSED IN BRAIN, SIGNAL = 9.1; EXPRESSED IN BONE MARROW, SIGNAL = 8.8; EXPRESSED IN HELA, SIGNAL = 6.4; EXPRESSED IN ADULT LIVER, SIGNAL = 5.7; EXPRESSED IN HEART, SIGNAL =   8
gatgacctggaacctgggttgggggacaggctgccaggcccagtgtctgcagcggtcagccccttctgctctgtaggatgcacctggcagagaagatggatgaccttggacaggacccaggttatgctgtgcccatgagtttcccggggatgccacgaccaagtacaacaaactggggtgggcacaggcaggagtgaaatccattctctccctgtcctggggcctgaagcctgagaccaaggtgggctgcactccctgcaggggctctagggaggacctttcctgccccctcgctcttctggcggtggccgtgacccttggtgccaacctctctacctccatcttcactgtccctcgctgccttcttctctgtgtccacaggtcttctaaagacaccagtcattggacttagggcacatctgattaatccaggatgacctcatctcaa

SEQ ID NO: 224 - DNA, 442 bp, Homo sapiens
  MAP TO AL079300.10; EXPRESSED IN HEART, SIGNAL = 3.4
ggctccggaggaagagagcccagagaggccaggggtccacgctgggcctagaggactggcccactctccccatttaccagacgactggggcctccacactaaggaggggcagggctggcagtgacgagggaaacctctcgctgagggttggggcaaagtcacccctggaaatcgaaggggccgctggtggtctcttgaggtccaccagcctcaaatgcatctcttcagacggtgttgggggcacaaccctactccccgaaaagtcgaaaacccaattcagttcctgcgagtccctcttagaatccagaccgagcatggggagaaaactgagctctccgaccacacccagggacatgctgttgtcgcccacactgcgtcctcggaggcggtgtctggagtcctctgtggacgatgcgggctgtccagaccttggaaaggagcc

SEQ ID NO: 225 - DNA, 442 bp, Homo sapiens; identical to SEQ ID NO: 224
  MAP TO AL079300.10; EXPRESSED IN LUNG, SIGNAL = 0.67; EXPRESSED IN HEART, SIGNAL =   4

SEQ ID NO: 226 - DNA, 485 bp, Homo sapiens
  MAP TO AL079300.10; EXPRESSED IN FETAL LIVER, SIGNAL = 0.78; EXPRESSED IN LUNG, SIGNAL = 0.65; EXPRESSED IN PLACENTA, SIGNAL = 0.89; EXPRESSED IN HEART, SIGNAL =  13
aaaggagccgcttgttttccagaaccgccagtttgcccacctgatggaggaacctctaggcagtgacccattcagctggaaactcccaagcctcgactacgaacgcaagaccaaagtggacttcgatgacttcctcccagctatccggaagccccagacacctacctccttggctggatcagccaaaggtgggcaagacggttcacagcgttcaagcatccactttgaaacggaagaggctaaccgttcctttctctcggggatcaagaccattttgaagaagagcccggagcccaaggaggatcccgctcacctgtctgactcgtcctcatcctccggctccatcgtgtccttcaaaagtgctgacagcatcaaaagtcgaccaggaatcccacgacttgcgggtgacggtggcgagcgaacgtcccccgagcggagagagccagggacggggaggaaagacgacgatgttgcgagcataatga

SEQ ID NO: 227 - DNA, 466 bp, Homo sapiens
  MAP TO AL079300.10; EXPRESSED IN HEART, SIGNAL = 1.6
tggatggaaacataatgaaaatcttatccatcaatttcaatttgcagaagaaaaggttggaagctagagaggtttgatggcctgctcaaggtcaaacgggccctaactagaacccaggtatcctcactcctggtcctgtctaccttccacaaaggagacctgttggtttatttgatggtttcaagttcttcattgaaattaaccaaggtatggcatcctgtgatctcccatcaatttgagccacaagaatctaacttgatcaattaattcctgcctcattttattctgttctcttccttctcacaggaagtaacatttctgccaacaacaacatccactcctactcagctcttcgttccctgcaattcctgtcttgcccgacccctgcagagtggaagaaggtgatggatgggcagagaaatgggagatggacagctaccagggaagaatctgtgatttgggagcc

SEQ ID NO: 228 - DNA, 574 bp, Homo sapiens
  MAP TO AL079301.14; EXPRESSED IN HBL100, SIGNAL = 7.8; EXPRESSED IN FETAL LIVER, SIGNAL = 5.2; EXPRESSED IN HELA, SIGNAL = 8.2; EXPRESSED IN BRAIN, SIGNAL = 8.4; EXPRESSED IN PLACENTA, SIGNAL = 4.7; EXPRESSED IN HEART, SIGNAL = 4.3; EXPRESSED IN ADULT LIVER, SIGNAL = 5.6; EXPRESSED IN LUNG, SIGNAL = 6.2; EXPRESSED IN BONE MARROW, SIGNAL = 7.8; EXPRESSED IN BT474, SIGNAL =   7
ctcaccataggaggtggtcagtaaatgacagctgccatgaccaccactgatgttatcaccgtagctatcaacaccatcaccatcaccatcaccatgggcaccaccgccactaccatcacaatgatcaccatcaccaccaccatcaccagcagcaccaccaccatcaccatgagcaccaccatcaccatcagcaccaccaccactaccatcaccatgatcaccattatcaccaacactatgacaaccatcctcatcaccatcaccatgacaaccatcaccagcagcagcaccaccatcaccatcagcaccaccaccactaccatcacaatgatcaccattatcaccatcactatgacaaccatcctcatcaccaccatcaccatgacaaccatcaccagcagcagcaccaccaacaccatgagcaccaccatcaccatgagcacccccatcaccagcagcatcaccgccactaccatcacaatgatcaccattatcaccatcattatgacaaccatcatcaccaccatcaccagcagcaccatcatgagcaccaccgccactaccatcacaatga

SEQ ID NO: 229 - DNA, 481 bp, Homo sapiens
  MAP TO AL079301.14; EXPRESSED IN ADULT LIVER, SIGNAL = 4.6; EXPRESSED IN BONE MARROW, SIGNAL = 5.3; EXPRESSED IN BRAIN, SIGNAL = 3.9; EXPRESSED IN HEART, SIGNAL = 3.4; EXPRESSED IN PLACENTA, SIGNAL = 5.9; EXPRESSED IN BT474, SIGNAL = 4.4; EXPRESSED IN FETAL LIVER, SIGNAL = 4.8; EXPRESSED IN LUNG, SIGNAL = 4.8; EXPRESSED IN HELA, SIGNAL = 5.1; EXPRESSED IN HBL100, SIGNAL =   7
tttcccagttcttggctgaggggtttccctctatcaccccagatgcagcctctcctccctgcctcctttcccagcaccccgagctgagacgattcccccggccccccaggtgttctggctgtctgggccgtctgtctccctcgccctccagaccagagctgagtggctggtatctgacctgggaacagtggagcaggaccacactgcccactggctgggaagtcagactgccacactggagccactgccagatgccaggcaatggggcggacggggccatcccagcagcctggggttagtgccagccatgtatcacaaggaccctcagcagggactcctaggcacagggggtcaggacacccgctaccccaaagctgcacaccccctgctccaccacttcctctctaaaggaggtgagccccatccagaaatcccacttccaaaggcccggctcccacgggcctgctcatccactgggcac

SEQ ID NO: 230 - DNA, 465 bp, Homo sapiens
  MAP TO AL079301.14; EXPRESSED IN BRAIN, SIGNAL =  14; EXPRESSED IN HEART, SIGNAL = 4.6; EXPRESSED IN PLACENTA, SIGNAL =  14; EXPRESSED IN HBL100, SIGNAL =  20; EXPRESSED IN FETAL LIVER, SIGNAL = 9.3; EXPRESSED IN HELA, SIGNAL =  13; EXPRESSED IN ADULT LIVER, SIGNAL = 9.4; EXPRESSED IN BT474, SIGNAL =  13; EXPRESSED IN BONE MARROW, SIGNAL =  13; EXPRESSED IN LUNG, SIGNAL =  11
atttgcataagcctttatagctgatacagatattatttccattttgcaggtgggaaaagggaagtttggggagattccatgcccaagtattcaaggcatgtactctgaggaactggagctgggcccctttccgacatgccgatgtcctcaatctttcccagaggttagcaaggcatgacagccaccgccatcatcattggcatcatcaccaccatcatcactatcatcatcatcaccatcaccaccaccatcaccatcatcatcaccatcatcaccaccataaccaccatcaccatcatcatgatcaccatcatcatcaccaccatcaccaccatcatcaccatcacaaccaccatcatcaccaccactaccaccatcatcaccaccaccatcaccatcaccaccctcattaccaccaccatcatcatcaccatcaccaccaccaccaccaccatcatcatcatc

SEQ ID NO: 231 - DNA, 453 bp, Homo sapiens
  MAP TO AL079301.14; EXPRESSED IN HBL100, SIGNAL =   2; EXPRESSED IN HELA, SIGNAL = 2.4; EXPRESSED IN FETAL LIVER, SIGNAL = 2.2; EXPRESSED IN LUNG, SIGNAL = 2.1; EXPRESSED IN ADULT LIVER, SIGNAL = 1.6; EXPRESSED IN HEART, SIGNAL = 1.8; EXPRESSED IN PLACENTA, SIGNAL = 2.4; EXPRESSED IN BT474, SIGNAL = 2.5; EXPRESSED IN BONE MARROW, SIGNAL = 2.6; EXPRESSED IN BRAIN, SIGNAL = 2.2
actacggaaccagagcctccaaggcggcaaagcctgccccaagcggaaggagccggcaaaggatggagccgggattggaactccagtctgtccagttttaaagcctgcactgtaaatcactttgtcacacgcctctcggagacaaagttaaaagccttctaaacagtactcgggagggaaatcggggggcagggcctccaaggctgggccaccggacaccctcaaagctccttaaccccctagaggtgaccagagcctccccgagacactgccccatacatatcaagagcctcggctgctgaagaaggagtgtggcgccctcaggaccagcagtgtgtctgcagatggggcgagtagcagcctcgtgtgttcgctgctcacacaagtgaaatcaaagacacagcccatgattcggttcctgaagagacaaaggcgttggaggaaaaacttggt

SEQ ID NO: 232 - DNA, 469 bp, Homo sapiens
  MAP TO AL079340.7; EXPRESSED IN LUNG, SIGNAL = 1.7; EXPRESSED IN HEART, SIGNAL =   3; EXPRESSED IN ADULT LIVER, SIGNAL = 2.1; EXPRESSED IN HELA, SIGNAL = 3.3; EXPRESSED IN FETAL LIVER, SIGNAL = 2.6; EXPRESSED IN BONE MARROW, SIGNAL = 2.6; EXPRESSED IN BT474, SIGNAL = 8.2; EXPRESSED IN PLACENTA, SIGNAL = 1.5; EXPRESSED IN BRAIN, SIGNAL =   3; EXPRESSED IN HBL100, SIGNAL = 2.1
ttggcaactagagcctcagctgcaaatgcaacattttaaagaaagtcaatgacagttgtggcctcctccccttcccttcttcactcccctacctgccagtctactatagggcagcccactcaggcctcctacctccagctgttgactcagccgccttttaccctgaaggccttttgcaaaggtgctggtgggaggcaaagagggagagagttctcttggttgcaccctttcaggggaatagtgttcatggttttcttctctttccaaagggagggaatgacaatgggcaggggaattcctgcaacagattaaatgagggaagatatttcttcttacttgcaagaaaggaaaactggctttaggtttccctgttggacatgtgcttggtcggagggcttgtagatctgtcccttggcctcctggtgcagagaagagaactggagacagatggcaaggtgcagagagggcc

SEQ ID NO: 233 - DNA, 493 bp, Homo sapiens
  MAP TO AL079352.2; EXPRESSED IN BONE MARROW, SIGNAL = 1.7; EXPRESSED IN FETAL LIVER, SIGNAL = 4.8; EXPRESSED IN LUNG, SIGNAL = 2.7; EXPRESSED IN PLACENTA, SIGNAL = 2.5; EXPRESSED IN BT474, SIGNAL =   5; EXPRESSED IN HBL100, SIGNAL = 4.7; EXPRESSED IN HELA, SIGNAL = 2.5; EXPRESSED IN ADULT LIVER, SIGNAL = 4.5; EXPRESSED IN BRAIN, SIGNAL = 3.7; EXPRESSED IN HEART, SIGNAL = 2.6
tgattcagagagccatggtgaagacttgcccacacatctggtttgagcgcttggaagtgaaggatcgccacctgctggctaagagactgactgaacaagtgcaagatataagcaagctgcctatccctcatcttcccagaaggaatttgcatcaataatacatcggtgatgatgttcaaaaagggaagttttgaaattggagccacagtttaccctgatgctatcaagtatgaccatcaattcggcaatgccttctggaacagcagcaaataagggatgatgacttacctgctgcgaatgatgaccagctgggccattatctgcagcatgtggtacctgccttccatgaccagaggggcagatgaagatgccgtccagtttatgaatacgataaaatccgccatcgccaggcagggagaacttgtcgacctgctgtgggatgggggcctgaagagggagaaggtaaaggacatgttcaaggaggagcagcaga

SEQ ID NO: 234 - DNA, 495 bp, Homo sapiens
  MAP TO AL080272.3; EXPRESSED IN PLACENTA, SIGNAL = 4.5; EXPRESSED IN BRAIN, SIGNAL = 4.4; EXPRESSED IN HEART, SIGNAL = 3.5; EXPRESSED IN BONE MARROW, SIGNAL = 4.3; EXPRESSED IN BT474, SIGNAL = 3.1; EXPRESSED IN ADULT LIVER, SIGNAL = 4.7; EXPRESSED IN HELA, SIGNAL = 3.9; EXPRESSED IN LUNG, SIGNAL = 3.2; EXPRESSED IN FETAL LIVER, SIGNAL = 2.8; EXPRESSED IN HBL100, SIGNAL = 3.3
cattctcttttgtctgccaccatataagatgtgcctttcaccttctgccatgattgtgaagcaccccccaaccatgtggaactatgagttcattacatctatttttctttataaattacccagcctcaggtatgtcttcattagcagtgtggaaacagactaatatagtaaattggtacaaggtagtggggtgctgccatagagatacctgaaaatgtggaatcgactttggaagtggataacaggcaaagatttgaacagtttggagggctcagaagaagacaggacaatgtgagaaagtttggaacttcctagaggcttgttgaatggctttgaccaaaatgctgataattatatggacaatgaaatccagactgatgtaatctcagataaagatgaggaacttgttgggaactggagtaaagatgactcttgctatgttttagcaaagagactggcagcattttacccctgccctggagatttggggaactt

SEQ ID NO: 235 - DNA, 480 bp, Homo sapiens
  MAP TO AL096772.5; EXPRESSED IN LUNG, SIGNAL = 2.1; EXPRESSED IN HEART, SIGNAL =   1
gactgtgacatattttgcccgaacagttcccagaccctccctgctattctctctgcttccgctcttgcctcgttacattccatacttcacacagcagtgcttggccttggacaccaaggtggtgagtaaataaaccttctttttctctaaagatttcattagaaattcctaagggttgatagaccaaccattcacatgtacctgtcattacctttaactgctgaaatatccatcatgatcttactccatctcccatggtaagttctctcagccttcatgtgctttcattgcagttgccacaaaaagtcctacggctgaagaatacactgttaatattgagatcagttttgaaaatgcatccttcctggatcctatcaaagcctacttgaacagcctcagttttccaattcatgggaataacactgaccaaattaccgacattttgagcataaatgtgacaacaggtgagtaagagaccca

SEQ ID NO: 236 - DNA, 465 bp, Homo sapiens
  MAP TO AL096772.5; EXPRESSED IN PLACENTA, SIGNAL = 1.7; EXPRESSED IN BONE MARROW, SIGNAL = 0.89; EXPRESSED IN BT474, SIGNAL =   1; EXPRESSED IN HBL100, SIGNAL =   1; EXPRESSED IN FETAL LIVER, SIGNAL = 1.6; EXPRESSED IN LUNG, SIGNAL =   6; EXPRESSED IN HELA, SIGNAL = 0.97; EXPRESSED IN ADULT LIVER, SIGNAL = 1.1; EXPRESSED IN HEART, SIGNAL = 2.5; EXPRESSED IN BRAIN, SIGNAL = 0.87
attacggtggtcctgggaagtaactgcaattattaatcctcattttacatctggagaactgaagcacaaggtggttaagtgactgtctcaacaatatcttgctagtaagtgatggagtttgggatccgaagccaggcaacctggatacagagtctgcagacctaatcaccataaacccaacttctccattcagagaagaaatctatttaaatagtaactccttttatgaaaaaaaaatgatttgacctctttgctactaaataaaagagttagccagctgggatggcaacaatttgcttctcattataggaacccctgagacagacatagattctagctgcagcagatacaccctcaaggctgatggaacccagtgcccaagcgggtcgtctggaacaacagtcatctacacttgtgagttcatcagtgcctatggagccagaggcagtgcaaacataaaagtga

SEQ ID NO: 237 - DNA, 468 bp, Homo sapiens
  MAP TO AL096772.5; EXPRESSED IN FETAL LIVER, SIGNAL = 0.65; EXPRESSED IN PLACENTA, SIGNAL = 0.68; EXPRESSED IN LUNG, SIGNAL = 3.1; EXPRESSED IN ADULT LIVER, SIGNAL = 0.64; EXPRESSED IN HEART, SIGNAL = 1.4
tgctgaattggccttagagagtagggtgtgtagtgggtgtgactctcactgtcaccattgctaaatgcttactggcatctttcagtcttggggacccatcctttgctaaactctgccataagaaggtcatacatccccactgcctgtgatgtctcatttttgttttctcatttcctcttacctttatgcaatcagtttctaggaagatgttgtttttttcttttttatgattgaaagaatttggttagtttgaccccataccatttcactttcagcacgtgctctctacggttaatgtcatccttggcaagcccgtcttgaacacctggaaggttttacaacagcaatggaccaatcagagttcacagctactacattcagtggaaagattttcccaagcattacagtcgggagatagccctcctttgtccttctcccaaactaatgtgcagatgagcagcatggtaa

SEQ ID NO: 238 - DNA, 464 bp, Homo sapiens
  MAP TO AL109618.1; EXPRESSED IN BONE MARROW, SIGNAL = 3.1; EXPRESSED IN HBL100, SIGNAL =  16; EXPRESSED IN ADULT LIVER, SIGNAL = 7.5; EXPRESSED IN BRAIN, SIGNAL =   4; EXPRESSED IN PLACENTA, SIGNAL = 7.5; EXPRESSED IN HEART, SIGNAL = 4.7; EXPRESSED IN HELA, SIGNAL = 6.9; EXPRESSED IN LUNG, SIGNAL = 5.5; EXPRESSED IN FETAL LIVER, SIGNAL = 9.6; EXPRESSED IN BT474, SIGNAL =  23
gtgagatggtgctgtcaaggctatggaagaaatgaatggtaaagacttggagggagaaaatattgaaattgtttttgccaagccaccaaatcagaaaaggaaagaaaaaagctcagaggcaagcagcaaaaaatcaaatgtatgacgattactactattatggtccaccttatatgccccctccaacaagagatggagggcgaggaggtagaggtggttatggatatcctccagattattatggatatgaagattattatgattattatggttatgattaccataactatcgtggtggatatgaagatccatactatggttatgaagattttcaagttggagctagagaaggggtggtagaggagcaaggggtgctgctccatccagaggtcgtggggctgctcttccccgtggtagagccggttattcacagagaggaggacctggatcagcaagaggcgttc

SEQ ID NO: 239 - DNA, 469 bp, Homo sapiens
  MAP TO AL109618.1; EXPRESSED IN HELA, SIGNAL = 1.3; EXPRESSED IN BT474, SIGNAL = 0.95; EXPRESSED IN HBL100, SIGNAL = 0.88; EXPRESSED IN FETAL LIVER, SIGNAL = 2.2; EXPRESSED IN LUNG, SIGNAL = 1.6; EXPRESSED IN BRAIN, SIGNAL = 2.1; EXPRESSED IN PLACENTA, SIGNAL = 2.1; EXPRESSED IN ADULT LIVER, SIGNAL =   1; EXPRESSED IN HEART, SIGNAL = 1.3
gggaaggtacaaattcaatataacatcacaataggaaataaattgaaagatttacaagccctgagcagggagggcacctttggaagccctttatcatcaggtcatatgaggctggaatgaagagtcaggcagagagagagacacacacacacacacacactgacagacacacacaccaaggggctacatggagcctcagcttcctagagaccccttactggactcctggacttggcctcagtggatggccaagaagctgctggctgtaccggccacccaacatttttgcattcactgcctggccactgacaactctactccctggtctcctggttgaggagctttgaggagttccatggaaagcatcacattgggcatcaagctgtgacaccagcagtggagcctggtcatggagagtgtggttcccttggacagtgaccattccacctgcacggtggagaacaagttt

SEQ ID NO: 240 - DNA, 418 bp, Homo sapiens
  MAP TO AP000023.1; EXPRESSED IN PLACENTA, SIGNAL = 3.8; EXPRESSED IN BT474, SIGNAL =  14; EXPRESSED IN BONE MARROW, SIGNAL = 6.2; EXPRESSED IN HBL100, SIGNAL =  17; EXPRESSED IN FETAL LIVER, SIGNAL =  11; EXPRESSED IN LUNG, SIGNAL = 5.2; EXPRESSED IN HELA, SIGNAL =  10; EXPRESSED IN BRAIN, SIGNAL = 6.9; EXPRESSED IN ADULT LIVER, SIGNAL =   3; EXPRESSED IN HEART, SIGNAL = 6.5
ctgtctcagtgtgactcaagaccacaaaaaaaccatttttccttcacttctgagtcctggggttaagacctagaccagcaagcgtactgcttggggtcccttcacaggtttacaagtttttcattgagggcaatctgtgactgtgtgaggttggccagttaggtcaccatcaacaggtcattgatgttgctgtggagcatggtctcgaagtcatcgggaactatttttggtacttggttaaccaggctcatcaggaagtggcccaccttcctgatggtattgtcagctgacacctttccagatagtatatcctctgcatattgcaacactatgctcagggtatcctggatgcgagctgatgcccctcctacttgctgcaagtcacttgagagtccaaccactctgttggggctaaagc

SEQ ID NO: 241 - DNA, 473 bp, Homo sapiens
  MAP TO AP000030.1; EXPRESSED IN HEART, SIGNAL = 2.1; EXPRESSED IN PLACENTA, SIGNAL = 1.9; EXPRESSED IN FETAL LIVER, SIGNAL = 1.5; EXPRESSED IN HELA, SIGNAL =   2; EXPRESSED IN BT474, SIGNAL = 1.5; EXPRESSED IN BONE MARROW, SIGNAL = 2.3; EXPRESSED IN HBL100, SIGNAL = 1.6; EXPRESSED IN LUNG, SIGNAL = 2.1; EXPRESSED IN ADULT LIVER, SIGNAL = 2.8; EXPRESSED IN BRAIN, SIGNAL = 2.5
acaaggcaattgaggctgagacattcagcaacttggccaagaggcctgaacactgtccagaggcctgaacagtgatggaattccaaaaatcccaaaatccccaaatgcctgctcttcaccgtcaatgctattctgtctcccttcacaacagtgtagcttttcagtctggcaaatggaaaccagctcaacgtactaaagcatatttgtgtggctatgaaactcctagaggaagcagagccacgaagatgaatggagatctacaaataaaactgtggggcaccccagtgcccgactgtatgagcccccctggtgggcacacacctggacgcctcctggtggaagcaaggcgccttctgatccacactgagccatcagctgtccccaccagctggtcagccgcacttcgcatccccagaaccaacctccaagaccccggacccctggcctggaaatgtaagtgggcaggcaatgtt

SEQ ID NO: 242 - DNA, 473 bp, Homo sapiens; identical to SEQ ID NO: 241
  MAP TO AP000030.1; EXPRESSED IN ADULT LIVER, SIGNAL = 1.7; EXPRESSED IN BONE MARROW, SIGNAL =   2; EXPRESSED IN BRAIN, SIGNAL = 2.4; EXPRESSED IN PLACENTA, SIGNAL = 1.7; EXPRESSED IN BT474, SIGNAL = 1.7; EXPRESSED IN LUNG, SIGNAL = 1.9; EXPRESSED IN HELA, SIGNAL = 2.5; EXPRESSED IN HEART, SIGNAL = 1.9; EXPRESSED IN HBL100, SIGNAL = 2.3; EXPRESSED IN FETAL LIVER, SIGNAL = 1.8

SEQ ID NO: 243 - DNA, 480 bp, Homo sapiens
  MAP TO AP000031.1; EXPRESSED IN LUNG, SIGNAL = 1.1; EXPRESSED IN BT474, SIGNAL = 2.1; EXPRESSED IN BONE MARROW, SIGNAL =   1; EXPRESSED IN HBL100, SIGNAL = 2.3; EXPRESSED IN HELA, SIGNAL = 0.96; EXPRESSED IN ADULT LIVER, SIGNAL = 1.3; EXPRESSED IN BRAIN, SIGNAL = 1.1; EXPRESSED IN HEART, SIGNAL = 1.2; EXPRESSED IN PLACENTA, SIGNAL = 1.6; EXPRESSED IN FETAL LIVER, SIGNAL = 2.4
gaaacagagtgttgttcatgagtcattaacattttactgaaccatatatttacctatatattaaatttaatttataaactcagtattattcccaacataaaagccattttttggttttaaatcttaagaggatcccttcctcattcaagagaaaactaataccacaaattttacaaaacaacttcatagaacattgttgtcattgctaaatgttacttaggttatgccttacaactattaccaattttctatctgctgaggaataaaaaaaaaaactaacaatggtgcctgtggaggaggaggagaggcagcagcgggtgcagcagcagcaggcacggtggcggtgggtgcagggggtactgcggcagcaggtgctgtcgtggtgacggcagtggtatcctctttctttgattcttccacagcttctggctcatcatcatagtcaaatctatcaagcaacttctggaataattatgtcaa

SEQ ID NO: 244 - DNA, 475 bp, Homo sapiens
  MAP TO AP000032.1; EXPRESSED IN BRAIN, SIGNAL = 4.2; EXPRESSED IN HEART, SIGNAL = 3.4; EXPRESSED IN PLACENTA, SIGNAL = 3.3; EXPRESSED IN BT474, SIGNAL = 3.4; EXPRESSED IN BONE MARROW, SIGNAL = 4.2; EXPRESSED IN HBL100, SIGNAL = 4.1; EXPRESSED IN FETAL LIVER, SIGNAL = 3.5; EXPRESSED IN HELA, SIGNAL = 5.3; EXPRESSED IN ADULT LIVER, SIGNAL =   4; EXPRESSED IN LUNG, SIGNAL = 4.6
aaaatatctggccaccagggaacagttacgtaaattatttgatgtgtctttttaacaagatattaggaagtgctcggcattgttaggattttttttggccacgtggaaaaacacacatgatataaagcaaaggaaaataaggcagtctgcaaatggatctgcttagaactgccattacgtaaaacagtcctcagctcatactcgacttggagagaaatccaaaaaaaaaaaaaaaaaaagtaagaactttttagctgatgagtaacatttgtggctgaatccttttctcatttctgttaaatattatgatggtgtttgtgcagaacaataaaaatgatgatgatgatgatgatgatgatgatattttagaagaactggaaatgctcttttacagcatctcagcactaaagccacactaagctgctataaaatccaaagtggtccctgaccatggagagacactgtggacactggg

SEQ ID NO: 245 - DNA, 475 bp, Homo sapiens; identical to SEQ ID NO: 244
  MAP TO AP000032.1; EXPRESSED IN PLACENTA, SIGNAL = 3.4; EXPRESSED IN BT474, SIGNAL = 3.6; EXPRESSED IN HBL100, SIGNAL =   6; EXPRESSED IN LUNG, SIGNAL =   5; EXPRESSED IN HELA, SIGNAL = 6.6; EXPRESSED IN ADULT LIVER, SIGNAL = 4.2; EXPRESSED IN HEART, SIGNAL = 3.6; EXPRESSED IN BONE MARROW, SIGNAL = 5.5; EXPRESSED IN FETAL LIVER, SIGNAL = 4.4; EXPRESSED IN BRAIN, SIGNAL =   4

SEQ ID NO: 246 - DNA, 458 bp, Homo sapiens
  MAP TO AP000033.1; EXPRESSED IN BONE MARROW, SIGNAL = 9.2; EXPRESSED IN FETAL LIVER, SIGNAL = 8.6; EXPRESSED IN PLACENTA, SIGNAL = 7.3; EXPRESSED IN BT474, SIGNAL = 6.6; EXPRESSED IN HBL100, SIGNAL = 8.3; EXPRESSED IN LUNG, SIGNAL =  20; EXPRESSED IN HELA, SIGNAL = 7.5; EXPRESSED IN ADULT LIVER, SIGNAL = 6.1; EXPRESSED IN BRAIN, SIGNAL = 9.9; EXPRESSED IN HEART, SIGNAL = 6.2
agggcttagaatagggccagctgagtagacaccagcttctgtcgtcatcactgacactgtcacccaccctcagcctcaccatcaccaccacccacttcgtaagctgtgatgggattgagtgatataacacgtcgcatgctcagaacagcacctggtgtgaactggcagcctgacaactgctacctgttgttgttatcatgattaattctgttcccggggggctctgtgaccagtctcttttcccttttctggctctagggtgctgctgtggggcccagcggccgtggagcatcacaagacgtgccggagcctgggcaggtcactgtggcagcagccgagtgtcggggacatccttcgcctgctggaccgggaccggatgatgcagaccatcctgcacttcccccagaaccggaggctgctgccccccgaggttgggctgctgctgttctgtccctacc

SEQ ID NO: 247 - DNA, 442 bp, Homo sapiens
  MAP TO AP000033.1; EXPRESSED IN PLACENTA, SIGNAL = 4.6; EXPRESSED IN HEART, SIGNAL = 3.8; EXPRESSED IN HBL100, SIGNAL = 3.8; EXPRESSED IN FETAL LIVER, SIGNAL = 4.9; EXPRESSED IN LUNG, SIGNAL = 3.3; EXPRESSED IN HELA, SIGNAL = 4.1; EXPRESSED IN BRAIN, SIGNAL = 3.8; EXPRESSED IN BT474, SIGNAL =   3; EXPRESSED IN BONE MARROW, SIGNAL = 3.5; EXPRESSED IN ADULT LIVER, SIGNAL = 3.2
tgaaacatcgagcactcaccaggctcctgacgtgggagcagggccgggtgctcaggacatgcaagccgcccctcgtgtcccccattgacacctccccacatctggatctgtgtgggcaggagggaccccagtctcattaccttctctttgtgcatttaacagaaatgctcaaggataagaacaagcctgtcatgccagcccgagccaaaggcccacggggccgaaagaggaggcctggggaggcagaggagatggctgaccctgagctgatggcatctaccttggagacatgcaagggcctcctgaggtccatcttgacttactggagaccagtgatccctggtcctgaccccactcaggagcctgtggactcagccagccccgagagcgatgcgccaggccccgtatatgctgccgcttccctggcagtcagttgggtgct

SEQ ID NO: 248 - DNA, 463 bp, Homo sapiens
  MAP TO AP000041.1; EXPRESSED IN HBL100, SIGNAL = 1.4; EXPRESSED IN FETAL LIVER, SIGNAL = 1.8; EXPRESSED IN BRAIN, SIGNAL = 1.4; EXPRESSED IN PLACENTA, SIGNAL = 1.7; EXPRESSED IN HEART, SIGNAL = 1.9; EXPRESSED IN ADULT LIVER, SIGNAL = 1.4; EXPRESSED IN HELA, SIGNAL = 1.2; EXPRESSED IN LUNG, SIGNAL = 1.5; EXPRESSED IN BONE MARROW, SIGNAL = 1.7; EXPRESSED IN BT474, SIGNAL = 1.6
ctgaggtgaaatctgggtggcatgggcgccgcacaatggggccgctgttccccggcccgggcttgtgttttacaacaggggaggggcgggcgtgaatggtctgatgattggaacaatccccccgattcaggcctacaaacgcatcttctgttccacaccgaggggacagaaaggagaaaagtgacaaagaacgcggggcggggggaattaaaacaaaatgcgctcgactaaaaaatctctcatatcctgcatattccagaaagcggctctatggagagagccttcaggaggcctcagccatatctgaatggctttctctggcctctgatttattgatgaagctgaagcgacttgctggagaaaggcctggagccttctttgtctccgagatgaagtacaataggccacagggcggagatctcttgtgatgctctcgggtcctgcctttctcttgccctctcct

SEQ ID NO: 249 - DNA, 469 bp, Homo sapiens
  MAP TO AP000043.1; EXPRESSED IN BONE MARROW, SIGNAL = 2.1; EXPRESSED IN HBL100, SIGNAL = 1.5; EXPRESSED IN PLACENTA, SIGNAL = 1.2; EXPRESSED IN BRAIN, SIGNAL = 1.7; EXPRESSED IN HELA, SIGNAL = 1.8; EXPRESSED IN FETAL LIVER, SIGNAL = 1.8; EXPRESSED IN BT474, SIGNAL =   1; EXPRESSED IN HEART, SIGNAL = 1.5; EXPRESSED IN ADULT LIVER, SIGNAL = 1.5; EXPRESSED IN LUNG, SIGNAL =   2
cagctgatacggactctctctctctttttttttttttttaagaattttcataactttttagcctggccatttcctaacctgccaccgttggaagccatggatatggtggaggtcatttacatcaacagaaagaagaaagtgtgggattataattatgatgatgaaagtgatagcgatactgaggcagcgcccaggacaagtggcggtggctataccatgcatggactgactgtcaggcctctgggtcaggcctctgccacctctacagaatcccagttgatagacccggagtccgaggaggagcctgacctgcctgaggttgatgtggagctccccacgatgccaaaggacagccctcagcagttggaactcttgagtgggccctgtgagaggagaaagagtccactccaggacccttttcccgaagaggactacagctccacggaggggtctgggggcagaattacct

SEQ ID NO: 250 - DNA, 371 bp, Homo sapiens
  MAP TO AP000043.1; EXPRESSED IN HBL100, SIGNAL = 2.9; EXPRESSED IN LUNG, SIGNAL = 5.8; EXPRESSED IN HELA, SIGNAL = 5.2; EXPRESSED IN ADULT LIVER, SIGNAL =   4; EXPRESSED IN BRAIN, SIGNAL = 3.6; EXPRESSED IN HEART, SIGNAL = 3.3; EXPRESSED IN PLACENTA, SIGNAL = 3.7; EXPRESSED IN BT474, SIGNAL = 4.8; EXPRESSED IN BONE MARROW, SIGNAL = 4.4; EXPRESSED IN FETAL LIVER, SIGNAL = 4.1
cagaatcaccatccaaagcccagacctcccaattcttacattggggattaaatttcaacatgaattttagaggagacgaaaacattcaaaccataataggacataaacttgatttctcattgataggatggatgcaactaaacagctcaacagtgttgattaaaaatgcttattatgatagaggaaaatggcagataggaggcaggactaacttgcagctcccactcggatggacagagcagtgcatgaagacccacatcgtcaaattttactccaagaactaacacaggatcataccaggaaaaccaaaagaaaccacagaccctttgaaggcggtgaattgctgctgcaggctctgtgtcccctacaaa

SEQ ID NO: 251 - DNA, 445 bp, Homo sapiens
  MAP TO AP000051.1; EXPRESSED IN PLACENTA, SIGNAL = 4.2; EXPRESSED IN FETAL LIVER, SIGNAL = 2.6; EXPRESSED IN ADULT LIVER, SIGNAL = 2.5; EXPRESSED IN BT474, SIGNAL = 3.2; EXPRESSED IN HEART, SIGNAL = 2.8; EXPRESSED IN BRAIN, SIGNAL = 4.4; EXPRESSED IN HELA, SIGNAL = 3.7; EXPRESSED IN LUNG, SIGNAL = 3.6; EXPRESSED IN HBL100, SIGNAL = 4.3; EXPRESSED IN BONE MARROW, SIGNAL =   6
ctggagaaagatgcaggctcggaggctaggccagtctggccttttcacatttttctgcctgctttatattcactggcagctgattagatggtacccacaagattaagggtgtgcctgccttccccagcccactgactcaaatgttaatcttttttggcaacaccctcacagacacacccaggatcaagacttgcatccttcaatccaatcaagctacacttagtattaaccatcacacagactaacagcagaatcaggagcctcaccgggagagcgcagagcacattgaggcagtagacatgcgctccaggccacttgggatgtcctgctctccatagaaatatactaacattatacattctcaatatgcaaatggccaatatgcacatgaaaagatgctcaacaacactaatcattagaaaaatgcaaaacaaagccacagtga

SEQ ID NO: 252 - DNA, 470 bp, Homo sapiens
  MAP TO AP000052.1; EXPRESSED IN ADULT LIVER, SIGNAL =   6; EXPRESSED IN LUNG, SIGNAL =  12; EXPRESSED IN HELA, SIGNAL = 8.7; EXPRESSED IN PLACENTA, SIGNAL = 8.6; EXPRESSED IN BT474, SIGNAL = 6.6; EXPRESSED IN BONE MARROW, SIGNAL =  11; EXPRESSED IN FETAL LIVER, SIGNAL = 9.3; EXPRESSED IN BRAIN, SIGNAL = 8.1; EXPRESSED IN HEART, SIGNAL = 5.4; EXPRESSED IN HBL100, SIGNAL = 8.8
taccattccctcctgggttccacctctttgtgtttttatgtcgtgaactccttcctctacttgatcctctaaacctcaaattcactgcccaacagtgatcctcctcttttcagtccattttctgagttttttaaaatttaaaaaaaaaaagaagaaggttttcttttagctccaagtctttttctcagacttaaatggtatcttcttgagcattcttttttacttgtttttcaagcctcttttccctccatgggggggctccctgggatgcagatttggtccctctccccctcatcacacagatctctgcatgcctgcgattttgcaggccacagacaggcagttgagggcatgaatgttcatcgagcagtggacggcacagatgtttctgcttttcagagccagcagcaacaaaccaagtgagcagccacttctctgcagatcagagcggggcatcttctctgctttgt

SEQ ID NO: 253 - DNA, 459 bp, Homo sapiens
  MAP TO AP000090.1; EXPRESSED IN HBL100, SIGNAL = 2.9; EXPRESSED IN ADULT LIVER, SIGNAL = 2.7; EXPRESSED IN HEART, SIGNAL = 4.4; EXPRESSED IN PLACENTA, SIGNAL = 2.4; EXPRESSED IN BT474, SIGNAL = 4.7; EXPRESSED IN BRAIN, SIGNAL = 9.3; EXPRESSED IN HELA, SIGNAL = 7.3; EXPRESSED IN LUNG, SIGNAL = 5.5; EXPRESSED IN FETAL LIVER, SIGNAL = 3.3; EXPRESSED IN BONE MARROW, SIGNAL = 1.8
acggtaaaataagaattcccggatccgctactataggcatttttcattcaggagtcctggaactggcccaggaatttgtaatttcaatatacaccctgggtaaattcattctgaggcagggaactcaaaaatactgctcctatagggtcagtgcacagaatgtaactgcaagagtccaaaacacagtacaacacagagtggcaatgtgctgaagaacaagtctgtgtatgtgacctaacaggagcatcctctttttcttccctcaagaccaggcccccaatcaacaccagccccacggccggccggctcacctaagcagcggtagggaatcacaaagtggggatgggtcttgcactgcttgcggccccgcttgcaccagttctggatggtcactggttggttggcttctaccacattggtgatctgcagttcagggtagacctgggagagcacacaaaa

SEQ ID NO: 254 - DNA, 471 bp, Homo sapiens
  MAP TO AP000091.1; EXPRESSED IN BONE MARROW, SIGNAL =   9; EXPRESSED IN LUNG, SIGNAL =  12; EXPRESSED IN PLACENTA, SIGNAL =  12; EXPRESSED IN BT474, SIGNAL = 7.5; EXPRESSED IN HBL100, SIGNAL =   9; EXPRESSED IN FETAL LIVER, SIGNAL =  12; EXPRESSED IN HELA, SIGNAL = 8.7; EXPRESSED IN ADULT LIVER, SIGNAL = 9.5; EXPRESSED IN BRAIN, SIGNAL =  15; EXPRESSED IN HEART, SIGNAL =  11
gtgttttgttgtcaggagccttaaattgaaattccataaggaagggtaggctgaataaaaattagagcgtcgtaacggttgtgagcttcaattttagctttttaaaggcaatttctagctctctaactttaagttttctgtgcatttatttaatcattccctgaaataatttgagcttataagattgctgaaaataatgattaatgaaacactatgtaaaagcaaactttcatcaaacattgactacattagtgaaacacaggagacgtaccatgttatacctccctgcctgaactgagatttctttgttatagcttacggaattcttgacattctaagcattcagatctaatcagtctgccaatacgaattgagttcctactatgtgtcagaagtcgggagtggctctggacgtgcacagagccacagcatcgtatgcacgcacaaaccccgctctcctggttcttgaaa

SEQ ID NO: 255 - DNA, 482 bp, Homo sapiens
  MAP TO AP000093.1; EXPRESSED IN PLACENTA, SIGNAL = 2.5; EXPRESSED IN BT474, SIGNAL = 4.6; EXPRESSED IN HBL100, SIGNAL =   8; EXPRESSED IN FETAL LIVER, SIGNAL = 4.3; EXPRESSED IN HELA, SIGNAL = 7.2; EXPRESSED IN ADULT LIVER, SIGNAL = 3.6; EXPRESSED IN BRAIN, SIGNAL = 3.3; EXPRESSED IN BONE MARROW, SIGNAL = 4.6; EXPRESSED IN LUNG, SIGNAL = 3.8; EXPRESSED IN HEART, SIGNAL = 3.2
gagcaagggtattttgctgcattcactttctggaactctgctgcacttggcctgtggtctttctgtcaagctggttgtgatagcaagggatgctgaatgcgttcatgagttcgagaacctgggttctgagctggaagtccacatcagagcgtgcgctaagtgcaagtgcaatgagtcagaagctaatgaaaagggtccaaagtgtgcaggcaacaggggcactgtggctcctaggggcatttgccagcttggcaaagtgcttatcggagaaatgaggagtttctgacaacttgggctagtcacaggcttcatggtgaaacttattatcatcaacagcaagcccacaatagattaccgaggacagggtattgcccttgtgatcagcaagtatcacacaggaaaggtaaatgttgttgtaaaactaaaaaagtaagcccacaaaattttggaaattcttcctttgcagtccccaaacataatcc

SEQ ID NO: 256 - DNA, 443 bp, Homo sapiens
  MAP TO AP000100.1; EXPRESSED IN BRAIN, SIGNAL = 5.6; EXPRESSED IN HEART, SIGNAL = 4.5; EXPRESSED IN BT474, SIGNAL = 3.7; EXPRESSED IN BONE MARROW, SIGNAL = 3.1; EXPRESSED IN LUNG, SIGNAL = 7.6; EXPRESSED IN PLACENTA, SIGNAL = 3.6; EXPRESSED IN ADULT LIVER, SIGNAL =   5; EXPRESSED IN HELA, SIGNAL = 5.6; EXPRESSED IN FETAL LIVER, SIGNAL = 4.8; EXPRESSED IN HBL100, SIGNAL = 3.4
acttatatcccacagcccccagtctcccatgctgggaccttctcacctcttctgtcctggcaagcagccaagtgtggctcagaggctgagcagagggaaagatgttggccctttgctcctcagcatcagtgggcttaagtgcgggcacaatccagacctggagtgtttgcatttgaaggcttagttctactcgaatgaaactctggttcaagccttccaggccaatgaaaaattccagccaactgagaccaagcaaatgtggctgtatccacatattcagagccaggccttgggcagggcaggtgacaaggagcatgtcatttgggggaacctagcactgagtgaaatcatcacagttaattctttactagctgtgtcagaatttcggctcattttaatcttggtgttcaatgaacaccctgaggtcttcctcatgagtcccc

SEQ ID NO: 257 - DNA, 454 bp, Homo sapiens
  MAP TO AP000102.1; EXPRESSED IN BT474, SIGNAL = 6.2; EXPRESSED IN BONE MARROW, SIGNAL = 9.7; EXPRESSED IN HBL100, SIGNAL = 6.4; EXPRESSED IN FETAL LIVER, SIGNAL = 7.4; EXPRESSED IN LUNG, SIGNAL = 9.6; EXPRESSED IN ADULT LIVER, SIGNAL = 6.8; EXPRESSED IN PLACENTA, SIGNAL = 5.9; EXPRESSED IN HELA, SIGNAL = 9.1; EXPRESSED IN BRAIN, SIGNAL = 9.1; EXPRESSED IN HEART, SIGNAL = 6.8
agctcatagctacccccagcctctttacaggtgagcaccatgatactaaggtaggtgaagtgacttctccaaagacagggagctagtaagcagctgggctgaaactcaaaggctgcccagctccccatccagggctccaagatggatgtgtcccatctctgagcctcattagctttggaaatgtggctgagagacagagagagagggagggacggacagggtgagagagacatgttggctactctgggccagtcctgggttctgacactcactcatgagctcccgggcttgggccttctcaatggctgctctcaggtcttcctggagcttgaggtctctttcaatgaggctccacttgtgcaagaggacaaggacgtccttggtggaaagcactgtctcatttacggtgaatctgttcatgtccctaaaggcctgtatgacagtggcccggtac

SEQ ID NO: 258 - DNA, 482 bp, Homo sapiens
  MAP TO AP000102.1; EXPRESSED IN BT474, SIGNAL = 1.7; EXPRESSED IN BONE MARROW, SIGNAL = 1.5; EXPRESSED IN FETAL LIVER, SIGNAL = 1.6; EXPRESSED IN LUNG, SIGNAL =   2; EXPRESSED IN HELA, SIGNAL = 2.2; EXPRESSED IN PLACENTA, SIGNAL = 1.4; EXPRESSED IN HBL100, SIGNAL = 1.6; EXPRESSED IN ADULT LIVER, SIGNAL = 1.5; EXPRESSED IN BRAIN, SIGNAL = 2.9; EXPRESSED IN HEART, SIGNAL = 1.7
tacccctcgacaacatcaccacggctcctgattgaacatgaggtccccaccagagacagaacccctgtgagagaacacatgtatcgtctaaattcttactctgcacaaggactttgggatcatgctctgtgacatcactgcctacaatcacaagtggcaggtcttctcagctgaccctcagcacccacgctaccacactgcccaccggcctgtccaaccctgcggctccaaggacacatcacttggcttccaccctagggctgcagaatggccttttccacctggtgaggtctggaaggaaagcccaaacccagatcagagcctaccttgctcagggcttctctgaagagctgcacgaattcttccatcatcacagctgtgtacacgcctgattcctgccacacctctttattcaggcagtggtcaacagtttttaatgccctcttcaaaatgacagaaataagggataaggctgtgtgcct

SEQ ID NO: 259 - DNA, 461 bp, Homo sapiens
  MAP TO AP000110.1; EXPRESSED IN PLACENTA, SIGNAL =   5; EXPRESSED IN ADULT LIVER, SIGNAL = 3.1; EXPRESSED IN HEART, SIGNAL = 2.6; EXPRESSED IN BT474, SIGNAL = 2.7; EXPRESSED IN BONE MARROW, SIGNAL = 3.3; EXPRESSED IN HBL100, SIGNAL = 2.8; EXPRESSED IN FETAL LIVER, SIGNAL = 2.3; EXPRESSED IN LUNG, SIGNAL = 3.5; EXPRESSED IN HELA, SIGNAL =   3; EXPRESSED IN BRAIN, SIGNAL = 3.8
ccaaaatgttcagacctggcggagactgatctaagaatgtgagtagtgagatgtcagggattgcggatggggcagaagggaggcttcacgcagcccgcacccttcaacacatacatgctcctcgtcctggtcaccactgagtgttacaggcaagaaaataaaaaccctaaactcctcagacagtgatcattaggtgtcattctgttcaaatcttaaaaaatagtttgagcagatgaagaatcagtaaagaaagcttggaggtgatttgataacattttatctacccagaggaccaatcaaagagagtatttgtattgtggtgatggtggtgatggtggtggtggtggtggtggtggtcgtggtgctggttttgttccatttgcttgcttccggtggcttcactcacatgcttcctctgcagtcctggttccccacagccatgggcagaaggtacagcctat

SEQ ID NO: 260 - DNA, 457 bp, Homo sapiens
  MAP TO AP000110.1; EXPRESSED IN ADULT LIVER, SIGNAL = 1.3; EXPRESSED IN BRAIN, SIGNAL = 0.9; EXPRESSED IN HEART, SIGNAL = 1.2; EXPRESSED IN BT474, SIGNAL = 1.9; EXPRESSED IN BONE MARROW, SIGNAL = 1.4; EXPRESSED IN HBL100, SIGNAL =   2; EXPRESSED IN HELA, SIGNAL = 2.5; EXPRESSED IN PLACENTA, SIGNAL = 1.5; EXPRESSED IN FETAL LIVER, SIGNAL = 1.7; EXPRESSED IN LUNG, SIGNAL = 1.5
ccccaaccagtgaactcaactggagagcgttatccaatatgacttatgggatgcacaaaagtgtgacttggagataaactagttgaaattctctcctcttgtaatctttattttcttggagaaatagtgaagaaattaatgttataaaagctctgcaaaagtgaactgaccacctaattagtccaggtgaatatttaaaccactgtggaaaagttgatttttccatttgctattgctgtgtaatgaaccaaaacctcagtggcataaaacactagtcatttatcatcacccacgtatttgcatgtttacagggctggcttggtcttggctgatctggacttggcgcctctgatcctggtgtctctcatcctcctggacccactggctgactggatatgttcctatcatggcattggcagaagcacaagggagagagcccgaccccacaagtactttc

SEQ ID NO: 261 - DNA, 410 bp, Homo sapiens
  MAP TO AP000111.1; EXPRESSED IN BT474, SIGNAL = 0.92; EXPRESSED IN HELA, SIGNAL = 1.1; EXPRESSED IN ADULT LIVER, SIGNAL = 0.82; EXPRESSED IN PLACENTA, SIGNAL = 0.87; EXPRESSED IN BONE MARROW, SIGNAL = 0.98; EXPRESSED IN HBL100, SIGNAL = 1.2; EXPRESSED IN FETAL LIVER, SIGNAL = 0.98; EXPRESSED IN LUNG, SIGNAL = 1.1; EXPRESSED IN BRAIN, SIGNAL = 1.6; EXPRESSED IN HEART, SIGNAL = 1.2
atcaaccctgattacaggcgatcgattctacaaagaactctacaaagattctacattctttattctatatagattctgtaaaagaagaatctaagcactttgttctgcaccgtccaaacatgagtcattgttttcagggcatcatttggcttttaacacaaagacccagcagagggagccgtttcctaacatgaaaggagctataggccctgctaagacagcaactgttattagtattattccactagagctgccatagaggggtgacgtcaacaacagaaatgtattttctcacagttctggagactggaagtctgaaatcaaggtgtcagcagaattggttccttctgagatctctcttcttggctcatagatggcggatttctgagtcttcacatggtcacccctct

SEQ ID NO: 262 - DNA, 488 bp, Homo sapiens
  MAP TO AP000111.1; EXPRESSED IN PLACENTA, SIGNAL =   4; EXPRESSED IN BONE MARROW, SIGNAL = 4.6; EXPRESSED IN HBL100, SIGNAL = 5.1; EXPRESSED IN FETAL LIVER, SIGNAL = 3.5; EXPRESSED IN ADULT LIVER, SIGNAL = 4.1; EXPRESSED IN BRAIN, SIGNAL = 8.5; EXPRESSED IN BT474, SIGNAL = 3.2; EXPRESSED IN LUNG, SIGNAL = 4.7; EXPRESSED IN HELA, SIGNAL =   6; EXPRESSED IN HEART, SIGNAL = 4.3
ggggagagagagagagagaaagagaaaagaaagaaagaaattattaaggacaaatgcaaaaatttagttccaagaatatcccatgatacattaagtctttaataaaaatcagagacaatttaaatgttcaaaacagtgaatcagttaaatcatgatacagtcacttagtggaatagcattagcaatgaaaaattatgatgtaaatcaggacttggcagattttctatacagggccagagaagaaccactttagactttgtgggccacatatggtctctgtgacatattcctgtctgtttttgttttttgcacagtgtcttttgaaccaccagagtttgagattgttggttttaccaaccacattaatgtgatggtgaaatttccatctattgttgaggaagaattacagtttgatttatctctcgtcattgaagaacagtcagagggaattgttaagaaggtaagtggcttctcctgttaggatcaaa

SEQ ID NO: 263 - DNA, 474 bp, Homo sapiens
  MAP TO AP000112.1; EXPRESSED IN LUNG, SIGNAL = 1.6; EXPRESSED IN ADULT LIVER, SIGNAL = 1.8; EXPRESSED IN BRAIN, SIGNAL = 1.1; EXPRESSED IN HEART, SIGNAL = 1.7; EXPRESSED IN PLACENTA, SIGNAL = 1.6; EXPRESSED IN BT474, SIGNAL =   3; EXPRESSED IN BONE MARROW, SIGNAL = 2.7; EXPRESSED IN HBL100, SIGNAL = 2.5; EXPRESSED IN FETAL LIVER, SIGNAL = 1.9; EXPRESSED IN HELA, SIGNAL = 1.8
aggcccattgctacactgccagtagtaggtacagtggatcagaattcttgcttgttattcttttgatgtatgtcagcaataattccagaaaccaaactttggagaagataggaaaagggtgaaactcttcaaaaacctctgggtcctccaaccagttgctgtttctgagacgtcccccaagataaacgtacaggctctgttttcagggattgtgatggttaaaatgctcttgggatcactgtgacccgacctgtgacaagaatgtaacatgcccattacccctggcagaaacggtcccctcctggatggtggccgtcatcctcatggcctcggtcttcatggtctgcctggcactcctcggctgcttcgccttgctgtggtgcgtttacaagaagacaaagtacgccttctcccctaggaattctcttccacagcacctgaaagaggtaggtaggatggagtgagatgtggatt

SEQ ID NO: 264 - DNA, 480 bp, Homo sapiens
  MAP TO AP000112.1; EXPRESSED IN LUNG, SIGNAL = 1.6; EXPRESSED IN HELA, SIGNAL = 1.4; EXPRESSED IN ADULT LIVER, SIGNAL = 1.4; EXPRESSED IN HEART, SIGNAL = 1.1; EXPRESSED IN PLACENTA, SIGNAL = 0.9; EXPRESSED IN BT474, SIGNAL = 1.9; EXPRESSED IN FETAL LIVER, SIGNAL = 1.3; EXPRESSED IN BRAIN, SIGNAL = 1.3; EXPRESSED IN BONE MARROW, SIGNAL = 1.8; EXPRESSED IN HBL100, SIGNAL = 1.5
ggagaccagtgtattcaaagtgctaaaaaaaacaaaaccaaaaaactcaaaaccctgtatatggcaaaattgcccttcaaaagcataaggaaattaagatgttcttagatagacaaaagctaagggagttcattaccgctagaactgccctgcgagaaatgcttaaggaagtcctgaaaggtgaaatgaaagggcactagacagaggggacagtgcagattcaggcaggtgcaatggcttctggggaagacccagccagtggggctattgccagcatccagtcagctgccaccttccctgaccccagtgtcaagtgatgcgcagggtgatccaggtgtgtgaggggcagctggatgtccagactgagggcactggtgccatcagtggctatcctaccactcaattcatgacccaggtggtgatccagggtgatatcaccagttatgatgcagttaacacagaggggaaagctgctgagat

SEQ ID NO: 265 - DNA, 421 bp, Homo sapiens
  MAP TO AP000113.1; EXPRESSED IN BONE MARROW, SIGNAL = 2.6; EXPRESSED IN HBL100, SIGNAL = 4.4; EXPRESSED IN FETAL LIVER, SIGNAL = 3.4; EXPRESSED IN ADULT LIVER, SIGNAL =   2; EXPRESSED IN BRAIN, SIGNAL = 2.9; EXPRESSED IN HEART, SIGNAL =   2; EXPRESSED IN PLACENTA, SIGNAL = 3.1; EXPRESSED IN HELA, SIGNAL = 2.6; EXPRESSED IN LUNG, SIGNAL = 3.7; EXPRESSED IN BT474, SIGNAL = 2.7
tcgtaacaactgggacctgcaggtggaaaggctgccccaggcgcctcttttctttttgtgctgcctgtaccagtagggccatctttgtagccaaaagtcgggggtgtggggccatgcccagggggacctggtaatgccatttctgcactttgacaaaaactgagttgtatgaatgacttagataatggacattgaaacatttttgtaattatttccctctctctcctcccttcctccctcttctttttctctgtccccctcaagaccctctttcccagctgcccgctcctcagcacccgaagattcgcctgtacaacgcagagcaggtcctgagttgggagccagtggccctgagcaatagcacgaggcctgttgtctaccaagtgcagtttaaatagtaagccggtatttctgttggatc

SEQ ID NO: 266 - DNA, 451 bp, Homo sapiens
  MAP TO AP000121.1; EXPRESSED IN PLACENTA, SIGNAL = 1.6; EXPRESSED IN BT474, SIGNAL = 1.3; EXPRESSED IN BONE MARROW, SIGNAL = 1.6; EXPRESSED IN FETAL LIVER, SIGNAL = 2.1; EXPRESSED IN LUNG, SIGNAL = 2.1; EXPRESSED IN HELA, SIGNAL = 2.3; EXPRESSED IN BRAIN, SIGNAL =   2; EXPRESSED IN HEART, SIGNAL = 1.3; EXPRESSED IN HBL100, SIGNAL =   2; EXPRESSED IN ADULT LIVER, SIGNAL = 1.9
ctgggtgatcagcaggttgcacggttgagctgtgagagaccagagtccccacgcctgtggatgaccggtggtcccctccatgaagccagccgcaagcaagcagcaaagagcagagctgtaacttgactgttggccccatggggatagagaccttttctgcttggtctccagtgtagctccagccccctatcctcgtgcctgttgcagaataggtgctaagtaaatatttgttgactgaaggatcataaaagaaacctcccatatcggtgatggaacatttagttagcatggcttctttcttcttgaaggttcttgagcacgtgcccctgctgctgtatatcttggcagcaaaaacattaattctctgcctgacatttgctggggtgaaaatgtatcaaagaaaaaggttggaggcaaaacaacaaaaactggaggctgaaaggaagaagca

SEQ ID NO: 267 - DNA, 498 bp, Homo sapiens
  MAP TO AP000130.1; EXPRESSED IN PLACENTA, SIGNAL = 2.6; EXPRESSED IN HBL100, SIGNAL = 1.8; EXPRESSED IN FETAL LIVER, SIGNAL = 1.7; EXPRESSED IN HELA, SIGNAL = 1.2; EXPRESSED IN ADULT LIVER, SIGNAL = 1.5; EXPRESSED IN BRAIN, SIGNAL = 2.3; EXPRESSED IN BONE MARROW, SIGNAL = 2.2; EXPRESSED IN HEART, SIGNAL =   4; EXPRESSED IN BT474, SIGNAL = 1.8; EXPRESSED IN LUNG, SIGNAL = 1.6
tccccaaaatgagaaacagcagaagcattataaagctgcccatgggtgacaggtggatctgtagcaaaacagctctatgagaaaataaagttccctgcgcctttgaaatttcaacaggaaatgcagggccagtcatcagcccatcttgcacacacattttataccacctgccagacagaggcactcactgaaacacacaagccgcatgataaactccccgggtcgtggcacaacggagttcagactcgcccccagcaccctgcacagccatacctgggttgctggtgagaaaggcgagggggctctcgccaaggtcggcagggccgtccactcggtggggcgggctttccagcagctccactccttcctccagctcggggtaggtcctcaccaggaggcccagcgagggctgtgagaggaaatctttgagcatagaagagttcagggcgtcagcagcacgattattgatctcaagaatctcatctcctgctttcaggc

SEQ ID NO: 268 - DNA, 492 bp, Homo sapiens
  MAP TO AP000130.1; EXPRESSED IN LUNG, SIGNAL = 1.2; EXPRESSED IN PLACENTA, SIGNAL =   1; EXPRESSED IN BT474, SIGNAL = 1.6; EXPRESSED IN BONE MARROW, SIGNAL = 1.2; EXPRESSED IN HBL100, SIGNAL = 2.4; EXPRESSED IN FETAL LIVER, SIGNAL = 0.93; EXPRESSED IN ADULT LIVER, SIGNAL = 1.1; EXPRESSED IN BRAIN, SIGNAL = 2.2; EXPRESSED IN HELA, SIGNAL = 1.3; EXPRESSED IN HEART, SIGNAL = 1.1
cccctagaagagcacatcattgatgggggccagggctcctctactgggtttctgtctttcattcaatgtaatattgttccgtttagctattaacaatcagctatgaacaaagggtgaagaacactgacagtcacagtaaagaacttagcatcctggatgacaggctgtcgaggagatatccgatgatgtttcacgattccaaaacagcaaaaaaaaaaaaaaacccttttagagacctaacaattttgtccggacctaaacacggaagaacgattacctgatctaatattgttttctttttctttgagtcagtgactgaagacagctgcatttcacccattttcttcatcttttcatccatgtcaatcttctgttccagttttttgatctctgatttcaggagtcggagcgtgtcttccttgtggtggtgcctcgcgaccgcagtggcgcaggcagagtggatggcggtgatccagttttcaagctccgtct

SEQ ID NO: 269 - DNA, 470 bp, Homo sapiens
  MAP TO AP000131.1; EXPRESSED IN FETAL LIVER, SIGNAL = 1.3; EXPRESSED IN LUNG, SIGNAL = 1.2; EXPRESSED IN HELA, SIGNAL = 1.3; EXPRESSED IN BRAIN, SIGNAL = 1.7; EXPRESSED IN BT474, SIGNAL = 1.4; EXPRESSED IN BONE MARROW, SIGNAL = 1.2; EXPRESSED IN PLACENTA, SIGNAL = 1.4; EXPRESSED IN HEART, SIGNAL = 1.1; EXPRESSED IN ADULT LIVER, SIGNAL = 1.3; EXPRESSED IN HBL100, SIGNAL = 1.5
aatatgtagcgtcatccccgtaaagcctgctctcctcagtgtctggcatgctctgcacagaggctgctgtgaggacgatgctgctgtctacgctgggagtgacagaagagtcagtgtaagacacaggtctcaagcccatgtccactcggtccacccagatggggctcccgaagtcttctagggtaccatcttgggagaagggctccaggccattttcagccagggactgggggatgctgggggtgctgctggatcgggtgctcacttcggagttcctgtggatcaccttccccgaggaagcgtgcctggtcctccgcgtcttgtgcgagaggcgcagggagcgggaagtgtgcttgcgccccaggctggcatgcttttctccataaaactcgtgctctacatgttgactttctgcgtttcccatggttttatggtctgcagcaaagcggggggaaaggggagaattgagt

SEQ ID NO: 270 - DNA, 469 bp, Homo sapiens
  MAP TO AP000133.1; EXPRESSED IN BONE MARROW, SIGNAL = 3.6; EXPRESSED IN HBL100, SIGNAL = 2.1; EXPRESSED IN BRAIN, SIGNAL = 3.1; EXPRESSED IN HEART, SIGNAL = 2.6; EXPRESSED IN PLACENTA, SIGNAL = 1.9; EXPRESSED IN BT474, SIGNAL = 2.1; EXPRESSED IN FETAL LIVER, SIGNAL =   2; EXPRESSED IN LUNG, SIGNAL = 2.2; EXPRESSED IN HELA, SIGNAL = 2.4; EXPRESSED IN ADULT LIVER, SIGNAL = 2.2
ccacagagcaagaccctatttcgaaacaacaacaacaaaagaaaggttataagcgccatggctatgactagtgtcaaattgcttgccattgttttaagaaagccagatacctggattggactctggggtgttctccgagggacaccttcgtcacacaaactctgtacttcctggaatcgatatagcactaagttatgtgcaccaaattataaaagacttatccataatattttctcactgaaattctcagggcttttaatatctccagaatatatttttccattttccataagactcaaaagtaataaaagctctaataaatctactacaaagtcactgcaaaaagtagaagatgaagaggactctgaggaagacagcaatcatgatgagatgagtgagcaggaagaggagcttgaggatgaccctacgatagtcaaagactatcaagacctggaaaaagcagtgcagt

SEQ ID NO: 271 - DNA, 467 bp, Homo sapiens
  MAP TO AP000140.1; EXPRESSED IN PLACENTA, SIGNAL = 1.7; EXPRESSED IN BT474, SIGNAL = 3.4; EXPRESSED IN HBL100, SIGNAL = 3.1; EXPRESSED IN HEART, SIGNAL = 1.9; EXPRESSED IN ADULT LIVER, SIGNAL = 2.4; EXPRESSED IN BRAIN, SIGNAL = 7.2; EXPRESSED IN BONE MARROW, SIGNAL = 1.3; EXPRESSED IN FETAL LIVER, SIGNAL = 2.1; EXPRESSED IN LUNG, SIGNAL = 3.3; EXPRESSED IN HELA, SIGNAL = 3.8
tgtactggtttttgttgcttgtgtttgaaaaaaaaaagtctaagagtaatcatgcttttttaaagtcatgcattatcatttgtattattttgataacttcaacacaaattgtaagttgagataacaacacacactctcaataccttgagcagaatattcacggtaagttgcaatgaatgaaaaccaaaacaagaaagaacaactgtaacccaagcatcatggaagcacactgattcgttttttaaaagagatacttagctagttcttagcaaaaagctaagcctaattctctcatagtcttaattcccacttggaaacatgcagtcaagtttacctacctccaccacaccatgatgaatggatgtgtactgtttcttcttcagcatcaccaaggtgatgacgatcactgtcgctatgacaacaccgcccaccatgagtccaatgattgcacctttgtttgaacccac

SEQ ID NO: 272 - DNA, 463 bp, Homo sapiens
  MAP TO AP000141.1; EXPRESSED IN BT474, SIGNAL = 1.5; EXPRESSED IN FETAL LIVER, SIGNAL = 1.3; EXPRESSED IN LUNG, SIGNAL = 3.2; EXPRESSED IN ADULT LIVER, SIGNAL = 1.5; EXPRESSED IN PLACENTA, SIGNAL = 2.1; EXPRESSED IN BONE MARROW, SIGNAL = 0.9; EXPRESSED IN HBL100, SIGNAL = 1.5; EXPRESSED IN HELA, SIGNAL = 1.5; EXPRESSED IN BRAIN, SIGNAL = 3.5; EXPRESSED IN HEART, SIGNAL = 2.3
ttgtcttttccaacaattggcagtttacatgctttgcagcataaaaaatataaagaataatttacacagatatattattttaatgacatagtaactcctagtatttactttttaaagtaaaattataatgaaaatatttatgactacatcaaaaaaaattcaccactcaagaacatacaaaagataactctctctcttgcacacacgttatgtatgtgtatatatacctcccagaacgcccttgctggctcaggggactcttaccttcgttttctgtgttggctggcacagagtcagccccaaaagaatgccacggctggagatcgtccaggctgaactctccattcacgggaaggagctccacggtggttttcgtttcggtcaaagatggcatgagagcatcgtttccgtaactgatccttggttcactaatcatgttggccaagacgtcatctgaatagtt

SEQ ID NO: 273 - DNA, 378 bp, Homo sapiens
  MAP TO AP000141.1; EXPRESSED IN HBL100, SIGNAL = 1.3; EXPRESSED IN BRAIN, SIGNAL =   3; EXPRESSED IN PLACENTA, SIGNAL = 1.5; EXPRESSED IN BT474, SIGNAL = 1.6; EXPRESSED IN BONE MARROW, SIGNAL = 0.79; EXPRESSED IN LUNG, SIGNAL = 2.4; EXPRESSED IN HELA, SIGNAL = 1.5; EXPRESSED IN ADULT LIVER, SIGNAL = 1.3; EXPRESSED IN FETAL LIVER, SIGNAL = 1.2; EXPRESSED IN HEART, SIGNAL =   2
gagccataacaagattgggcaaattagaaaaaatgctgccacgtataattcaataacaagtgtccaattattacaaaactataccctaagtcaggcgacattcctccagtcttacaagtatggagaggtaagaactgattcaattgctaaggctagtaagctagttccagcctgacagtttcatcgtaaaaggcaagctgttctattaacttccatattcctcaaacagataactcacttcctcaattttcctctgggggaaaatacatgtccatgtgcagcatcaaaagaacagcttacttaccaacttcatcctgaatctcctcggccactgcaggcacgttgtagagcagggagagagactgattcatgcgctca

SEQ ID NO: 274 - DNA, 498 bp, Homo sapiens
  MAP TO AP000141.1; EXPRESSED IN HELA, SIGNAL =  10; EXPRESSED IN BT474, SIGNAL =  12; EXPRESSED IN FETAL LIVER, SIGNAL = 6.4; EXPRESSED IN LUNG, SIGNAL = 9.5; EXPRESSED IN PLACENTA, SIGNAL = 6.1; EXPRESSED IN BONE MARROW, SIGNAL = 6.6; EXPRESSED IN HBL100, SIGNAL =  11; EXPRESSED IN ADULT LIVER, SIGNAL = 6.4; EXPRESSED IN BRAIN, SIGNAL =  33; EXPRESSED IN HEART, SIGNAL = 9.5
ccttccagcttttgtgttcgaacttgaactatgccatcaattgtcaccacctcaggaatattaaatcaagtcagggcttgcaatgtgagtccctgggagtcctgtctggctgctctgtggggaagtgtgagtacctgctgtgtagagatgaccttgtggaggtagctgccctgtgaccctttgaccttcaagatggaatggacaggggttgaacctctgaataacagtgctcaaggcatttctcctcattctttttgtatggcttccagttcccagtgccccacccttactgtctgtgctgtgacctgaagtgtgaactcggctgcagcgagacctacccgaggaggaacagcctgcagagcggtgatgtagttctccagggccaggcggcggcggtcattgagcatggcttccactctggccatgtgtgtctccaccagctgctgtctctcgttggctgcttcctgttccaaagattccactttctcctggaaatgc

SEQ ID NO: 275 - DNA, 469 bp, Homo sapiens
  MAP TO AP000142.1; EXPRESSED IN BRAIN, SIGNAL = 4.5; EXPRESSED IN BONE MARROW, SIGNAL =   4; EXPRESSED IN ADULT LIVER, SIGNAL = 3.6; EXPRESSED IN PLACENTA, SIGNAL = 4.1; EXPRESSED IN BT474, SIGNAL = 4.6; EXPRESSED IN HBL100, SIGNAL = 5.3; EXPRESSED IN LUNG, SIGNAL =   4; EXPRESSED IN HELA, SIGNAL = 4.7; EXPRESSED IN HEART, SIGNAL = 3.4; EXPRESSED IN FETAL LIVER, SIGNAL = 3.2
aaacagccactccagctttgtttaaaagagaagcactcaaaagtccctctggattgcaagacatatgtgctacagctaggaagagaacacatccatggccatgctttatcagggaaagacggagaggtgtgctcatgattgaacatactgcggagactctgagcaattagagaagtggacagaaatgtggttagtggtagcaacaggcccattcccaagaaccaggaaaatcaatctgttacaaaaagcagagtcagtggcgagagagacgaaaggtggccaggctcgaagaagggtccacttactggcgctgccacacacggccatgcagtactcttctgtgtcaaagttgttccggttgccgccacatccgccgtaaaagaatggggcacacttcccttcagtcacatcaaagtaccagcgggagatcattgctcggcacggccccgtctcggcttgttcagagcac

SEQ ID NO: 276 - DNA, 453 bp, Homo sapiens
  MAP TO AP000142.1; EXPRESSED IN HELA, SIGNAL =  20; EXPRESSED IN BRAIN, SIGNAL =  22; EXPRESSED IN HEART, SIGNAL =  14; EXPRESSED IN BT474, SIGNAL =  15; EXPRESSED IN HBL100, SIGNAL =  16; EXPRESSED IN FETAL LIVER, SIGNAL =  15; EXPRESSED IN ADULT LIVER, SIGNAL =  13; EXPRESSED IN PLACENTA, SIGNAL =  15; EXPRESSED IN BONE MARROW, SIGNAL =  16; EXPRESSED IN LUNG, SIGNAL =  20
agatgactacctggttgggcggagtcttgtagaattaacttgggatttgccaagcagcatatacaaggtacaaaacaaactgtataataaagatttcacattatttgaaattgtttgcttgttaaaccaaaaaaatttcacaagcataagaagccttttggaaaaaaaaacatgtttttgattggggaaggcagtggtgctagggtggatatttccaactctggtattacgctttcttttccttgggggtggggggaatccaagcaaatggtggattacctcgaaccacctcttccacagactctgtggtggtggtggtggtggtggcaatgctggtggttctctctgtggcttcttcgtagggttcctcagcctcttcctctacctcatcaccatcctcatcgtcctcgtcatcatcggcttcttcttcttccacctcagccacttcttcct

SEQ ID NO: 277 - DNA, 482 bp, Homo sapiens
  MAP TO AP000142.1; EXPRESSED IN LUNG, SIGNAL = 4.6; EXPRESSED IN HELA, SIGNAL = 4.5; EXPRESSED IN ADULT LIVER, SIGNAL = 2.9; EXPRESSED IN BRAIN, SIGNAL =  11; EXPRESSED IN HEART, SIGNAL = 2.9; EXPRESSED IN BT474, SIGNAL = 4.5; EXPRESSED IN FETAL LIVER, SIGNAL = 2.8; EXPRESSED IN PLACENTA, SIGNAL = 2.6; EXPRESSED IN HBL100, SIGNAL = 3.9; EXPRESSED IN BONE MARROW, SIGNAL = 1.6
aatgaccaaaacagaacgccattattatttcaactccctgttagaactaccagtaacctatgatagttatcagtgggattttgatcccaagtttaatattaaatagttaaaattaactctgtgatgggtgactgatattattaattcaacaggatgccataaaaattcatagttcagatttttgcataacagcagactctgatgggagtgggcagagaccttttcagtgataaacagaaagattaatttacaggatacaaatactccatacaagatgtttcagcatctctgaggctgaacacaaaggccaccttacctcccatctgcatagtctgtgtctgctccgccccaccagacatccgagtcatcctcctccgcatcagcagaatccacattgtcactttcttcagccagtgggcaacacacaaactctacccctcggaacttgtcaattccgcagggcagcaacatgccgtagtcat

SEQ ID NO: 278 - DNA, 474 bp, Homo sapiens
  MAP TO AP000143.1; EXPRESSED IN PLACENTA, SIGNAL = 3.3; EXPRESSED IN HEART, SIGNAL = 1.9; EXPRESSED IN BRAIN, SIGNAL = 1.8; EXPRESSED IN ADULT LIVER, SIGNAL =   2; EXPRESSED IN HELA, SIGNAL = 3.1; EXPRESSED IN LUNG, SIGNAL = 2.3; EXPRESSED IN FETAL LIVER, SIGNAL = 2.7; EXPRESSED IN HBL100, SIGNAL = 5.5; EXPRESSED IN BONE MARROW, SIGNAL = 1.8; EXPRESSED IN BT474, SIGNAL = 5.7
ggaaagcgttctaccttcttgtcaatacaaatgcacttgattccatttcctccccgcaaggagaggaaattgacaatttctctccccagggtagccagcctccaagaaggcccccaatagtccctgcctcctgctattcatggaccctgggaaactccacaatgtatcagggtctgtctgtgcaacaaatggagtacagcagaagtgatgatggtgtaacttccgagcatgtatatattagacttaaagatgctgcaactcttttaaaaacaaaccctttgctaccagaaaggtcactgaagggcatgatgatgtgtaacatccaaaacaaggtcatgaagggcatcacaattcttcattgctctctgggatcactcactgtgagggaggtcatcagctgccatgttctgagacatttggtgctaaaaccaggaaagtttttggcaaaatacactggatcaccctacctgacaa

SEQ ID NO: 279 - DNA, 472 bp, Homo sapiens
  MAP TO AP000150.1; EXPRESSED IN BONE MARROW, SIGNAL = 0.65; EXPRESSED IN HBL100, SIGNAL = 2.2; EXPRESSED IN LUNG, SIGNAL = 0.94; EXPRESSED IN ADULT LIVER, SIGNAL = 1.9; EXPRESSED IN BRAIN, SIGNAL = 1.2; EXPRESSED IN PLACENTA, SIGNAL = 1.1; EXPRESSED IN BT474, SIGNAL = 2.2; EXPRESSED IN FETAL LIVER, SIGNAL = 1.4; EXPRESSED IN HELA, SIGNAL = 1.3; EXPRESSED IN HEART, SIGNAL = 1.7
aaggacatcattgccctttgcaaattacaatataaatgcctctctggaggaacttcttgattatactgacattgatttttttttttaagtctgctatatgggaatgcaatattgtatttattctattcattaacaatacttgaacatttacaatattcattgaacataatctaagagaaggtcaagttacattttttacttctctattaataagagagatggtcaaattaatttatggtcaaaattataatggcaaaaacttataaataaatacgtgcttggtgttactatggttacacacagttcagtttttggtgtaaagttctttggctgcaagaaagaacatttggtttacttcactaatagaaatatctcttaaggctggaatggcctcctcttggtatttcttctgctgttgattttttgcatagttatctgtaagaaaagaccaaaaagctctgtttacctaagc

SEQ ID NO: 280 - DNA, 467 bp, Homo sapiens
  MAP TO AP000150.1; EXPRESSED IN BT474, SIGNAL = 1.6; EXPRESSED IN HELA, SIGNAL = 1.1; EXPRESSED IN BRAIN, SIGNAL = 1.6; EXPRESSED IN PLACENTA, SIGNAL = 1.1; EXPRESSED IN HBL100, SIGNAL =   1; EXPRESSED IN FETAL LIVER, SIGNAL = 1.1; EXPRESSED IN LUNG, SIGNAL = 1.2; EXPRESSED IN ADULT LIVER, SIGNAL =   1; EXPRESSED IN BONE MARROW, SIGNAL = 1.5; EXPRESSED IN HEART, SIGNAL = 1.2
gcacatacaaagataaataagatgcccttgatgatcctctatttaaaggagacatgtaaacaggttaacttagagtagagatggtgaatatgtgaacctgaggaaaggaagaaatagattaaattatctggagagaggaaaagtcagcagaatggggacgagaatctttcggagctcagtgttctgataggagttatttccttgggcataggttccaagtatttttctaatataccatagaagccaggaaaactttcttctgttatctcaaatgatttaattactgacttgagtttgtgttgtctccttagacttgtgcaccatggacaattttgctgagggagatttcactgtggcggattatgccttgttagaagattgccctcacgtggatgattgtgtctttgctgctgaatttatgagcaatgattatgttcgtgtgactcagctttactgtgatggggtgg

SEQ ID NO: 281 - DNA, 462 bp, Homo sapiens
  MAP TO AP000151.1; EXPRESSED IN FETAL LIVER, SIGNAL = 2.2; EXPRESSED IN HELA, SIGNAL = 3.3; EXPRESSED IN ADULT LIVER, SIGNAL = 2.2; EXPRESSED IN BRAIN, SIGNAL = 3.3; EXPRESSED IN BT474, SIGNAL = 5.3; EXPRESSED IN BONE MARROW, SIGNAL = 1.7; EXPRESSED IN LUNG, SIGNAL = 2.2; EXPRESSED IN HEART, SIGNAL = 1.1; EXPRESSED IN PLACENTA, SIGNAL = 1.2; EXPRESSED IN HBL100, SIGNAL = 2.4
caacccaaaggggtctcttctaattctcctaaaccaggctctgaggatgcaaattacaagcgagtctcctgtaattccccaaaccggttcttgaggatgtgaaaccaacttattgggctcaatcccatttggtcacaggatactgtacgtatcttcctttccagagatttgatatcacccagacaccgccagcatacataaacgtgttaccaggtttgccccagtacaccagcatatatacacccttggccagcctttctcctgaatatcagctaccaagatcagtaccagtggtgccgtcttttgtagccaatgacagagcagataaaaatgctgctgcctattttgagggtcatcatttgaatgctgagaatgttgctggtcaccagattgcctctgaaacacagatccttgagggctctttgggaatatctgtaaagtcacactgcagcacaggtgatg

SEQ ID NO: 282 - DNA, 479 bp, Homo sapiens
  MAP TO AP000151.1; EXPRESSED IN PLACENTA, SIGNAL = 1.4; EXPRESSED IN BONE MARROW, SIGNAL = 0.98; EXPRESSED IN HEART, SIGNAL = 0.86; EXPRESSED IN BT474, SIGNAL = 1.2; EXPRESSED IN BRAIN, SIGNAL = 0.78; EXPRESSED IN HBL100, SIGNAL = 0.88; EXPRESSED IN FETAL LIVER, SIGNAL = 1.1; EXPRESSED IN LUNG, SIGNAL =   1; EXPRESSED IN HELA, SIGNAL = 0.81; EXPRESSED IN ADULT LIVER, SIGNAL = 1.1
caatagaaaatacaaataaaaagggcatttaaaaacccgccctgtaatcagtattaccactttggtatatatttttctaaactcttgaatgcatggatatgtgaattagtcaaaactgaatacgctagtcacactttgtatgttctctgaggggctgaatgttttggttgttttccatttttttttttattgtggttgtcctttttttcttttagttagaaatatactgtgcccatcttttctaggaaatagaaaacggtcaagttaagtgtatatttttttcaaactaaacctggctccgagctttgcactgggcattggagaggccttcaatggctcttccccggtctggcacttcctcttcttccctgaccctcgagtcatgggcagcagtggaggggcatgaaccctccttctgcagcatctgccccatctcctcctgggccgagtcatgccttgggagagacagcaaaaccctg

SEQ ID NO: 283 - DNA, 430 bp, Homo sapiens
  MAP TO AP000151.1; EXPRESSED IN BONE MARROW, SIGNAL = 4.5; EXPRESSED IN HBL100, SIGNAL =   8; EXPRESSED IN FETAL LIVER, SIGNAL =   6; EXPRESSED IN ADULT LIVER, SIGNAL =   3; EXPRESSED IN BRAIN, SIGNAL = 3.3; EXPRESSED IN PLACENTA, SIGNAL = 3.1; EXPRESSED IN BT474, SIGNAL = 6.5; EXPRESSED IN LUNG, SIGNAL = 3.9; EXPRESSED IN HELA, SIGNAL = 6.1; EXPRESSED IN HEART, SIGNAL = 5.9
ggagatgaacagtgacttggctctgctttttaagactctggcacaataatgattcatttacaacatgagacacataggtgcttgagacacatgggaactgaactgatacatccctctctcctccccaggtatctcatttaactgttttaacgaccccgatcttcaggatcaagaagcagacccagcacagtgaggctgcctggctaacagggttgacgtgtgaacccacggctccccctcaccgagccccgtgctcttctgggcagcgctgcctctgctcctgacagcccaccagcttcctcggagccttcctgctgcagccgctcagggagagcaggcctttcctccagccctgtggcctgcacagacctcctcagctgggcctccaaggaggagcaggagggtactaacatttggaacctgccttcaa

SEQ ID NO: 284 - DNA, 464 bp, Homo sapiens
  MAP TO AP000152.1; EXPRESSED IN PLACENTA, SIGNAL =  11; EXPRESSED IN LUNG, SIGNAL =  14; EXPRESSED IN HELA, SIGNAL =  16; EXPRESSED IN BT474, SIGNAL =  14; EXPRESSED IN HBL100, SIGNAL =  14; EXPRESSED IN FETAL LIVER, SIGNAL =  12; EXPRESSED IN BRAIN, SIGNAL =  16; EXPRESSED IN BONE MARROW, SIGNAL =  20; EXPRESSED IN ADULT LIVER, SIGNAL = 9.6; EXPRESSED IN HEART, SIGNAL =  10
gtgcgtgtacaatccctgagctagatacaaaggttctccacgtccccatcagattagttagatacagagtatggacacaaaggttcttcaaggccccaccagagcagctagatacagagtgtcgattggtgcactcacaaaccctgagctagacacagggtgctgattggtgtgtttacaaaccttgagctagatacagagtgctgattggtgtatttacaatccctgagctagacataaagattctccacgtccccaccagactcaggagcctagctggcttcacccagtggatcccacaccggggctgcagctggagctgcctgccagtctcgcgccatgcactcgcactcctcaggccttgggtggtcgataggactggccgtggtggagcagggggcggcgctcgtcggggaggctcgggctgcacaggaacccacggaggcggggtaaggctcaggcat

SEQ ID NO: 285 - DNA, 470 bp, Homo sapiens
  MAP TO AP000160.1; EXPRESSED IN FETAL LIVER, SIGNAL = 7.9; EXPRESSED IN HELA, SIGNAL = 9.3; EXPRESSED IN BRAIN, SIGNAL =  14; EXPRESSED IN PLACENTA, SIGNAL =  10; EXPRESSED IN BT474, SIGNAL =  13; EXPRESSED IN BONE MARROW, SIGNAL =   6; EXPRESSED IN HEART, SIGNAL = 3.8; EXPRESSED IN ADULT LIVER, SIGNAL = 8.6; EXPRESSED IN LUNG, SIGNAL = 8.8; EXPRESSED IN HBL100, SIGNAL = 8.8
acatggctttattcttctttatttgttgatgattcaaatctactatacttctacaattaaaactggtctggaactctaaaatcgaaattcaggattacagtttatgcagctaaaaattgcaaagccaacttgagatcacacggtggtggtgattggggtaatggtggagtgatgtggtgatcatagcagtagtgggatggtggtagagatggtatgatggcagtatggtggtggcaggaagatgctcatggaggtgacagtaaccatgatggtggaaatggagcaggaggtaaaagttgtgatggaggtaggggtgggggctgtgatggtaatggtaatagtgatggtgatggtggtggtgatggttggtggtggtgatggtggtgatattggtgatggtgttgcctgtgatgctgtggtagtgatgatcatggtggtggtggtggtggtgctaatggtgatggtggtga

SEQ ID NO: 286 - DNA, 477 bp, Homo sapiens
  MAP TO AP000161.1; EXPRESSED IN BT474, SIGNAL = 2.3; EXPRESSED IN HBL100, SIGNAL = 2.3; EXPRESSED IN LUNG, SIGNAL = 1.6; EXPRESSED IN BRAIN, SIGNAL = 1.9; EXPRESSED IN PLACENTA, SIGNAL =   3; EXPRESSED IN BONE MARROW, SIGNAL =   2; EXPRESSED IN FETAL LIVER, SIGNAL = 1.9; EXPRESSED IN HELA, SIGNAL = 2.4; EXPRESSED IN ADULT LIVER, SIGNAL = 3.7; EXPRESSED IN HEART, SIGNAL =   2
tgccctgacctggataaaaggacacttcatcacagcaacagcctgctgggagaggagggaatagaccctgctcttgctgctgcagatgcctgcaaaggatctttacttggaggggtcttggagctcctttctccgcagctacaccaagtggccaggtatatgtgcacatatacagtagccacctgctttcactgttgcatgttacgcaatgaatctcaccatgggagtgaagatgcttctggttcttcaaagtgagacaggaagaggaagaagaagaagaggaggaagaggaggaagaagaggaagaagaaggaggaggaggagggaagagaagaagaaggaggacgaggaggaggaggaggcggtggcagtggcggtggaggaggaggagggggaggaggagggggaggagggggaggaggagggggtggaggaggaagaagaaggaagaagaggaaggaagaagaagaaagaaga

SEQ ID NO: 287 - DNA, 477 bp, Homo sapiens; identical to SEQ ID NO: 286
  MAP TO AP000161.1; EXPRESSED IN HELA, SIGNAL =   2; EXPRESSED IN BT474, SIGNAL =   2; EXPRESSED IN BONE MARROW, SIGNAL = 1.7; EXPRESSED IN HBL100, SIGNAL = 1.9; EXPRESSED IN FETAL LIVER, SIGNAL = 1.7; EXPRESSED IN LUNG, SIGNAL = 1.6; EXPRESSED IN ADULT LIVER, SIGNAL = 3.3; EXPRESSED IN BRAIN, SIGNAL = 1.9; EXPRESSED IN PLACENTA, SIGNAL = 1.8; EXPRESSED IN HEART, SIGNAL = 1.9

SEQ ID NO: 288 - DNA, 494 bp, Homo sapiens
  MAP TO AP000161.1; EXPRESSED IN BRAIN, SIGNAL = 1.5; EXPRESSED IN HBL100, SIGNAL = 1.1; EXPRESSED IN FETAL LIVER, SIGNAL = 1.6; EXPRESSED IN HEART, SIGNAL = 1.4; EXPRESSED IN BT474, SIGNAL = 1.1; EXPRESSED IN BONE MARROW, SIGNAL = 1.5; EXPRESSED IN HELA, SIGNAL = 1.5; EXPRESSED IN ADULT LIVER, SIGNAL = 1.6; EXPRESSED IN PLACENTA, SIGNAL = 1.3; EXPRESSED IN LUNG, SIGNAL = 1.5
aagtgctttcttggagagggtatagtaattgtatatttcatataaatacactgtagaaagagaaaaacaaatatttagatatttgtgtccccttctgattatctacgaagggatttacatggcacaaattaaatctatccactcaccctgaagttctgtccttccttcaagcaggagccccagcagagtggcccagggccagctgtttttaagcagcctctgagagcaacacagcaggtcccacccaggagaccacagagctatggtgggggaagccacttacctcctgtatgagttccctggggttgctgtgacaaaggacactgagagagtgtctcagataatggacattcattgtcacacagttctgaggctggaagtccaagatcaaggtgctagcagggttggttccttctgacagcaatgaagaagaatctgttcctggcctcttttctggcttctggtagccttgggcattccttggcttgaaggtg

SEQ ID NO: 289 - DNA, 464 bp, Homo sapiens
  MAP TO AP000161.1; EXPRESSED IN HELA, SIGNAL = 2.2; EXPRESSED IN HEART, SIGNAL = 2.2; EXPRESSED IN PLACENTA, SIGNAL =   2; EXPRESSED IN FETAL LIVER, SIGNAL = 3.8; EXPRESSED IN LUNG, SIGNAL = 2.9; EXPRESSED IN ADULT LIVER, SIGNAL = 2.8; EXPRESSED IN BRAIN, SIGNAL = 2.2; EXPRESSED IN BT474, SIGNAL = 9.7; EXPRESSED IN BONE MARROW, SIGNAL = 5.2; EXPRESSED IN HBL100, SIGNAL = 4.5
ttccccaccgtaggatactgttaagtttattctagggtgagtgggtgcccaagggaggcagtgagtatggctgaagtcacctggtggcagggtgctcagggatggccacaagttctacacggccctgcaggacctgagtctttagtcagttgggaagctctaccttctgccccagcccaagagggttggggcagtcacggatgtagcagttttcgtaattcacagggatccatgatgagcattgagcaggcttgattctcacacacatacgcagtggcctggtcttcctgccttcggagggtactcaggaaaggcagccagtgggacaggaaactcgaggggtccccatcagccagaatcagcaccatgttaggaatgtagacagggtggacgcactgcaccagaactttggtgtccttggcctggcggtctccacagatggtgatctgcctgagggtctgctg

SEQ ID NO: 290 - DNA, 480 bp, Homo sapiens
  MAP TO AP000162.1; EXPRESSED IN BRAIN, SIGNAL = 6.7; EXPRESSED IN FETAL LIVER, SIGNAL = 6.4; EXPRESSED IN LUNG, SIGNAL =   8; EXPRESSED IN HELA, SIGNAL = 8.2; EXPRESSED IN ADULT LIVER, SIGNAL = 5.7; EXPRESSED IN PLACENTA, SIGNAL = 5.6; EXPRESSED IN BT474, SIGNAL = 5.3; EXPRESSED IN BONE MARROW, SIGNAL = 7.7; EXPRESSED IN HBL100, SIGNAL = 5.4; EXPRESSED IN HEART, SIGNAL = 5.3
ctttctgcaggtcacacagctgatgaattgcagagtcagcatttaaccccggtctgcttttctgcaaagcctctgctcctcactctaccctaccgaccacctaagtatagatcagttaatcttgccttcagaattctcctttcttgtgtacttccatgtacattcatacttacttcacatgatgattctattttctggaagttccaccacatatggcgataatgaaacatctttgtcatttctctaagtgtttccagagcctggcaatggatgccattcacatcggcatgtccagcacccccctggtgaagcacactgctggggctgggctcaaggccaacagaccccgcgtcatgtccaagagtgggcacagcaacgtgagaattgacaaagtggatggcatatacctactctacctgcaagacctgtggaccacagttatcgacatgaagtggagatacaaactcaccctgttcgctg

SEQ ID NO: 291 - DNA, 487 bp, Homo sapiens
  MAP TO AP000162.1; EXPRESSED IN BT474, SIGNAL = 0.76; EXPRESSED IN BONE MARROW, SIGNAL = 1.6; EXPRESSED IN LUNG, SIGNAL = 3.8; EXPRESSED IN ADULT LIVER, SIGNAL = 1.1; EXPRESSED IN PLACENTA, SIGNAL = 1.3; EXPRESSED IN HBL100, SIGNAL = 0.83; EXPRESSED IN FETAL LIVER, SIGNAL =   1; EXPRESSED IN HELA, SIGNAL = 0.65; EXPRESSED IN HEART, SIGNAL = 0.91
gccacttttgtgatgacctggttcctttttggagtcatctactatgccatcgcgtttattcatggggacttagaacccggtgagcccatttcaaatcataccccctgcatcatgaaagtggactctctcactggggcgtttctcttttccctggaatcccagacaaccattggctatggagtccgttccatcacagaggaatgtcctcatgccatcttcctgttggttgctcagttggtcatcacgaccttgattgagatcttcatcaccggaaccttcctggccaaaatcgccagacccaaaaagcgggctgagaccatcaagttcagccactgtgcagtcatcaccaagcagaatgggaagctgtgcttggtgattcaggtagccaatatgaggaagagcctcttgattcagtgccagctctctggcaagctcctgcagacccacgtcaccaaggagggggagcggattctcctcaaccaagcca

SEQ ID NO: 292 - DNA, 459 bp, Homo sapiens
  MAP TO AP000170.1; EXPRESSED IN FETAL LIVER, SIGNAL = 2.4; EXPRESSED IN LUNG, SIGNAL = 2.9; EXPRESSED IN HELA, SIGNAL = 2.6; EXPRESSED IN BRAIN, SIGNAL = 2.7; EXPRESSED IN BT474, SIGNAL = 2.4; EXPRESSED IN ADULT LIVER, SIGNAL = 2.8; EXPRESSED IN PLACENTA, SIGNAL =   3; EXPRESSED IN HEART, SIGNAL = 2.6; EXPRESSED IN HBL100, SIGNAL = 1.8; EXPRESSED IN BONE MARROW, SIGNAL = 2.9
tcacataatctctccatcatcccaaggggtctctcgtcaggattcattggtaatcgtagggagattttgtagggatgatgggtcctctccacataaactatattcccttatctacaccttcaaagttcctggtagagtcaacacattggattaaggctttttccatggaatacactataataagggggctggagcgaggctgaccttcctctaacacaacgattaacaattttggctggttgattctttgttgaggggctgtctgtgcattgtaggatgttttacaacttacctggcctctacctaccagacgccagtagcatcctccaatcatggaaactaaaacatgtgcccagacattgccagatgatccatggagggcaaaatcaccccttgttgaaagccacttctcaaacccatgaccacagatctgtttcatcaggtcaacatccttcacca

SEQ ID NO: 293 - DNA, 459 bp, Homo sapiens
  MAP TO AP000171.1; EXPRESSED IN PLACENTA, SIGNAL =  16; EXPRESSED IN HELA, SIGNAL =  11; EXPRESSED IN FETAL LIVER, SIGNAL =  12; EXPRESSED IN BT474, SIGNAL =  11; EXPRESSED IN BONE MARROW, SIGNAL =  18; EXPRESSED IN HBL100, SIGNAL =  11; EXPRESSED IN LUNG, SIGNAL =  13; EXPRESSED IN ADULT LIVER, SIGNAL = 8.8; EXPRESSED IN BRAIN, SIGNAL =  13; EXPRESSED IN HEART, SIGNAL = 9.4
catgttcaatgatgtttctgccagtccacgtctccccacaggctttccataagtatttttgaataaataaatcacttctagaaggagcaatattgtgtagacagcagtgtgattttccagggaggagtgagccctttattcagatattctacatccacctgctgccttcccagcacccattgcttgctggccacatctcagcgaggaagggaagcaaactccatcacagctggtgaaaagtgacatgcacttgcaaacctctctttgtgatttcttgcccttctgttttagttcatgaaaagaacctgctgaaggccctgaggaagctggataattacttaaatagccctctgcctgatgaaatagatgcctacagcaccgaggatgtcactgtttctggaaggaagtttctggatggggacgagctgacgctggctgactgcaacctcttacccaagc

SEQ ID NO: 294 - DNA, 477 bp, Homo sapiens
  MAP TO AP000171.1; EXPRESSED IN PLACENTA, SIGNAL = 2.9; EXPRESSED IN HBL100, SIGNAL = 2.8; EXPRESSED IN LUNG, SIGNAL = 2.9; EXPRESSED IN HELA, SIGNAL = 2.4; EXPRESSED IN BRAIN, SIGNAL =   3; EXPRESSED IN BT474, SIGNAL = 2.6; EXPRESSED IN BONE MARROW, SIGNAL = 3.1; EXPRESSED IN FETAL LIVER, SIGNAL = 2.7; EXPRESSED IN ADULT LIVER, SIGNAL = 2.2; EXPRESSED IN HEART, SIGNAL = 2.9
aatccaccagagtccagagcatactcgtgccagcggattccaagacccatctgtgacaaactggtgggcagaactatgtgcagtcactgtagtgagtacaggaacttcatagccctcctcacacccaagatggccctatgcaagtcaagatgccgtggtgggtagcccggatgactgtgggatgacatgggaaactgggaaagaatgtattgcatgcctcagaagaatggactgtctgacttgggagcctaccttagcaagttttccctttactgatcattttctcttcattttcagattgtggccaagaagtacagagattttgaatttccttctgaaatgactggcatctggagatacttgaataatgcttatgctagagatgagttcacaaatacgtgtccagctgatcaagagattgaacacgcatattcagatgttgcaaaaagaatgaaatgaagctgggctgttttctgt

SEQ ID NO: 295 - DNA, 490 bp, Homo sapiens
  MAP TO AP000171.1; EXPRESSED IN BT474, SIGNAL =  24; EXPRESSED IN HELA, SIGNAL =  28; EXPRESSED IN PLACENTA, SIGNAL =  30; EXPRESSED IN BONE MARROW, SIGNAL =  25; EXPRESSED IN FETAL LIVER, SIGNAL =  28; EXPRESSED IN LUNG, SIGNAL =  31; EXPRESSED IN ADULT LIVER, SIGNAL =  25; EXPRESSED IN BRAIN, SIGNAL =  44; EXPRESSED IN HBL100, SIGNAL =  24; EXPRESSED IN HEART, SIGNAL =  29
cctcaagtccttgctactttggtttgatgtctccaaacacacacacacacacacacacacacacacacacacacacacacacagagagagagagagaagtgatttaaaattgttaatttttctctgtgtgagtgttaatttgtaacacactattccaccaccatcgatggaggtagtaatctttcaaaacctactttccacaaaccaaataaataactccacctaactttagggcaggcaacctggtatgcttctgagaaccagttctgtgaacacacagatcatgcttatgatttcagccagtgcatcaatttaaactaaaagtttaagatgtttatttttcctcattttattatttctcttatttgttctatagtcatcttaatctgtgtaagaaatactgaagctgtccaaaagttcaaatttgaacccaatgctgaatttaaaggtgttgccccaaaaaacattaggtaaacatgcaaggatcgtc

SEQ ID NO: 296 - DNA, 480 bp, Homo sapiens
  MAP TO AP000173.1; EXPRESSED IN BRAIN, SIGNAL = 1.7; EXPRESSED IN HEART, SIGNAL =   2; EXPRESSED IN BONE MARROW, SIGNAL = 2.1; EXPRESSED IN HELA, SIGNAL = 1.5; EXPRESSED IN PLACENTA, SIGNAL = 1.2; EXPRESSED IN BT474, SIGNAL = 0.88; EXPRESSED IN ADULT LIVER, SIGNAL = 1.4; EXPRESSED IN LUNG, SIGNAL = 1.7; EXPRESSED IN FETAL LIVER, SIGNAL = 1.5; EXPRESSED IN HBL100, SIGNAL = 1.5
tcacatgtggctacaaacacagagtatcactttcttatacagaccaggtcactgttcctcaaaaaaaaaaaaaaaaaaaagatggtgttctatttgataacctgcacttctccagagtgacctcttcagctgagtctggaagactgccttaggcaagtcccccgggtctctggctacagagggccatcctccatgagagatgagcttgtttcattgttgcaaagtatagccaagctgatacattttagcaagactaaaacttaatctttagggttctgggtcctttcatcaaatttcctctgctcacaccatgatctccattgtctcctcctcctcctcctgctcctccagttcctctttcctttcttcttctttacctcctccctccttgcttccttccgcctcttcctcctcctccttcttcttcaactattatctaccaagctgtgcctgggctgcccccagtgttttgcagtgtga

SEQ ID NO: 297 - DNA, 458 bp, Homo sapiens
  MAP TO AP000182.1; EXPRESSED IN HEART, SIGNAL = 2.9; EXPRESSED IN FETAL LIVER, SIGNAL = 3.3; EXPRESSED IN ADULT LIVER, SIGNAL = 3.3; EXPRESSED IN BRAIN, SIGNAL = 3.8; EXPRESSED IN BONE MARROW, SIGNAL = 4.4; EXPRESSED IN LUNG, SIGNAL = 4.8; EXPRESSED IN HELA, SIGNAL = 4.6; EXPRESSED IN PLACENTA, SIGNAL = 3.1; EXPRESSED IN BT474, SIGNAL =   3; EXPRESSED IN HBL100, SIGNAL = 3.2
tgaatattctatgaaatactgccttgtacaaagttaacaatgcttaattatttacccctcaatcataatctatagaagaaaccatgcaagggcctcagtttacagcttagtaataccactgattgtacaaatattttaaaacagacaaacttcccttggagaatgtacttttcaaaaattacctttacagaaatcccttcaaaaactattttaaccaactaaaaattctgtgtaaataagtttacatttacctcttggacctttaggaatataaataacaaataaaatataaagtgcacataccacgcaaacttccagtagttaaaagtgctcgagctttgtcagctaaatcactattcagagtatttcccagtagcaaaacatcaatggcctcttgcttggagctgtcaaagaagttattctgaattgttcgggtaacagagcgagcaccatctttt

SEQ ID NO: 298 - DNA, 494 bp, Homo sapiens
  MAP TO AP000182.1; EXPRESSED IN BONE MARROW, SIGNAL = 0.99; EXPRESSED IN HBL100, SIGNAL = 1.1; EXPRESSED IN ADULT LIVER, SIGNAL = 1.1; EXPRESSED IN BRAIN, SIGNAL = 1.4; EXPRESSED IN PLACENTA, SIGNAL = 0.97; EXPRESSED IN BT474, SIGNAL = 0.77; EXPRESSED IN FETAL LIVER, SIGNAL = 0.77; EXPRESSED IN LUNG, SIGNAL = 0.93; EXPRESSED IN HELA, SIGNAL = 0.7; EXPRESSED IN HEART, SIGNAL = 1.3
cctcgtgcctgctcatatctgactgtctactcttacattgctccctcaaggcgttgggacccagaaatcttttgggagatgaggtagaggtcattctctgtagctacttgctgctgaaaaggggcatcgagggtcttcagggttcttcctcctttcttgctgtcacggtgaggaggtttttgatgactgaacaactgctgaacatattatgtcccaaatcaccaaaagggaaaaaatgaactcaccagaaaaatctattatcagttgtctgttcttgcatgctacgatgcgcattaagactcaaatctaaactgatgccagatgcagaccatgcaaaataaaagtttcctgaattcaaaactttccgcacttctgaaatgcgatcctcatctgaagaatcgattcgcagtgatataaactcagtggaagtaactcggaaaacttcagattcttgaatttttccaacagacatacatccagtgactaggaccaga

SEQ ID NO: 299 - DNA, 492 bp, Homo sapiens
  MAP TO AP000182.1; EXPRESSED IN HELA, SIGNAL = 1.8; EXPRESSED IN PLACENTA, SIGNAL =   2; EXPRESSED IN BT474, SIGNAL = 2.5; EXPRESSED IN HBL100, SIGNAL = 2.4; EXPRESSED IN FETAL LIVER, SIGNAL = 1.6; EXPRESSED IN LUNG, SIGNAL = 2.6; EXPRESSED IN BRAIN, SIGNAL = 1.9; EXPRESSED IN BONE MARROW, SIGNAL = 2.8; EXPRESSED IN ADULT LIVER, SIGNAL = 1.9; EXPRESSED IN HEART, SIGNAL = 1.9
cccccatagcgtgactacactttttcagagtccaagaggtacaaactcagaaatgtcttcaacaagatcatggagtggcattttttataatttttcgaggcttccacagaagtaatccaagaaggtagcagaacaaagtatgaagtcatcttctgtttagcttttgaagctgggccagtgaatcttctttgctgatattctgcatctgctaccccagactacatgttgcctgagggaacagaaagctagcggacaggtctttaagaagttgatctgccctacctgtctttaagctgtttctttaccaaatcaatagtaacgggagtcatctcattactgggagttttgaaagggactgtattatctgttttttgagatttggcatctgatgatccataggccgtataactataaggaatgccataggatgagccgtaaggcattgtctggtaagtgttctggtagtacatattcacttctgcgggttgactg

SEQ ID NO: 300 - DNA, 470 bp, Homo sapiens
  MAP TO AP000183.1; EXPRESSED IN BT474, SIGNAL =   3; EXPRESSED IN HBL100, SIGNAL = 3.1; EXPRESSED IN FETAL LIVER, SIGNAL = 3.1; EXPRESSED IN BRAIN, SIGNAL = 3.3; EXPRESSED IN PLACENTA, SIGNAL = 4.3; EXPRESSED IN HEART, SIGNAL = 2.5; EXPRESSED IN ADULT LIVER, SIGNAL = 2.7; EXPRESSED IN HELA, SIGNAL = 2.5; EXPRESSED IN LUNG, SIGNAL = 2.9; EXPRESSED IN BONE MARROW, SIGNAL = 3.9
acctctgtgcagaaacccacagtggggcgggcagctccaggtgtctgcacaggtgctggctgtctgcaaggctatggctggaccaggcacaccacaagcaatttccagagatggcactggggaacatggtggcacccagaagcttgaacatgccagaaatcacagggccccaaggagggagtcacagtcctggctgagggagctccctggtcttggctccctgaaaggttgcagctcttttctccatctcttcacctgtaatgtggcaagcaaagggcatgtctcaaccctgtttgtgttacagctcttttagcctcgccatttggcaggtcccaagtcttgtcctgtgaccaggaagaataggtatgctgacaagtggagggcgagcaagaagaagaggagctttattgagtaatagaacagctgagaggagaccctcagtttgtagctcctttccacagtcagggtgt

SEQ ID NO: 301 - DNA, 454 bp, Homo sapiens
  MAP TO AP000190.1; EXPRESSED IN PLACENTA, SIGNAL = 5.2; EXPRESSED IN BONE MARROW, SIGNAL = 3.7; EXPRESSED IN HBL100, SIGNAL = 5.2; EXPRESSED IN FETAL LIVER, SIGNAL = 8.1; EXPRESSED IN LUNG, SIGNAL = 5.4; EXPRESSED IN HELA, SIGNAL = 3.6; EXPRESSED IN ADULT LIVER, SIGNAL = 3.1; EXPRESSED IN BRAIN, SIGNAL =   5; EXPRESSED IN BT474, SIGNAL =  14; EXPRESSED IN HEART, SIGNAL =   4
tgagcggtctatgatgtcccctatggctgaacgctctatgatgtcagcctacgagcgctctatgatgtcagcctacgagcgctctatgatgtcccctatggctgagcgctctatgatgtcagcttatgaacgctccatgatgtcagcttatgaacgctccatgatgtccccaatggctgatcgatctatgatgtccatgggtgctgaccggtctatgatgtcgtcatactctgctgctgaccggtctatgatgtcatcgtactctgcagctgaccgatctatgatgtcatcttatactgctgatcgttcaatgatgtctatggctgctgattcttacaccgattcttacactgacacatatacagaggcatatatggtgccacctttgcctcctgaagagcccccaacaatgccaccgttgccacctgaggagccaccaatgacaccaccattg

SEQ ID NO: 302 - DNA, 372 bp, Homo sapiens
  MAP TO AP000190.1; EXPRESSED IN PLACENTA, SIGNAL = 4.3; EXPRESSED IN BT474, SIGNAL = 7.1; EXPRESSED IN LUNG, SIGNAL =   4; EXPRESSED IN HELA, SIGNAL = 3.8; EXPRESSED IN BRAIN, SIGNAL = 4.6; EXPRESSED IN BONE MARROW, SIGNAL =  15; EXPRESSED IN HBL100, SIGNAL =   5; EXPRESSED IN FETAL LIVER, SIGNAL = 4.4; EXPRESSED IN ADULT LIVER, SIGNAL = 3.1; EXPRESSED IN HEART, SIGNAL = 3.1
catggtaatttccaccagtcctagtggtggtagtgaagctgacattgaagggcctttgcctgctaaagatattcatcttgatttaccatctaataataaccttgttagtaaggatacagaagaaccattacctgtaaaagagagtgaccagacattagcagctctgctcagccctaaagaaagtagtggaggagaaaaagaagtacctccccctcctaaagagacactgcctgattcaggattttctgccaatattgaggatattaatgaagcagatttagtgagaccgttacttcctaaggacatggaacgtcttacaagccttagagctggcattgaaggacctttacttgcaagtgatgttggacgtga

SEQ ID NO: 303 - DNA, 489 bp, Homo sapiens
  MAP TO AP000190.1; EXPRESSED IN FETAL LIVER, SIGNAL =  23; EXPRESSED IN BRAIN, SIGNAL = 4.2; EXPRESSED IN HEART, SIGNAL = 5.3; EXPRESSED IN BT474, SIGNAL =  25; EXPRESSED IN BONE MARROW, SIGNAL =  12; EXPRESSED IN HBL100, SIGNAL =  46; EXPRESSED IN HELA, SIGNAL =  14; EXPRESSED IN ADULT LIVER, SIGNAL =  13; EXPRESSED IN PLACENTA, SIGNAL = 8.1; EXPRESSED IN LUNG, SIGNAL = 9.7
tgttgatggcataggagctggaggaggccttggtggcattgatgagctcatccgccaggcactcagcaatggtcttgatgttccagaaggcagcctcacgagtgcctgtgcacagcagccagacgacctgattcacacagtgcagtggggacatgtccacagcctgttgtctcacagtccctgctcgcccaatgcatgtggagtcctcccagggaccactgttgatgatggcgttcaccaggacctggagagggttctcgcctgtgagcaggtggatgaaatcgaaggcatgcttgatgatgcacatgatcatgagcttgttgctgttgttgcagccgtgcatcatcatggagttagtgaggggctccacaatggggcactgagctttgcggaagcatttggctgcataccacccagcactgtgaggcaggtacttggcatacttctccttcactgcagtgtaatcctgcagggaaatgccattgatct

SEQ ID NO: 304 - DNA, 458 bp, Homo sapiens
  MAP TO AP000190.1; EXPRESSED IN LUNG, SIGNAL = 0.63; EXPRESSED IN HEART, SIGNAL =   2; EXPRESSED IN BT474, SIGNAL = 0.93; EXPRESSED IN BONE MARROW, SIGNAL = 0.8; EXPRESSED IN HBL100, SIGNAL =   2; EXPRESSED IN FETAL LIVER, SIGNAL = 0.99; EXPRESSED IN HELA, SIGNAL = 0.88; EXPRESSED IN ADULT LIVER, SIGNAL = 0.76
gctttgacatgtcctgaacgtaggacaggtaacagtgaatggctgtagattctggtaggcgtgagaagtaagtcccctgcatgttgaagagagaagacaaaaacttagcctatgaatagaaaaccaaaacataaaaatcaacctggagaatgacaccagctctacaataatgaccaagtagcaaaccaaggtaattcattcccttttagctctaagtaatcagagactaaaaccactaaatgcttgctcaggcatttccaagcaggacagtttaaacatgagggagtttacctaaagtctggtcaccacaaccatcaggtgctggagaggagtactggagggaagattttgccacgattttcctcacaaggctaaatccattgctatgaagaccagatgaagctattccaacaacaacatcaccctcagtgattctttccaggtgagggagtttctga

SEQ ID NO: 305 - DNA, 463 bp, Homo sapiens
  MAP TO AP000190.1; EXPRESSED IN HBL100, SIGNAL = 2.3; EXPRESSED IN FETAL LIVER, SIGNAL = 2.5; EXPRESSED IN HELA, SIGNAL = 4.5; EXPRESSED IN ADULT LIVER, SIGNAL = 1.9; EXPRESSED IN PLACENTA, SIGNAL = 1.4; EXPRESSED IN HEART, SIGNAL =   2; EXPRESSED IN BRAIN, SIGNAL = 3.8; EXPRESSED IN LUNG, SIGNAL = 2.9; EXPRESSED IN BONE MARROW, SIGNAL = 1.8; EXPRESSED IN BT474, SIGNAL = 3.9
gctccagaaaaagtagatgcgtatctgtacaaacagatcctactgatgaaattcccactaaaaagtcaaagaagcataaaaagcacaaaaacaaaaagaagaaaaagaagaaagaaaaggaaaaaaaatataaaagacagccagaagaatctgagtcaaagacgaaatctcatgatgatgggaacatagatttagaatctgattcctttttaaagtttgattctgaaccttcagctgtggcgctggagcttcctacaagagcatttggcccatctgagaccaatgaatcccctgcagttgtgctagaacctcctgtagtatcaatggaggtatcagagccacacatcttagaaactctgaagccagctacaaaaactgcagaactgtcagttgtatctacatcagtaatctcagagcagtcagagcagtctgtggcagtaatgccagaaccatccatgacaaa

SEQ ID NO: 306 - DNA, 459 bp, Homo sapiens
  MAP TO AP000190.1; EXPRESSED IN PLACENTA, SIGNAL =  20; EXPRESSED IN LUNG, SIGNAL =  18; EXPRESSED IN HEART, SIGNAL =  13; EXPRESSED IN BT474, SIGNAL =  17; EXPRESSED IN BONE MARROW, SIGNAL =  23; EXPRESSED IN HBL100, SIGNAL =  21; EXPRESSED IN FETAL LIVER, SIGNAL =  19; EXPRESSED IN HELA, SIGNAL =  22; EXPRESSED IN ADULT LIVER, SIGNAL =  13; EXPRESSED IN BRAIN, SIGNAL =  19
actgttccagaaccaccaccagagccagaatcttcaattacgttaacacctgtagagtctgcagtagtagcagaagaacatgaagttgttccagagagaccagtgacttgtatggtatctgaaactcccgccatgtcagctgaaccaactgtgttagcatcagagcctcctgttatgtcagagacagcagaaacatttgattccatgagagcctcaggacatgttgcctcagaagtatctacatccttgttggttccagcagtaactactccagtgctggcagagagcattctggagccgccagccatggctgccccagagtcttcagctatggctgtcctggagtcttcggctgtgaccgtcctggagtcttcgactgtgactgtcctggagtcttcgactgtaactgtcctggagccttcggttgtgactgtcccggagcctcctgttgtggctgag

SEQ ID NO: 307 - DNA, 459 bp, Homo sapiens; identical to SEQ ID NO: 306
  MAP TO AP000190.1; EXPRESSED IN BT474, SIGNAL =  19; EXPRESSED IN LUNG, SIGNAL =  21; EXPRESSED IN BRAIN, SIGNAL =  17; EXPRESSED IN PLACENTA, SIGNAL =  25; EXPRESSED IN BONE MARROW, SIGNAL =  23; EXPRESSED IN HBL100, SIGNAL =  22; EXPRESSED IN FETAL LIVER, SIGNAL =  19; EXPRESSED IN HELA, SIGNAL =  18; EXPRESSED IN ADULT LIVER, SIGNAL =  10; EXPRESSED IN HEART, SIGNAL = 9.7

SEQ ID NO: 308 - DNA, 465 bp, Homo sapiens
  MAP TO AP000191.1; EXPRESSED IN PLACENTA, SIGNAL = 2.2; EXPRESSED IN LUNG, SIGNAL = 2.7; EXPRESSED IN HELA, SIGNAL = 2.2; EXPRESSED IN ADULT LIVER, SIGNAL = 2.4; EXPRESSED IN BT474, SIGNAL = 2.5; EXPRESSED IN BONE MARROW, SIGNAL = 2.6; EXPRESSED IN HBL100, SIGNAL = 2.4; EXPRESSED IN FETAL LIVER, SIGNAL = 2.2; EXPRESSED IN BRAIN, SIGNAL = 3.3; EXPRESSED IN HEART, SIGNAL =   3
agaaaaacccaacctgggagattaagtggaagggcactcccagacctctgcctccataaaagtagagggagatgcaaactgagataagacctacaatcaaaacccgtcaaggtccaggaaactgtccctcaaatctagtcttacccacccctcagcggcctcagctaagctaggcctgggcccgaacaagtcccaggttagggttcgacgcgaaccaccatcctccccagggctgcacggttctgtggggcatctctccacctttcgcttaaaggcccgtttcccaagacacaggacgcgtttcccggggctcacctgcctctgagccgccccaacggcctgcaccttcaccaccgccaccttccagtccttcgtcagagagcccgccccctgctcccattggtcaggccgctcgtcactcctgaagggcggggtcggactcgcgaggctgtccagaacgccatg

SEQ ID NO: 309 - DNA, 419 bp, Homo sapiens
  MAP TO AP000192.1; EXPRESSED IN FETAL LIVER, SIGNAL = 1.6; EXPRESSED IN LUNG, SIGNAL = 1.8; EXPRESSED IN HELA, SIGNAL = 1.6; EXPRESSED IN ADULT LIVER, SIGNAL =   2; EXPRESSED IN BRAIN, SIGNAL = 1.9; EXPRESSED IN BONE MARROW, SIGNAL = 1.4; EXPRESSED IN PLACENTA, SIGNAL = 1.5; EXPRESSED IN BT474, SIGNAL = 1.3; EXPRESSED IN HEART, SIGNAL = 1.5; EXPRESSED IN HBL100, SIGNAL = 1.2
ttgagcctttaagtccactgcagttattattctttttgattctcatcttgtttgttctgtcttcaggttgagtcttgagtccttttgatgtgatccttgacataatttttgttactctttaaaatgattaacttgaagccctattttaattggaatatattacagctggaaagtgattttctttaagcagtactgggttaattattattcagtgttgaaatgtgattggatgtgaatggtgttgagctgttttttcttcataggtatgggaggtatcgccagcatgccaccgcttacagctgttgctccagtgccaatgggatccattccagttgttggaatgtctccaaccctagtatcttctgttcccacagcagctgtgccccccctggctaacggggctccccctgttatacaac

SEQ ID NO: 310 - DNA, 472 bp, Homo sapiens
  MAP TO AP000193.1; EXPRESSED IN BT474, SIGNAL = 1.7; EXPRESSED IN BONE MARROW, SIGNAL = 1.5; EXPRESSED IN HBL100, SIGNAL = 1.6; EXPRESSED IN FETAL LIVER, SIGNAL = 2.5; EXPRESSED IN LUNG, SIGNAL = 1.2; EXPRESSED IN ADULT LIVER, SIGNAL = 2.3; EXPRESSED IN BRAIN, SIGNAL = 1.3; EXPRESSED IN PLACENTA, SIGNAL = 1.7; EXPRESSED IN HELA, SIGNAL = 1.2; EXPRESSED IN HEART, SIGNAL = 1.4
gcatttttagttagcacatcaagcattcttgaaggcataaagaatggaattctaatggggaaataatcctgtcatcttacgtaaatatagtattatgtaaatataatacccagttctgtgtattccctttattcccatagaaggaatactgtatttttatgtaattttttgttttctaatgtgatttcttgtaatgtttaatatttcatccctaaaaggaaagacttcctagatgccatttttgtgaaaagacattgtgtagtgtaagaactgaaaaattagtaatttgtctctgtaaatgtcacaggctgcaaaacgggaacttgaaaggcaacgacaacttgagtgggaacggaatcgaaggcaagaactactaaatcaaagaaacaaagaacaagaggacatagttgtactgaaagcaaagaaaaagactttggaatttgaattagaagctctagtgagtgaagtttgg

SEQ ID NO: 311 - DNA, 475 bp, Homo sapiens
  MAP TO AP000193.1; EXPRESSED IN HBL100, SIGNAL = 2.2; EXPRESSED IN HELA, SIGNAL = 1.6; EXPRESSED IN BRAIN, SIGNAL = 2.3; EXPRESSED IN PLACENTA, SIGNAL = 1.6; EXPRESSED IN BT474, SIGNAL =   2; EXPRESSED IN BONE MARROW, SIGNAL = 1.8; EXPRESSED IN FETAL LIVER, SIGNAL = 3.2; EXPRESSED IN LUNG, SIGNAL = 1.6; EXPRESSED IN ADULT LIVER, SIGNAL = 2.7; EXPRESSED IN HEART, SIGNAL = 2.2
ctccaggcactttgtctcaactgccattattaggacagttatggggtaaggcttttttaaaaagtgcagagaataagagcttgaattatagtgcattttttttttcagcattactgcttagactcttttcccagacacttggactaagatgaagagattcctatgccatatgtcaatctaaagagggcagaggcttgggacttcactgtagttgggtgctgggtctattcaggggttaatttagttctacttaaagctgtgactttttccacaggtggatgaaagccaaactggagaacccggctggcttggaggagaattaaaaggaaagacagggtggttccctgcaaactatgcagagaaaatcccagaaaatgaggttcccgctccagtgaaaccagtgactgattcaacatctgcccctgcccccaaactggccttgcgtgagacccccgcccctttggcagtaacctct

SEQ ID NO: 312 - DNA, 477 bp, Homo sapiens
  MAP TO AP000193.1; EXPRESSED IN BRAIN, SIGNAL = 1.6; EXPRESSED IN HBL100, SIGNAL = 1.2; EXPRESSED IN FETAL LIVER, SIGNAL = 1.5; EXPRESSED IN LUNG, SIGNAL = 1.5; EXPRESSED IN HEART, SIGNAL = 1.5; EXPRESSED IN PLACENTA, SIGNAL = 1.5; EXPRESSED IN BT474, SIGNAL = 1.1; EXPRESSED IN BONE MARROW, SIGNAL = 1.5; EXPRESSED IN HELA, SIGNAL = 1.5; EXPRESSED IN ADULT LIVER, SIGNAL = 1.5
tagtgaggcatcgacacaggggacccatttgagttgttcaagaaaaaaactccatatttctgcacaagaaaaacaaattgtaacaaacagccactctgccaaagaaaaatgctctggtgctacctctctgtagccctagactcatttctttctccattccttgtctcccaaatagatcctttagtggcccttaaggctgtgcccctcacacacattctgtttctgtgcaacctaagtgtgctgtggtgctgtcagatagcgtgaaagcagggggctcacctcccgtgtttccgtgcagagcgctgagagtccgcaagaagatgtccggggagaagatgcctgtgaagatgattggagacatcctgagcgcacagctgccgcacatgcagccctacatccgcttctgcagccgccagctcaacggggctgccctgatccagcagaagacggatgaggccccagacttcaaggagttcg

SEQ ID NO: 313 - DNA, 478 bp, Homo sapiens
  MAP TO AP000201.1; EXPRESSED IN BT474, SIGNAL = 1.9; EXPRESSED IN BONE MARROW, SIGNAL = 1.9; EXPRESSED IN FETAL LIVER, SIGNAL =   2; EXPRESSED IN LUNG, SIGNAL =   2; EXPRESSED IN ADULT LIVER, SIGNAL = 1.3; EXPRESSED IN BRAIN, SIGNAL = 1.2; EXPRESSED IN HEART, SIGNAL = 1.4; EXPRESSED IN PLACENTA, SIGNAL = 2.2; EXPRESSED IN HBL100, SIGNAL = 1.8; EXPRESSED IN HELA, SIGNAL = 1.5
acttctatagacacaaaacagagaacctaaagtgctttataatttcttgaatctattcacaaccactaatgattaggtagacagtaaagtcattcttaatttgaaaaccttctttttaaaaagcacttacatatcacagcatatcatggtaaaaatgataaaatggtaattgatacatattaaaataagtaattgagcattatatctgacctagaaatttaaaaactatttccttgacaaaaaagaaagtggtggaatttaaatagtaacaagaaacttttacacttaccagcttctcaatttctgattcaagattctgtatacagtcaagttttctcttgcgacagcgctgtgcagcaattctgtttttacttcttcttcgaatatcatggatacaatccagctgttctggagtaagcttgtgcattttcaacaaggactgaaaatcatttcgagacagtgaaattatccgttgtgc

SEQ ID NO: 314 - DNA, 469 bp, Homo sapiens
  MAP TO AP000201.1; EXPRESSED IN HBL100, SIGNAL =   1; EXPRESSED IN LUNG, SIGNAL = 1.2; EXPRESSED IN BRAIN, SIGNAL = 0.83; EXPRESSED IN PLACENTA, SIGNAL = 1.8; EXPRESSED IN BT474, SIGNAL = 1.3; EXPRESSED IN BONE MARROW, SIGNAL = 0.96; EXPRESSED IN FETAL LIVER, SIGNAL = 1.8; EXPRESSED IN HELA, SIGNAL = 1.1; EXPRESSED IN ADULT LIVER, SIGNAL =  26; EXPRESSED IN HEART, SIGNAL =   1
attgcctacaatccactgggcgtgtcctgatttggtcatttcatcaaaaataacataacagtgggtgttatgttatatccaactgctcagtaatgttaaccaacattcaaaattaatgattttacattaaaaaaactaaaaaaaaaaaaaaaaggggttgcacagaacctgggaaatgctccatagccacctgacaaggagactgtgctttattttcaacattatgaaccataaaaaacttaagtaaaagtagattaaaattgccaaaaacatggatctctcacctcttctggaagagtaatgttcagctctccatcagcctggcctacgattcttgagtggaagtaactgctgcatgccgccagcacggaccggtgagcgcggaaccgctgtccctccacaaagatggtgacatcgcacagcacatctttcttccgctggtcattaaggctgagtaaaacattggtgc

SEQ ID NO: 315 - DNA, 470 bp, Homo sapiens
  MAP TO AP000203.1; EXPRESSED IN PLACENTA, SIGNAL = 2.7; EXPRESSED IN FETAL LIVER, SIGNAL = 2.3; EXPRESSED IN LUNG, SIGNAL = 2.3; EXPRESSED IN ADULT LIVER, SIGNAL = 2.2; EXPRESSED IN BONE MARROW, SIGNAL = 3.1; EXPRESSED IN HBL100, SIGNAL = 2.3; EXPRESSED IN BRAIN, SIGNAL = 4.2; EXPRESSED IN HEART, SIGNAL = 3.1; EXPRESSED IN BT474, SIGNAL = 2.5; EXPRESSED IN HELA, SIGNAL = 2.6
gaatgcgtcccatgaaatatgatggttttaaaaatgggagtttccctgcacaaactctcttcccttgtctgctgccatgtgagacatgccttttaccttccaccatgattgtgaggtctccccagccacatggaactgtaagtacaattaaaacctatttttcttcccagtctcaggtatgtctttatcagcagtgtgaaaacaaactaatagagtaaattggtaccagtaaagtgaggtgctgctaaagatacctgatagtgtggaagcaactttggaactgggtaacaggcaggggttggaacagtcaggagggatcagaagaagacaggaaaaatgtgggaaagtcagaaacttcctagagatgtgttgaatggctttgacaaagatgatgctgatagtgatatggaaaatagcatccaggtcggggtggtctcagatggagataaggaacttgctgggaattggag

SEQ ID NO: 316 - DNA, 457 bp, Homo sapiens
  MAP TO AP000213.1; EXPRESSED IN FETAL LIVER, SIGNAL = 8.1; EXPRESSED IN BRAIN, SIGNAL = 5.5; EXPRESSED IN HEART, SIGNAL = 5.4; EXPRESSED IN BONE MARROW, SIGNAL =  10; EXPRESSED IN HBL100, SIGNAL =  12; EXPRESSED IN LUNG, SIGNAL = 7.1; EXPRESSED IN ADULT LIVER, SIGNAL = 7.3; EXPRESSED IN PLACENTA, SIGNAL = 7.3; EXPRESSED IN BT474, SIGNAL =  11; EXPRESSED IN HELA, SIGNAL = 9.2
ctgtcacctcaggcttttcctttcctcgggcttcttccttctctctacgagactctctatctctagaatctctctctctgtctcgatgcccactagagcgtctatttctctcttccaagtctctgtgcctgtcccggtcagggctcctccttccccactctctcctgtcacggttactattatctctatcatcattacggttcccataccgttcccggtcattttccaccctatttccaaaagatcttcttccaaacctttcttggtctctacctgaattgaactgctgcctgttatcatttctaaactgctgtggctgctgctgtgttggtggaggctgttgtgatggtggtggctgctgctgctgctgctgctgtggttgctggggcgcctgcggctgtggctgctgctgtggctgctgcggcggctgttgccttccgtctctgtcttcaggacc

SEQ ID NO: 317 - DNA, 482 bp, Homo sapiens
  MAP TO AP000213.1; EXPRESSED IN HBL100, SIGNAL = 3.2; EXPRESSED IN FETAL LIVER, SIGNAL = 2.9; EXPRESSED IN PLACENTA, SIGNAL = 3.6; EXPRESSED IN BT474, SIGNAL = 2.2; EXPRESSED IN LUNG, SIGNAL =  41; EXPRESSED IN ADULT LIVER, SIGNAL = 2.9; EXPRESSED IN BRAIN, SIGNAL = 2.7; EXPRESSED IN HEART, SIGNAL = 2.7; EXPRESSED IN BONE MARROW, SIGNAL = 3.1; EXPRESSED IN HELA, SIGNAL = 2.9
acccattcaaaagcacaagcttctcagccacacttaaattacagaaacagagtgttgttcatgagtcattaacattttactgaaccatatatttacctatatattaaatttaatttataaactcagtattattcccaacataaaagccattttttggttttaaatcttaagaggatcccttcctcattcaagagaaaactaataccacaaattttacaaaacaacttcatagaacattgttgtcattgctaaatgttacttaggttatgccttacaactattaccaattttctatctgctgaggaataaaaaaaaaaactaacaatggtgcctgtggaggaggaggagaggcagcagcgggtgcagcagcagcaggcacggtggcggtgggtgcagggggtactgcggcagcaggtgctgtcgtggtgacggcagtggtatcctctttctttgattcttccacagcttctggctcatcatca

SEQ ID NO: 318 - DNA, 442 bp, Homo sapiens
  MAP TO AP000085.1; EXPRESSED IN BRAIN, SIGNAL = 2.3; EXPRESSED IN HEART, SIGNAL = 2.2; EXPRESSED IN BT474, SIGNAL = 1.7; EXPRESSED IN BONE MARROW, SIGNAL = 2.1; EXPRESSED IN HBL100, SIGNAL = 1.9; EXPRESSED IN HELA, SIGNAL = 2.1; EXPRESSED IN ADULT LIVER, SIGNAL = 1.7; EXPRESSED IN PLACENTA, SIGNAL = 1.8; EXPRESSED IN FETAL LIVER, SIGNAL = 1.8; EXPRESSED IN LUNG, SIGNAL = 2.3
ctcaaatgcacagaggaggcgtcatggaagggtgacaaaacactccagagcaataacagctaccctattttctgttccctgggagtagggagaaaagacatcaaaatcaaattataaatttaaaaaagtattaaaattctcttatggaaatatattaagaagtttgttaggcaaatggaaaacgttttgtggaaacaagaaataagaaagaatggccatcacttaaagcaacagaatgtatctctcccactagctctcccctccctacccacagctttattcacatttgttctataacatttcagcacagttcagaccttccgctgagccagtgtgaggtcagggtgttgaggaagcgagtccctgcagtcagactccagctggctgtcgtcctgcttctgcttattccacagaatgagtctggtgggggagaggaaattcc

SEQ ID NO: 319 - DNA, 442 bp, Homo sapiens; identical to SEQ ID NO: 318
  MAP TO AP000223.1; EXPRESSED IN LUNG, SIGNAL = 2.9; EXPRESSED IN HELA, SIGNAL = 5.2; EXPRESSED IN ADULT LIVER, SIGNAL = 2.2; EXPRESSED IN BRAIN, SIGNAL = 3.1; EXPRESSED IN HEART, SIGNAL = 2.7; EXPRESSED IN PLACENTA, SIGNAL = 2.3; EXPRESSED IN BT474, SIGNAL = 1.7; EXPRESSED IN BONE MARROW, SIGNAL = 2.5; EXPRESSED IN HBL100, SIGNAL = 2.3; EXPRESSED IN FETAL LIVER, SIGNAL = 2.3

SEQ ID NO: 320 - DNA, 463 bp, Homo sapiens
  MAP TO AP000230.1; EXPRESSED IN LUNG, SIGNAL =  11; EXPRESSED IN BT474, SIGNAL =  13; EXPRESSED IN HBL100, SIGNAL = 9.4; EXPRESSED IN FETAL LIVER, SIGNAL =  10; EXPRESSED IN BRAIN, SIGNAL = 9.4; EXPRESSED IN PLACENTA, SIGNAL =  14; EXPRESSED IN BONE MARROW, SIGNAL =  13; EXPRESSED IN HELA, SIGNAL = 9.3; EXPRESSED IN ADULT LIVER, SIGNAL = 8.4; EXPRESSED IN HEART, SIGNAL = 6.7
gcagcctgacaatgcaatagaaaagaaaatcccatattctgaggagaaaatcaagctggctgcagaaatttgcatatgtaacaaggagttaaatgttaatccccaagacaatggggaaaatgtctccagggcatgccagaggtcttcacagcagcccctcccatcacaggcctgcaggcctaggaggaaaaagtgatctcttgggccaggcccagggtccccatgctgtgtgcagcctggggacttggtgccttgtgtcccagctgctccagccatggctgaaaggggccaacatagagctcggattgtggcttcagagggtgcaagctgtaagccttggcagcttccatgtggtgttgagcctgccagtgcacagaagtcaaaaattggggtttgggaacctctgcctagatttcagaagatgtatggaaatgcctggatgccctggcagaagtctgctgta

SEQ ID NO: 321 - DNA, 463 bp, Homo sapiens; identical to SEQ ID NO: 320
  MAP TO AP000230.1; EXPRESSED IN BT474, SIGNAL = 5.8; EXPRESSED IN HELA, SIGNAL = 8.1; EXPRESSED IN ADULT LIVER, SIGNAL = 7.2; EXPRESSED IN PLACENTA, SIGNAL = 6.7; EXPRESSED IN BONE MARROW, SIGNAL = 8.9; EXPRESSED IN HBL100, SIGNAL = 6.4; EXPRESSED IN FETAL LIVER, SIGNAL = 6.7; EXPRESSED IN LUNG, SIGNAL = 7.5; EXPRESSED IN BRAIN, SIGNAL = 9.5; EXPRESSED IN HEART, SIGNAL = 7.7

SEQ ID NO: 322 - DNA, 457 bp, Homo sapiens
  MAP TO AP000230.1; EXPRESSED IN PLACENTA, SIGNAL = 3.9; EXPRESSED IN BT474, SIGNAL = 5.2; EXPRESSED IN BONE MARROW, SIGNAL = 4.6; EXPRESSED IN HBL100, SIGNAL = 3.7; EXPRESSED IN LUNG, SIGNAL = 4.7; EXPRESSED IN HELA, SIGNAL = 5.7; EXPRESSED IN ADULT LIVER, SIGNAL = 7.4; EXPRESSED IN BRAIN, SIGNAL = 8.5; EXPRESSED IN FETAL LIVER, SIGNAL = 4.4; EXPRESSED IN HEART, SIGNAL =  13
catctccagttgcaattcccatgtgtcaggggatggggcctcgtgggaggtgattgaatcgtgggggtggacttcccccttgctgttcttgtgagagtgcgtgagttctcatgagatctggttgtttgaaagtatgtggcactcctccccttgctctctctctcttgctgtcagaggtgattgaaccagaacaactccattttgagtaggggctgggtaaagtaaggctgagacctactgggctgcattctcagacagctggttaagctttctaagtcacaggatgagatgggcggttggcacaagatacaagtcataaagtccttgctgataaaacagattgcagtaaagaagctggccaaaacccaccataacaaagaaggccacatgagtgacctctggtcattctcactactcattatatgctaattataatgcattagcaagccaagagacg

SEQ ID NO: 323 - DNA, 492 bp, Homo sapiens
  MAP TO AP000146.1; EXPRESSED IN HBL100, SIGNAL = 0.9; EXPRESSED IN FETAL LIVER, SIGNAL = 1.2; EXPRESSED IN HEART, SIGNAL = 3.6; EXPRESSED IN PLACENTA, SIGNAL =   1; EXPRESSED IN BRAIN, SIGNAL = 1.9; EXPRESSED IN ADULT LIVER, SIGNAL = 1.9; EXPRESSED IN HELA, SIGNAL = 1.5; EXPRESSED IN LUNG, SIGNAL = 1.2; EXPRESSED IN BONE MARROW, SIGNAL = 0.99; EXPRESSED IN BT474, SIGNAL = 1.2
tttggctgacaggttttgcttttttttttttttaactgaacactttaaatatgatatcctattgccttccagcctacattgtttttgctgagaagtcagctgttaaatcgtattgaggttcccttgaaagtgaggagttttgttttgttgtaattttctcttgctgctttcaagattttctccttgttttaagtttaagcatttttactatgatgtgtctgatgtggatatggacatggatgttgatgcacttaatggtgtcccagatttccctgaggctccttatttctcttttttatgttttctgttttttagcttgcataatctgaatgagtctatcttcaagtttgctcattccttcttctgccaattcaaatctactgttgggcccatctagtataattttcatttcagttcttgtgtttatcagctccagaatttccataataatttttatctctttattgatactttgtcttgtgttggacatcg

SEQ ID NO: 324 - DNA, 470 bp, Homo sapiens
  MAP TO AP000241.1; EXPRESSED IN HELA, SIGNAL = 1.1; EXPRESSED IN ADULT LIVER, SIGNAL = 0.7; EXPRESSED IN HEART, SIGNAL = 0.9; EXPRESSED IN BT474, SIGNAL = 1.9; EXPRESSED IN BONE MARROW, SIGNAL = 2.8; EXPRESSED IN FETAL LIVER, SIGNAL = 1.6; EXPRESSED IN LUNG, SIGNAL = 1.1; EXPRESSED IN PLACENTA, SIGNAL = 1.2; EXPRESSED IN HBL100, SIGNAL = 2.9
gacaaagaataaagtccatgagggtctatggaagaattgtgggggaaaggagtcacttctgatttttcagttgggcactgagaagcaggatctttcttcgtttcttcaggttccattgctaatttactttcgtcacattttaacatcacctgcaaatctctacactccgggactcctcccaggcattcattttcagacctttcatttggctgaacagaagcatgaatgtctttgacactagattccccagtacggactctgtcagttccaaatgctttttggaattttctgtatttggggcataaagaaggcaaggccagagcagcatccttctctaagcacatggactcatatgtctgactggcactgtcttgtagaggaggtgaggcttttgcatttccttgatacctgcggagtttacactgaggagtctgaacatttttattttccagaaattcctccacttcatc

SEQ ID NO: 325 - DNA, 457 bp, Homo sapiens
  MAP TO AP000260.1; EXPRESSED IN BT474, SIGNAL = 3.2; EXPRESSED IN HELA, SIGNAL = 3.8; EXPRESSED IN ADULT LIVER, SIGNAL = 3.3; EXPRESSED IN BRAIN, SIGNAL =   5; EXPRESSED IN PLACENTA, SIGNAL = 4.1; EXPRESSED IN BONE MARROW, SIGNAL = 4.9; EXPRESSED IN HBL100, SIGNAL = 3.8; EXPRESSED IN FETAL LIVER, SIGNAL = 3.8; EXPRESSED IN LUNG, SIGNAL = 5.4; EXPRESSED IN HEART, SIGNAL = 4.2
ccatcctaggaagactgcccgacctctgtggggagagtgacatgctgctggtgacttttgcaaagtagccaaggctgtttgccggttggtttcttctgaccttggcgggaactgtctcagttaagctggaggtcacagcaggcaggagaagggccgtgagcactgtccggacgtcctcatgattgtttatgctttcttggtgtgcagattcctttggctgccgcaatattttccgcaaaacctcagattccaattgtgtggcttcttcttccatggagttcatccccgtgccaccgcccaggaccccgaggattgtgaagaaaccggagccccatcagccagggcccggaagcactggcatcccccacaaggaagaccccctgatgctggacatggtgcgctccttcgagtctgtggatcgcgacgaccacgtagaagtgctgtctccctctcatca

SEQ ID NO: 326 - DNA, 470 bp, Homo sapiens
  MAP TO AP000260.1; EXPRESSED IN FETAL LIVER, SIGNAL = 1.4; EXPRESSED IN PLACENTA, SIGNAL = 1.8; EXPRESSED IN BONE MARROW, SIGNAL = 1.1; EXPRESSED IN HBL100, SIGNAL =   2; EXPRESSED IN ADULT LIVER, SIGNAL = 2.1; EXPRESSED IN BRAIN, SIGNAL = 6.2; EXPRESSED IN BT474, SIGNAL = 2.2; EXPRESSED IN LUNG, SIGNAL = 2.2; EXPRESSED IN HELA, SIGNAL = 2.5; EXPRESSED IN HEART, SIGNAL = 2.3
tccttcgagtctgtggatcgcgacgaccacgtagaagtgctgtctccctctcatcactacaggattctgaactccccggtcagcttggctcgcagaaattccagcgagaggacgctgtccccgggtctgccatccggaagcatgtcgcctctccatactcctttgcatccaactctggtctcttttgctcacgaagataagaacagccccccaaaagaggagggcctgtgttgcccacctccggttcccagcaatggccccatgcagcctctggggagccccaattgtgtgaaaagccgaggccggttccctatgatgggcatcggacagatgttaaggaagcgccatcagagtctgcagccatctgcagataggcccctggaggccagcctgcccccactgcagcccctagcccctgtgaaccttgcctttgacatggccgatggggtcaagacccagtgctaacttgg

SEQ ID NO: 327 - DNA, 493 bp, Homo sapiens
  MAP TO AP000263.1; EXPRESSED IN PLACENTA, SIGNAL = 1.2; EXPRESSED IN LUNG, SIGNAL = 1.5; EXPRESSED IN HELA, SIGNAL = 1.4; EXPRESSED IN ADULT LIVER, SIGNAL = 1.2; EXPRESSED IN BRAIN, SIGNAL = 1.5; EXPRESSED IN HEART, SIGNAL = 1.4; EXPRESSED IN BT474, SIGNAL = 1.2; EXPRESSED IN BONE MARROW, SIGNAL = 1.1; EXPRESSED IN HBL100, SIGNAL = 1.1; EXPRESSED IN FETAL LIVER, SIGNAL = 1.2
ctcacctcttctgtcctggcaagcagccaagtgtggctcagaggctgagcagagggaaagatgttggccctttgctcctcagcatcagtgggcttaagtgcgggcacaatccagacctggagtgtttgcatttgaaggcttagttctactcgaatgaaactctggttcaagccttccaggccaatgaaaaattccagccaactgagaccaagcaaatgtggctgtatccacatattcagagccaggccttgggcagggcaggtgacaaggagcatgtcatttgggggaacctagcactgagtgaaatcatcacagttaattctttactagctgtgtcagaatttcggctcattttaatcttggtgttcaatgaacaccctgaggtcttcctcatgagtcccctgcattctgatgaaattgcctttagtgtcttaggaggccgtgtggttcagagcatgggtgtggagttgagagatgtccattccactccagg

SEQ ID NO: 328 - DNA, 493 bp, Homo sapiens; identical to SEQ ID NO: 327
  MAP TO AP000263.1; EXPRESSED IN LUNG, SIGNAL = 3.1; EXPRESSED IN HELA, SIGNAL =   3; EXPRESSED IN ADULT LIVER, SIGNAL = 2.1; EXPRESSED IN BRAIN, SIGNAL = 3.9; EXPRESSED IN HEART, SIGNAL =   2; EXPRESSED IN PLACENTA, SIGNAL = 2.6; EXPRESSED IN BT474, SIGNAL =   3; EXPRESSED IN BONE MARROW, SIGNAL = 2.4; EXPRESSED IN FETAL LIVER, SIGNAL = 1.9; EXPRESSED IN HBL100, SIGNAL = 2.6

SEQ ID NO: 329 - DNA, 440 bp, Homo sapiens
  MAP TO AP000281.1; EXPRESSED IN HEART, SIGNAL =   2; EXPRESSED IN FETAL LIVER, SIGNAL = 1.7; EXPRESSED IN LUNG, SIGNAL = 2.2; EXPRESSED IN HELA, SIGNAL = 2.2; EXPRESSED IN PLACENTA, SIGNAL = 2.4; EXPRESSED IN BT474, SIGNAL = 2.5; EXPRESSED IN BONE MARROW, SIGNAL = 2.9; EXPRESSED IN HBL100, SIGNAL = 1.9; EXPRESSED IN ADULT LIVER, SIGNAL = 2.2; EXPRESSED IN BRAIN, SIGNAL = 2.7
ctccaggtgtctgcacaggtgctggctgtctgcaaggctatggctggaccaggcacaccacaagcaatttccagagatggcactggggaacatggtggcacccagaagcttgaacatgccagaaatcacagggccccaaggagggagtcacagtcctggctgagggagctccctggtcttggctccctgaaaggttgcagctcttttctccatctcttcacctgtaatgtggcaagcaaagggcatgtctcaaccctgtttgtgttacagctcttttagcctcgccatttggcaggtcccaagtcttgtcctgtgaccaggaagaataggtatgctgacaagtggagggcgagcaagaagaagaggagctttattgagtaatagaacagctgagaggagaccctcagtttgtagctcctttccacagtcagggtgtcctg

SEQ ID NO: 330 - DNA, 450 bp, Homo sapiens
  MAP TO AP000184.1; EXPRESSED IN ADULT LIVER, SIGNAL = 2.1; EXPRESSED IN BONE MARROW, SIGNAL = 3.1; EXPRESSED IN BRAIN, SIGNAL = 1.8; EXPRESSED IN PLACENTA, SIGNAL = 3.8; EXPRESSED IN BT474, SIGNAL = 3.3; EXPRESSED IN LUNG, SIGNAL = 3.2; EXPRESSED IN HELA, SIGNAL =   3; EXPRESSED IN HEART, SIGNAL = 2.9; EXPRESSED IN HBL100, SIGNAL = 2.8; EXPRESSED IN FETAL LIVER, SIGNAL = 4.6
aaaggaagagtcccaaagccaaggccattgagaggagatgagtggggatttccactcaaggatggcgagttgaatgcaggggttagcctccagtccctcctgaaaccccactaaagcaacaacaggggaggtattttggaagacatataaacctacggaatgaagagaacagaagcaatgataatagcaataaaatctgaaagtttggaaagcaaatgtaagtttggtaactgtgatggtgaatattaggtgtcaacttgatgggattgagggtggctggtaaggtattgtttctggatgtgtctgtgagggtattgccagaggaaattgacattgaagttggtgggctgggagaggaaaacccaccctttatgtgggtgggcaccatccaatcagctgccagcaaggctagagcagagcagacgcagaaggagaaggtgcaatgagctg

SEQ ID NO: 331 - DNA, 450 bp, Homo sapiens; identical to SEQ ID NO: 330
  MAP TO AP000282.1; EXPRESSED IN PLACENTA, SIGNAL = 1.8; EXPRESSED IN BT474, SIGNAL = 2.7; EXPRESSED IN BONE MARROW, SIGNAL = 2.4; EXPRESSED IN ADULT LIVER, SIGNAL = 2.2; EXPRESSED IN HELA, SIGNAL = 3.1; EXPRESSED IN LUNG, SIGNAL = 4.2; EXPRESSED IN FETAL LIVER, SIGNAL = 2.1; EXPRESSED IN HBL100, SIGNAL = 2.8; EXPRESSED IN HEART, SIGNAL = 2.8; EXPRESSED IN BRAIN, SIGNAL =   3

SEQ ID NO: 332 - DNA, 466 bp, Homo sapiens
  MAP TO AP000300.1; EXPRESSED IN HBL100, SIGNAL = 1.2; EXPRESSED IN FETAL LIVER, SIGNAL = 1.8; EXPRESSED IN LUNG, SIGNAL = 1.7; EXPRESSED IN HELA, SIGNAL = 1.9; EXPRESSED IN ADULT LIVER, SIGNAL = 1.6; EXPRESSED IN HEART, SIGNAL = 1.2; EXPRESSED IN BT474, SIGNAL = 2.9; EXPRESSED IN PLACENTA, SIGNAL = 0.96; EXPRESSED IN BRAIN, SIGNAL = 2.6; EXPRESSED IN BONE MARROW, SIGNAL = 0.84
tgtgaaaagataggggatgataggaaacccggatataaggcagaacaatgttgcttgggccatctcttacacctcagtgaaacggaaaatgaaggaaatggaaggctggcatgggaaccccgacttatacagtgatgcccttttgctgttccacgcgtcgcttggggtggaagcccttccttgtcccctcgccacccaccccggagccccttggtgcttcctttctgaactgaatgcttagactggggaactagaggtgcccggaaagggaagtcgggaagaagagactattcctgttggttcctccccagagatgggagatggtgaacaggcgtgtggagggcggaataatggtccccaaagatgtccacgccctcatcctcagagtccgtgaacctgggaatgtgctgcctgacgtacaaaagggactccgcagatgtgagtaagttaagagccctgatgtggg

SEQ ID NO: 333 - DNA, 486 bp, Homo sapiens
  MAP TO AP000311.1; EXPRESSED IN HEART, SIGNAL = 2.2; EXPRESSED IN HBL100, SIGNAL = 3.2; EXPRESSED IN FETAL LIVER, SIGNAL =   3; EXPRESSED IN BRAIN, SIGNAL = 2.6; EXPRESSED IN PLACENTA, SIGNAL = 2.3; EXPRESSED IN BT474, SIGNAL = 2.2; EXPRESSED IN BONE MARROW, SIGNAL = 3.4; EXPRESSED IN HELA, SIGNAL = 3.7; EXPRESSED IN ADULT LIVER, SIGNAL =   3; EXPRESSED IN LUNG, SIGNAL = 2.2
tggatggtgatgtagaactgctagataaggatcttttagaaacagtgtttggcgtggaggagaagatataaacagagaggttaggcaaagggggttttcgttgtgctcattaacaaggacacagaagcttagggagttctgggtttgggtttgtactacaaatttcaaatacattggtgagttttcctttgaaaagagtccgttgaaaatcttgagttttcatagttgctgtgttccttgtctgaagtaacgtttgaagataagaagcgggagaactttgaacgtggcaacctggaactggagaaacgaaggcaagctctcctggaacagcagcgcaaggagcaggagcgcctggcccagctggagcgggcggagcaggagaggaaggagcgtgagcgccaggagcaagagcgcaaaagacaactggaactggagaagcaactggaaaagcagcgggagctagaacggcagagagaggaggagagg

SEQ ID NO: 334 - DNA, 450 bp, Homo sapiens
  MAP TO AP000330.1; EXPRESSED IN BONE MARROW, SIGNAL = 3.9; EXPRESSED IN FETAL LIVER, SIGNAL = 4.1; EXPRESSED IN ADULT LIVER, SIGNAL = 3.4; EXPRESSED IN PLACENTA, SIGNAL = 3.7; EXPRESSED IN BT474, SIGNAL = 3.2; EXPRESSED IN HBL100, SIGNAL = 4.2; EXPRESSED IN LUNG, SIGNAL = 5.2; EXPRESSED IN HELA, SIGNAL = 3.6; EXPRESSED IN BRAIN, SIGNAL =   5; EXPRESSED IN HEART, SIGNAL = 3.6
tgatgtttctgccagtccacgtctccccacaggctttccataagtatttttgaataaataaatcacttctagaaggagcaatattgtgtagacagcagtgtgattttccagggaggagtgagccctttattcagatattctacatccacctgctgccttcccagcacccattgcttgctggccacatctcagcgaggaagggaagcaaactccatcacagctggtgaaaagtgacatgcacttgcaaacctctctttgtgatttcttgcccttctgttttagttcatgaaaagaacctgctgaaggccctgaggaagctggataattacttaaatagccctctgcctgatgaaatagatgcctacagcaccgaggatgtcactgtttctggaaggaagtttctggatggggacgagctgacgctggctgactgcaacctcttacccaagc

SEQ ID NO: 335 - DNA, 477 bp, Homo sapiens; identical to SEQ ID NO: 294
  MAP TO AP000330.1; EXPRESSED IN PLACENTA, SIGNAL = 2.3; EXPRESSED IN LUNG, SIGNAL = 2.6; EXPRESSED IN HEART, SIGNAL = 2.1; EXPRESSED IN HBL100, SIGNAL = 1.8; EXPRESSED IN FETAL LIVER, SIGNAL = 1.9; EXPRESSED IN HELA, SIGNAL = 2.1; EXPRESSED IN BRAIN, SIGNAL = 2.6; EXPRESSED IN BT474, SIGNAL = 2.1; EXPRESSED IN BONE MARROW, SIGNAL = 2.4; EXPRESSED IN ADULT LIVER, SIGNAL = 2.3

SEQ ID NO: 336 - DNA, 460 bp, Homo sapiens
  MAP TO AP000330.1; EXPRESSED IN HBL100, SIGNAL =  22; EXPRESSED IN ADULT LIVER, SIGNAL =  26; EXPRESSED IN BT474, SIGNAL =  17; EXPRESSED IN BONE MARROW, SIGNAL =  28; EXPRESSED IN HELA, SIGNAL =  21; EXPRESSED IN BRAIN, SIGNAL =  21; EXPRESSED IN HEART, SIGNAL =  20; EXPRESSED IN PLACENTA, SIGNAL =  25; EXPRESSED IN FETAL LIVER, SIGNAL =  27; EXPRESSED IN LUNG, SIGNAL =  33
ctccaaacacacacacacacacacacacacacacacacacacacacacacacagagagagagagagaagtgatttaaaattgttaatttttctctgtgtgagtgttaatttgtaacacactattccaccaccatcgatggaggtagtaatctttcaaaacctactttccacaaaccaaataaataactccacctaactttagggcaggcaacctggtatgcttctgagaaccagttctgtgaacacacagatcatgcttatgatttcagccagtgcatcaatttaaactaaaagtttaagatgtttatttttcctcattttattatttctcttatttgttctatagtcatcttaatctgtgtaagaaatactgaagctgtccaaaagttcaaatttgaacccaatgctgaatttaaaggtgttgccccaaaaaacattaggtaaacatgcaaggatcgtc

SEQ ID NO: 337 - DNA, 445 bp, Homo sapiens
  MAP TO AP000341.1; EXPRESSED IN HELA, SIGNAL = 2.4; EXPRESSED IN ADULT LIVER, SIGNAL = 1.7; EXPRESSED IN BRAIN, SIGNAL = 2.3; EXPRESSED IN HEART, SIGNAL = 1.8; EXPRESSED IN PLACENTA, SIGNAL = 1.5; EXPRESSED IN BT474, SIGNAL = 1.4; EXPRESSED IN BONE MARROW, SIGNAL = 2.1; EXPRESSED IN HBL100, SIGNAL = 1.8; EXPRESSED IN FETAL LIVER, SIGNAL = 1.4; EXPRESSED IN LUNG, SIGNAL =   2
agcctcaacgctcagtgtccagtcctgccccagccagctggggcaacagcctgggcccttgccagcctgggtgccagccccaccacccaagctttagggccagagcacgccttgagtgattctgccattgttctccccatccgtaacaggaaccccacaccgagagctgctcaagattaaattagtcagcagtgccagatgcagagcgagagttgtcttaatgtggccaccgtatcctcctcctcttcttccctgacccctccgtgttcataagctcagtgcttgcagaccgcaccgagggcagagcctgcccagtggagaggaatggactggatggcgccagctgggcctgcttctcgccctgcacttcagcttgtgcctcctttggccccaaaattataggtacagactacaaggaaataagagagagacagaacgggatcca

SEQ ID NO: 338 - DNA, 452 bp, Homo sapiens
  MAP TO AP000341.1; EXPRESSED IN PLACENTA, SIGNAL = 4.6; EXPRESSED IN BONE MARROW, SIGNAL = 5.2; EXPRESSED IN ADULT LIVER, SIGNAL = 3.2; EXPRESSED IN BRAIN, SIGNAL = 4.3; EXPRESSED IN BT474, SIGNAL = 5.2; EXPRESSED IN HBL100, SIGNAL = 4.6; EXPRESSED IN FETAL LIVER, SIGNAL = 4.4; EXPRESSED IN LUNG, SIGNAL = 4.9; EXPRESSED IN HELA, SIGNAL = 3.8; EXPRESSED IN HEART, SIGNAL = 3.2
ctcccttcagcctcctgtggaagagcattggccacctcatcacctcacagaaggcccacctcttactactgctgcgttggggattacgtttcaacatgaattttcagtggcctgcatgcaaggctacacaggcaatagcttgtgaccatggtggacagaccccacagaggcccagggaccccacctcagcgttggaagacccctccctggggctgtgggagggtctatgagttgcttctgacctgtaggatgtggcaaggggccaggatgtcactcctggcactgcgtaaggctccagctcccctgctggcactggtgaagcaagcagccattttggggctgccctagaatggccgcggcgactctctgcctctggaggtggactgcaggcacctctccgagcgagcttgggagccccagctgacaaccagccaacacctgaagcgctcact

SEQ ID NO: 339 - DNA, 452 bp, Homo sapiens
  MAP TO D83253.1; EXPRESSED IN PLACENTA, SIGNAL = 3.2; EXPRESSED IN FETAL LIVER, SIGNAL = 2.1; EXPRESSED IN LUNG, SIGNAL = 2.8; EXPRESSED IN BT474, SIGNAL = 2.5; EXPRESSED IN HEART, SIGNAL = 3.7; EXPRESSED IN BRAIN, SIGNAL = 4.4; EXPRESSED IN ADULT LIVER, SIGNAL =   3; EXPRESSED IN HELA, SIGNAL = 2.9; EXPRESSED IN HBL100, SIGNAL = 1.9; EXPRESSED IN BONE MARROW, SIGNAL = 2.6
taagatgcccttgatgatcctctatttaaaggagacatgtaaacaggttaacttagagtagagatggtgaatatgtgaacctgaggaaaggaagaaatagattaaattatctggagagagaggaaaagtcagcagaatggggacgagaatctttcggagctcagtgttctgataggagttatttccttgggcataggttccaagtatttttctaatataccatagaagccaggaaaactttcttctgttatctcaaatgatttaattactgacttgagtttgtgttgtctccttagacttgtgcaccatggacaattttgctgagggagatttcactgtggcggattatgccttgttagaagattgccctcacgtggatgattgtgtctttgctgctgaatttatgagcaatgattatgttcgtgtgactcagctttactgtgatggggtgg

SEQ ID NO: 340 - DNA, 382 bp, Homo sapiens
  MAP TO D83253.1; EXPRESSED IN PLACENTA, SIGNAL = 1.9; EXPRESSED IN BT474, SIGNAL = 2.3; EXPRESSED IN BONE MARROW, SIGNAL = 2.5; EXPRESSED IN HBL100, SIGNAL = 1.8; EXPRESSED IN HEART, SIGNAL = 2.4; EXPRESSED IN FETAL LIVER, SIGNAL = 2.1; EXPRESSED IN LUNG, SIGNAL = 2.7; EXPRESSED IN HELA, SIGNAL = 2.4; EXPRESSED IN ADULT LIVER, SIGNAL = 2.8; EXPRESSED IN BRAIN, SIGNAL = 3.1
gaactctgctgggggtacagaaatttcttaagcaaaaatattgatccttagttattgtgattatttgtgtatttataacttttcacttagctcattaggtaatgttatttcctgaggtattaacattttacatttatttttcattggtagggacctaatctaatattttaagtaatgaatcagttttcaagcaaaacatttttccttacctgttttctttaacttaagcatatttttgagaaaaaattaaatttatctttttggaacagggtcattatcgttattgtgatgctctttctatgctgggggaatatgactgggccctgcaagcaaacataaaagctcaaaaactctgtaaaaatgaccctgagggaatcaagga

SEQ ID NO: 341 - DNA, 483 bp, Homo sapiens
  MAP TO AB016897.1; EXPRESSED IN PLACENTA, SIGNAL = 4.4; EXPRESSED IN FETAL LIVER, SIGNAL = 5.4; EXPRESSED IN BT474, SIGNAL = 5.9; EXPRESSED IN HEART, SIGNAL = 3.7; EXPRESSED IN BRAIN, SIGNAL = 2.7; EXPRESSED IN ADULT LIVER, SIGNAL = 3.4; EXPRESSED IN HELA, SIGNAL = 1.9; EXPRESSED IN LUNG, SIGNAL = 6.2; EXPRESSED IN HBL100, SIGNAL = 2.3; EXPRESSED IN BONE MARROW, SIGNAL = 0.86
aatgtccatggatttgcctctcccaccacccccttccgccaaccagatagggctgccgtctgcgcaggtggctgctgctgaacggagaaagagagaagaacatcagcgttggtatgagaaggagaaggcccgcctggaggaggagcgggagaggaagcggagagagcaggagaggaagttgggccagatgcgcactcagtccttaaaccctgctccgttttctcccctgactgcacagcagatgaagcccgaaaagccttccacactccagcggccacaggaaacagtcattcgggagctgcagcctcagcagcagccccgcacgatcgagcgcagagacttgcagtacattacagtcagcaaagaggagctttcctcgggggacagtctgtcccccgacccgtggaagcgggacgccaaggagaagctggagaagcagcagcagatgcacatcgtggacatgctgagcaaggagatccagga

SEQ ID NO: 342 - DNA, 493 bp, Homo sapiens
  MAP TO Z98946.15; EXPRESSED IN PLACENTA, SIGNAL = 0.74; EXPRESSED IN BONE MARROW, SIGNAL = 2.5; EXPRESSED IN LUNG, SIGNAL = 2.1; EXPRESSED IN HELA, SIGNAL = 1.1; EXPRESSED IN HEART, SIGNAL = 0.86; EXPRESSED IN HBL100, SIGNAL = 1.6; EXPRESSED IN FETAL LIVER, SIGNAL = 1.1; EXPRESSED IN ADULT LIVER, SIGNAL = 0.71
tctctcccctgtgaacttctgatataagagatctaaatcagtaaaaagaactgagaaaatggaaccagggatgggtgaaagaaattactcaatctctggttctatataagcacctgcctccagggtaataaagttctgtaaccaggtagacagagggaaaacaaaaaggctttttatttggaaagccagaaaaacaacaacagagtctgacactatatgcaaatgtctcttgagcagcataacacagtcttcagacagaccccaatggagaagaacagatctggcatccctgtgaggcagggattggtcagctgtgggctgcagccccttatggccaaggcaaaggagggcagggaaccacctcacctctgcgggagcaacttgtctccggccaggtagccagacttatgcacttccttattgaagtcgccatacttagactggacagcatacgaggccagcagcacagcggtctcaggcgggcagtaaatat

SEQ ID NO: 343 - DNA, 408 bp, Homo sapiens
  MAP TO Z98742.5; EXPRESSED IN BONE MARROW, SIGNAL = 1.3; EXPRESSED IN ADULT LIVER, SIGNAL =   1; EXPRESSED IN PLACENTA, SIGNAL = 1.7; EXPRESSED IN BT474, SIGNAL = 2.1; EXPRESSED IN HBL100, SIGNAL = 1.4; EXPRESSED IN FETAL LIVER, SIGNAL = 1.8; EXPRESSED IN LUNG, SIGNAL = 1.9; EXPRESSED IN HELA, SIGNAL = 1.4; EXPRESSED IN BRAIN, SIGNAL = 1.4; EXPRESSED IN HEART, SIGNAL = 1.4
ctccagcagatcagggctacccccaggcagtgtgtggagcctattccattatactaaatgcattatgctaatctttgcagaaagacgtaaggtgacctaatcaaagttctagtattaatttcaactgcattgatgataagggtcaaagattgtcatatttttagctaaattaataaataatctattaaggtatataccttattaaggtctatcaatctattaaggtatattacaggggttgcttggatttgagaaaaaggaaaacgagtatgtggatgagggagacaaggagaataatttcattcattcattcactcaaaaatcatatttgcacgtcaagtaccaatcattgcgctaagtgcttaggaaacaatgacacaatgtccttgcctttgaaaatcgtgcagt

SEQ ID NO: 344 - DNA, 469 bp, Homo sapiens
  MAP TO Z98051.6; EXPRESSED IN ADULT LIVER, SIGNAL = 4.3; EXPRESSED IN HEART, SIGNAL = 2.9; EXPRESSED IN BONE MARROW, SIGNAL = 6.1; EXPRESSED IN BRAIN, SIGNAL = 1.1; EXPRESSED IN PLACENTA, SIGNAL = 3.2; EXPRESSED IN BT474, SIGNAL = 7.1; EXPRESSED IN FETAL LIVER, SIGNAL = 8.8; EXPRESSED IN LUNG, SIGNAL = 4.1; EXPRESSED IN HELA, SIGNAL = 7.3; EXPRESSED IN HBL100, SIGNAL =  12
gagaaaagggaaacagagcagaaacatttggaaaattcacagccttgtcatgtggtagagaatgaaaaagagttttcaggagtggaaccaagggtgcagaggagccaccactttatgcctaaaagggagccaggtgctaatagtcaaaacaatgaggaaaaggccctaacggcacttcagagatctttgaggcagcccctccctttagaggcctacagcccttggaggacagaattgtttgggagtggaggaggcctgggacacaactgccctgtgccacctcgggaaagctgcttccctcatctcagcccctccagctggagcagccatatctcacatggacccaggtgtggctcatgtctcagctcaggaaggtacaagtcgtaaaccttggtggcatccacatggtgataattctgcaggcccgcataaagtaagagctgtggaggcttcgcaacctctacccatt

SEQ ID NO: 345 - DNA, 490 bp, Homo sapiens
  MAP TO Z93930.10; EXPRESSED IN BT474, SIGNAL =  43; EXPRESSED IN HBL100, SIGNAL =  11; EXPRESSED IN FETAL LIVER, SIGNAL =  20; EXPRESSED IN LUNG, SIGNAL = 8.8; EXPRESSED IN HEART, SIGNAL = 3.8; EXPRESSED IN PLACENTA, SIGNAL = 4.6; EXPRESSED IN BONE MARROW, SIGNAL = 3.1; EXPRESSED IN BRAIN, SIGNAL = 1.7; EXPRESSED IN HELA, SIGNAL =  22; EXPRESSED IN ADULT LIVER, SIGNAL =  25
ctctgctatcctccaggcagtgtaatagtcaaggaaaagggcaacagtattggatcattccttagacactaatcagctggggaaagagttcattggcaaaagtgtcctcccaagaatggtttacaccaagcagagaggacatgtcactgaatggggaaagggaacccccgtatccacagtcactgtaagcatccagtaggcaggaagatggctttgggcagtggctggatgaaagcagatttgagatacccagctccggaacgaggtcatcttctacaggttcttccttcactgagacaatgaattcagggtgatcattctctgaggggctgagaggtgcttcctcgattttcactaccacattagcttggctctctgtctcagagggtatctctaagactaggggcttggtatatatgtggtcaaaacgaattagttcattaatggcttccagcttggctgatgacgtccccactgacagagaaaggga

SEQ ID NO: 346 - DNA, 448 bp, Homo sapiens
  MAP TO Z86090.10; EXPRESSED IN LUNG, SIGNAL =  26; EXPRESSED IN ADULT LIVER, SIGNAL =  23; EXPRESSED IN BRAIN, SIGNAL =  17; EXPRESSED IN HEART, SIGNAL = 8.4; EXPRESSED IN PLACENTA, SIGNAL =  16; EXPRESSED IN BONE MARROW, SIGNAL =  23; EXPRESSED IN HBL100, SIGNAL =  65; EXPRESSED IN HELA, SIGNAL =  50; EXPRESSED IN BT474, SIGNAL =  40; EXPRESSED IN FETAL LIVER, SIGNAL =  33
tgttcaaaaagcttcctgccatgagcaatcactgtttttttcactgatcaggtctttattaaaaataagctgtccaaaattatttgacctttatggaataaaccaacaagctcatgcagcaggcttcgtttcctctgtggtaggtttttttttcagctactgatgtcttggttggtagctgctgccctttttcccaccagaggtttctcctgcttaaaaacaacaaccttctttcctttcttccctaccacaggcttcttgactgcaaccccctttctcatctgatttggcctctagtgctgctggtgctgctggtgctgctggtgctggtgctggtgctgctgctgctgctgccaccgccgccgctgccttatccacctggagtttgtggttgctggcctggcaaagcctggtgttgcagagcatggtctttgcatatgggtttagc

SEQ ID NO: 347 - DNA, 478 bp, Homo sapiens
  MAP TO Z86090.10; EXPRESSED IN PLACENTA, SIGNAL =  32; EXPRESSED IN BRAIN, SIGNAL = 1e+02; EXPRESSED IN BT474, SIGNAL = 3.3e+02; EXPRESSED IN BONE MARROW, SIGNAL =  56; EXPRESSED IN HBL100, SIGNAL = 2.2e+02; EXPRESSED IN FETAL LIVER, SIGNAL = 1.2e+02; EXPRESSED IN LUNG, SIGNAL =  26; EXPRESSED IN HELA, SIGNAL = 1.1e+02; EXPRESSED IN ADULT LIVER, SIGNAL =  90; EXPRESSED IN HEART, SIGNAL = 1.2e+02
aactgtgtcgaggggagatgctcagtgtggtgggggctgagcgcagcagggttccccagcagctgagggcccccctcttcctcttgtgctctcactgggattggtggcctggggctcttactccttggaggccatgtggaccatgaggttcaccaccctgtcataccaggaaatgagcttgacaaagtcattgttgagggcaatgccagccccagcattgaagatggaagaatgggtgtcactgtcaaagtcagaggagacgaccttgtgctcagtacagcccaggatgcccttgaggatctccctcaatgcctgcttcaccatcctcttgatgtcactgtatttggcaggtttctccagatggcaggtcaggtccatgaccaacatgttggtggtggggacgtggaaggccacgccagtgagcttcccattcagctcggggatgactttgcccacaggcttggcaggaatgatgttc

SEQ ID NO: 348 - DNA, 478 bp, Homo sapiens
  MAP TO Z84476.6; EXPRESSED IN HEART, SIGNAL = 0.8; EXPRESSED IN LUNG, SIGNAL = 1.6; EXPRESSED IN HELA, SIGNAL = 1.9; EXPRESSED IN ADULT LIVER, SIGNAL = 1.2; EXPRESSED IN BRAIN, SIGNAL = 1.4; EXPRESSED IN PLACENTA, SIGNAL = 0.96; EXPRESSED IN BT474, SIGNAL = 2.6; EXPRESSED IN BONE MARROW, SIGNAL = 1.2; EXPRESSED IN HBL100, SIGNAL = 2.3; EXPRESSED IN FETAL LIVER, SIGNAL = 1.5
gggaaagcattcaagaccagaaatcagctttctatgcaccggataatccacacaggggagaaaccttttaattgcacccagtgtgggaaggctttcaacagtagatcagctctttgccgacataaaaaaacccacagtggggagaagcctcacgagtgcagggactgtgggaaggccttcaagaccaggaaccgtctctgtatgcatcagcttatccacaccggggagaagccttacaaatgtaactgctgtgggaaggccttccagtttaagcattcccttaccatccatggcagaatccacactggggagaagccatatgaatgtgaggagtgcgggaaggccttcagtgggagttcagacctcaccaaacacataagaatccacactggggaacgaccttatgagtgcagcaagtgtggaagggccttcagtcggagctcagacctaagcaaacacaaacgaatccatactcggg

SEQ ID NO: 349 - DNA, 430 bp, Homo sapiens
  MAP TO AP000337.1; EXPRESSED IN ADULT LIVER, SIGNAL = 5.6; EXPRESSED IN BONE MARROW, SIGNAL = 6.1; EXPRESSED IN HBL100, SIGNAL = 5.3; EXPRESSED IN BRAIN, SIGNAL = 6.9; EXPRESSED IN HEART, SIGNAL =   6; EXPRESSED IN PLACENTA, SIGNAL = 5.6; EXPRESSED IN BT474, SIGNAL =   5; EXPRESSED IN LUNG, SIGNAL = 6.5; EXPRESSED IN HELA, SIGNAL = 7.2; EXPRESSED IN FETAL LIVER, SIGNAL = 5.4
agccttggaagtcacacagcatcacttctgccacactgcgcttgttggggcagtcactgacctgcccaggtttgaggcagcgtggactctgcctcttcagggagtggtaagggctggaggagccagcgggactgcaattcctgctggccaattttatgaaacattttgaaacaaaggctaaagctaaatgcatatttttgttgaagcacagctgcaggttttgctttgtgctgtctgcaaatgtcagcaaattggcttcaaatgataccagggattttgttcagtgacttgaacaactgttccccattccttcgctcaccgtaatgtgtcttgagggcatctgtgaccaggggaccactgcccagagagtggaggtcctggtgagggagtgtggagagcagcagcgtgaccttgatctgccctgatttgg

SEQ ID NO: 350 - DNA, 476 bp, Homo sapiens
  MAP TO AP000326.1; EXPRESSED IN PLACENTA, SIGNAL = 2.7; EXPRESSED IN BT474, SIGNAL = 2.5; EXPRESSED IN BONE MARROW, SIGNAL = 3.4; EXPRESSED IN BRAIN, SIGNAL =   3; EXPRESSED IN ADULT LIVER, SIGNAL =   3; EXPRESSED IN HBL100, SIGNAL = 2.5; EXPRESSED IN FETAL LIVER, SIGNAL = 3.4; EXPRESSED IN LUNG, SIGNAL = 4.1; EXPRESSED IN HELA, SIGNAL = 4.5; EXPRESSED IN HEART, SIGNAL = 2.8
tgcacttgctgtttccagactgtgggacagcctatgagacatatgaaaacagtttcactggggacctatgacaaaggatggagaaaccagatgaaaagagacagaagagacagatcactgaaatgcagtgagtgcctcttatttggattctaacgcaaacacgctaattataaaaagacattcatgagccaatcggggacatttgaacacagaatggatatttggtgatattaagaaagtacatttactttatttttgttaagtgtccttatctcttagagatacatacaaatgaaatgatatgatgcctgggatatgtttaaaatgatcccatgattggcagggtggctcatgtctgtaatttcagcactgtgggaggccaaggcaggaagattgcttgagcccaggaggtcagcactgtagtgagctgtggttgtgccactacactccagcctggcgacagagcaaggctgtgt

SEQ ID NO: 351 - DNA, 476 bp, Homo sapiens; identical to SEQ ID NO: 350
  MAP TO AP000326.1; EXPRESSED IN PLACENTA, SIGNAL = 2.8; EXPRESSED IN BT474, SIGNAL = 2.8; EXPRESSED IN FETAL LIVER, SIGNAL = 2.7; EXPRESSED IN HELA, SIGNAL = 2.2; EXPRESSED IN ADULT LIVER, SIGNAL = 2.1; EXPRESSED IN BONE MARROW, SIGNAL =   4; EXPRESSED IN HBL100, SIGNAL = 2.8; EXPRESSED IN LUNG, SIGNAL = 2.9; EXPRESSED IN BRAIN, SIGNAL = 2.2; EXPRESSED IN HEART, SIGNAL =   2

SEQ ID NO: 352 - DNA, 493 bp, Homo sapiens
  MAP TO AP000317.1; EXPRESSED IN LUNG, SIGNAL =   4; EXPRESSED IN BRAIN, SIGNAL = 3.5; EXPRESSED IN HEART, SIGNAL = 1.7; EXPRESSED IN PLACENTA, SIGNAL = 4.4; EXPRESSED IN HBL100, SIGNAL =   4; EXPRESSED IN HELA, SIGNAL = 4.9; EXPRESSED IN ADULT LIVER, SIGNAL = 2.7; EXPRESSED IN BT474, SIGNAL = 3.3; EXPRESSED IN BONE MARROW, SIGNAL = 4.7; EXPRESSED IN FETAL LIVER, SIGNAL = 3.8
tcccaaaacggaagaacttggagtctaatgttcaagagcaggaagcatccagccctggagaaagatgcaggctcggaggctaggccagtctggccttttcacatttttctgcctgctttatattcactggcagctgattagatggtacccacaagattaagggtgtgcctgccttccccagcccactgactcaaatgttaatcttttttggcaacaccctcacagacacacccaggatcaagacttgcatccttcaatccaatcaagctacacttagtattaaccatcacacagactaacagcagaatcaggagcctcaccgggagagcgcagagcacattgaggcagtagacatgcgctccaggccacttgggatgtcctgctctccatagaaatatactaacattatacattctcaatatgcaaatggccaatatgcacatgaaaagatgctcaacaacactaatcattagaaaaatgcaaaacaaagcca

SEQ ID NO: 353 - DNA, 474 bp, Homo sapiens
  MAP TO AP000266.1; EXPRESSED IN PLACENTA, SIGNAL = 2.7; EXPRESSED IN BT474, SIGNAL = 2.9; EXPRESSED IN BONE MARROW, SIGNAL = 2.5; EXPRESSED IN FETAL LIVER, SIGNAL = 2.6; EXPRESSED IN HELA, SIGNAL = 2.5; EXPRESSED IN ADULT LIVER, SIGNAL = 2.5; EXPRESSED IN HEART, SIGNAL = 2.1; EXPRESSED IN LUNG, SIGNAL = 2.1; EXPRESSED IN HBL100, SIGNAL = 2.6; EXPRESSED IN BRAIN, SIGNAL = 2.4
gctacccccagcctctttacaggtgagcaccatgatactaaggtaggtgaagtgacttctccaaagacagggagctagtaagcagctgggctgaaactcaaaggctgcccagctccccatccagggctccaagatggatgtgtcccatctctgagcctcattagctttggaaatgtggctgagagacagagagagagggagggacggacagggtgagagagacatgttggctactctgggccagtcctgggttctgacactcactcatgagctcccgggcttgggccttctcaatggctgctctcaggtcttcctggagcttgaggtctctttcaatgaggctccacttgtgcaagaggacaaggacgtccttggtggaaagcactgtctcatttacggtgaatctgttcatgtccctaaaggcctgtatgacagtggcccggtacctcagcacggagtcaagtgtcccgaaga

SEQ ID NO: 354 - DNA, 392 bp, Homo sapiens
  MAP TO AP000266.1; EXPRESSED IN BONE MARROW, SIGNAL = 2.9; EXPRESSED IN FETAL LIVER, SIGNAL = 2.9; EXPRESSED IN LUNG, SIGNAL = 2.7; EXPRESSED IN ADULT LIVER, SIGNAL = 2.6; EXPRESSED IN PLACENTA, SIGNAL = 2.5; EXPRESSED IN BT474, SIGNAL = 2.9; EXPRESSED IN HBL100, SIGNAL = 3.3; EXPRESSED IN HELA, SIGNAL =   4; EXPRESSED IN BRAIN, SIGNAL = 3.8; EXPRESSED IN HEART, SIGNAL = 3.4
tgaccgtattgaacaggcaggccacctcctgcacaggccctgccagcccctcagccccacagagccggctatacagcctgaatatgctgctcctcacggcactgtccttaaggaggtcagccacgaccacagggtgtggcaaaatatggctcttaagccagccaatgagtcctgcagcctctgccctgctgagcgggtgctcggccaccgaccgcagcacccaactgactgccagggaagcggcagcatatacggggcctggcgcatcgctctcggggctggctgagtccacaggctcctgagtggggtcaggaccagggatcactggtctccagtaagtcaagatggacctcaggaggcccttgcatgtctccaaggtagatgccatcagc

SEQ ID NO: 355 - DNA, 449 bp, Homo sapiens
  MAP TO AP000247.1; EXPRESSED IN BT474, SIGNAL =   2; EXPRESSED IN LUNG, SIGNAL = 1.8; EXPRESSED IN ADULT LIVER, SIGNAL =   2; EXPRESSED IN PLACENTA, SIGNAL = 2.6; EXPRESSED IN BONE MARROW, SIGNAL = 2.1; EXPRESSED IN HBL100, SIGNAL = 1.7; EXPRESSED IN FETAL LIVER, SIGNAL = 1.6; EXPRESSED IN HELA, SIGNAL = 1.2; EXPRESSED IN BRAIN, SIGNAL = 2.1; EXPRESSED IN HEART, SIGNAL = 1.5
tccccaaaatgagaaacagcagaagcattataaagctgcccatgggtgacaggtggatctgtagcaaaacagctctatgagaaaataaagttccctgcgcctttgaaatttcaacaggaaatgcagggccagtcatcagcccatcttgcacacacattttataccacctgccagacagaggcactcactgaaacacacaagccgcatgataaactccccgggtcgtggcacaacggagttcagactcgcccccagcaccctgcacagccatacctgggttgctggtgagaaaggcgagggggctctcgccaaggtcggcagggccgtccactcggtggggcgggctttccagcagctccactccttcctccagctcggggtaggtcctcaccaggaggcccagcgagggctgtgagaggaaatctttgagcatagaagagttcagggcg

SEQ ID NO: 356 - DNA, 466 bp, Homo sapiens
  MAP TO AP000247.1; EXPRESSED IN FETAL LIVER, SIGNAL = 0.74; EXPRESSED IN LUNG, SIGNAL = 0.91; EXPRESSED IN PLACENTA, SIGNAL =   1; EXPRESSED IN BT474, SIGNAL = 1.1; EXPRESSED IN BONE MARROW, SIGNAL = 0.87; EXPRESSED IN HBL100, SIGNAL = 1.1; EXPRESSED IN ADULT LIVER, SIGNAL = 0.88; EXPRESSED IN BRAIN, SIGNAL = 2.3; EXPRESSED IN HEART, SIGNAL = 0.89; EXPRESSED IN HELA, SIGNAL = 0.8
cggaggagtctcttcagcagcagctggtggcatcttatggtttgcaagattgggaatatcagacaccaaattccgacagtagcctgcaaatttgctccccggccccccgtttgctgtcactccagagtttttctgagcatacaagtcacccaaggaattggctctctgacaggtgctgagctgccgcggactcgcccgcgtttccatcccccgagcctcctcgcagtccttctcttcggcggaacccaagatttcttcgttgcttgttaaatgttcttggctcagatcagagagtgagaattccaggctgtcctcccgccagatgtctgcagatttggagcgtttcttcttaaagctcgccgtctccatgaaagtgggcccattggatgtataggaatgctgcctcctgcctccctcagccaaatatgtagcgtcatccccgtaaagcctgctctcctcagtgtct

SEQ ID NO: 357 - DNA, 489 bp, Homo sapiens
  MAP TO AP000246.1; EXPRESSED IN HBL100, SIGNAL =   1; EXPRESSED IN LUNG, SIGNAL = 1.8; EXPRESSED IN BRAIN, SIGNAL = 2.2; EXPRESSED IN PLACENTA, SIGNAL = 1.9; EXPRESSED IN BT474, SIGNAL = 1.2; EXPRESSED IN BONE MARROW, SIGNAL =   2; EXPRESSED IN FETAL LIVER, SIGNAL =   2; EXPRESSED IN HELA, SIGNAL = 2.2; EXPRESSED IN ADULT LIVER, SIGNAL = 1.3; EXPRESSED IN HEART, SIGNAL = 1.5
cgtggtaattgataggtctcacgagatttgatggttttataaggggaaaccccttttgcttggctctcattctcttctcctgtctgcagccatgtgagaggtgccttttgccttctgcctcctgccatgattgtgagccctctccagccacgtggaactgtgagtccattaaacctctttctttcgtaaattgcccagccttgggtatatctttatcaacagtgtgaaaacggactaatacaggtggtatggacacatcaatatcagtttttccaatccatgagcatgggatatcttttcactttttggtgtcctcttcaatttctttcatcagtgttttgtagttttcactatagagatctttcacttggtcgattaaatttattcctagggctttgtttttgcttcggtagctagtataaatgggattgctttccttttcagattgttctctgttgacatatataaatgctactgatggccaggcat

SEQ ID NO: 358 - DNA, 450 bp, Homo sapiens
  MAP TO AP000226.1; EXPRESSED IN FETAL LIVER, SIGNAL = 1.3; EXPRESSED IN LUNG, SIGNAL = 1.6; EXPRESSED IN HELA, SIGNAL = 1.9; EXPRESSED IN ADULT LIVER, SIGNAL = 1.3; EXPRESSED IN BT474, SIGNAL = 1.8; EXPRESSED IN PLACENTA, SIGNAL = 1.6; EXPRESSED IN HEART, SIGNAL = 1.4; EXPRESSED IN BRAIN, SIGNAL = 0.94; EXPRESSED IN HBL100, SIGNAL = 1.4; EXPRESSED IN BONE MARROW, SIGNAL = 0.9
cactctcaacaccctaagagcagaaattttttagacttctttgtatttcctgcacgcaggacagaatttgtccaccacatgagcttaaatgtgcgttacaattaaaagagagatacagaaaatcaacattcatcctaataactctacatgtaaaatagattataacttaccctagtgtcttctatgtcaagcttaattcctattattctacccaatatagaattatgcattttattaccatagggtatcccaaggcgttcttgttctttcctatagccttccagtgcagcagcccatcttgtcacttgttctgaagtttcatctgaaatggttgtgatgtgttttgtgccatcaagagttatcacttgagcttcttcaacaagatgtgcttctgattcagcatggtgggcatctggatcaataacaacctcaacagtgtccgcaggttta

SEQ ID NO: 359 - DNA, 468 bp, Homo sapiens
  MAP TO AP000216.1; EXPRESSED IN BT474, SIGNAL = 2.7; EXPRESSED IN HBL100, SIGNAL = 2.2; EXPRESSED IN BRAIN, SIGNAL = 4.1; EXPRESSED IN PLACENTA, SIGNAL =   2; EXPRESSED IN HEART, SIGNAL = 1.4; EXPRESSED IN ADULT LIVER, SIGNAL = 1.4; EXPRESSED IN HELA, SIGNAL = 1.2; EXPRESSED IN LUNG, SIGNAL = 1.5; EXPRESSED IN FETAL LIVER, SIGNAL = 1.9; EXPRESSED IN BONE MARROW, SIGNAL = 1.9
ggaacttgtgttgggacaggtacagctttcagcatcagataatgctctgattctcagtaaaagctttagttggaatagacatcctgtaaaatggatctggcctgatctttagattgtaaatggccttaaatagctgtgtgacattggtgggcttcactcttctttgtgccaccctttcccaagcattcattggcccctgtgacctgtgcctgtatccatgtgacccagtctgtcttctctctgcagtgccgtattcacctggaccaacctgctggtggtggtggtggagctggatgggctagagcaggatgccctggacctggtggccctggtgaccaacgtggtgctggaggagcactacctggtcgtgggagtggtggtcatcgtggacccaggggtgatccctatcaactctcggggtgagaagcagcgcatgcacctgcgggacggcttcctggctgaccagct

SEQ ID NO: 360 - DNA, 468 bp, Homo sapiens; identical to SEQ ID NO: 359
  MAP TO AP000216.1; EXPRESSED IN PLACENTA, SIGNAL = 1.4; EXPRESSED IN BT474, SIGNAL = 2.6; EXPRESSED IN HELA, SIGNAL =   1; EXPRESSED IN HEART, SIGNAL = 1.5; EXPRESSED IN BONE MARROW, SIGNAL = 1.4; EXPRESSED IN HBL100, SIGNAL = 1.8; EXPRESSED IN FETAL LIVER, SIGNAL = 1.5; EXPRESSED IN LUNG, SIGNAL = 1.4; EXPRESSED IN ADULT LIVER, SIGNAL =   1; EXPRESSED IN BRAIN, SIGNAL = 1.9

SEQ ID NO: 361 - DNA, 449 bp, Homo sapiens
  MAP TO AP000216.1; EXPRESSED IN PLACENTA, SIGNAL = 0.81; EXPRESSED IN BT474, SIGNAL = 0.96; EXPRESSED IN LUNG, SIGNAL = 0.8; EXPRESSED IN HELA, SIGNAL =   1; EXPRESSED IN BRAIN, SIGNAL =   1; EXPRESSED IN HBL100, SIGNAL = 0.75; EXPRESSED IN FETAL LIVER, SIGNAL = 0.71; EXPRESSED IN ADULT LIVER, SIGNAL = 0.83; EXPRESSED IN BONE MARROW, SIGNAL = 1.4; EXPRESSED IN HEART, SIGNAL = 1.6
aacatgacagaggtgtctgggtcttcagcaaaagtgatcccttgttcgagtccttggtgaatctcggttttcatctggcttcatgtctcgacctgtactgtctaatgtggtagccactggccggatgtacctttttaaattatataaaatgaaatgagactaaaacttgcactccttattcgctcagtagctagtgctgcatgttggaggcgcaggcttcgagtgtggggagcagatgcctctgactgcttgctgttctgtgtcctgtctgtgtgtcacaggttggcccccgctctcctggctagtgattgatgggaagcatctagccaagcccccaaaggactggcaccctctggcccaggacacagggactgggactgcctacattgaggtaatgactgttcctaacttagagaatgtaaaaacatgtcccacaggcttaagtcttg

SEQ ID NO: 362 - DNA, 493 bp, Homo sapiens
  MAP TO AP000207.1; EXPRESSED IN BT474, SIGNAL = 5.2; EXPRESSED IN LUNG, SIGNAL = 2.1; EXPRESSED IN BRAIN, SIGNAL =   2; EXPRESSED IN PLACENTA, SIGNAL =   2; EXPRESSED IN HBL100, SIGNAL = 2.4; EXPRESSED IN FETAL LIVER, SIGNAL =   2; EXPRESSED IN HELA, SIGNAL = 1.8; EXPRESSED IN ADULT LIVER, SIGNAL = 1.7; EXPRESSED IN BONE MARROW, SIGNAL = 1.2; EXPRESSED IN HEART, SIGNAL = 1.8
tgcaaaataatggcaaagccatttccagatattcaggactgtggagatttctgttctccattactataatgaacaaattcagataattaggatcttgagagtataccttgtgatacatcaagtcacattccacgttaggtgacaaatatacaagtgcattgagaaaggcaatttcaattttttcattagagagcaatctggtgtagacccttctaatggaatcagtatccacagacacatcatcagggcctaatttttgcaaattgttgtctccctgtgagctatcacctgtgcttgaggaagatgcttctgagtcttcttccatagcagcagcagaacatgcagcttttgccttttcattttcattcttctcttcatcctttgcttgaagagacttcagttcttccttggtgtgttgtttagctttccagaagctctctaccaatgcctcagcactagaaaaaactcttccaataacacagttaagggggaa

SEQ ID NO: 363 - DNA, 472 bp, Homo sapiens
  MAP TO AP000196.1; EXPRESSED IN HBL100, SIGNAL =  14; EXPRESSED IN HELA, SIGNAL =  12; EXPRESSED IN BRAIN, SIGNAL =  14; EXPRESSED IN BT474, SIGNAL =  11; EXPRESSED IN BONE MARROW, SIGNAL =  17; EXPRESSED IN FETAL LIVER, SIGNAL =  14; EXPRESSED IN LUNG, SIGNAL =  14; EXPRESSED IN ADULT LIVER, SIGNAL = 8.8; EXPRESSED IN PLACENTA, SIGNAL =  12; EXPRESSED IN HEART, SIGNAL =  10
gtggtctgactgctccactgaccggctgttcctccatttctcttcatctcctcgggcctccctatttcttgagacacaatattgaaattagactaattagtaaccctacaatggcctctaggtgtttaagtgaaaggaagagttatacatctcttacttaaaatcaagagctagaaattattaagcttagtgaggaagacatggcaaaagccgagacaggcggaaagctaggcctcttgcaccaattagtcaagttgtgaatgcaagagaaaagttcgtgatggaagtgaaaagggctaccccagtgaacacacaaatgataagaaagcaaaacagccttattgctgatataaagaaagttttagtggtctggatagaagctcaaaccagccgcaagagcctcttaagccaaagcctaatccacagcaaggtcatcaataacgaggcaaaaccctccaccagcaaaaagatt

SEQ ID NO: 364 - DNA, 458 bp, Homo sapiens
  MAP TO AP000187.1; EXPRESSED IN BONE MARROW, SIGNAL =   4; EXPRESSED IN FETAL LIVER, SIGNAL = 3.8; EXPRESSED IN LUNG, SIGNAL = 4.4; EXPRESSED IN HELA, SIGNAL = 4.1; EXPRESSED IN PLACENTA, SIGNAL = 3.3; EXPRESSED IN BT474, SIGNAL = 3.6; EXPRESSED IN HBL100, SIGNAL = 2.8; EXPRESSED IN HEART, SIGNAL = 3.2; EXPRESSED IN ADULT LIVER, SIGNAL = 5.4; EXPRESSED IN BRAIN, SIGNAL =   4
ggcaattcctcaaacaattaaacatagagttgccagcaattctactcctagaaatatattcaagagaaatgagaacataggtccacacagaatcaccatccaaagcccagacctcccaattcttacattggggattaaatttcaacatgaattttagaggagacgaaaacattcaaaccataataggacataaacttgatttctcattgataggatggatgcaactaaacagctcaacagtgttgattaaaaatgcttattatgatagaggaaaatggcagataggaggcaggactaacttgcagctcccactcggatggacagagcagtgcatgaagacccacatcgtcaaattttactccaagaactaacacaggatcataccaggaaaaccaaaagaaaccacagaccctttgaaggcggtgaattgctgctgcaggctctgtgtcccctacaaa

SEQ ID NO: 365 - DNA, 465 bp, Homo sapiens
  MAP TO AP000146.1; EXPRESSED IN BT474, SIGNAL =   3; EXPRESSED IN BONE MARROW, SIGNAL =   3; EXPRESSED IN LUNG, SIGNAL = 3.8; EXPRESSED IN ADULT LIVER, SIGNAL = 2.2; EXPRESSED IN BRAIN, SIGNAL = 2.7; EXPRESSED IN PLACENTA, SIGNAL = 4.2; EXPRESSED IN HBL100, SIGNAL = 2.5; EXPRESSED IN FETAL LIVER, SIGNAL = 3.6; EXPRESSED IN HELA, SIGNAL = 2.2; EXPRESSED IN HEART, SIGNAL = 2.6
ttattttctttctattctgtccatctctcaacagtgagctaaaaggagttaaatatatattttctttttgattttgccatcgtgaaggaggagaagttcaatagttctgaatttttttgcaaagggtttctactaattatttaaatttaatattctctgaagtaatgctacattattactgatatttgtgtcaacggtatgtacagaatagaaattcttaaacttatcaaacagaaagaggtctggagctcagtagcccagtggtttccaaccctggatgcaggttggtgtcacctgttgacgccatatctctgagtgttcggccttggtttctccacaggtgattctgatacatagtgtgagttgatagtagtgatataatccatctcccaaataacagactttgggaaaaagaggttgctagaggttggaaattttcactgaaggctagcaaactaacagtgg

SEQ ID NO: 366 - DNA, 359 bp, Homo sapiens
  MAP TO AP000146.1; EXPRESSED IN HBL100, SIGNAL = 1.5; EXPRESSED IN BRAIN, SIGNAL = 1.8; EXPRESSED IN BT474, SIGNAL = 1.1; EXPRESSED IN BONE MARROW, SIGNAL = 1.9; EXPRESSED IN FETAL LIVER, SIGNAL = 1.8; EXPRESSED IN HELA, SIGNAL = 1.4; EXPRESSED IN ADULT LIVER, SIGNAL = 1.6; EXPRESSED IN PLACENTA, SIGNAL = 1.9; EXPRESSED IN LUNG, SIGNAL = 1.6; EXPRESSED IN HEART, SIGNAL = 2.4
tgatccatttccagttaatttttgtatatggtgtaaaatagaggtcttatttcattcttttgcatgtggctatccaattatctcagtaccatgtattgaaaagactattccgtctttcattgaattatttaaaatcaattggttatggatgtatggttttatttttggtctctcaattcttatccattggtatatacatctgttcttgtgctggcatcacactgtgttgactgtcattgctttgtaggaagttttgaaattgtgaagtactcctaccttgttctttattttcaaggttattttgactattgtgggtctcctgcctccactttatcgacaactttttcttttgtaagtgg

SEQ ID NO: 367 - DNA, 469 bp, Homo sapiens
  MAP TO AP000137.1; EXPRESSED IN HELA, SIGNAL = 2.7; EXPRESSED IN HEART, SIGNAL = 1.6; EXPRESSED IN BT474, SIGNAL =   2; EXPRESSED IN FETAL LIVER, SIGNAL = 1.7; EXPRESSED IN LUNG, SIGNAL = 2.2; EXPRESSED IN ADULT LIVER, SIGNAL = 1.8; EXPRESSED IN BRAIN, SIGNAL = 2.4; EXPRESSED IN PLACENTA, SIGNAL = 1.2; EXPRESSED IN BONE MARROW, SIGNAL = 1.7; EXPRESSED IN HBL100, SIGNAL = 2.6
ttgttgccataacaaattactgcaaattgagctcctttaaacaacttcaatgtattcaatgtattatctcatagttctgtgggtcagaagtctggtgaattcagctggttcctctggtccaggtttcacagactgaaatcaaattgctggcaaactggactcttatctgaaggctctgagggataactcattcaagttgttggaagaattcagttttcatgactgcaaggctaaggatcatatttcctggctagctgttagccaggagcctccctcagcctcttaaggctgtgcaaattcctcatcatgctgctccctccaacatcaaaccagaaagttcccattgagtccctgtactttgaattgttctcgctgctgctgctgctgctgcatctcttctgcctccagttggagaaagctctctgctttgaaggctttatgtaattagattgggcctacttggataatc

SEQ ID NO: 368 - DNA, 412 bp, Homo sapiens
  MAP TO AP000136.1; EXPRESSED IN BT474, SIGNAL =  21; EXPRESSED IN BONE MARROW, SIGNAL = 9.2; EXPRESSED IN HBL100, SIGNAL =  16; EXPRESSED IN LUNG, SIGNAL = 4.1; EXPRESSED IN ADULT LIVER, SIGNAL = 7.8; EXPRESSED IN BRAIN, SIGNAL = 9.6; EXPRESSED IN HEART, SIGNAL =  13; EXPRESSED IN PLACENTA, SIGNAL = 6.8; EXPRESSED IN HELA, SIGNAL =  14; EXPRESSED IN FETAL LIVER, SIGNAL =  12
tcctttctgcctcaaacacctttttctctgtgtctctttctctcgttcacttttacatacacacataccacacatgcagtcttcttattttcggtcctataatcaatgaaccgtgaaacatttgttctttgtcgcttccctttttcactttttagaaaaggaatattatatctgtttctacataagaaagtcagtggaaatttgaagtaaacttctagatgactatccatagtatacatttttttaatatcaagaaaaccaaagcacatgtcaattttatgcccctaattattcaaagtttgccttcactatacttattccaaatgataattgtgaagaaaaagcagcatttgtagcctttcttctcaatgatattgaacataccttttatcgtggagctgctggagaaaaa

SEQ ID NO: 369 - DNA, 470 bp, Homo sapiens
  MAP TO AP000117.1; EXPRESSED IN BONE MARROW, SIGNAL = 1.9; EXPRESSED IN HBL100, SIGNAL = 8.3; EXPRESSED IN LUNG, SIGNAL = 2.2; EXPRESSED IN ADULT LIVER, SIGNAL = 4.5; EXPRESSED IN BRAIN, SIGNAL = 4.5; EXPRESSED IN PLACENTA, SIGNAL = 1.7; EXPRESSED IN BT474, SIGNAL = 5.7; EXPRESSED IN FETAL LIVER, SIGNAL = 5.6; EXPRESSED IN HELA, SIGNAL = 4.5; EXPRESSED IN HEART, SIGNAL =  18
tggagggctatggatcaaacacagatccgatgatctagtagggaccaggaactctgaacaaacccttaaagacacgggattttggcaggcaggaccagatagactttgctgagtgaccatgtgttaggtgctgtgtctaaccaattaattcctaaacataatctactcaaaccaaattctctaggccaaaagggctttttggcctttatactcaggggataccaaaaaaggacataaaaataaagccttctacattccagtttaaaagacagtgaacataatatgatctgttctggaagctttttattgttgctccaagtttaagaattttcactgatggcagaaaaccaacacttttagacaatctcccgcatagccctgcccagcttctgaatcttggtcttgacagacatgtcaacatatttctcgccaatgcgcacaatcattccacccaagattgacggatcagt

SEQ ID NO: 370 - DNA, 492 bp, Homo sapiens; identical to SEQ ID NO: 299
  MAP TO AP000106.1; EXPRESSED IN BT474, SIGNAL =   3; EXPRESSED IN BONE MARROW, SIGNAL = 1.1; EXPRESSED IN HBL100, SIGNAL =   2; EXPRESSED IN FETAL LIVER, SIGNAL =   2; EXPRESSED IN LUNG, SIGNAL = 1.4; EXPRESSED IN HELA, SIGNAL = 1.3; EXPRESSED IN ADULT LIVER, SIGNAL = 1.4; EXPRESSED IN BRAIN, SIGNAL = 1.4; EXPRESSED IN PLACENTA, SIGNAL = 2.3; EXPRESSED IN HEART, SIGNAL = 1.2

SEQ ID NO: 371 - DNA, 492 bp, Homo sapiens; identical to SEQ ID NO: 299
  MAP TO AP000106.1; EXPRESSED IN PLACENTA, SIGNAL = 1.6; EXPRESSED IN BT474, SIGNAL = 2.1; EXPRESSED IN LUNG, SIGNAL = 1.1; EXPRESSED IN HELA, SIGNAL = 1.2; EXPRESSED IN ADULT LIVER, SIGNAL = 1.4; EXPRESSED IN BONE MARROW, SIGNAL =   2; EXPRESSED IN HBL100, SIGNAL = 1.9; EXPRESSED IN FETAL LIVER, SIGNAL = 1.4; EXPRESSED IN BRAIN, SIGNAL = 1.4; EXPRESSED IN HEART, SIGNAL =   1

SEQ ID NO: 372 - DNA, 464 bp, Homo sapiens
  MAP TO AP000097.1; EXPRESSED IN PLACENTA, SIGNAL = 3.4; EXPRESSED IN HELA, SIGNAL = 2.7; EXPRESSED IN HEART, SIGNAL = 1.1; EXPRESSED IN LUNG, SIGNAL = 3.1; EXPRESSED IN BT474, SIGNAL = 4.4; EXPRESSED IN BONE MARROW, SIGNAL = 2.4; EXPRESSED IN HBL100, SIGNAL = 2.2; EXPRESSED IN FETAL LIVER, SIGNAL = 3.8; EXPRESSED IN ADULT LIVER, SIGNAL = 1.4; EXPRESSED IN BRAIN, SIGNAL = 1.1
ccagcaaaattcaagtcaccatattggtcatatgtgtgtaaaagagacaaagaataaagtccatgagggtctatggaagaattgtgggggaaaggagtcacttctgatttttcagttgggcactgagaagcaggatctttcttcgtttcttcaggttccattgctaatttactttcgtcacattttaacatcacctgcaaatctctacactccgggactcctcccaggcattcattttcagacctttcatttggctgaacagaagcatgaatgtctttgacactagattccccagtacggactctgtcagttccaaatgctttttggaattttctgtatttggggcataaagaaggcaaggccagagcagcatccttctctaagcacatggactcatatgtctgactggcactgtcttgtagaggaggtgaggcttttgcatttccttgatacctgcggagttt

SEQ ID NO: 373 - DNA, 465 bp, Homo sapiens
  MAP TO AP000097.1; EXPRESSED IN BT474, SIGNAL = 2.8; EXPRESSED IN HBL100, SIGNAL =   2; EXPRESSED IN HELA, SIGNAL = 2.2; EXPRESSED IN ADULT LIVER, SIGNAL = 1.8; EXPRESSED IN BRAIN, SIGNAL =   2; EXPRESSED IN PLACENTA, SIGNAL = 1.7; EXPRESSED IN BONE MARROW, SIGNAL = 2.2; EXPRESSED IN FETAL LIVER, SIGNAL = 2.2; EXPRESSED IN LUNG, SIGNAL = 1.5; EXPRESSED IN HEART, SIGNAL = 2.3
aagtgaggggtggacatcagaccacagggactagctctcagggcgtgtggggactaggtgagtgggagaagcggatcacgctgactccactagatccagtaggagtagccaaagctggagttattatctacatgaatatggggaacgagttacccatttgttgtcccctacttgaggagggaatcaaccctgaagtctgggcattggaaggaacaaactcaagctccagccttaagccttcccacaggatgaaacttttctttatgcatcacagagagagcaaggatggctcttggagtccttactcagactcatggggcaaccccacaaccagtggcatacctaagtaaggaaattgatgtagtagcgaaaggctggcctcactctttaagggtagttgtggcggtggccatcttagtgtcagaggctatcaaaataatacaaggaaaggatctcactgtctgg

SEQ ID NO: 374 - DNA, 379 bp, Homo sapiens
  MAP TO AP000097.1; EXPRESSED IN PLACENTA, SIGNAL = 1.3; EXPRESSED IN BT474, SIGNAL = 2.1; EXPRESSED IN BONE MARROW, SIGNAL = 1.9; EXPRESSED IN HBL100, SIGNAL = 1.3; EXPRESSED IN FETAL LIVER, SIGNAL = 1.7; EXPRESSED IN LUNG, SIGNAL = 1.5; EXPRESSED IN HELA, SIGNAL = 1.3; EXPRESSED IN ADULT LIVER, SIGNAL = 0.74; EXPRESSED IN BRAIN, SIGNAL = 0.83; EXPRESSED IN HEART, SIGNAL = 0.98
ttcctgctcacctcacattcttgttctctggctgaacaggattcactgtctccttcggtgtccgtctcagagtcgtctcccaagctaatgacacaagcatatgggcaaggttcttgctggggttctgaaacataatcatcgtttccaatttccaaattgcttgaacagccttcagtactcagagtacttataaaagggcagttgacagaacttaatgttgtgaaagtcctttgacctggttctgggctctcactaatcctgatacctaaccacggacactcagaccgtttctgtgagatctgttctgagccatctttggccacagcaggtgataactgcatttggcaaggagtgtccgtgctgcaaatgtcactccaga

SEQ ID NO: 375 - DNA, 402 bp, Homo sapiens
  MAP TO AP000087.1; EXPRESSED IN HBL100, SIGNAL = 1.2; EXPRESSED IN FETAL LIVER, SIGNAL = 1.2; EXPRESSED IN LUNG, SIGNAL = 1.2; EXPRESSED IN BRAIN, SIGNAL =   1; EXPRESSED IN PLACENTA, SIGNAL = 1.7; EXPRESSED IN HEART, SIGNAL =   1; EXPRESSED IN ADULT LIVER, SIGNAL = 0.94; EXPRESSED IN HELA, SIGNAL = 0.88; EXPRESSED IN BONE MARROW, SIGNAL =   1; EXPRESSED IN BT474, SIGNAL = 1.3
gagttttggagtagtgagcattgaaattttagtaaataatgttgggatgtttcatttgatagtagcattaaatattctacatagcttcaatattaattgctattgtggcggatgcagtactctactaggcttctgcttatggaatagtctgtaaattattgtaagaagtctcattttttctgaagtctctaatttttttttctctttttgaagatattattacgatggggacatgatttgtaaagttcaaggcaagagatttgtgtacaagtttgtctgtgacttgaagactcttattggatacagtgcagcggagttgaaccgtttggtcacagaatgtgaacagaagaaacttgcaaagatgcagctccatggaattgcccagccagtcacagcagtagc

SEQ ID NO: 376 - DNA, 397 bp, Homo sapiens
  MAP TO AP000087.1; EXPRESSED IN HELA, SIGNAL = 2.3; EXPRESSED IN ADULT LIVER, SIGNAL =   3; EXPRESSED IN BRAIN, SIGNAL = 1.5; EXPRESSED IN HEART, SIGNAL = 6.2; EXPRESSED IN PLACENTA, SIGNAL = 1.6; EXPRESSED IN LUNG, SIGNAL = 1.2; EXPRESSED IN FETAL LIVER, SIGNAL = 3.6; EXPRESSED IN HBL100, SIGNAL = 4.9; EXPRESSED IN BONE MARROW, SIGNAL = 2.5; EXPRESSED IN BT474, SIGNAL = 1.9
tgacagtaagaatgtattttaaacagcaataaatttagtaggattttcccttgtaactcatataaagatacagtttctgacttaaaaaaatcaagatccttatcttcttttttgagggcacctaatgaacctctatgtcagagatgagctcagtgaaggtctaatactttcaaataccaagtcatttttattaccaccttgaaacttacatactttgaatatttatatttacactgtagttatttattcacttactgtcgcttagatttgtattctctaatcttgtccacaaagagtttctgtataggatcaagttccttattaaatgccactgctgtaacaccaatgttcctccgcaaatggactgagacggctgaccgaatgacagaggagaacc

SEQ ID NO: 377 - DNA, 479 bp, Homo sapiens
  MAP TO AP000056.1; EXPRESSED IN HBL100, SIGNAL =  26; EXPRESSED IN LUNG, SIGNAL =  36; EXPRESSED IN HELA, SIGNAL =  32; EXPRESSED IN ADULT LIVER, SIGNAL =  26; EXPRESSED IN BT474, SIGNAL =  22; EXPRESSED IN PLACENTA, SIGNAL =  23; EXPRESSED IN HEART, SIGNAL =  22; EXPRESSED IN BRAIN, SIGNAL =  30; EXPRESSED IN FETAL LIVER, SIGNAL =  30; EXPRESSED IN BONE MARROW, SIGNAL =  38
ccacagtttccacctgagtggattcttcatagttgtactggaagaaatcttgaagagcattgagttcagggttcccttctgccccactatcagactggggttcctagataaacttgcccctctccaaattttcatctcagagaatggccatttcatgcttctagttgtttaggccccaaaccgtatttttctaatgcaccatatgatatggtttggatttgtgtccctgcccaaatcttatgtcatatcataatcaccagtgttggaggaggggcctggtagaaggtgacttggatcatgggggcggacgtcccccttgctgttctcgtgatagcgagttctcatgagatctgtttttttgttgttgttgttgtttgttttgttttgttttgttttgagacaaggtctcactctgtcatccaggctgaagtgcagtgtggtgtgatagctcattgcaacctcaacctccttggctcaag

SEQ ID NO: 378 - DNA, 471 bp, Homo sapiens
  MAP TO AP000056.1; EXPRESSED IN BT474, SIGNAL =  13; EXPRESSED IN HELA, SIGNAL =  10; EXPRESSED IN HEART, SIGNAL = 7.2; EXPRESSED IN BRAIN, SIGNAL = 8.4; EXPRESSED IN ADULT LIVER, SIGNAL = 6.7; EXPRESSED IN LUNG, SIGNAL =  12; EXPRESSED IN HBL100, SIGNAL =   9; EXPRESSED IN BONE MARROW, SIGNAL =  15; EXPRESSED IN PLACENTA, SIGNAL =  14; EXPRESSED IN FETAL LIVER, SIGNAL =  11
tgggattacaggagtgagccactgcacctggccctgatctctgtattctttgtagcccctctcagtggttagcatataccactgtagcaataaaggaagagagttgtggggagaataaggaagtgtagggaagagagtacctccactcgaaaaggaattttaatctgctttgcttctgttgtttatgggtggcatatcactgatgccccataaagatttgtagaattaatatgtatctaaaaatcttatcttgctactcaaagaagtggaagccatagctcttgccctcatggagcttacagttggtatacgatatagaatgaatgatgtaataaaaggcaagtgccaaattatggcccagacagtgagtcttggtgattgtctgaaggatgcagaggctgccatgggccagcagtgctttgtggagaagatgggaattgtactaagccttgaaggttgctgcttctggaa

SEQ ID NO: 379 - DNA, 477 bp, Homo sapiens
  MAP TO AP000047.1; EXPRESSED IN PLACENTA, SIGNAL = 1.3; EXPRESSED IN BONE MARROW, SIGNAL = 1.9; EXPRESSED IN LUNG, SIGNAL = 1.4; EXPRESSED IN HELA, SIGNAL = 1.4; EXPRESSED IN BRAIN, SIGNAL = 1.3; EXPRESSED IN HEART, SIGNAL = 1.3; EXPRESSED IN BT474, SIGNAL = 1.1; EXPRESSED IN HBL100, SIGNAL = 1.6; EXPRESSED IN FETAL LIVER, SIGNAL = 1.6; EXPRESSED IN ADULT LIVER, SIGNAL = 1.2
ttagtgttactgtattttatgtgtggcctaagacaattcttcttccaatgtggccagggaagccaaaagattggacacccctagtctacgctgtaaaagataagcatgttctctcttacatacagcgcttacaatgagaataaagtggaagttccaatttaaattaaaaagtcttcagttaaaaacaaaacctaaaactgaacatctggtttaataagtgcattaataattatgccctggttaaattttttttcttaaattcatcaaactaaaaaaactacacaggctactaatttcataaggtacctacctccagcatctaggacaatatctactcccaggccacctgtttcttccaaacagctttcagcaacatgaactttcccattagatacatcaatcactcgggctgtaaaggacaggaaatcaggcaattgtactgttctctatgtgatcaacacaaacaaatcagggaaa

SEQ ID NO: 380 - DNA, 362 bp, Homo sapiens
  MAP TO AP000046.1; EXPRESSED IN PLACENTA, SIGNAL = 5.2; EXPRESSED IN BT474, SIGNAL = 5.3; EXPRESSED IN FETAL LIVER, SIGNAL = 4.9; EXPRESSED IN HELA, SIGNAL = 2.4; EXPRESSED IN ADULT LIVER, SIGNAL =   3; EXPRESSED IN BONE MARROW, SIGNAL = 3.2; EXPRESSED IN HBL100, SIGNAL = 5.1; EXPRESSED IN LUNG, SIGNAL = 3.8; EXPRESSED IN BRAIN, SIGNAL = 3.7; EXPRESSED IN HEART, SIGNAL = 2.8
taatttgcagtccctttcccaaatgatttggttcttcgggttgagattataatttgacttacatagtatgggttttatatttttgtaaattatttttctagcatttagtgaaaaaatacaaagctaatagatattaaagtttgatgctgttcttattgtatgtttttcttgaataggtattgagaaatggagcccttaccagacccaattgtatgtttttcttgaataggtattgataaatggaagcgcttaccagcccagctttgccagccctaataagaagcatgctaaagccacagcagctactgtggttcttcaagcaatgggccttgtaccaaaggacctcatggctaatgccactt

SEQ ID NO: 381 - DNA, 458 bp, Homo sapiens
  MAP TO AP000046.1; EXPRESSED IN BONE MARROW, SIGNAL = 7.7; EXPRESSED IN ADULT LIVER, SIGNAL = 5.2; EXPRESSED IN PLACENTA, SIGNAL = 7.6; EXPRESSED IN BT474, SIGNAL = 7.8; EXPRESSED IN HBL100, SIGNAL = 7.9; EXPRESSED IN LUNG, SIGNAL = 8.2; EXPRESSED IN HELA, SIGNAL = 7.1; EXPRESSED IN BRAIN, SIGNAL = 8.3; EXPRESSED IN FETAL LIVER, SIGNAL = 8.9; EXPRESSED IN HEART, SIGNAL = 5.4
ctgtccaggaatcgactgtgacagtttcagagcctgctgtcacagtctcagagcagactcaagtaataccaactgaggtggctatagagtccacaccaatgatactggaatctagtatcatgtcatcacatgttatgaaaggaattaatctatcctctggtgatcaaaatcttgctccagagattggcatgcaggagattgcattgcattcaggtgaagaaccacatgctgaggaacacctgaaaggtgacttttacgaaagtgaacatggtataaatatagaccttaatataaataatcatttaattgctaaagagatggaacataatacagtgtgtgctgctggtactagtcctgttggggaaattggtgaagagaaaattttgcccaccagtgagactaaacagcgcacagtattggatacctaccctggtgttagtgaagctgatgcaggagaa

SEQ ID NO: 382 - DNA, 475 bp, Homo sapiens
  MAP TO AP000046.1; EXPRESSED IN PLACENTA, SIGNAL = 1.1; EXPRESSED IN BT474, SIGNAL = 2.5; EXPRESSED IN BONE MARROW, SIGNAL = 2.8; EXPRESSED IN ADULT LIVER, SIGNAL = 1.5; EXPRESSED IN HEART, SIGNAL =   1; EXPRESSED IN HBL100, SIGNAL = 7.2; EXPRESSED IN FETAL LIVER, SIGNAL =   2; EXPRESSED IN LUNG, SIGNAL =   1; EXPRESSED IN HELA, SIGNAL = 2.5; EXPRESSED IN BRAIN, SIGNAL = 1.5
aaatcagtaccactgtgattttgctaaactttccaaacttacgctatcatgaagttttttccatttgagtattgctataaccagttttgattcaaacaaaatacaaaccaagactgtatcactcccacagagagaaaagaatactgaatgacttatagggttaatgaaatgttctacatagccatttaggccagtttctgaaatggcactacagctaacttgcttagagttttacctgggctgctggaggaaagctatggcacgaaagccgacgtctttcctataaattgctccctcaaactttatagcagctagtcctttcttggcttcctcaagggctgatatgagattttcccggatggctgtgactgcaagaactctacccccatgagttactactttgccatttttgagggcagtgcctgcatggaacacctccagtcctagagcttgagcctcaggaaaccctagaaga

SEQ ID NO: 383 - DNA, 496 bp, Homo sapiens
  MAP TO AC007912.2; EXPRESSED IN HBL100, SIGNAL = 0.83; EXPRESSED IN LUNG, SIGNAL = 1.1; EXPRESSED IN ADULT LIVER, SIGNAL = 1.5; EXPRESSED IN BRAIN, SIGNAL = 1.1; EXPRESSED IN HEART, SIGNAL = 0.9; EXPRESSED IN PLACENTA, SIGNAL = 1.4; EXPRESSED IN BT474, SIGNAL = 0.87; EXPRESSED IN BONE MARROW, SIGNAL = 0.98; EXPRESSED IN FETAL LIVER, SIGNAL = 0.91; EXPRESSED IN HELA, SIGNAL =   1
ctttatagggagcccatgccattctggttggaagcttctgtattatatctgcaagtccatgtgggatcctcttgtcctttcttttctgagcacactgtttgttccagatcttttctgcttgcccctccagctccactctccatcttcctttactctctgcctaggaagctgacccatgcagatgttactgtggacttccttgccctctggcttctaggtttggcttgaccaagggcatcctggtggaggggagttaggaggaagagagattgctcccttgactctctccttgggttaccttggtctggttgtgtccttggactcaaagtcactacttttctccacgaagccctcttcttggagggacactgtctcctggagagttgccacacacctctctttctctggttctggtacaacccccaattctcctcctttcagctctagagatggtaagagttctactgtgactgggtacctcactatggctccctca

SEQ ID NO: 384 - DNA, 471 bp, Homo sapiens
  MAP TO AC007912.2; EXPRESSED IN PLACENTA, SIGNAL = 2.3; EXPRESSED IN BONE MARROW, SIGNAL = 2.8; EXPRESSED IN LUNG, SIGNAL =   3; EXPRESSED IN ADULT LIVER, SIGNAL = 2.7; EXPRESSED IN BRAIN, SIGNAL = 3.7; EXPRESSED IN BT474, SIGNAL = 2.4; EXPRESSED IN HBL100, SIGNAL = 2.3; EXPRESSED IN FETAL LIVER, SIGNAL = 2.5; EXPRESSED IN HELA, SIGNAL = 3.2; EXPRESSED IN HEART, SIGNAL =   4
agaaaggaaggaaggaagggcttgggcaaatgcatggagatgagatagtgtgtagctttttggggactggggattataactagaaaccagagcagctggtcccaatgtactgcttacttgtaagagttactgattagaaagctggcaccatggactgaattgcacccacccctagttcataggttgagtatgttggactttacccttaatgtggtggctttagagatggagcttttgggaggtgattagggttagatgaactcatgagagtaggggattttaagaacaggaagagatctctctctgcatatgcactgaaaataggccacaagaagacggccatctgcaagccaggaagagagccctcaccagagactgaccctgcagacaccttgatcttggacttccagcctccagaactgtgagaaaataaatgtctgtagtttaagccacttggtgtatggtactttg

SEQ ID NO: 385 - DNA, 466 bp, Homo sapiens
  MAP TO AC007903.1; EXPRESSED IN BRAIN, SIGNAL = 2.4; EXPRESSED IN LUNG, SIGNAL = 1.9; EXPRESSED IN HELA, SIGNAL = 1.9; EXPRESSED IN ADULT LIVER, SIGNAL = 2.3; EXPRESSED IN PLACENTA, SIGNAL = 1.7; EXPRESSED IN BT474, SIGNAL = 1.7; EXPRESSED IN BONE MARROW, SIGNAL = 1.7; EXPRESSED IN HBL100, SIGNAL = 1.4; EXPRESSED IN HEART, SIGNAL = 1.9; EXPRESSED IN FETAL LIVER, SIGNAL = 1.6
aggcagtcctttacagcaacatgagaatgaactaatacagtaaattggtagagagtggggtgctgctataaagagacccaaaaatgtgaaagtgactttggaactgggtaaaaggcaggggttggaacagtttggagggcttagaaaaagataggaaaatgtggggaagtttggaacttcctagagacttagagggctcagaagacaggaagatgtggaaacatttggaactccctagagacttgttaaatgactttgactaaaatgctgagagtgatagcgatatggacaatgaagtcaaggctgaggtctcagatggagatgagaaacttgttgagaactggaataaaggtgactcttgttatgttttagcaaagagactggtgacatttttccactgccctagaaatctgtggaactttgaacttgagagcgatgatgttagggtatgtggtggaagaaattt

SEQ ID NO: 386 - DNA, 480 bp, Homo sapiens
  MAP TO AC007903.1; EXPRESSED IN ADULT LIVER, SIGNAL = 1.7; EXPRESSED IN PLACENTA, SIGNAL = 0.75; EXPRESSED IN FETAL LIVER, SIGNAL = 0.64; EXPRESSED IN LUNG, SIGNAL =   1; EXPRESSED IN BT474, SIGNAL = 0.64; EXPRESSED IN HEART, SIGNAL = 1.1
  unsure 88
aagtatagtgttattcatgcagcagagtaatttctcttgtcagctttactgaggtataatttacatacaataaaatgcatgaatttcnaagtatactattcaatgagatttgacaaatatatgcagttttgaaaccatcataattgacagggtaatctttgcagataatgatttatgattttcctgctttccgttttccaaaatgagtagtgggctctagggtcctggcttggagaggtttgtggctgtacgaagggcaaacatgggctgtaagataagcctgtctgtgactttgcttttcagcatccccaggcatgaaggagcttatgctaggtgtcctggtggggaaaaaaggaagtgcctcagagggtgacgagaatgcagatggcgatgaagaggatggtgatgacgatgattaaatgtgaggtcccagtctcagggcttttacatgtattagctcatttaatcctcataacatcc

SEQ ID NO: 387 - DNA, 494 bp, Homo sapiens
  MAP TO AC007842.1; EXPRESSED IN PLACENTA, SIGNAL = 1.3; EXPRESSED IN FETAL LIVER, SIGNAL = 2.4; EXPRESSED IN LUNG, SIGNAL = 1.6; EXPRESSED IN BT474, SIGNAL = 4.7; EXPRESSED IN HEART, SIGNAL = 3.4; EXPRESSED IN BRAIN, SIGNAL = 1.8; EXPRESSED IN ADULT LIVER, SIGNAL = 1.9; EXPRESSED IN HELA, SIGNAL = 2.8; EXPRESSED IN HBL100, SIGNAL = 3.1; EXPRESSED IN BONE MARROW, SIGNAL = 2.9
ggtgaagttgaccaccttggtaatgcatgttcagaaaggtcccaatcattttctggaccctggggggcctctgaggcaaggcatattctaatacagacactgtagacatttcctaagtgagcagtggtcctcagatttgcctcataactttggatccatcccagatactggaattcagatttcctggttggggttataaaactggcctggtctgcactgccctcatgatagctggatcttctagttcattttcaatcaccatcttactgagcctttctgccagattttcctcatggtcacccaacaagtccatttcttccctttctccattgcctgtttgttcattaactgccactggtagcttttcttccaattcagccaggcactcatgtgcttcctgccaatcatcatcaactgcacctgacccaaaaatatcatcattgaattgatcaatctcttcatcttcttctctcagtccctgaaattcatcttca

SEQ ID NO: 388 - DNA, 446 bp, Homo sapiens; identical to SEQ ID NO: 134
  MAP TO AC007842.1; EXPRESSED IN HEART, SIGNAL = 1.7; EXPRESSED IN FETAL LIVER, SIGNAL = 2.4; EXPRESSED IN ADULT LIVER, SIGNAL = 2.5; EXPRESSED IN BRAIN, SIGNAL = 1.7; EXPRESSED IN PLACENTA, SIGNAL = 1.6; EXPRESSED IN BT474, SIGNAL = 1.6; EXPRESSED IN BONE MARROW, SIGNAL = 1.5; EXPRESSED IN HBL100, SIGNAL = 3.2; EXPRESSED IN LUNG, SIGNAL = 1.4; EXPRESSED IN HELA, SIGNAL = 2.4

SEQ ID NO: 389 - DNA, 490 bp, Homo sapiens
  MAP TO AC007842.1; EXPRESSED IN ADULT LIVER, SIGNAL = 2.7; EXPRESSED IN LUNG, SIGNAL = 2.4; EXPRESSED IN HELA, SIGNAL = 3.6; EXPRESSED IN PLACENTA, SIGNAL = 2.3; EXPRESSED IN BONE MARROW, SIGNAL = 2.1; EXPRESSED IN HBL100, SIGNAL =   3; EXPRESSED IN BRAIN, SIGNAL = 2.9; EXPRESSED IN HEART, SIGNAL =   2; EXPRESSED IN BT474, SIGNAL = 2.3; EXPRESSED IN FETAL LIVER, SIGNAL = 2.6
gatcctagttgggggttgtgtgacactggggacatgttatgagtggtatatgataacataagatctgtttgaggggcaagttgacataaagagcttgtttaggtggccaaaaggtttccaggatctatttagagggtcttaagatatcaggggtctgttaggggctaagtgacatcagggtgaagtggggaggggaacaaacattagtgaagttgggaagctttcatgagaggactgtcttcttccaatgtgagttatcccctttcgtctaggatgagatcccagcactgtccgtgtcccggccccagaccggcctgtccttcctgggccctgagcctgaggacctggaggacctgtacagccgctacaaggtacattcgacccccaacccagaccttgcacaggacctgacatctcatactcttccccactttccaccactctctggatcagcaagtctggagccatccccttctgtcccctctctgct

SEQ ID NO: 390 - DNA, 481 bp, Homo sapiens
  MAP TO AC007842.1; EXPRESSED IN PLACENTA, SIGNAL = 2.2; EXPRESSED IN BT474, SIGNAL = 2.7; EXPRESSED IN BONE MARROW, SIGNAL = 1.3; EXPRESSED IN FETAL LIVER, SIGNAL =   2; EXPRESSED IN LUNG, SIGNAL = 2.3; EXPRESSED IN HELA, SIGNAL =  12; EXPRESSED IN ADULT LIVER, SIGNAL = 1.3; EXPRESSED IN BRAIN, SIGNAL = 1.6; EXPRESSED IN HBL100, SIGNAL = 1.1; EXPRESSED IN HEART, SIGNAL = 1.4
aaaaggcaaatgctgaggtcctatgttaaagccctttgccaggggctaggctcatttaattcccagtaacagggtgacatttttgttgcaattattctctttgttgacagtttgtttcaggcccaggtgaagacaaagagccttgagctgctaactgtggtcgtcaggatccctcctgccctcccggggacctcaggggaccatcctgccacacatacccggactttgccgatctcgtccttgtggatggagatgttggtgccgagggcagccacggtgacgactctcacgtaggacacagcagggttgccccggttctggttcttggtggtgacggtgaagggtgtcaggccctgggtgctgacccccgggcagccagttgttgccagcacatagttacaggtgccctggaagtcaaacttccggccatcgaaggagtggtagtgtgggtcgccccacagccagcacgtggcctcatagt

SEQ ID NO: 391 - DNA, 461 bp, Homo sapiens
  MAP TO AC007842.1; EXPRESSED IN BONE MARROW, SIGNAL = 2.2; EXPRESSED IN LUNG, SIGNAL = 2.9; EXPRESSED IN HELA, SIGNAL = 2.3; EXPRESSED IN PLACENTA, SIGNAL = 2.3; EXPRESSED IN BT474, SIGNAL = 2.2; EXPRESSED IN HBL100, SIGNAL =   2; EXPRESSED IN FETAL LIVER, SIGNAL = 2.2; EXPRESSED IN ADULT LIVER, SIGNAL = 2.2; EXPRESSED IN BRAIN, SIGNAL = 2.5; EXPRESSED IN HEART, SIGNAL =   2
tctaccacatcacctgcctggagcccacgggagccagtgatacccccatggttgtaggtcagctttgtggcctggctggccacaacgaaggccaaatcatagcgagattgggaggccagcgtgggtactacatagtgggtgccccaggcagacgtgggtagcagctgctcaaccacatggttgcaggtcgtatgtttctgcgcacagctgtggccagagaggacagccacggggctactagctgtgacctttgaccccgagagatccactgagctctgtagctgggccacattgtagggctgtagagtcactcttaggacatcgcctgctggatagaacttgccattgaatgtcactgaccccttcagcgtgacactgaccgaggcacctgcggcaccggccaccacggcaaactccttgacattcctggctgaggtgccggggggtgtgagcacaaaata

SEQ ID NO: 392 - DNA, 445 bp, Homo sapiens
  MAP TO AC007842.1; EXPRESSED IN BONE MARROW, SIGNAL = 1.2; EXPRESSED IN FETAL LIVER, SIGNAL = 1.1; EXPRESSED IN HELA, SIGNAL = 1.2; EXPRESSED IN ADULT LIVER, SIGNAL = 1.4; EXPRESSED IN BRAIN, SIGNAL = 1.2; EXPRESSED IN PLACENTA, SIGNAL = 2.2; EXPRESSED IN BT474, SIGNAL = 1.9; EXPRESSED IN HBL100, SIGNAL = 1.2; EXPRESSED IN LUNG, SIGNAL = 1.6; EXPRESSED IN HEART, SIGNAL = 1.2
gatctcctgcccctcactgtatgctcccagcccccacccagggcatcactcacggcagttggctggtgatctccagtccccaaccgagatgccaagctccagacaggcctgggcataggcgctgaggccacggcacaggctgagccgctccccaccgaccacacacaggtcatatacacactgctccaggaagggcctggggtccagggtgtcatggcagacagcgaaggggccatcgagcttggtcagcatgccacagagtcggtcgccctcatagtgttgggcctggcctggggtgcaggcgggacagttgttctggcagccatcctcacacaggtagtccccatcatccagcttccagctacttgcgaactccacagcgtcaggagccagagccccgtcaggcgtgaggaagtcgtctgctgggtcaccattatagttgcca

SEQ ID NO: 393 - DNA, 477 bp, Homo sapiens
  MAP TO AC007842.1; EXPRESSED IN BT474, SIGNAL =   2; EXPRESSED IN BONE MARROW, SIGNAL = 1.3; EXPRESSED IN ADULT LIVER, SIGNAL = 1.4; EXPRESSED IN HEART, SIGNAL = 1.6; EXPRESSED IN PLACENTA, SIGNAL = 1.4; EXPRESSED IN HBL100, SIGNAL = 1.2; EXPRESSED IN FETAL LIVER, SIGNAL = 1.5; EXPRESSED IN LUNG, SIGNAL = 1.7; EXPRESSED IN HELA, SIGNAL = 1.6; EXPRESSED IN BRAIN, SIGNAL = 1.4
caatccctacctcatagggctattataaggattaaatgaattaatgatatttatacattaatgaatatatataaggctgagtcccccagttgccacttccgatactcacggcaaagttcttcactcctccaggggtgcactgtggctccagcagcctggcatgcagcagcataggtggccagtgcgtcacacagtggcccagactggcctggcagcaggcagcggtcatagacacagtcgcgcacggcaccctgggggtccagcttgctatggcactcccggaagggccccttggggtcggcaaggattccacactcattcttgctctgcagctgctgggccaccagggagtccagcttgggacagtcacccggttcagttgctccacagccgggcctcgtctcttcttgccagctgttcccaaaggccagtgcattggcagcttgacccccaccccgcagagccaggtcatcagct

SEQ ID NO: 394 - DNA, 467 bp, Homo sapiens
  MAP TO AC007842.1; EXPRESSED IN HBL100, SIGNAL = 3.6; EXPRESSED IN BT474, SIGNAL = 3.3; EXPRESSED IN BONE MARROW, SIGNAL = 3.1; EXPRESSED IN HELA, SIGNAL = 3.5; EXPRESSED IN ADULT LIVER, SIGNAL = 2.6; EXPRESSED IN BRAIN, SIGNAL = 2.8; EXPRESSED IN PLACENTA, SIGNAL = 2.5; EXPRESSED IN FETAL LIVER, SIGNAL = 2.9; EXPRESSED IN LUNG, SIGNAL =   3; EXPRESSED IN HEART, SIGNAL = 2.4
gacccagaaggaccagagtgaaaccaaaccagccccgaagagatgggaccccgcccccagccccgcctctgctcccccaacactcaccacagccaacctgtgcccgccagtcttcgatgacaaccccagcagcctggcaggcggccacataggaagccagagccttgcaaagaatgtcacggtccccaccacccatgcagacgtccagaacacagcccttgaagaagctctcaggtggcacatgagcatggcaggtggtgaaagggccccctgtgccgggggccaggggtccgcagaagccagggccctcgtactgctccaaccggtcctcagggcacgttgggcaggacccccgacattcgtcccaacacagtgggtcccagcctggggctcgccagctgccgccccagatgggtatggagggagccagtgtgccattagggaagacctggtcattgttggggttg

SEQ ID NO: 395 - DNA, 441 bp, Homo sapiens
  MAP TO AC007842.1; EXPRESSED IN PLACENTA, SIGNAL = 2.1; EXPRESSED IN LUNG, SIGNAL = 1.6; EXPRESSED IN BRAIN, SIGNAL = 0.84; EXPRESSED IN BT474, SIGNAL = 2.6; EXPRESSED IN BONE MARROW, SIGNAL = 0.67; EXPRESSED IN FETAL LIVER, SIGNAL = 1.2; EXPRESSED IN HELA, SIGNAL = 0.61; EXPRESSED IN ADULT LIVER, SIGNAL = 1.1; EXPRESSED IN HEART, SIGNAL = 0.9
ctctccctcactcacgacagaaagtttcattcctccagggctccacctggcctccagctgcctggcaagcactcacgtaggcatggatgttgctgcagagaatgctcaggttcccaccacccaggcagagatcaaagatgcaatctttcaagggaccctggggatccaccagcttgtggcaagaggacagtggccctgtggggctggagaggagcccacagaactcctccttctgatacttcttctccagctcgggaggacactcctcgctggggatacagccctcgctccccggcgggcaggtgggcggcggcaggcagggagagtcgggcaccacctcctcccaggagttgccgaactcattggcgttgcctgcctgcgagccattgggcttctggaagtcatccttggggtcgccgttgtagttcccacacaggccac

SEQ ID NO: 396 - DNA, 360 bp, Homo sapiens
  MAP TO AC007732.1; EXPRESSED IN BONE MARROW, SIGNAL = 2.7; EXPRESSED IN HBL100, SIGNAL = 3.8; EXPRESSED IN ADULT LIVER, SIGNAL = 1.4; EXPRESSED IN HEART, SIGNAL = 0.84; EXPRESSED IN PLACENTA, SIGNAL = 0.96; EXPRESSED IN BT474, SIGNAL = 3.2; EXPRESSED IN LUNG, SIGNAL = 1.4; EXPRESSED IN HELA, SIGNAL = 1.8; EXPRESSED IN BRAIN, SIGNAL = 1.3; EXPRESSED IN FETAL LIVER, SIGNAL = 1.7
  unsure 78
aggccggggatattggtggggatctccatgccatacttgcacttctctgcatcaagcaggaggtcaaagcagccagtngccggccggagccagctggcccagcatgatattctcagagacccccttcatggggtcactctcaccgtgtgcggctgcttccataagcacgtccacctgaacagagcagaccggccccatgagacccctccacacacagcacctgactgtcccatcaccacagcccagctgcccaaagtgtgtgcccttcttctcacactactccctccttctgccctattcagaaattccactgttaccgtttcctcaaaggaacacttcatgagtggtcctgtgtcctgg

SEQ ID NO: 397 - DNA, 465 bp, Homo sapiens
  MAP TO AC007722.1; EXPRESSED IN ADULT LIVER, SIGNAL = 1.7; EXPRESSED IN PLACENTA, SIGNAL = 1.4; EXPRESSED IN BONE MARROW, SIGNAL = 3.1; EXPRESSED IN LUNG, SIGNAL = 1.7; EXPRESSED IN HELA, SIGNAL = 1.4; EXPRESSED IN BT474, SIGNAL = 1.5; EXPRESSED IN HBL100, SIGNAL =   2; EXPRESSED IN FETAL LIVER, SIGNAL =   4; EXPRESSED IN BRAIN, SIGNAL =   2; EXPRESSED IN HEART, SIGNAL = 1.3
  unsure 162
  unsure 430
ctgctgctgggctctcaacaggcaggcaccaccctgaacctggatctgggcggaaagcacagccccatctgccacaccaccatggccttccttcgagtacgcccaggcaggggattggcagggctgggagagtagaacttacccactggacttgttcatctnagccctggggcactgagctgggtgctgtgagtccgggggtggtcaggacacggtgcctactggccaggagaaggtgggatgtgtatggtagcaagatggcctgactcttgcccctgtcctaggatgaggcagacttccgggacaagctgagccccattgtgctcagcctcaatgtgtccctaccgcccacggaggctggaatggcccctgctgtcgtgctgcatggagacacccatgtgcaggagcaggtagggacaggcagggacanggccagggaggtgcaggacccctgatagcaaatca

SEQ ID NO: 398 - DNA, 472 bp, Homo sapiens
  MAP TO AC007722.1; EXPRESSED IN HBL100, SIGNAL = 5.2; EXPRESSED IN BRAIN, SIGNAL =  10; EXPRESSED IN PLACENTA, SIGNAL = 4.4; EXPRESSED IN BT474, SIGNAL = 4.7; EXPRESSED IN BONE MARROW, SIGNAL = 4.8; EXPRESSED IN FETAL LIVER, SIGNAL = 5.1; EXPRESSED IN LUNG, SIGNAL =   5; EXPRESSED IN HELA, SIGNAL = 4.9; EXPRESSED IN ADULT LIVER, SIGNAL = 3.5; EXPRESSED IN HEART, SIGNAL = 4.9
  unsure 294
  unsure 361
  unsure 364
  unsure 398
  unsure 414
  unsure 417
  unsure 419
aataagtcatcagccccagcagattctgaacgaggacccaaaccagaaccccctgggagtggcagtcccgcaccaccaagaagaaggcggagagctcaagatgactcccagcggagatccctcccagctgaagaggggagcagtggcaaaaaggatgaaggtgggggtggtagcagctcccaagaccatggtgggaggaaacacaaaggtgaacttccaccttcatcctgccagcgaagagcaggcaccaaacggagcagccggtctagccatcggagccaacccagtagtggnagatgaggatagtgatgatgcttcctcacaccggctgcaccagaagtctccatcccagtacagtganggnaagaagaagaggaagattcaggcagtgagcattncccgcagccgctcaanggntnctggccggcgccattcctcgcatcgttcctcccggcgttcttactcaagtagc

SEQ ID NO: 399 - DNA, 497 bp, Homo sapiens
  MAP TO AC007683.2; EXPRESSED IN PLACENTA, SIGNAL =  28; EXPRESSED IN BT474, SIGNAL =  80; EXPRESSED IN LUNG, SIGNAL =  41; EXPRESSED IN HBL100, SIGNAL =  92; EXPRESSED IN BRAIN, SIGNAL =  16; EXPRESSED IN BONE MARROW, SIGNAL =  23; EXPRESSED IN FETAL LIVER, SIGNAL =  57; EXPRESSED IN HELA, SIGNAL =  51; EXPRESSED IN ADULT LIVER, SIGNAL =  21; EXPRESSED IN HEART, SIGNAL =  19
gtggagtggcagagtgagtgttccaaaaggataagtagaacaggagtcttgcccaggccctattacaacctcagtaccttgaatggcctccccagcccaaccagaagttgacaaagaggcatgaacctggtgaaaagatacatgtatttataattagccagctggactcagtttagatgaccccaattttgttggcaatatcccagttttgttgggtcagcaacaaagttgatcccaattttgttggcaatatccaaagcattgtaatcaggagccagtggagcttatgccttcttcctgcatcaggcctaatcagggcatggactttggccacatcagtgtcatagagcttcttcacagcctgtttgatctggtgcttggtggctttaacatccacagtgaacacaagtgtgttgttgtcttctatcttcttcatggcagactcagtggtcagaggaaactctgtgacagcatagtggtcaagcttgtttctcctg

SEQ ID NO: 400 - DNA, 486 bp, Homo sapiens
  MAP TO AC007683.2; EXPRESSED IN BONE MARROW, SIGNAL =  26; EXPRESSED IN FETAL LIVER, SIGNAL =  96; EXPRESSED IN LUNG, SIGNAL =  48; EXPRESSED IN ADULT LIVER, SIGNAL =  37; EXPRESSED IN PLACENTA, SIGNAL =  18; EXPRESSED IN BT474, SIGNAL = 7.5e+02; EXPRESSED IN HBL100, SIGNAL = 1.1e+02; EXPRESSED IN HELA, SIGNAL =  51; EXPRESSED IN BRAIN, SIGNAL =  28; EXPRESSED IN HEART, SIGNAL =  43
agtccacatgggtacaagccctgaaacctcaaatgtacatcagaattacctgtggagttgtttttttttttttttttttttttttgcaagcagataaaggcttattttactttaatggctgatctatgtaatcacggaggccagtatgtacacacaaaggggcagcttttatttcttggtctcttcctccttggacaaagtcttgatgatctcctccttcttggcctggaggtgctcttcatagctcttgtgtgcttccttggtcttagatctgcgggcctcagcctgatcagccaggagcttcttgcgggccttgtctgccttcagcttgtggatgtgttccatgagaatctgcttgttttttaacacattcctcttcaccttcaggtacaggctgtgatacatgcggcgatcaatcttcttagattcacggtatcttctgagcagccggtgcagaatcctcattctcctcatccacgtgacctt

SEQ ID NO: 401 - DNA, 469 bp, Homo sapiens
  MAP TO AC007683.2; EXPRESSED IN PLACENTA, SIGNAL = 0.77; EXPRESSED IN LUNG, SIGNAL = 0.92; EXPRESSED IN BT474, SIGNAL = 0.89; EXPRESSED IN HBL100, SIGNAL = 0.74; EXPRESSED IN FETAL LIVER, SIGNAL = 1.3; EXPRESSED IN HELA, SIGNAL = 0.89; EXPRESSED IN ADULT LIVER, SIGNAL = 1.2; EXPRESSED IN BRAIN, SIGNAL = 1.7; EXPRESSED IN BONE MARROW, SIGNAL = 1.2; EXPRESSED IN HEART, SIGNAL = 1.1
aatctgacctaccaacccccaatcatgtataacaaagtccaccattaaaatcataaattacagtgtcacaaaaatcataattgctttacttttaaattcagttaatttatcacatagcaggaatgttttctttggaagtctacatacctcggttcataagctccgatgggaatagctgcaaggtcaaaaggtccaaatctttttcctatctcttcaaaagcagggcaataaccagtatctcctgcgaaaaaaaatcgattccaaggccccaagacagaccagctgccccatagcaccttgttgtcatccattagagtccttttacaccagtgctgggaaggtgtaaagacaaaagtgaccttatcatgtccggggacacaattctcctcccaccagtccaactcaatcacattctcacagccacatttttgcatccagtcaaggagacccaaaggcacaaaccatctca

SEQ ID NO: 402 - DNA, 482 bp, Homo sapiens; identical to SEQ ID NO: 121
  MAP TO AC007653.1; EXPRESSED IN PLACENTA, SIGNAL = 0.89; EXPRESSED IN HELA, SIGNAL = 0.69; EXPRESSED IN FETAL LIVER, SIGNAL = 0.65; EXPRESSED IN LUNG, SIGNAL = 0.66; EXPRESSED IN BONE MARROW, SIGNAL = 0.64; EXPRESSED IN ADULT LIVER, SIGNAL = 0.83; EXPRESSED IN BRAIN, SIGNAL = 1.6; EXPRESSED IN HEART, SIGNAL = 0.91
  unsure 73

SEQ ID NO: 403 - DNA, 480 bp, Homo sapiens; identical to SEQ ID NO: 118
  MAP TO AC007642.4; EXPRESSED IN BONE MARROW, SIGNAL = 2.1; EXPRESSED IN ADULT LIVER, SIGNAL =   2; EXPRESSED IN PLACENTA, SIGNAL =   2; EXPRESSED IN BT474, SIGNAL = 2.8; EXPRESSED IN FETAL LIVER, SIGNAL = 3.2; EXPRESSED IN LUNG, SIGNAL =   2; EXPRESSED IN HELA, SIGNAL = 3.9; EXPRESSED IN BRAIN, SIGNAL = 2.2; EXPRESSED IN HBL100, SIGNAL = 3.7; EXPRESSED IN HEART, SIGNAL = 2.7

SEQ ID NO: 404 - DNA, 613 bp, Homo sapiens
  MAP TO AC007632.4; EXPRESSED IN HBL100, SIGNAL = 4.9; EXPRESSED IN HELA, SIGNAL = 8.6; EXPRESSED IN ADULT LIVER, SIGNAL = 9.6; EXPRESSED IN HEART, SIGNAL = 5.8; EXPRESSED IN PLACENTA, SIGNAL = 3.6; EXPRESSED IN BRAIN, SIGNAL = 6.6; EXPRESSED IN LUNG, SIGNAL = 7.7; EXPRESSED IN FETAL LIVER, SIGNAL = 5.2; EXPRESSED IN BONE MARROW, SIGNAL = 5.2; EXPRESSED IN BT474, SIGNAL = 5.2
tggtgcatttacaaaccttgagctacacacaaggtgctgattggtgtgtttacaaaccctgagctagacacagagtgctgactagtgtatttacaatcccttagctagacataaaggttcttcaagtacccaccagattagctagatacagagtgctgattggtgcatttacaaaccttgagctagacacagagtgctgaatggtgcatttataatcccttagctagacataaaggttctccaagtccccaccagattagctagatacagagtgctggttggtgcattcacaaatgccgagctagacacagagtgctgattggtgtatttacaatcctctagctagacataaaagttctccaagtccccactagactcaggagcccagctggctttacctagtggatcccgcaccgcaccggggctgcaggtggagctgcccaccagtcccgtgctgtgcacccactcagcccttgggcggtggatgggactgggtgctgtgaagcagggggcggtgctcttaggggaggctcgggccctgcaggagcccacggcaggggtaggcatggcgggctgcaggtccccagccctgccactcagggaggcagctaag

SEQ ID NO: 405 - DNA, 458 bp, Homo sapiens
  MAP TO AC007603.1; EXPRESSED IN BRAIN, SIGNAL = 2.2; EXPRESSED IN HELA, SIGNAL = 2.2; EXPRESSED IN ADULT LIVER, SIGNAL = 1.9; EXPRESSED IN PLACENTA, SIGNAL = 2.4; EXPRESSED IN BT474, SIGNAL =   2; EXPRESSED IN BONE MARROW, SIGNAL = 2.5; EXPRESSED IN HBL100, SIGNAL = 1.9; EXPRESSED IN FETAL LIVER, SIGNAL = 1.8; EXPRESSED IN LUNG, SIGNAL = 2.7; EXPRESSED IN HEART, SIGNAL =   2
tgtgatcctggtcatgatggctggagctctggcagccatcttgggccatgcagtgatcttggggatgaacaccagtgctgtgtttggtggggcagaagaggagaagcgtgtcactgatggtagagctattctaccaccctcaactccccatatctgggcttgttttataggagagagacaaactttatcttctttaaggcactattattttgagttttctattatgtgcagctgacctgttcctagcctatacacccttttccaaggggcgactgctcagttccatttccaccattcagaacctggagaaagatggggagaatccaatccagcagatgtcccctttgcaagcaaatcccatgaatgagctgaagaggagactaaagacggtttgcagaccttctgggatccttctgggtcctctgttcacaggatgcccagggaagcctctgtctttg

SEQ ID NO: 406 - DNA, 447 bp, Homo sapiens
  MAP TO AC007603.1; EXPRESSED IN FETAL LIVER, SIGNAL = 5.6; EXPRESSED IN HELA, SIGNAL = 6.1; EXPRESSED IN HEART, SIGNAL = 5.2; EXPRESSED IN BT474, SIGNAL = 5.9; EXPRESSED IN BONE MARROW, SIGNAL =   7; EXPRESSED IN LUNG, SIGNAL = 7.7; EXPRESSED IN ADULT LIVER, SIGNAL = 4.2; EXPRESSED IN BRAIN, SIGNAL =   7; EXPRESSED IN PLACENTA, SIGNAL = 6.2; EXPRESSED IN HBL100, SIGNAL = 5.1
gtgccttcatggcttgttgtagcctcaaactcctggggtcaagcgatgctcccaccccagcctcccaagtagctgagattacaggtatatgccaccacaaccagctaatttttttatttttatttttcagagatgaggtctggctatgttgcccggactgttcccaaactcccggcctcaagctatctcctgtctcagcccccagggtgccgggattacaggcatgagccaccacacccagctcaggaaagctttcttaaacctcctcctcagaaattctgcctagaaagaaacaatgacatgaaaagattccataaacacactcagggattcagggctcttcagcattcattttttttcttggcctcacacgtggctgagtttggccggccctggaatgtgcaccgaccccagtcccaggaccccaccagccacagtgccaatatt

SEQ ID NO: 407 - DNA, 466 bp, Homo sapiens; identical to SEQ ID NO: 116
  MAP TO AC007563.1; EXPRESSED IN ADULT LIVER, SIGNAL =  10; EXPRESSED IN BRAIN, SIGNAL = 1.2; EXPRESSED IN HEART, SIGNAL = 1.4; EXPRESSED IN PLACENTA, SIGNAL = 1.7; EXPRESSED IN BT474, SIGNAL = 3.5; EXPRESSED IN HELA, SIGNAL = 0.67; EXPRESSED IN LUNG, SIGNAL = 1.3; EXPRESSED IN FETAL LIVER, SIGNAL =  15; EXPRESSED IN HBL100, SIGNAL = 1.2; EXPRESSED IN BONE MARROW, SIGNAL =   1

SEQ ID NO: 408 - DNA, 481 bp, Homo sapiens
  MAP TO AC007563.1; EXPRESSED IN ADULT LIVER, SIGNAL = 2.2; EXPRESSED IN BRAIN, SIGNAL = 2.6; EXPRESSED IN HEART, SIGNAL = 1.7; EXPRESSED IN BONE MARROW, SIGNAL = 2.7; EXPRESSED IN HBL100, SIGNAL = 2.8; EXPRESSED IN FETAL LIVER, SIGNAL = 2.3; EXPRESSED IN HELA, SIGNAL = 2.7; EXPRESSED IN PLACENTA, SIGNAL = 2.7; EXPRESSED IN BT474, SIGNAL = 2.4; EXPRESSED IN LUNG, SIGNAL = 2.8
cccagtgatctttcaggagcaggttatataatttccatgtatttgcatggttttgaaggttccttttgaaattggtttccagtttcattccgctgtggtctgagagagtgtttgatataatttcaactttcttaaatttattgaggctcgttttatggcctatcacatggtccatcttggggaaagttccatgcgctgttgcatagcatgtgtatgctgtggttgttggatgaaatgttctgtatatatctgttaagcccatttgttctaaggtatactttaaatccattgtttcttttttgactttctgtcttgatgacctgtctagtgctgtcagtggagtattgaagtcccccactattattgtgttgccatctatctcatttcttaggtctattagtaattgttttataaatttgggagctccagtgttagatgcatatatgtttacaatcatgatattttcctattggactaggcc

SEQ ID NO: 409 - DNA, 470 bp, Homo sapiens
  MAP TO AC007562.2; EXPRESSED IN BT474, SIGNAL = 3.7; EXPRESSED IN HBL100, SIGNAL = 4.9; EXPRESSED IN LUNG, SIGNAL = 4.7; EXPRESSED IN HELA, SIGNAL = 2.9; EXPRESSED IN PLACENTA, SIGNAL = 5.8; EXPRESSED IN FETAL LIVER, SIGNAL = 3.7; EXPRESSED IN HEART, SIGNAL = 3.5; EXPRESSED IN BONE MARROW, SIGNAL = 4.7; EXPRESSED IN ADULT LIVER, SIGNAL = 2.7; EXPRESSED IN BRAIN, SIGNAL = 4.2
aatctccatggaccagtaccccacacgtactttgaaccgaggagtcctcagctgcctggagccatgtgacagtctccttcttggggagctggttgcagaggcctctcatcccctccaggaacaccactgaggcctgacaccaggggccgccaatgcctccctgctgggctggctgtatggaagacctcagtgtcaatggccagaggtgggggcttcgggaagccttgctgacacacaacatggcggcaggctgcagactggaggaggtggaggagtatgaggacaatacctatggccattatgaagctttctccaccctggcccccagggcttggctgtccatggatctagctgagccatgcatgcttgagccagggctgcctcctgtctttaccaatttcacccagctgctgactatcagcccagtggtggtgaccgagggtggcacagccgagtggtggcatgtgcag

SEQ ID NO: 410 - DNA, 468 bp, Homo sapiens
  MAP TO AC007562.2; EXPRESSED IN BT474, SIGNAL =   5; EXPRESSED IN HBL100, SIGNAL = 3.7; EXPRESSED IN FETAL LIVER, SIGNAL =   2; EXPRESSED IN HELA, SIGNAL = 2.5; EXPRESSED IN BRAIN, SIGNAL = 2.8; EXPRESSED IN PLACENTA, SIGNAL = 1.5; EXPRESSED IN BONE MARROW, SIGNAL = 2.3; EXPRESSED IN LUNG, SIGNAL = 3.1; EXPRESSED IN ADULT LIVER, SIGNAL = 1.4; EXPRESSED IN HEART, SIGNAL = 1.5
ccatggtgagcctgactttccctgcccctactttgccaccttcctctgtagtccctctgaaacccccttatgttcttggtttccctgccttctgacttctgtggactttctctccttccgggagccagtggtcagacaccatttcacctgtgaccaacaggtgcactctgtgaggcccaaaaggaaggggctgtgctccatctccctgccctggttgttatgtgtatacccctacaagagtactcacctcttgccttcaggtggcatttttcaactccgctggagccagtgcccaggaggagcaaagcgtgtgctgccagcccctggctcacccagtggcctcatcccagaaaaagccagaggcagcggccccagccccagagactgggggtgaatctgtgtgtggggacacccactgggccctgcaggaggccatggagaagctgcaggtgagtagtcctggcatgg

SEQ ID NO: 411 - DNA, 463 bp, Homo sapiens
  MAP TO AC007543.4; EXPRESSED IN FETAL LIVER, SIGNAL = 1.4; EXPRESSED IN LUNG, SIGNAL = 1.9; EXPRESSED IN HEART, SIGNAL = 1.4; EXPRESSED IN BONE MARROW, SIGNAL =   2; EXPRESSED IN HELA, SIGNAL = 1.5; EXPRESSED IN ADULT LIVER, SIGNAL = 1.5; EXPRESSED IN BRAIN, SIGNAL = 2.3; EXPRESSED IN PLACENTA, SIGNAL = 1.5; EXPRESSED IN BT474, SIGNAL = 1.4; EXPRESSED IN HBL100, SIGNAL = 1.2
ctgttagctgagagtggccccagctgacagccagcaaaacagtgaaaccttaatctcacaactttgaggaattgaagtctactgacaacctggggaggcttggaagtaaatcttttccaagtcaagcctctgaagaggctgcaatcccaactgggaccttgaatgtcgcctggcaagatgctgagcaaaggacttctgaccacagaaactatgggatgataaagggttctgttcagacccactaagctcatggcaatttgttatgcagcaacagaaaatgaatatacttactccagatactgtgttcttccttcttttgtatttcccatctttggctccgtccattatcagggtcttaaactgggctttcttcttgtttttgcctatcatttatgttttcagctacttaacctgtatattctaaatgttgaaaactctctttggctctatcagaactgggttg

SEQ ID NO: 412 - DNA, 499 bp, Homo sapiens
  MAP TO AC007543.4; EXPRESSED IN BT474, SIGNAL = 2.1; EXPRESSED IN BONE MARROW, SIGNAL =   3; EXPRESSED IN HELA, SIGNAL = 2.3; EXPRESSED IN ADULT LIVER, SIGNAL = 1.7; EXPRESSED IN BRAIN, SIGNAL = 2.3; EXPRESSED IN HBL100, SIGNAL = 2.2; EXPRESSED IN FETAL LIVER, SIGNAL = 2.1; EXPRESSED IN LUNG, SIGNAL = 2.9; EXPRESSED IN PLACENTA, SIGNAL = 2.8; EXPRESSED IN HEART, SIGNAL = 2.2
agaatcttcccatgtcagcagttatttattcattagccatgactataatgatgttcagaagggctttattcaagccactttgcaagcattaatttgacaagctctctagctttctgggtagtagattaaacctttccacaaagtgtttgctggaaggtaatgtatatagacatttagaaaacaaaacaaatggaaaaaaactatcaatttttgatggctataaaggactgaatccttggcatcagttaccatgtgccatctggcagcctggaaattggtcttatagagatagtggatattgacgtggttgtggaaattgcacctagagaacccattgccccgtgtaagatttcctctgtgaatttcattaagttctcagtggtcagacacattcagcccaacatcctgcagcaaccagagggtgaaaaatggacacagcaagagatcctgctgttgttaaccaataaagcaaaatagaactcctttcttggcatctgaa

SEQ ID NO: 413 - DNA, 479 bp, Homo sapiens
  MAP TO AC007542.2; EXPRESSED IN HBL100, SIGNAL = 4.3; EXPRESSED IN HELA, SIGNAL = 5.2; EXPRESSED IN ADULT LIVER, SIGNAL =   5; EXPRESSED IN BT474, SIGNAL =   4; EXPRESSED IN FETAL LIVER, SIGNAL = 4.5; EXPRESSED IN LUNG, SIGNAL = 6.4; EXPRESSED IN HEART, SIGNAL = 5.6; EXPRESSED IN PLACENTA, SIGNAL = 4.5; EXPRESSED IN BONE MARROW, SIGNAL = 5.4; EXPRESSED IN BRAIN, SIGNAL = 6.1
tggaaaacagtatggaggttcctcaaaaacctaaaaatagaactaccatatgatccagcaatcccacgactgggtatctatccaaaggaaaggaaatcagtatgttgacgatttctctgcactcccatgtctattgcagtactcttcacaggaggcaagatacagaatcaacttaagtgtccagcagagggtgaatggataaagaaaatatggtgtgtgtgtgtgtgtgtatatatatatatgtgtgtgtggaatatcattcagccttaaaataaaaaggtaattctgtcatttgcaaccacatagatgaacctgaaggacattatatcaagtgaaataacccaagcactagaagataaataccacgtttttactcacaatgctaaaaaaaacttgcaagttgctctagcagatgtcgttactagagccaaggaagggagagagagggggacagccaaaggcttgttaagggatgcaaa

SEQ ID NO: 414 - DNA, 489 bp, Homo sapiens
  MAP TO AC007463.3; EXPRESSED IN PLACENTA, SIGNAL = 1.5; EXPRESSED IN BT474, SIGNAL = 1.1; EXPRESSED IN BONE MARROW, SIGNAL = 1.4; EXPRESSED IN FETAL LIVER, SIGNAL = 1.1; EXPRESSED IN LUNG, SIGNAL = 1.3; EXPRESSED IN HELA, SIGNAL = 1.2; EXPRESSED IN ADULT LIVER, SIGNAL =   1; EXPRESSED IN BRAIN, SIGNAL = 1.5; EXPRESSED IN HEART, SIGNAL = 1.3; EXPRESSED IN HBL100, SIGNAL = 1.1
tgagcaggaatgaacaactaccttcatcttatttaaatctttcatttcctaattgttcctggtctggctcataaagatctctagataaagttaattgactttaaataggagtggtaagctcttttacaacttttaaaaaatatatcttttacgttcctggataacctgtaattttacaatactgatctagaaaccagaagctgccacaaatgatggtgctaaatctgtgcttgaaatggtgggacagaaatgcaaggtgactttacaaaggatggatgatttgagtctctgttcctatatccatgatttgactgtgcaaaagaagtccttactacttctccacccaccaattctggtgacagttagggggtttgtggccctagcctacatcattctcccctgctggatgcttcctgctcttgaacatcggactccaggttcttcagttttgggactcggactggctctccttgctcttcagcttgcaga

SEQ ID NO: 415 - DNA, 457 bp, Homo sapiens
  MAP TO AC007403.2; EXPRESSED IN HEART, SIGNAL = 2.3; EXPRESSED IN HELA, SIGNAL = 4.1; EXPRESSED IN ADULT LIVER, SIGNAL = 3.3; EXPRESSED IN BRAIN, SIGNAL =   3; EXPRESSED IN BT474, SIGNAL = 2.7; EXPRESSED IN BONE MARROW, SIGNAL = 3.2; EXPRESSED IN HBL100, SIGNAL = 2.7; EXPRESSED IN FETAL LIVER, SIGNAL = 2.8; EXPRESSED IN PLACENTA, SIGNAL = 2.4; EXPRESSED IN LUNG, SIGNAL = 3.7
ctccttggccctccctataccctgagacacaagaatattgaaattaagccaattaataactgtatgatggcctgcgtgtattcaagtgaaaggaagagttagatatctctcatttcaaatcaaatgctagaaatgataaagcttagtgaggaagacatgctgaaagctgagataggcctgaatctaggcctcttgtgccatttatccaagttgtgaatgcaaaggaagagttcatgaaggaaactaagtattacttcagtgaacacataagaaagtgaaacagccttattgctaacatggagaaaattttagtggtctgtatagaagatcaaaccagcccacatcctaatccagaccaaggccctaattctcttcaattctatgaaggccgtgagaggtgaggaagctgcagaagaaaagtttgaagcaaacagatgttggctcatgaggtttaagg

SEQ ID NO: 416 - DNA, 476 bp, Homo sapiens
  MAP TO AC007393.3; EXPRESSED IN BT474, SIGNAL = 0.99; EXPRESSED IN FETAL LIVER, SIGNAL = 1.2; EXPRESSED IN HELA, SIGNAL = 1.2; EXPRESSED IN ADULT LIVER, SIGNAL = 1.1; EXPRESSED IN PLACENTA, SIGNAL = 0.87; EXPRESSED IN BONE MARROW, SIGNAL = 0.7; EXPRESSED IN HBL100, SIGNAL = 1.1; EXPRESSED IN LUNG, SIGNAL = 1.3; EXPRESSED IN BRAIN, SIGNAL = 1.8; EXPRESSED IN HEART, SIGNAL = 0.93
aaacaaggaagagtaagaagatctgagaatgacatttttctgatcagatcaaacaatcaaagtttgtactaacccacagacatctaccttcttatggtatgttagtctctagaggccatatgcaaattcccagaataaaatttcagtttctaacctatctcataccatttctacatggaaaacattaaaatacatatatacacatatatgtatacacacacacacacacacacacatatatatatattcaagcaaaatgttcatttaccagatgtctgagctctttcaaatctcgacaaacagtgtagaaaactccaagaagaatgttaatgtaggcagcatagaaatcagctgaatactctggaggatgatcatgggacaggatcttttgaaggttgcctgttcacaggacacaaaataacttataatgattaacatagtacactaatcatatcttcaagcattttataacaaag

SEQ ID NO: 417 - DNA, 491 bp, Homo sapiens
  MAP TO AC007392.3; EXPRESSED IN BT474, SIGNAL = 1.8; EXPRESSED IN BONE MARROW, SIGNAL = 7.6; EXPRESSED IN LUNG, SIGNAL = 3.4; EXPRESSED IN ADULT LIVER, SIGNAL =   3; EXPRESSED IN HELA, SIGNAL =   3; EXPRESSED IN FETAL LIVER, SIGNAL = 2.8; EXPRESSED IN HBL100, SIGNAL = 6.1; EXPRESSED IN PLACENTA, SIGNAL = 2.2; EXPRESSED IN HEART, SIGNAL = 2.8; EXPRESSED IN BRAIN, SIGNAL = 4.2
ggttgctgagtgtgtgtatgtgtgtgtgtgtgtgtgtgtgtgtgtgtgtatttatgtttgtttgtttataaacaatccggcgcattcatgcccagtgaagggttaattacttttgacgttttgttaatggcaatgtcgttctcttacttattattgcttatctttttagatcagctatttttaaacttctatcagactttgaatgaacttatcaattttcagttaataaaacgttgaatttgatatccttacaaacttaccagtggtaaatattatctcctaagtagtactgtttgaaaatcacatctactcgtcttccagtgtatctggtacctggactatctaactggtacctggaccgttctccacttatgtttcctttgggtgaagatttcaaagatttctggtaaaaccaaatgtgctcttggggaaagtatatcatgaaaacgtatttaccagtcatgactgaaggatgtagatggttttaagca

SEQ ID NO: 418 - DNA, 452 bp, Homo sapiens
  MAP TO AC007392.3; EXPRESSED IN BT474, SIGNAL = 1.8; EXPRESSED IN HELA, SIGNAL = 1.3; EXPRESSED IN ADULT LIVER, SIGNAL = 1.1; EXPRESSED IN BONE MARROW, SIGNAL = 1.4; EXPRESSED IN HBL100, SIGNAL = 1.7; EXPRESSED IN FETAL LIVER, SIGNAL = 1.4; EXPRESSED IN LUNG, SIGNAL = 1.2; EXPRESSED IN BRAIN, SIGNAL = 1.1; EXPRESSED IN PLACENTA, SIGNAL = 1.4; EXPRESSED IN HEART, SIGNAL = 1.5
aagtccatgtttcaggcaggaagaaatgaaagagccaaggacgaaatgtccattccagcgaagtctgccctctccctcccttcccatacatccacatattttaaagagccttcctggaagtcccatcaaaaactccctgctcccttttttttcagttgccagaactaggtcagatgatgacttgtatccaggaattcagcagtgtttgtttaatcttttccccaaactggagttaagtggacaggaataagaatggatactgggaagagaccactaggctttcgtagctgccaaacaatgatgataacaatagtgatgatgatcataataaaaatcatcatagttaccatttattatgtgctgtgtgccaggtgtgtaagctttgtacatttttcttgtttagtcccccaaatccttaaagtacttgtgttggcacccatttagaactgagg

SEQ ID NO: 419 - DNA, 472 bp, Homo sapiens
  MAP TO AC007392.3; EXPRESSED IN FETAL LIVER, SIGNAL =  16; EXPRESSED IN HEART, SIGNAL =  17; EXPRESSED IN PLACENTA, SIGNAL = 6.7; EXPRESSED IN BT474, SIGNAL =  40; EXPRESSED IN BONE MARROW, SIGNAL = 9.3; EXPRESSED IN HBL100, SIGNAL =  19; EXPRESSED IN LUNG, SIGNAL =  11; EXPRESSED IN HELA, SIGNAL =  18; EXPRESSED IN ADULT LIVER, SIGNAL =  11; EXPRESSED IN BRAIN, SIGNAL =   9
aagacctcagtaggcggacctgataacagtgacaatgaaaggaaaatagtggcaaaatgtgagtttccagcatgatgtttctcattttattttcttctgtatgaatcaaaagaatgctttacaaaaccatgttcccttaatcacagggttctctggcttttataggattgtcatagccaggaccacactattgctttttcataacattttctttttgtttctttcttttgaatttcttacagggctgcaaagtatgccaggggagtatgtagcccggggtggtccaatgggtgtgagtatgggacagccaagttatacccaaccccagatgcccccccatcctgctcagctgcgtcatgggccccccatgcatacgtacattcctggacaccctcaccacccaacagtgatgatgcatggaggaccgccccaccctggaatgccaatgtcagcatcaagccccacagttctt

SEQ ID NO: 420 - DNA, 478 bp, Homo sapiens
  MAP TO AC007382.2; EXPRESSED IN HELA, SIGNAL = 5.9; EXPRESSED IN FETAL LIVER, SIGNAL = 3.9; EXPRESSED IN LUNG, SIGNAL = 6.2; EXPRESSED IN HEART, SIGNAL = 3.9; EXPRESSED IN BT474, SIGNAL = 3.8; EXPRESSED IN BONE MARROW, SIGNAL = 5.4; EXPRESSED IN ADULT LIVER, SIGNAL = 4.8; EXPRESSED IN BRAIN, SIGNAL = 5.5; EXPRESSED IN PLACENTA, SIGNAL = 4.7; EXPRESSED IN HBL100, SIGNAL = 4.1
ctgtggaaggagcaaggaagaacctagctgagaattcgagtacactgctcctccacagctgctggtgggtgtggggttttgctttgagagggtaattgcaggtttcggattgaccagtccctccctggaggccttactgcctagagatgagcttcatgcacatttaaaggcatgggaaaaccactgcaacggcgttacaatttttcagagtgcagaaaatcctgatgttgggtaggtctccgggcagtcatctaccttgtttgcaaagttgggctccaccacatactgcttctcattttcagcagcaccttcaatggtgatgaagaaaatgttgattcctgactctctcgcaagtcttgaagcctcctccactttgtccgtgggccagccatccaccatcaccaccaccacattgggagccccgcttctgtttccattggctttggaaaagaagttcttggtcacaaaggagatggcc

SEQ ID NO: 421 - DNA, 445 bp, Homo sapiens
  MAP TO AC007372.4; EXPRESSED IN HEART, SIGNAL = 2.6; EXPRESSED IN BT474, SIGNAL =   2; EXPRESSED IN BONE MARROW, SIGNAL = 3.5; EXPRESSED IN HELA, SIGNAL = 3.4; EXPRESSED IN BRAIN, SIGNAL = 2.9; EXPRESSED IN PLACENTA, SIGNAL = 2.3; EXPRESSED IN HBL100, SIGNAL = 2.4; EXPRESSED IN FETAL LIVER, SIGNAL = 2.3; EXPRESSED IN LUNG, SIGNAL = 2.6; EXPRESSED IN ADULT LIVER, SIGNAL = 2.7
tcattcacaatacacctggtcacccaaaagctctgatggaaatgtccaaaaagattaatattgtttccatgcctgttaacacagcatccattccataagcccataaatcaaggagtaactttgactttcaaatcttgttacttaagaaatacatttcataagactgtaactgtcataggtattgattcctcagatggatctggaaaaagtacattgaaaatctcctagaaaggattcaccattctagattagattaagaacatttgtgattcatgggagaaggtcaaaatgtcaacaattacaggagtttggaagaagttgattctaagcctcatggaagactttgaggggttcaagacttcagtgaaggaagtcactgtggatatgacagaaatagtaagagaactagagttagaagtggcgcccgaagatgtgactggattgc

SEQ ID NO: 422 - DNA, 471 bp, Homo sapiens
  MAP TO AP000046.1; EXPRESSED IN LUNG, SIGNAL = 8.1; EXPRESSED IN BRAIN, SIGNAL = 3.2; EXPRESSED IN HEART, SIGNAL = 2.6; EXPRESSED IN BT474, SIGNAL =  20; EXPRESSED IN BONE MARROW, SIGNAL =  16; EXPRESSED IN PLACENTA, SIGNAL = 3.8; EXPRESSED IN ADULT LIVER, SIGNAL = 8.8; EXPRESSED IN HELA, SIGNAL =  19; EXPRESSED IN FETAL LIVER, SIGNAL =  21; EXPRESSED IN HBL100, SIGNAL =  37
tggggtttcagtactaaggaaggaaaactagatattaggggacaattagaagtttccaaatctcatcactttttttgggggggtgggggaggcatcccaaagggcagactggtttattaggcagcagccaggaaaatcagcggttggacttgtccccacactccagctcatccttcttgttgatggcataggagctggaggaggccttggtggcattgatgagctcatccgccaggcactcagcaatggtcttgatgttccagaaggcagcctcacgagtgcctgtgcacagcagccagacgacctgattcacacagtgcagtggggacatgtccacagcctgttgtctcacagtccctgctcgcccaatgcatgtggagtcctcccagggaccactgttgatgatggcgttcaccaggacctggagagggttctcgcctgtgagcaggtggatgaaatcgaaggcatgct

SEQ ID NO: 423 - DNA, 480 bp, Homo sapiens
  MAP TO AP000046.1; EXPRESSED IN PLACENTA, SIGNAL = 2.8; EXPRESSED IN BT474, SIGNAL = 6.4; EXPRESSED IN BONE MARROW, SIGNAL = 1.9; EXPRESSED IN BRAIN, SIGNAL = 3.9; EXPRESSED IN HELA, SIGNAL = 7.3; EXPRESSED IN HBL100, SIGNAL = 3.5; EXPRESSED IN FETAL LIVER, SIGNAL = 5.5; EXPRESSED IN LUNG, SIGNAL = 3.7; EXPRESSED IN ADULT LIVER, SIGNAL = 2.7; EXPRESSED IN HEART, SIGNAL = 2.4
gccagcccggttgtaagtagtatgccagaaagagcttcagagtcttcttcagaggaaaaagatgattatgaaatttttgtaaaagttaaggacactcacgaaaaaagcaagaaaaataagaaccgtgataagggggagaaagagaagaaaagagactcttcattaagatctcgaagtaagcgttccaaatcttctgaacacaaatcacgcaagcgtaccagtgaatctcgttctagggcaagaaagagatcatctaagtccaagtctcatcgctctcagacacgttcacggtcacgttcaagacgcaggaggagaagcagcagatcaagatcaaagtctagaggaagaagatctgtatcaaaagagaagcgcaaaagatctccaaagcacagatccaagtctagggaaagaaaaagaaaaagatcaagctccagggataaccgaaagacagttagagctcgaagtcgaaccccaagtcgt

SEQ ID NO: 424 - DNA, 464 bp, Homo sapiens
  MAP TO AP000046.1; EXPRESSED IN HBL100, SIGNAL = 6.4; EXPRESSED IN FETAL LIVER, SIGNAL =  10; EXPRESSED IN HELA, SIGNAL = 4.6; EXPRESSED IN BRAIN, SIGNAL = 5.5; EXPRESSED IN HEART, SIGNAL = 4.7; EXPRESSED IN ADULT LIVER, SIGNAL = 3.2; EXPRESSED IN LUNG, SIGNAL = 8.6; EXPRESSED IN BONE MARROW, SIGNAL = 3.7; EXPRESSED IN BT474, SIGNAL =  16; EXPRESSED IN PLACENTA, SIGNAL =  18
ctgcagctgaccgatctatgatgtcatcttatactgctgatcgttcaatgatgtctatggctgctgattcttacaccgattcttacactgacacatatacagaggcatatatggtgccacctttgcctcctgaagagcccccaacaatgccaccgttgccacctgaggagccaccaatgacaccaccattgcctcctgaggaaccaccagagggtccagcattgcccactgagcagtcagcattaacagctgaaaatacttggcctacagaggtgccatcatcaccatctgaagagtctgtatcgcagcctgagcctcctgtgagtcaaagtgagatttcggagccttcagcagtgcctactgattattcagtgtcagcatcagatccctcagttttagtatcagaggctgctgtgactgttccagaaccaccaccagagccagaatcttcaattacgttaaca

SEQ ID NO: 425 - DNA, 472 bp, Homo sapiens
  MAP TO AP000046.1; EXPRESSED IN BONE MARROW, SIGNAL = 4.5; EXPRESSED IN ADULT LIVER, SIGNAL = 2.2; EXPRESSED IN PLACENTA, SIGNAL = 4.2; EXPRESSED IN BT474, SIGNAL =   6; EXPRESSED IN FETAL LIVER, SIGNAL = 5.3; EXPRESSED IN LUNG, SIGNAL = 4.3; EXPRESSED IN HELA, SIGNAL = 3.5; EXPRESSED IN BRAIN, SIGNAL =   4; EXPRESSED IN HBL100, SIGNAL = 3.8; EXPRESSED IN HEART, SIGNAL = 3.5
tcaacaacaatggattttccagagtcatctgcaattgaagcgctaagattgccagagcagcctgtagacgtaccatcggagattgcagattcatccatgacaagaccgcaggagttgccggagctgcctaagaccacagcgttggagctgcaggagtcgtcggtggcctcagcgatggagttgccggggccacctgcgacctccatgccggagttgcaggggccccctgtgactccagtgctggagttacctgggccctctgctaccccggtgccagagttgccagggcccctttctaccccagtgcctgagttgccagggccccctgcgacagcagtgcctgagttgccagggccctctgtgacaccagtgccacagttgtcgcaggaattgccagggcttccagcaccatccatggggttggagccaccacaggaggtaccagagccatctgtgatggcacaggagttgc

SEQ ID NO: 426 - DNA, 466 bp, Homo sapiens
  MAP TO AP000036.1; EXPRESSED IN BT474, SIGNAL = 1.2; EXPRESSED IN BONE MARROW, SIGNAL = 1.2; EXPRESSED IN FETAL LIVER, SIGNAL = 1.3; EXPRESSED IN HELA, SIGNAL = 1.1; EXPRESSED IN ADULT LIVER, SIGNAL = 1.2; EXPRESSED IN PLACENTA, SIGNAL = 1.4; EXPRESSED IN HBL100, SIGNAL = 1.2; EXPRESSED IN LUNG, SIGNAL = 1.5; EXPRESSED IN BRAIN, SIGNAL = 1.7; EXPRESSED IN HEART, SIGNAL = 1.3
caacagagatgctgttgaaggaaaaagaggcttgaacccctcccaattctgcccagggcttaactcggtgggagagtatttgaaaaacattgcagataaaaggcactccctgagaagcaggtttagctacgactttatcccacattcagaaaactcagcctcacattagattaaattagcagcttggatcaagtgtcagcaactgagaagcactttgggtgtaggagctcttttttccacagacagcagagacgatcgcctctagggtcgcacttacccctgacaaatagcgctccagtttcttgtttaagaggaagtagatggccaggatgtggcaggcgcggttggagagcacagtgttgatcacgtcgctgttcttgtaacccagcttctcggtcatgtgcagcacgacgctcgggctcagatcttccagagaaatcctgcgaggtgcagagagagaggacca

SEQ ID NO: 427 - DNA, 377 bp, Homo sapiens
  MAP TO AP000036.1; EXPRESSED IN BT474, SIGNAL = 3.1; EXPRESSED IN BONE MARROW, SIGNAL = 3.3; EXPRESSED IN HELA, SIGNAL = 4.7; EXPRESSED IN HEART, SIGNAL = 4.4; EXPRESSED IN PLACENTA, SIGNAL = 3.8; EXPRESSED IN HBL100, SIGNAL = 3.2; EXPRESSED IN FETAL LIVER, SIGNAL = 3.7; EXPRESSED IN LUNG, SIGNAL = 5.6; EXPRESSED IN ADULT LIVER, SIGNAL =   5; EXPRESSED IN BRAIN, SIGNAL = 4.6
agatggagtggacccaaatggagtggatctggatgaagtggctctggatggagttcacctggatggagtggacctggatacagtggacctagatggagcggacccagatggagtggacccggatggagtggacctggatggagtgggcctgaatggagtgcacctggatggagtggacctggatggagtggatctggatggagtggacttggatgaagtggatctggatggattggacctggatggagtggactcggatggagtggacccagatagagtggatctggatggagtgaatccggatggagtgcacctggatggagcgcacctggatgaagttcacttggatggagtggacctggatggaattcacttgg

SEQ ID NO: 428 - DNA, 459 bp, Homo sapiens
  MAP TO AP000026.1; EXPRESSED IN BT474, SIGNAL = 0.68; EXPRESSED IN HEART, SIGNAL = 0.85; EXPRESSED IN BONE MARROW, SIGNAL = 1.8; EXPRESSED IN HBL100, SIGNAL = 0.75; EXPRESSED IN FETAL LIVER, SIGNAL = 0.91; EXPRESSED IN LUNG, SIGNAL = 0.92; EXPRESSED IN HELA, SIGNAL = 0.8; EXPRESSED IN ADULT LIVER, SIGNAL = 0.74; EXPRESSED IN PLACENTA, SIGNAL = 1.4
aaggaagagtatactttgagagaaacattttctactaccaaaataaaatgaaaataaaaatgtaagaaacttgatacagaaatgtcaacccatggtagacactagaattaaagaaattacatggtccttagaagcatcagttttgaaagcatataaatataataaaagtatgattccatgcattttattaaataagataaaaagaactccagggctacttgaacaatttaaatataggagaagactattttttagaaatgttttccgtcgccaacttgttaaagctttatagcactttgcatattttggagaatgtcaactatatttttatcagagctgatttgttccagtggaacaacagtggcgtagacatcgcccacaaggttctgcatactcaggaagactgggttacacgtccacagcagggttgaagaagatgagatgatgaggtccacccag

SEQ ID NO: 429 - DNA, 449 bp, Homo sapiens
  MAP TO AL096827.3; EXPRESSED IN HEART, SIGNAL = 1.6; EXPRESSED IN FETAL LIVER, SIGNAL = 1.2; EXPRESSED IN PLACENTA, SIGNAL = 2.3; EXPRESSED IN BONE MARROW, SIGNAL = 2.3; EXPRESSED IN HBL100, SIGNAL = 1.6; EXPRESSED IN ADULT LIVER, SIGNAL = 1.2; EXPRESSED IN BRAIN, SIGNAL = 1.5; EXPRESSED IN BT474, SIGNAL = 1.5; EXPRESSED IN LUNG, SIGNAL = 1.4; EXPRESSED IN HELA, SIGNAL = 2.1
cagcagctgcaatttgagtcaccatttggttaagcttatgataatccactttcattctccaagatccatctgtcttctgcacaggccaaatagaagatttgaataggaatgtggtgggaatcaccacctctgagtcttccaagtcttttatggtggcactaatctctgaaatccctctagggatgcaatattgttttttatttactattttttttctaggtagaggcagctctaattgcttccatttggcctttcccaccatgatatccctaatcctaccagtcaggaagccaaagtgggggctccaccagctgctaaatatgtctatgccaattatacattctggcactggggaaatgaccacaggatgagtctggaaacccactggacccactgtaagtgggatttgagctgaaacatcattaattacctgacttccttaagcccct

SEQ ID NO: 430 - DNA, 475 bp, Homo sapiens
  MAP TO AL096827.3; EXPRESSED IN BT474, SIGNAL = 1.6; EXPRESSED IN BONE MARROW, SIGNAL = 2.4; EXPRESSED IN HBL100, SIGNAL =   2; EXPRESSED IN FETAL LIVER, SIGNAL = 1.8; EXPRESSED IN PLACENTA, SIGNAL = 2.2; EXPRESSED IN LUNG, SIGNAL = 1.8; EXPRESSED IN HELA, SIGNAL = 1.9; EXPRESSED IN ADULT LIVER, SIGNAL = 1.4; EXPRESSED IN BRAIN, SIGNAL = 1.3; EXPRESSED IN HEART, SIGNAL = 1.5
tggcagtcttagcttccagcttaatggaattgttgttgtgtctcctggtggcagtgttcctccctctgtaactaagacatctaggccagcaggacataatgttgtgggaacaggaagcaaaaattttctagtgggtcactaggggtaatggtgagtggtgtgacatccacttccactcctcgattcctggatccatgaattctagctacgagaggaagagtaccatatattggatgctgatccagagcatacacagccttctggaaagctttgccctagctctgcaaagtattgtccacctagttggcattgtaattgtgacttcaaaaggccattgtaccattctatcaatccagctgcttcaggatgatggggaatataataagaccagtgaattccatgagcatgagcccagtgctgcccctctttagccataaagtaagtgccttagtaagaggcaatgctatgtggaatt

SEQ ID NO: 431 - DNA, 458 bp, Homo sapiens
  MAP TO AL096757.1; EXPRESSED IN HBL100, SIGNAL = 1.4; EXPRESSED IN LUNG, SIGNAL = 1.6; EXPRESSED IN ADULT LIVER, SIGNAL = 1.8; EXPRESSED IN PLACENTA, SIGNAL = 1.6; EXPRESSED IN BT474, SIGNAL = 1.3; EXPRESSED IN HEART, SIGNAL = 1.2; EXPRESSED IN BRAIN, SIGNAL = 1.4; EXPRESSED IN HELA, SIGNAL = 1.4; EXPRESSED IN FETAL LIVER, SIGNAL = 1.4; EXPRESSED IN BONE MARROW, SIGNAL = 1.7
gacatctgaccctcaaagccttcctgcgaaaatagtatcacttttctttttgggactcagaaaagttaagcgatgtcctctgagtgatgtagccaggaagcagctgatacagaatttgtattcgggtctttccgtttccaaagcccctattctttttactaactggagatagggagtcctgggggttcctattgtgatttatttaactttgcatctgcagcaccaagcaattagccagtgattgcgtgtgtgttcaggaaaagaaacactatttctagtcttcccagtaatttgctaggcgaccgcaaatttgccatttcttctttctgtgcctcagtttctatatctgtaaagtggtcatctagttgcctatcttctgctttctgaactgcgggacaaggagcatggtgtgtgggagcttagcctgcaaagttgtctgagatcaagtccagcactgg

SEQ ID NO: 432 - DNA, 461 bp, Homo sapiens
  MAP TO AL096757.1; EXPRESSED IN PLACENTA, SIGNAL = 1.4; EXPRESSED IN BONE MARROW, SIGNAL = 1.7; EXPRESSED IN FETAL LIVER, SIGNAL = 1.3; EXPRESSED IN ADULT LIVER, SIGNAL = 1.2; EXPRESSED IN BRAIN, SIGNAL = 1.3; EXPRESSED IN BT474, SIGNAL = 1.6; EXPRESSED IN HBL100, SIGNAL = 1.3; EXPRESSED IN LUNG, SIGNAL = 1.3; EXPRESSED IN HELA, SIGNAL = 1.1; EXPRESSED IN HEART, SIGNAL = 1.4
agcttcactgatcctgagcccaggatgaggcactttgtgttcatcatccctaggaatcactgaagacagctatgagccaggtggtgcggtgcccgttgcacagaggaggagagcgaggcccatgtcctgtcctcgtggggtgctcagctgcagcagcccggagccctgaggtggccacgaactctggccagggggtggcaggggcactgtatgcgttgtagggcctgtttgggaagacattgaagagtaggcgccggtgagtcaggttatctccaaagagaagtcaaagatgagctctgggtggagagtgtgaccctgagtggccctcttcattttacagatggggacactgagcctcagagagaagaacgatgtggccagggtcccgcagcgaggatgcggcagaatcaggattggaacccagacctgtctgactccagagctttcggggactaggattc

SEQ ID NO: 433 - DNA, 459 bp, Homo sapiens
  MAP TO AL096757.1; EXPRESSED IN PLACENTA, SIGNAL = 1.8; EXPRESSED IN BT474, SIGNAL = 2.1; EXPRESSED IN BONE MARROW, SIGNAL =   1; EXPRESSED IN HBL100, SIGNAL = 2.2; EXPRESSED IN FETAL LIVER, SIGNAL = 1.7; EXPRESSED IN LUNG, SIGNAL = 1.8; EXPRESSED IN HELA, SIGNAL = 1.9; EXPRESSED IN ADULT LIVER, SIGNAL = 1.6; EXPRESSED IN BRAIN, SIGNAL = 2.3; EXPRESSED IN HEART, SIGNAL = 1.8
tcatcagcagaaggagcaagacatgagcaaactttccactttcatgtatttattccagtgtatattggacacaaatagaatgagcacattctaccagtactttcgtggatgttcttgcctcagatgacaccgagattaaaaaagtgtccccgaaagttaaaaaaatgatggacaaatagtgggggaaggatttatttgaaggggcagaaatggtgagagtggatgaatggccaaagtgtgtcaggttccaagggagatcatgtgaagtacttagcatcacgctaagggctcaccatggcctccaggatgggtggctacaaaacaatgatgatgatgatgatggtgatggtgatgatgatgatggtgatgatgatagtgatgatgatgatggtgatgatgatagtgatgatgatgctgataatgatggtgatggtgatggcgatgatggtgatggtgatg

SEQ ID NO: 434 - DNA, 468 bp, Homo sapiens
  MAP TO AL078477.5; EXPRESSED IN HEART, SIGNAL =   5; EXPRESSED IN PLACENTA, SIGNAL = 5.4; EXPRESSED IN FETAL LIVER, SIGNAL = 4.5; EXPRESSED IN LUNG, SIGNAL = 7.2; EXPRESSED IN HELA, SIGNAL = 4.3; EXPRESSED IN BT474, SIGNAL = 3.7; EXPRESSED IN BONE MARROW, SIGNAL = 4.8; EXPRESSED IN HBL100, SIGNAL = 5.4; EXPRESSED IN ADULT LIVER, SIGNAL = 4.4; EXPRESSED IN BRAIN, SIGNAL = 9.6
cacacacacacacgatggaggtgtggtaggcccgagtagtcttgggaaatgcaacatttgagtaggaaatgcggaaatgcctgtcctcagttatttaaaactttaaactttcattcattcaaaataaacacacacacacacacacacacacacacacaggatggaggtgtggtaggcccgagtagtcttgggaaatgcaacatttgagtaggaaatgcctgtcctcacctaggtcaggatgaatcttgtgagacaaagtagcaaacctaagaaggaatgtttgctcattctgtttgccagagaatttcgcaaagcccctgactcagtgagtgagggcaaccctctggaagaataccctaaagataaacaggatagagcacaggtccccattctcttgcctgaatcactgcagttttagaaaacataagttcaatgatcctagcctctgcctcttcatgtgcatgggta

SEQ ID NO: 435 - DNA, 475 bp, Homo sapiens
  MAP TO AL078477.5; EXPRESSED IN ADULT LIVER, SIGNAL = 0.86; EXPRESSED IN BONE MARROW, SIGNAL = 1.4; EXPRESSED IN PLACENTA, SIGNAL = 0.88; EXPRESSED IN BT474, SIGNAL = 1.4; EXPRESSED IN LUNG, SIGNAL = 0.73; EXPRESSED IN HELA, SIGNAL = 1.6; EXPRESSED IN HEART, SIGNAL = 0.82; EXPRESSED IN HBL100, SIGNAL = 3.4; EXPRESSED IN FETAL LIVER, SIGNAL = 1.2
ttccaacataaagaaaagatgtgtgatattccaattaccctgatttgataattacacattgcatacatgtatcaaaatatcacctgtgcccccaaaatacatacaaccactacctatctatttaaaagtcctgtagtctgaaattcaaaacatataaatacagtcagccttctgtatctgagggttccaaatcctccttgcctcagataatgagggacgactctataattcacaagaaaaatttaaaagattttattaggaaatattagaaaaaaattaaaaacaaacctttatcatcctccttcagacacacatcacaggcttcaataatttgagctaaatcaacatgaagtccaccttccgagttctcttctgaaatctcagctcctttagatttcagataagcacgaagctcagcagcctgttgaggattgctctattataaaactgactacgaatgacaaagcacaatctc

SEQ ID NO: 436 - DNA, 474 bp, Homo sapiens
  MAP TO AL078477.5; EXPRESSED IN PLACENTA, SIGNAL = 1.4; EXPRESSED IN FETAL LIVER, SIGNAL = 0.69; EXPRESSED IN HELA, SIGNAL = 0.94; EXPRESSED IN BT474, SIGNAL = 0.82; EXPRESSED IN BONE MARROW, SIGNAL = 1.1; EXPRESSED IN HBL100, SIGNAL = 0.67; EXPRESSED IN LUNG, SIGNAL = 0.67; EXPRESSED IN ADULT LIVER, SIGNAL = 0.69; EXPRESSED IN HEART, SIGNAL = 0.94
tcaaggacaaacctcgaatgttacggacaacagaaaatcagttactacagaaataaaagacaagatatgcttggaaaaagacaatggatgtacagaatttaaatcaccaaataatcattttgtagtgttagatacagcaatagaaacagaaaaaatacatctagaaagaaccagaggattagatgttcaccatacagatgtaaatctggaggttgaaaataacaaaacatcatttaacagtattttaaatgagacagcacacaatacatatcacaataataataaagatgtttctgaaaatgagccattcaaacaattcagattgcttccagggactcgagaacatgctctagagaaggaaattacaaatagtgaccaaaccaaagcagatttggactcgtctctagatataaaaaaaaatcctgttccatgtcagaaatatagtttacggaattcaagtaatgttatgttaga

SEQ ID NO: 437 - DNA, 417 bp, Homo sapiens
  MAP TO AL050337.6; EXPRESSED IN LUNG, SIGNAL = 2.3; EXPRESSED IN HEART, SIGNAL = 1.7; EXPRESSED IN BRAIN, SIGNAL = 1.4; EXPRESSED IN PLACENTA, SIGNAL = 2.4; EXPRESSED IN BT474, SIGNAL = 1.4; EXPRESSED IN BONE MARROW, SIGNAL = 1.2; EXPRESSED IN HBL100, SIGNAL = 1.6; EXPRESSED IN FETAL LIVER, SIGNAL = 1.6; EXPRESSED IN HELA, SIGNAL = 0.84; EXPRESSED IN ADULT LIVER, SIGNAL = 1.6
tctaaatctgaacatccaaaatgctccaatgagtatttcctttgagtgccatgctggcgctcaaaaagtttcagattttggagcattctgggtttctagacttgggatgctcaacctgtactgactctaaattcctccaagtgtttcttaagcattgtgataattttcagcaactgctaataaaagcaaacatacagaagacatgtataaatattttccaatttaaaatttacatgtgtacacattctactcaccatctcggcatacagcaaattcttctgactttgcataggcagattctttttgtccaaccctggctttaactctgacccaaagagaatttgatggatcaccaacatgatcagaaatattacaataatgatgagaaatattgatgcaggcatcaatccattctga

SEQ ID NO: 438 - DNA, 448 bp, Homo sapiens
  MAP TO AL050337.6; EXPRESSED IN PLACENTA, SIGNAL = 4.4; EXPRESSED IN LUNG, SIGNAL = 4.2; EXPRESSED IN HEART, SIGNAL =   2; EXPRESSED IN HBL100, SIGNAL = 3.9; EXPRESSED IN FETAL LIVER, SIGNAL =   3; EXPRESSED IN HELA, SIGNAL = 1.3; EXPRESSED IN BRAIN, SIGNAL =   2; EXPRESSED IN BT474, SIGNAL = 1.9; EXPRESSED IN BONE MARROW, SIGNAL = 6.5; EXPRESSED IN ADULT LIVER, SIGNAL = 3.8
aaagcagaaaactgtccaggaaaatcagacttcaaagttggtgcaacttagctgatctcatgaaaattctttggaatcttctgttggtctataaccaatcaaggactctttaccgctatcatccacaagtagatccactagcacatgtggtttatcataaccaaaggaggtgggggcttttattacggttatgagctcttgtccttctgtttttatttcacctttattatttgggggaaattctgagtcagataaggagctatgtgattccagacagctggaatcagtatcaaaaccatttctggagtgatcactctcagaacaatttctggagtgatacgagtttaaagcgatgctgccaggttcagactggttactacttaaaggtgaagaactctctctctctattggagtcagatggctgcccgggaccacgtcaggaatattt

SEQ ID NO: 439 - DNA, 484 bp, Homo sapiens
  MAP TO AL050327.6; EXPRESSED IN HBL100, SIGNAL = 1.7; EXPRESSED IN HELA, SIGNAL = 2.4; EXPRESSED IN ADULT LIVER, SIGNAL = 2.8; EXPRESSED IN PLACENTA, SIGNAL = 2.2; EXPRESSED IN BONE MARROW, SIGNAL = 1.9; EXPRESSED IN BT474, SIGNAL = 2.6; EXPRESSED IN HEART, SIGNAL = 1.8; EXPRESSED IN BRAIN, SIGNAL = 1.7; EXPRESSED IN LUNG, SIGNAL = 2.4; EXPRESSED IN FETAL LIVER, SIGNAL = 2.7
tctggactgtgaacttggacctttatgggagagagagaaatggatttctgtgctgtttcagccataatttttttaggactctctgttgtagcagccaaacctataaaatgagacacccccaaggcactccacataaacatacaaccgaaatgaaaacagtagggttgctatgcaagtaacgctccatagcctcttcctctgggaagttccggggctccattgctagtctctgttttctcagcctggtatgcagacagctttctctgacgaggagcccttctccatctcgccagctgctggcttcctcaccgcctctgagtcttcaatatacatttctggatggaggaagaattggagggaagcgggggggtgtgtggccagcaaggccgatggagactcccggtcctcagcagccccctgacctttgtcttggcctcccccgactggtggatgggggcagcctgcgaagagcccagggtcagct

SEQ ID NO: 440 - DNA, 480 bp, Homo sapiens
  MAP TO AL050327.6; EXPRESSED IN HBL100, SIGNAL = 0.92; EXPRESSED IN FETAL LIVER, SIGNAL = 1.1; EXPRESSED IN LUNG, SIGNAL = 0.92; EXPRESSED IN HELA, SIGNAL = 0.77; EXPRESSED IN BRAIN, SIGNAL = 0.9; EXPRESSED IN PLACENTA, SIGNAL = 1.4; EXPRESSED IN HEART, SIGNAL = 1.2; EXPRESSED IN ADULT LIVER, SIGNAL = 0.93; EXPRESSED IN BONE MARROW, SIGNAL = 1.3; EXPRESSED IN BT474, SIGNAL = 1.3
ctttgcatttctgtcctgggctaaaaatatgaattctagatcatgagattgaagattttttcttttttttcttctcaaattaaggtccagggggaaggaagctcagctcacctataggctgaaatggttggggtgtgccctgtctctgcgactcttaccgccctccttggaaattcttttttctgtgggtttgggggctttagtacctttaaactttctaaacctttctcaggccatcagaggaaaaaaatgcatttccctaccccaaatccaagctctgaagaatccacagtttgtccattttcctcattcgatgaacaaagaaacattaaactcaaaaagacaaaagcggaatgtctacaaaatacctcagaacagtcttcttaattttaggggaaacgactgggtcattttcttccagtgctgtcagaaagcaaagatcctctcctgggagaaagactgcttcaaagtcctccaaga

SEQ ID NO: 441 - DNA, 471 bp, Homo sapiens
  MAP TO AL050326.3; EXPRESSED IN LUNG, SIGNAL =  10; EXPRESSED IN HEART, SIGNAL =   8; EXPRESSED IN PLACENTA, SIGNAL = 6.6; EXPRESSED IN BONE MARROW, SIGNAL = 8.8; EXPRESSED IN HBL100, SIGNAL = 7.8; EXPRESSED IN FETAL LIVER, SIGNAL = 5.2; EXPRESSED IN ADULT LIVER, SIGNAL = 6.5; EXPRESSED IN BRAIN, SIGNAL =  10; EXPRESSED IN BT474, SIGNAL = 6.8; EXPRESSED IN HELA, SIGNAL = 8.2
tgatgatgatgatggtgctgataaaactagtgatgatgatgatggcgatgataaaactagcgatgatgattgtgatgaggatgatggtgatgatggtgatgacgatatgatgatggtgatgacgatatgatgatggtgatgaagatggtaacagtgctactggtagtgatgatgatggtgatgatagtgatggtgatgatggtgatggtgattatgatgacactgatgatgatgatgttgagaggaggctaataatgatgaggatggtgatgttactggtggtggtggtgatgatgataatggtgatgatgattctgtgatgatgatcatgagggtgatcacagtgatggtgatagtggtgaggatgaagatgatgatggttatggtaataatgatgattttctgtatattcagtcaaatatgctgtgtgactatagaaaagtgagtgattctatcacttgcaacaaagag

SEQ ID NO: 442 - DNA, 467 bp, Homo sapiens
  MAP TO AL050326.3; EXPRESSED IN LUNG, SIGNAL = 6.9; EXPRESSED IN ADULT LIVER, SIGNAL = 4.8; EXPRESSED IN BRAIN, SIGNAL = 6.5; EXPRESSED IN BT474, SIGNAL = 4.3; EXPRESSED IN HEART, SIGNAL = 4.4; EXPRESSED IN PLACENTA, SIGNAL =   5; EXPRESSED IN HELA, SIGNAL = 5.9; EXPRESSED IN FETAL LIVER, SIGNAL = 4.4; EXPRESSED IN HBL100, SIGNAL = 4.4; EXPRESSED IN BONE MARROW, SIGNAL = 4.6
cacaactagtaggcagtgagcctgagatgtaaactagaatctttcagagtccagagtccagagtccaaactcttaaccgcactgtcatcagcatgatggtaatgatggtgatgatgatgacgatggtgacaattatggtaatggtgatggtgatgataatgattctgatgatgataatgatgtaatgttgatgatatagtgatgatgatggtgacaatggtggtgataatgatgatagcgatggtgatgatgacagtaatgatgatggtaatatggtgatgatgatgttgatggagattatggtgataatgatggtggtagtgatgatggtaatggtaatgatcttggtgatgagggtgatgatagtgatgctgatgatgatagtgaggtttatgatggtgtgtgatgatgatggtgatgatggtaatggtgaaaataataattgtggtgatgatgaggttgtaatg

SEQ ID NO: 443 - DNA, 440 bp, Homo sapiens
  MAP TO AL050306.5; EXPRESSED IN BT474, SIGNAL = 1.1; EXPRESSED IN BONE MARROW, SIGNAL = 0.75; EXPRESSED IN HBL100, SIGNAL = 1.3; EXPRESSED IN FETAL LIVER, SIGNAL = 0.92; EXPRESSED IN HELA, SIGNAL = 1.5; EXPRESSED IN ADULT LIVER, SIGNAL = 0.91; EXPRESSED IN BRAIN, SIGNAL =   2; EXPRESSED IN LUNG, SIGNAL = 0.8; EXPRESSED IN HEART, SIGNAL = 0.98
cactggcctgcagaaaatcggcgagcattccgtcctgagagagaagagaggatctaaggagaaggaagcagtgagccccccacccaacatttcacctcagaaagtttggctctgtccctccccatccccccagactccccacctatacctcccaactgctcaaagaattcagggcactttgccccagcccagtttagttggctctgagaagaaaaggaaaagggagatttgtccactgctgccgtggggccctcttgggcaaacctaaacctttaacacgggaggtgtttgcctggtgcttcttagcagagagctgaggacagtggcagaggctcctgcctgggctgccttaggccctagggctagggctagtctccctcaccagtcttggtgttggccacgatcagttcaacggtccatctgaggatgtaggtaggccg

SEQ ID NO: 444 - DNA, 477 bp, Homo sapiens
  MAP TO AL050306.5; EXPRESSED IN FETAL LIVER, SIGNAL = 1.1; EXPRESSED IN HELA, SIGNAL = 2.5; EXPRESSED IN ADULT LIVER, SIGNAL = 1.1; EXPRESSED IN BRAIN, SIGNAL = 0.97; EXPRESSED IN PLACENTA, SIGNAL = 0.75; EXPRESSED IN BT474, SIGNAL = 1.6; EXPRESSED IN BONE MARROW, SIGNAL = 1.2; EXPRESSED IN HBL100, SIGNAL = 2.4; EXPRESSED IN LUNG, SIGNAL =   1; EXPRESSED IN HEART, SIGNAL = 0.91
tatgttactgcccagggctcacacccatgtcatcctctcagaatgtgctcttatgtgaggtagccagcagcctgacagtggtccctggcactcacaggctccatcctaagaggtgggagaagccagctgtcatctatgcaccaggctgccttccaggcttgcctcacattggctacctcctgctactttccatctcttcctagggtagaaggaagcctcaagagccagccaaagagaaaagaagtccatgtggggacaaagtagttcttacctgagctaacctgccatgcagagccctgcaaagctcctcttttctgggccagaagcctagcattctcggcagtgggggactcttgccctgtagagaaaggccccacctccattctgtcttcctcttcatcatcttcatcatcttcatcctcctcttcctcctcttggtcatcattttcttcctcctcctctacctggtctggcaag

SEQ ID NO: 445 - DNA, 457 bp, Homo sapiens
  MAP TO AL050306.5; EXPRESSED IN ADULT LIVER, SIGNAL = 1.5; EXPRESSED IN HBL100, SIGNAL = 1.5; EXPRESSED IN LUNG, SIGNAL = 2.1; EXPRESSED IN HELA, SIGNAL = 2.6; EXPRESSED IN PLACENTA, SIGNAL = 1.4; EXPRESSED IN BT474, SIGNAL = 2.7; EXPRESSED IN BONE MARROW, SIGNAL = 1.8; EXPRESSED IN FETAL LIVER, SIGNAL = 1.7; EXPRESSED IN BRAIN, SIGNAL = 1.7; EXPRESSED IN HEART, SIGNAL = 1.5
gttaccaacagccatgggacccctattagctatgctgagcaatacccaaagtttgaatccatgggggaccatggctactattcaatgttaggtgacttctccaaactgaacatcaacagcatgcataaccgagagtattacatggctgaagtagaccggggggtgtatgcccggaatcctaacctctgttctgacagccgtgtgagccataccaggaatgacaactattcctcttacaacaacgtgtatttggctgtagctgatacccatcctgaaggcaatttgaagctgcaccgctcagcatcccagaaccgacttcagccttttcctcatggttaccatgaagccttaacacgagtgcagagctatggcccagaggattctaagcaaggcccccacaaacagtcagtcccccacttagctctgcatgcccagcacccatcaactggaacacgtt

SEQ ID NO: 446 - DNA, 445 bp, Homo sapiens
  MAP TO AL050305.9; EXPRESSED IN FETAL LIVER, SIGNAL = 1.4; EXPRESSED IN HEART, SIGNAL = 3.8; EXPRESSED IN PLACENTA, SIGNAL = 0.75; EXPRESSED IN BT474, SIGNAL = 0.97; EXPRESSED IN BONE MARROW, SIGNAL = 0.78; EXPRESSED IN HBL100, SIGNAL = 1.5; EXPRESSED IN LUNG, SIGNAL = 0.91; EXPRESSED IN HELA, SIGNAL = 1.6; EXPRESSED IN ADULT LIVER, SIGNAL =   1; EXPRESSED IN BRAIN, SIGNAL = 1.2
aagaaatgcaacactttacggtgtccaactgctaagatttatttccaacttgtcagacacaactattttgcccaatccaaatcaaagggaatcaaggctgtgaaatccacacaggacatcaacgcacacataaatgaaaactacagatgtgtcagaggcaaccatatacacacaaataatgtaactactaaattccatgaagtagctgtccaggaatactttccaaataacttcagcaaaaaagaaacactatgaaagcataaagaaactttcctaacaacactaccaaggccaaagcctaccaggtccccatcttctgcagggccaaaatgttcatgtgcttaataagtacaatatgagtagcacaagtgggaccagtctgcttgtagcatgaggtgacaacatcatcacctatgagaaaagacacaagatgactgtgacagga

SEQ ID NO: 447 - DNA, 456 bp, Homo sapiens
  MAP TO AL049837.3; EXPRESSED IN PLACENTA, SIGNAL = 3.3; EXPRESSED IN BT474, SIGNAL = 3.2; EXPRESSED IN BONE MARROW, SIGNAL = 2.1; EXPRESSED IN FETAL LIVER, SIGNAL = 2.2; EXPRESSED IN HELA, SIGNAL = 2.2; EXPRESSED IN ADULT LIVER, SIGNAL = 1.8; EXPRESSED IN BRAIN, SIGNAL = 2.1; EXPRESSED IN HEART, SIGNAL = 2.4; EXPRESSED IN HBL100, SIGNAL = 2.5; EXPRESSED IN LUNG, SIGNAL = 2.9
tggtgggaaaagccaaatagaatccattagagctggctctacctagaaaaatagtaaatcaagacaatatcacatccctggagggattgcagagattagtgccaccatcaagggcttgaaagatgcaggggtggtgattcccaccacatccccattcaactctcccatttggtctgtgtagaagacagacggatcttgaagaatgacagtggattatcataagcttaaccaagtggtcactccaaatgcatctgctgtaccagatgtggtttcattgcttgaccaaattaacacatttcctggtacctggtatgcaaccactgacttggcaaatgcctttttctccattcctgtccataaggctcaccagaagcaatttgctttcagctggcaagaccagcaatatacatttactgtcctacttcaggggtatatcaactctctggctttgtgtca

SEQ ID NO: 448 - DNA, 464 bp, Homo sapiens
  MAP TO AL049836.2; EXPRESSED IN HELA, SIGNAL = 3.6; EXPRESSED IN ADULT LIVER, SIGNAL = 2.7; EXPRESSED IN BT474, SIGNAL = 3.1; EXPRESSED IN HBL100, SIGNAL = 2.5; EXPRESSED IN FETAL LIVER, SIGNAL = 2.8; EXPRESSED IN LUNG, SIGNAL = 3.7; EXPRESSED IN HEART, SIGNAL = 3.4; EXPRESSED IN PLACENTA, SIGNAL = 2.6; EXPRESSED IN BONE MARROW, SIGNAL = 3.3; EXPRESSED IN BRAIN, SIGNAL = 3.7
gacctagctactgccaacccgtagaatatccaacttggctgcagtagagaccattgccgacccccatgcggcaccattcttggaggaagccaaccagccaggtagaggcaccttgaccacctgggcgcttccactttagaagggtgcagtgatctgaatgcatgtcccccaacaacattcatatgttgaaattctaacctcaaaggggatgatataaggaggcagggactttgggaggtgatgaggtcacaagggtggagccctcatgaatgggattaatgcccttgttaaagaggcccgagagaggtctctgaccccttcttctacatgaggtgacagcgagaagatggctatcaatgaggaactggccctcatcagacaccaaatctgccagcaccttgatcttggacttcccagcctccagaactgtgagaaagaagtgtcttttgtttataagccaccca

SEQ ID NO: 449 - DNA, 463 bp, Homo sapiens
  MAP TO AL049836.2; EXPRESSED IN LUNG, SIGNAL = 2.3; EXPRESSED IN ADULT LIVER, SIGNAL = 1.7; EXPRESSED IN BRAIN, SIGNAL = 2.3; EXPRESSED IN HEART, SIGNAL =   2; EXPRESSED IN PLACENTA, SIGNAL = 2.5; EXPRESSED IN BONE MARROW, SIGNAL = 2.1; EXPRESSED IN HBL100, SIGNAL = 1.6; EXPRESSED IN HELA, SIGNAL = 2.2; EXPRESSED IN BT474, SIGNAL = 1.8; EXPRESSED IN FETAL LIVER, SIGNAL = 1.8
acacagtctctgaccccagcaattagcctgggcttgggactagctctggccaaagggctctgagaggaagcgatgtgaatcgctcctagactaaagccattgacaccaccagactcggcagcgccatctctctcctgtggcacgtgtggaggctgagcctgaaaatggtaacctggacccaggctgctccagggaagacatttccctggagagttactcaagtccccagcaaactttgcaggagccataaaagcaagaaataaagcatctgttgggtttagccagtgagagagttcctttgttgctgcagcagaacttaggctatcctgactaattcagctagtaaaagaagcagcaggagcacttgtctgtctctctctgggatccaggtggaggacaagtctcccctgacaatcacagccacagacctcacttcacaggagggtggggttcgaattcatac

SEQ ID NO: 450 - DNA, 850 bp, Homo sapiens
  MAP TO AL049836.2; EXPRESSED IN BT474, SIGNAL = 3.2; EXPRESSED IN BONE MARROW, SIGNAL = 2.5; EXPRESSED IN HEART, SIGNAL = 4.3; EXPRESSED IN BRAIN, SIGNAL = 5.8; EXPRESSED IN ADULT LIVER, SIGNAL = 5.6; EXPRESSED IN LUNG, SIGNAL = 5.9; EXPRESSED IN FETAL LIVER, SIGNAL =  33; EXPRESSED IN PLACENTA, SIGNAL =  11; EXPRESSED IN HELA, SIGNAL = 5.3; EXPRESSED IN HBL100, SIGNAL = 3.6
acactgccctgatctcacacaaacacacaaacactgccctgatgtcacacacacacactaccctgatctcacacactcatgcacacacacacacactgccctgatctcatacacacacacacacactctgccctaatctcacacaaacactgccctttgccctgatctctctctctcacatactgtcctgatctcacacactcatgcacacaaacacacactgccctaacctcacacacagacacacacacactgccctgatatcatacacacacacacagacacacacatactgccctgatatcacactcatgcacacacactgccctgatctcacacactcatgcacacagacacactgccctgatgtcacacacacacacacacgcacactgccctgatctcacacatacacatacacactgccctgatctctctcacacacccactgccctgatgtcacacacacacacacacacacacactaccctgatctcacacaatcatgcacacatacacacacttccctgaccctatcactctgcacattggagctaagctcatgaaggctgctcatgcattttatttggcaagtctctctcacatctttaatcacactagcctgcccactgccaatcaataaagattaggaaatcgattgctaacttactcttgggttagataataaaattgtttgaaacatgcacctggaggaatttatctgtgaagagtcctttcagagtttgtttcaagctttgcaagtctctcatggctctgaggtcggggaggctgtgagggatcctccacgcccagcagacgtggaaggagccgacgttcttacgggagatgg

SEQ ID NO: 451 - DNA, 394 bp, Homo sapiens
  MAP TO AL049776.2; EXPRESSED IN FETAL LIVER, SIGNAL = 1.2; EXPRESSED IN LUNG, SIGNAL = 0.92; EXPRESSED IN BT474, SIGNAL = 1.3; EXPRESSED IN BONE MARROW, SIGNAL = 2.7; EXPRESSED IN HBL100, SIGNAL = 0.99; EXPRESSED IN ADULT LIVER, SIGNAL = 1.2; EXPRESSED IN BRAIN, SIGNAL =   1; EXPRESSED IN HEART, SIGNAL = 1.2; EXPRESSED IN PLACENTA, SIGNAL = 1.7; EXPRESSED IN HELA, SIGNAL = 0.83
cagagatgttaagtccattgcctaaagtcatatagcagggctgggatttgaacctctgtagtctgaccctacagcagtggttctcaaccttggctgcacattagaatcacctagggccttaaacaaaaataacaaacaacactatgtttggggtacatgacccatgcaaactcagcggctgcttctggtgggaactgctgcttcagagcctatgtagtaccactctgtagtacggactccattaggcaccaagaaatcctgcatgatttaagtagcacaaatgagaaatggttaacatctaaagcaactttttgctttgttcttacctgtaattcttcattatctaacagttctctgctttttctttgtagaaagacagctcttgattcctctc

SEQ ID NO: 452 - DNA, 450 bp, Homo sapiens
  MAP TO AL049776.2; EXPRESSED IN BT474, SIGNAL = 2.9; EXPRESSED IN HELA, SIGNAL = 3.7; EXPRESSED IN PLACENTA, SIGNAL = 1.6; EXPRESSED IN BONE MARROW, SIGNAL = 3.4; EXPRESSED IN HBL100, SIGNAL = 4.6; EXPRESSED IN FETAL LIVER, SIGNAL = 2.4; EXPRESSED IN LUNG, SIGNAL = 1.8; EXPRESSED IN ADULT LIVER, SIGNAL = 1.9; EXPRESSED IN BRAIN, SIGNAL =   3; EXPRESSED IN HEART, SIGNAL = 4.5
caagcagaaggagttggagcacaggttgtctgcaatcaaatctgctgtggaaactggtcaagcagatgatgagcgtgttcgtgaatattatcttcttcaccttcagaggtgaactgatatcagcttagaagagattgagagcattgaccaggaaataaagatcctgagagaaagagactcttcaagagaggcatcaacttctaattcatctcgccaggagaggcctccagtgaaacccttcattctcactcggaacatggcccaagtcaaagtatttggagctggttatccaagtctggcaactatgacggtgagtgactggtataagcaacattggaaatatggagcattaccagatcagggaatagccaaggcaacaccagaggaattcagaaaagcagctcagcaacaggaaggtcaagaagaaaaggaggaagaggatgatgaaca

SEQ ID NO: 453 - DNA, 472 bp, Homo sapiens
  MAP TO AL049776.2; EXPRESSED IN BRAIN, SIGNAL = 1.2; EXPRESSED IN BONE MARROW, SIGNAL = 1.1; EXPRESSED IN HBL100, SIGNAL = 1.4; EXPRESSED IN FETAL LIVER, SIGNAL = 1.1; EXPRESSED IN LUNG, SIGNAL = 0.83; EXPRESSED IN ADULT LIVER, SIGNAL = 1.2; EXPRESSED IN HEART, SIGNAL = 2.2; EXPRESSED IN PLACENTA, SIGNAL = 0.96; EXPRESSED IN BT474, SIGNAL = 1.1; EXPRESSED IN HELA, SIGNAL = 1.5
caggagtgctgacaagaaactcttaggtgatcaggatctaataagcctgcgagagaggtggttgtgttaaaaccccttttcagttgtaccccctttataaaaactgtgtttgaaactttccacacctcttcttggcccaaaggtgattatttttgttcggaaattgtgagataactcatctgaggtgaggttttcttttagtactcccaggagaagatatatttctcttttcactttgaaagttttcctttaaaaataatttcttgtttgtccctctccaagatggctgctgaagacaaattactgctgccacagctccccgagctgtttgaaaccagcaaacagcttctggatgatgtagaagtagtgactgaacctgccggttcccggatagtccagaagaaggtgttcaagggcctggacctccttgagaaggctgccgaaatgttatcgcagcttgacttgttcagct

SEQ ID NO: 454 - DNA, 465 bp, Homo sapiens
  MAP TO AL049767.9; EXPRESSED IN BT474, SIGNAL = 1.8; EXPRESSED IN ADULT LIVER, SIGNAL = 1.5; EXPRESSED IN HEART, SIGNAL = 2.1; EXPRESSED IN BONE MARROW, SIGNAL = 2.3; EXPRESSED IN BRAIN, SIGNAL = 1.9; EXPRESSED IN HELA, SIGNAL = 2.2; EXPRESSED IN PLACENTA, SIGNAL = 2.2; EXPRESSED IN LUNG, SIGNAL = 2.2; EXPRESSED IN FETAL LIVER, SIGNAL = 1.6; EXPRESSED IN HBL100, SIGNAL = 1.7
tgtagagctctggcactggctaattaatcctagtgttcctaaaaagtgaaattgataggaggcctactgcattcctatttaatttatacaagcataaaacttctaggtcgaatggacaaaagactaatttgaattataaaagcagagaatcatggcccctcaatcaatttccagacttgaaccagtttacagacccagaaccccttgaatgaaggggaggccagggccccttgaggaaagaccccactaccctatgaccaatttatgcagtgaatctttttcccatcctttcccaaggagacctctggctttttaccaggggaactgtgtactggggaaagggaaatgatcagacatttcagggactactggacactggctctgagctgacgttgattccaggggacccaaaacatcattgtggtcctccaggaccaaaagtaagggcttatggagatcaggtaa

SEQ ID NO: 455 - DNA, 455 bp, Homo sapiens
  MAP TO AL049767.9; EXPRESSED IN ADULT LIVER, SIGNAL =   5; EXPRESSED IN BRAIN, SIGNAL = 7.7; EXPRESSED IN PLACENTA, SIGNAL = 5.3; EXPRESSED IN BT474, SIGNAL = 4.9; EXPRESSED IN HEART, SIGNAL = 5.4; EXPRESSED IN FETAL LIVER, SIGNAL = 7.6; EXPRESSED IN HELA, SIGNAL = 6.1; EXPRESSED IN LUNG, SIGNAL = 6.5; EXPRESSED IN HBL100, SIGNAL = 5.2; EXPRESSED IN BONE MARROW, SIGNAL = 6.8
acccaaaagtccaagtccgaagtttcatctgagacaaattaagtcccttccacctatcagcctgtaaaatcaaaagcaacttagttacttcctagatacaatgggggtacaggtattgggtaaatacacccattggaaatgggatgagttggccaaaacaaaggggctacaggctccatgcaagtccaagatccaatgaggcagtaattaaatcttcaaattccaaaataatctcttttgactccatgtctcacatccaggtcacgctgatgcaaaaggtgagctccacagccttgggcagctctgtccctgtggctttgcagggtacagcccccctccaggcttctttcatgggctggcattgtctgtggcttctcaaggtgcacattgcaagctgtcagtggatctaccattctggggtctgcaggatggtggccctcttctcacagctccat

SEQ ID NO: 456 - DNA, 478 bp, Homo sapiens
  MAP TO AL049745.9; EXPRESSED IN BT474, SIGNAL =   1; EXPRESSED IN BONE MARROW, SIGNAL = 1.4; EXPRESSED IN HBL100, SIGNAL =   1; EXPRESSED IN BRAIN, SIGNAL = 1.5; EXPRESSED IN ADULT LIVER, SIGNAL = 1.3; EXPRESSED IN LUNG, SIGNAL = 1.4; EXPRESSED IN PLACENTA, SIGNAL = 1.1; EXPRESSED IN HEART, SIGNAL = 1.1; EXPRESSED IN HELA, SIGNAL = 1.5; EXPRESSED IN FETAL LIVER, SIGNAL = 1.2
gaagtctgatagttgacaatgctgataaattattgtttctaccatgtactgtaaaaatttgtaaaattttagtactttctttttgtaatttcttttggtaaaatgttagatttattcttaatcccaaaagtttattctatgatggtaatattcagctttggcttcagctttgacagagtattgatttttgataattggtaattcagtatttggtcaaaaaatatatatggggcatgtcttgtagccatgagtgtatagtggtattggtttgcccaggtgggcgctgttctccagcctggggatggttggagcaggtgttttgctgggtggtgtggtggaagggcagtggaatgaggaagctgaagatttggcaagactagtggaaatgatagctcttggtgcccagaaccatagtttcctgcctatcaggtttgtaagtgtcttgcctggcagggtaggtttgcctcccgagaagact

SEQ ID NO: 457 - DNA, 454 bp, Homo sapiens
  MAP TO AL049737.4; EXPRESSED IN BT474, SIGNAL = 1.5; EXPRESSED IN HBL100, SIGNAL = 1.8; EXPRESSED IN FETAL LIVER, SIGNAL = 1.5; EXPRESSED IN LUNG, SIGNAL = 1.4; EXPRESSED IN BRAIN, SIGNAL = 1.5; EXPRESSED IN PLACENTA, SIGNAL =   2; EXPRESSED IN HEART, SIGNAL = 1.5; EXPRESSED IN ADULT LIVER, SIGNAL = 1.5; EXPRESSED IN HELA, SIGNAL = 1.3; EXPRESSED IN BONE MARROW, SIGNAL = 1.8
ggtgctcaaattgttgttgctgtttaatttatagtacatttttagctctttatttctaatttttaaatgtacaccgtgtgtccctgcaggcacagctccaggagctctgcattcccatgcaggctcagccaccacacactggagcaagtgtcatgtggcctcctctgtgatcatgaccactcatggcctgagctggccacagggaagagcagctggccacacttcaggtttataagcggctttgaaagcaccaaacatgatgtctgactctccctgtcctgtgattcccagggcccagactgggatctacagagaggaagaagggacacaggcttccttattactctccttcattaattcattcactaaacaagtacttactgagtgcctaccagttgtcaagtatgatgttagtgttgcgaatccagaagggagcaaagcaggaaagttctgc

SEQ ID NO: 458 - DNA, 483 bp, Homo sapiens
  MAP TO AL049696.8; EXPRESSED IN FETAL LIVER, SIGNAL = 1.2; EXPRESSED IN HELA, SIGNAL = 2.3; EXPRESSED IN BRAIN, SIGNAL = 1.5; EXPRESSED IN HEART, SIGNAL = 1.5; EXPRESSED IN PLACENTA, SIGNAL = 1.6; EXPRESSED IN ADULT LIVER, SIGNAL = 1.2; EXPRESSED IN LUNG, SIGNAL = 1.7; EXPRESSED IN HBL100, SIGNAL = 1.8; EXPRESSED IN BONE MARROW, SIGNAL = 1.9; EXPRESSED IN BT474, SIGNAL = 1.3
tgagcattcctctttctccgcattcttctcagcatagctattgttactgctgttagtataatctgctctgaaaactaaaacatgtaagcttaagacaccatttattattaagttcaaaacctttatcccaatctatatttatatacaaatataaactgccacccctccagctgagcacataaacattcctattctatctgtgataatagccaagaaaaagttaagtctctacctagcacattgttctaaactaaatagtcgcaatcttcttttaaaactattttcttggtttcttcatggaataataaggcaggagactgtggtgactgatactacatccattataccaggggtccccaacccccaggccatggaccagtatggtccctgccctgttaggaacctggccactcagcaggaggtgagcagcaggcaagggagcattactgcctgagctctgcctcctgtcagagcagcagcagt

SEQ ID NO: 459 - DNA, 449 bp, Homo sapiens
  MAP TO AL049636.21; EXPRESSED IN BT474, SIGNAL =   4; EXPRESSED IN BONE MARROW, SIGNAL = 2.2; EXPRESSED IN HBL100, SIGNAL = 9.2; EXPRESSED IN HELA, SIGNAL = 3.1; EXPRESSED IN ADULT LIVER, SIGNAL = 3.8; EXPRESSED IN BRAIN, SIGNAL = 5.6; EXPRESSED IN PLACENTA, SIGNAL = 2.3; EXPRESSED IN FETAL LIVER, SIGNAL = 4.9; EXPRESSED IN LUNG, SIGNAL = 2.6; EXPRESSED IN HEART, SIGNAL = 3.6
aaactgagtgactctgcattttctgggttctaggtggttgcccttcattaggcaaatagaaaaaaattccctggaccagacgcttcaaagctgaagccccaagaccactgaagaatgccttgaagatactatttgcatcaaaatcacccatattcatgccctccttgtccaggtcctgtccactgtcctagcgagtctttttcttgggatcagagaagatggtaaaggcctctccaatttccttgaacttcccctcctccttctgaacctcagcactgcctccactgtgccaatctggatggtgcatcaaggcccatttgtgataagctttcttggtctcgtcctcagaggcattattgtccactcccagaatcttgtagtaatctttcttcttactcttcttcagtttcagctgtgcattttttaggagctgtttgtgttcttttgtt

SEQ ID NO: 460 - DNA, 441 bp, Homo sapiens
  MAP TO AL049595.5; EXPRESSED IN HEART, SIGNAL = 3.2; EXPRESSED IN BONE MARROW, SIGNAL = 3.5; EXPRESSED IN FETAL LIVER, SIGNAL = 4.3; EXPRESSED IN HELA, SIGNAL = 6.1; EXPRESSED IN ADULT LIVER, SIGNAL = 4.2; EXPRESSED IN BRAIN, SIGNAL = 3.1; EXPRESSED IN PLACENTA, SIGNAL = 3.4; EXPRESSED IN BT474, SIGNAL = 3.4; EXPRESSED IN HBL100, SIGNAL = 5.9; EXPRESSED IN LUNG, SIGNAL = 3.5
cgaggagagccatggaggaaccgggtgctcagtgcgctccaccgccgcccgcgggctccgagacctgggttcctcaagccaacttatcctctgctccctcccaaaactgcagcgccaaggactacatttaccaggactccatctccctaccctggaaagtactgctggttatgctattggcgctcatcaccttggccaccacgctctccaatgcctttgtgattgccacagtgtaccggacccggaaactgcacaccccggctaactacctgatcgcctctctggcggtcaccgacctgcttgtgtccatcctggtgatgcccatcagcaccatgtacactgtcaccggccgctggacactgggccaggtggtctgtgacttctggctgtcgtcggacatcacttgttgcactgcctccatcctgcacctctgtgtcatcg

SEQ ID NO: 461 - DNA, 460 bp, Homo sapiens
  MAP TO AL049575.7; EXPRESSED IN PLACENTA, SIGNAL = 1.1; EXPRESSED IN FETAL LIVER, SIGNAL = 1.4; EXPRESSED IN LUNG, SIGNAL = 1.6; EXPRESSED IN HELA, SIGNAL = 1.4; EXPRESSED IN BRAIN, SIGNAL = 1.5; EXPRESSED IN HEART, SIGNAL = 0.96; EXPRESSED IN BT474, SIGNAL = 1.3; EXPRESSED IN BONE MARROW, SIGNAL = 1.3; EXPRESSED IN ADULT LIVER, SIGNAL = 1.1; EXPRESSED IN HBL100, SIGNAL = 1.2
ggaatgccattttgttgaggatccagaaacacctagatgagggatgcctatgagatcctgggcattttgggatgcagtgtggtccatttcatcagaaaatgggattaagggattagctatgttctgacctaaagaggggtcggctggagctgtttggggaactaacagcactttgggggattgctctgctggctcagagatgatggaatgaggtgagtcaggagccaatgaagaggatggaggtagagggaggagtgggggaatgtctgaccttgggggatgctttgaaatggaggaagtccctgcccatactggctgggatggggggacagcactgaaggatgtccctgatgggactgtggacaacgaggggagcatgctggtgagaggcaaacctgacacatcggctgcttcttgtccccctttaggccccggttggaccagggactcggtagaatcc

SEQ ID NO: 462 - DNA, 491 bp, Homo sapiens
  MAP TO AL049575.7; EXPRESSED IN BT474, SIGNAL =   3; EXPRESSED IN BONE MARROW, SIGNAL =   2; EXPRESSED IN HBL100, SIGNAL = 1.7; EXPRESSED IN FETAL LIVER, SIGNAL = 2.1; EXPRESSED IN ADULT LIVER, SIGNAL = 1.5; EXPRESSED IN BRAIN, SIGNAL =   2; EXPRESSED IN PLACENTA, SIGNAL = 2.8; EXPRESSED IN HELA, SIGNAL = 1.7; EXPRESSED IN HEART, SIGNAL = 1.5; EXPRESSED IN LUNG, SIGNAL =   2
agaagaggtgtgttctgccgaaagggcgggccctctggaattctctggagctgctgacaaatgcagcgggttagcagagtcatttgcagtggcagaggctagctttctgctggtcatttctatggcccctgattctgcagtctggaaaagtggaggctcagcctcatgggtcgctgtttctgtattcttaaaagttggcaaagacaccccattgtgcactcttccaggcaccccagctttgatctgctgggtggatgcaggacctgaagccacttccaacattgaccatgaggggcttccatctggaagctgaagaagacttccaagtgctgggggagggggagacggatgggacagttctgccatggggctcaaaaacccaggtgtggatgaacctgctgaatggggaccctctgttggggacagctcggaatgccattttgttgaggatccagaaacacctagatgagggatgcctatgagatcctggg

SEQ ID NO: 463 - DNA, 493 bp, Homo sapiens
  MAP TO AL049575.7; EXPRESSED IN BRAIN, SIGNAL = 2.3; EXPRESSED IN BT474, SIGNAL = 1.4; EXPRESSED IN HBL100, SIGNAL = 1.5; EXPRESSED IN HELA, SIGNAL = 1.3; EXPRESSED IN ADULT LIVER, SIGNAL = 1.4; EXPRESSED IN PLACENTA, SIGNAL = 1.7; EXPRESSED IN BONE MARROW, SIGNAL = 2.1; EXPRESSED IN FETAL LIVER, SIGNAL = 1.6; EXPRESSED IN LUNG, SIGNAL = 1.6; EXPRESSED IN HEART, SIGNAL = 1.5
tatgcctcggtttcctcatctgtaaaataatagtacttcctccaagggcagctgtgagaattagagagctgctgtatataaaacacttggaagcactgatggccgaatgggcatcagataaccacaaaccatcaggtcctgagactaaaaggaaggatctccttcaaaatgaggacctgccctgatgtttctgcaggctctggcaatggcctcaaaaggcaagagggaaaggcaggctgagctcctgcaggcctgtcctcctgcccctctccccaccacttccatatacctttgctctctgcggcaggtttatcatggtgtcaggcttgaagtcgttcttgttcttcctgcagagcacggcagtgatgatgatgatgatgaccgtgaccacggcaatgggcgccagcactgcagcgatgatccacaggttattgggcgggttcttcaccacggctgtgggaaagagccagcaggagggacatgacaagcaaca

SEQ ID NO: 464 - DNA, 495 bp, Homo sapiens
  MAP TO AL049557.19; EXPRESSED IN PLACENTA, SIGNAL =   1; EXPRESSED IN BONE MARROW, SIGNAL = 1.9; EXPRESSED IN HBL100, SIGNAL = 1.3; EXPRESSED IN ADULT LIVER, SIGNAL = 0.97; EXPRESSED IN BRAIN, SIGNAL = 1.4; EXPRESSED IN HEART, SIGNAL = 1.5; EXPRESSED IN HELA, SIGNAL = 0.96; EXPRESSED IN BT474, SIGNAL = 1.1; EXPRESSED IN FETAL LIVER, SIGNAL = 1.6; EXPRESSED IN LUNG, SIGNAL = 1.4
gcacttgggcagtagttgtgtcataaatttgcaaataaaattatttaggatcaaaagatctgtttctaaaaaattatatacagctctaaatcacacaaaagcaaattaaagtggttaagaattcctttttaattctagtttactgtcattgtttctagtcacctcagttgctagaaacttgtgttatgtcttgttttctgtcaggatagcaagtaataaaaaatgttactcacttgtaattatgctgttttaaattgttgcagtatacattcaagaaatttatatatttataattgcatattttttaaatcataggagcaatttacagcaatgagggatttgtatatgaagaacggccaaggttttgcactagtatattctattacagctcagtccacgtttaacgacttacaggacctgagggaacagattttacgggttaaggacacggaagatgtaagtattttttctctctgtaagatgttatgccatctc

SEQ ID NO: 465 - DNA, 460 bp, Homo sapiens
  MAP TO AL049557.19; EXPRESSED IN BRAIN, SIGNAL = 1.2; EXPRESSED IN BONE MARROW, SIGNAL = 2.8; EXPRESSED IN ADULT LIVER, SIGNAL =  15; EXPRESSED IN PLACENTA, SIGNAL =  22; EXPRESSED IN BT474, SIGNAL =  56; EXPRESSED IN HBL100, SIGNAL =  21; EXPRESSED IN FETAL LIVER, SIGNAL =  11; EXPRESSED IN LUNG, SIGNAL = 5.6; EXPRESSED IN HELA, SIGNAL =  15; EXPRESSED IN HEART, SIGNAL = 1.3
tcagctctgtgagcgtcatcttagcctctccagcctcagcagactgcgtggtgaccactgtggtgccctcctcaatctgctgagaccagtacttgtctagctcctgtcgattctttcaagccagctcattgtattgggccgagatgtctgccatgatcttgctgtcctgagatttgggggcatctgcctccatggtcaacccagagctggcaatctgggcttgtaggccttttacttcccctttatggttcttcttcatgaagaacagctcttcgttgagagcctcgatctctggcttcagctgcagccaagtgacattgatgtcatcattgaccttgtggagtccgtggatgtcactctccacagactggcacatggccagctctgtctcatacttgactctaaagtcatcagtagcaagatgggcattgtcaatctgcagaacgatgtgggcattgtc

SEQ ID NO: 466 - DNA, 481 bp, Homo sapiens
  MAP TO AL049556.13; EXPRESSED IN BT474, SIGNAL = 2.1; EXPRESSED IN FETAL LIVER, SIGNAL = 1.6; EXPRESSED IN LUNG, SIGNAL =   2; EXPRESSED IN PLACENTA, SIGNAL = 2.4; EXPRESSED IN HELA, SIGNAL = 1.5; EXPRESSED IN HEART, SIGNAL = 1.7; EXPRESSED IN BRAIN, SIGNAL = 1.7; EXPRESSED IN ADULT LIVER, SIGNAL = 1.5; EXPRESSED IN HBL100, SIGNAL = 1.6; EXPRESSED IN BONE MARROW, SIGNAL = 2.7
gtttccgcttttgtgtcctcctcattctctctttgcctactgccatccatgtaagacaggacttgctcctccttgccttagccatgattgtgaggcttccccagccacatggaactgtaagctcaattaaacttctttgttttgtaaattgcccactcttgggtatgtctttattagcagcgtgaaaacagactaatccaatttccagtttcatttccacaatgagtttggggctcagtctggatgtaatatggtttgctaaagaaatatgctactctgtgggaagtttggagctcataccggttttccctgattcgtttttctcttcctcttcttctctctcatcttcctctttttcctccctgtcttcctcctctttcttatctgcttccctctcttcctcttcttcctccttttctaaatgtccttctcaaatggacattaggtttcatacactctcctacctctacttcctttttca

SEQ ID NO: 467 - DNA, 464 bp, Homo sapiens
  MAP TO AL035697.18; EXPRESSED IN HBL100, SIGNAL = 2.1; EXPRESSED IN FETAL LIVER, SIGNAL = 2.4; EXPRESSED IN LUNG, SIGNAL = 1.5; EXPRESSED IN ADULT LIVER, SIGNAL = 2.1; EXPRESSED IN PLACENTA, SIGNAL = 2.3; EXPRESSED IN BONE MARROW, SIGNAL = 3.1; EXPRESSED IN HEART, SIGNAL = 1.6; EXPRESSED IN BT474, SIGNAL = 2.4; EXPRESSED IN HELA, SIGNAL = 1.7; EXPRESSED IN BRAIN, SIGNAL = 1.5
tggaaaccacagaagaactggaaatacaagtggagcctgaagatgtgactcaattgcagcaatctcatgataaaacatgaactgatcaggagttgcttcttatggatgcgcaaagattttttttttttaagttggaatctacttctggtgaagacactgggaacattgttgaaatgacaataaaggattttgaaaattacataaacttagttgatcaagcagtagctttgagaaagtttgagaggatcgactccaattttgaaagttgttctactgtgggtaaaatgctatcaaacagcatcacatgctacagagacatctttcatgaaaaaagagtccagtgatgtggcaaacatcaccgttgtcttagaaattgccacagccacgtcaagcttcagcagccgcaaccctgatcagtcagcagccatcaacatgaaggtaagaccctctcccagcaaaaagat

SEQ ID NO: 468 - DNA, 487 bp, Homo sapiens
  MAP TO AL035697.18; EXPRESSED IN BT474, SIGNAL = 2.4; EXPRESSED IN BONE MARROW, SIGNAL =   3; EXPRESSED IN FETAL LIVER, SIGNAL = 3.2; EXPRESSED IN HELA, SIGNAL = 3.4; EXPRESSED IN ADULT LIVER, SIGNAL = 4.5; EXPRESSED IN HEART, SIGNAL = 2.3; EXPRESSED IN PLACENTA, SIGNAL = 4.3; EXPRESSED IN HBL100, SIGNAL = 2.8; EXPRESSED IN LUNG, SIGNAL = 3.5; EXPRESSED IN BRAIN, SIGNAL =   4
tcttacatcttttacacatttcaaaacatcaaatatgtttgttgtagcttgttcttacctctattctgcctaagcaaatgatatttcatctcttaatgtgaaaataagatttttgagttgacacattcattcattttctaaaaggtgtgtgtgtgtgtgtgtgtgtatgtgtgtgtgagtagggttctgtgtgagatggacgggtgaagccataaggatatatagtataaagccatcctttataaaacaggacaacaaatcttacactaaaaatttgctctgtagagttgcaagcctcagaaagtttaggagtgtcacctgtcctgttcctgggcctggagatgagggtccacctctcccaggtcctgaggactttcctcctggagcctagcctgccagtgagtaggctgctctgatctcttctccctgcactccaacatcttgctttcagctttgccctctaaatactggaataaaagggccaaca

SEQ ID NO: 469 - DNA, 462 bp, Homo sapiens
  MAP TO AL035696.14; EXPRESSED IN FETAL LIVER, SIGNAL = 1.2; EXPRESSED IN HELA, SIGNAL = 1.5; EXPRESSED IN BRAIN, SIGNAL = 1.5; EXPRESSED IN HEART, SIGNAL = 1.2; EXPRESSED IN BT474, SIGNAL = 1.4; EXPRESSED IN BONE MARROW, SIGNAL = 1.2; EXPRESSED IN PLACENTA, SIGNAL = 1.4; EXPRESSED IN ADULT LIVER, SIGNAL = 1.2; EXPRESSED IN LUNG, SIGNAL = 4.4; EXPRESSED IN HBL100, SIGNAL = 1.1
aacaaggggacacaggtcagcccaggcagttatttaaattatgtagatcagaaagaagcctggctgttcgcttgacttctcagttttttagtctgcagtggcaggtttggcagaccactggtctcgggagattgttgtagcatcaggaagagcatgcagtgtcccctctgccaagaccaatcttggccaacagtgggaataagaagtgatgaccagtgcctggtttactggcgggctgccatgaaagaaggatcctcccagcaatcattgcaattccccaaagtgcaaacttggtcaagtagccagaaggtgtgaaaggcacctttgcttgccagcctgtggcagccagcttagatctcactatgagcttctgctgtggcacaggctggcaggctgctcctgtactgactcaaggaaccatgacgaccttctgactcaccggcacctcttcctgctgcttct

SEQ ID NO: 470 - DNA, 449 bp, Homo sapiens
  MAP TO AL035696.14; EXPRESSED IN BONE MARROW, SIGNAL = 3.5; EXPRESSED IN ADULT LIVER, SIGNAL = 2.3; EXPRESSED IN HEART, SIGNAL = 2.1; EXPRESSED IN LUNG, SIGNAL = 2.8; EXPRESSED IN HELA, SIGNAL = 3.5; EXPRESSED IN PLACENTA, SIGNAL = 2.7; EXPRESSED IN BT474, SIGNAL = 2.8; EXPRESSED IN HBL100, SIGNAL = 5.1; EXPRESSED IN FETAL LIVER, SIGNAL = 2.9; EXPRESSED IN BRAIN, SIGNAL = 1.8
ttagcaatggaaggtcattggccaaagggtgacctcaaggtcagaggttgttgtctgtacaagtaccgtctgcagcagcctcagacagaggccatttctgcttggacacctgcagcccttggtggcccagagatgctgccttgaagtgaaaatgcaaagcgatttgaagtccccagaagacagaggggtgctggcctcacttggctcataatgaagccccggattgcgtgctggggctggagaagccacaggagctgttgccgctggggcctgggcagagggcagcaggaaggtacagggctgtccctgcatgaggaactcaccgagacctgtacttgtgtgacggatggttcatacaagtattgaaggtccacatcaccagcatcggccagctcaaagaccagcatgggtggaggaccagcctccagccagtcagctccaggagacac

SEQ ID NO: 471 - DNA, 469 bp, Homo sapiens
  MAP TO AL035687.13; EXPRESSED IN PLACENTA, SIGNAL =  50; EXPRESSED IN BT474, SIGNAL =  81; EXPRESSED IN BONE MARROW, SIGNAL =  83; EXPRESSED IN LUNG, SIGNAL =  57; EXPRESSED IN ADULT LIVER, SIGNAL =  35; EXPRESSED IN BRAIN, SIGNAL =  16; EXPRESSED IN HBL100, SIGNAL = 1.3e+02; EXPRESSED IN FETAL LIVER, SIGNAL =  84; EXPRESSED IN HELA, SIGNAL =  79; EXPRESSED IN HEART, SIGNAL =  14
gcccttctatctgcctctccaagatgtctacaaaattggttgtattgatattgtccctgtgggcctagtggagacatgttctcaagcccagcatggtggtcatctttgctccagtcaatgttacaactgaagtaaagtctgctaaaatgcaacatgaatcttttgagtgaagccttttctggggacaatatgggcttcaatgtcaaaaatgtgtctgtcaaagatatttgttgtgacaatgttgctggtggcagcaaaaatgacctgcaaatggaagcagctggattcactgctcaggtgattatcctgaacaagccagaccaaatcactggtggctatgtccctgtactggattgccacacagctcacattgtttgcacgtctgctgagctgaaggaaaagattgaatactattctggtaataagctggaagatggccctaaattcttgaaatctgatgatgctgcca

SEQ ID NO: 472 - DNA, 487 bp, Homo sapiens
  MAP TO AL035686.11; EXPRESSED IN BT474, SIGNAL = 1.1; EXPRESSED IN BONE MARROW, SIGNAL = 1.5; EXPRESSED IN LUNG, SIGNAL = 1.6; EXPRESSED IN HELA, SIGNAL = 0.93; EXPRESSED IN ADULT LIVER, SIGNAL = 1.3; EXPRESSED IN BRAIN, SIGNAL = 1.4; EXPRESSED IN PLACENTA, SIGNAL = 1.9; EXPRESSED IN HBL100, SIGNAL = 1.1; EXPRESSED IN FETAL LIVER, SIGNAL = 1.2; EXPRESSED IN HEART, SIGNAL = 1.4
aaactcagcacagacacccccatttaaggcagcaggtcgccctcctcttgcatggaaaactcaagtctccctcttggcagccacacaaaggcagctcaagaggaaaaagtaagagagaagggaactcaaaaggttaaaaaaaaaggctggagtaacatgagagaatagatagaaagaggtagaatacaggaaaaacttcccagttacctcccaaccagtcacatcaaatttggcaggaaaacaatgggtcatcccaatggctttgccaatgaagagcacatttcacccattcatccctaggttctgagagccagatcagtccctctttctccgtggtcatgcagaggttttgcagtttcctgaatgtcacatacctgtgccaggagagcgaggtacacgatttggtctccaacttcaacctgagcgtgggggaggaggtaggagagtgtcctttatcatattcaataggcttctggtagaacagcaa

SEQ ID NO: 473 - DNA, 472 bp, Homo sapiens
  MAP TO AL035686.11; EXPRESSED IN HBL100, SIGNAL = 1.6; EXPRESSED IN FETAL LIVER, SIGNAL = 1.7; EXPRESSED IN BRAIN, SIGNAL = 1.9; EXPRESSED IN BT474, SIGNAL = 2.7; EXPRESSED IN BONE MARROW, SIGNAL = 2.1; EXPRESSED IN HELA, SIGNAL = 1.8; EXPRESSED IN ADULT LIVER, SIGNAL =   2; EXPRESSED IN PLACENTA, SIGNAL = 1.9; EXPRESSED IN LUNG, SIGNAL = 1.9; EXPRESSED IN HEART, SIGNAL = 1.6
tgaagtgtgcctcatcaactgactcttcctttcatgaaagatttctctatagcatgcaatgctatctgacagtattttacccacagtagaatttctttcattattggaatcaatcctctcaaaccctcctgctgctttctcactaagtttatgtaatatttaaaaccttttttgtcatttcatcaatgttcatggcatcttcaccaggaatagattccatctcaagaaaccactttctttgctccgccataaggagcaagtcctatctgttcaagttttctcatgagattgcagcaattcagtcacatcttcaggctccactaattctgtttggtttgccacttccaccatgtctgacgtaatttcctccactgaagtcttacactcctctaagtcatccctaagggttggaatcaacgtcttcctaactcctgttactgttgatattttgacctcctcccataaatcatga

SEQ ID NO: 474 - DNA, 447 bp, Homo sapiens
  MAP TO AL035686.11; EXPRESSED IN PLACENTA, SIGNAL = 2.8; EXPRESSED IN FETAL LIVER, SIGNAL = 1.8; EXPRESSED IN LUNG, SIGNAL = 2.5; EXPRESSED IN HELA, SIGNAL =   1; EXPRESSED IN BT474, SIGNAL = 1.1; EXPRESSED IN BONE MARROW, SIGNAL = 2.2; EXPRESSED IN HBL100, SIGNAL = 1.9; EXPRESSED IN ADULT LIVER, SIGNAL = 2.3; EXPRESSED IN BRAIN, SIGNAL = 1.8; EXPRESSED IN HEART, SIGNAL =   2
cactcatttccagcatcagcaccaatcaacacagtggtcacatcctcagagcccctcctccaaccccaaccctgacaagggagctggtattgttatatcctgtgtttcactgcaggcctggagatagtagaagtccactctgtctttattaagattagtatttgactgcaaggatagaaaacccaaaataacagtgggtgatgtttcctaagtctggcactgggaggcccaagttgacatggtggacagaggggcagggttccaggctccctctgccttgttgcttccccatgtacagctcccatccctatgatcacctcatggtccaaaattactgctggagtaccagacattataacgacattccagccatcaggaaggaagagccagagacataaaagcacccaccacctccttttgaatatatttcccggaagctgtcacttc

SEQ ID NO: 475 - DNA, 462 bp, Homo sapiens
  MAP TO AL035610.2; EXPRESSED IN FETAL LIVER, SIGNAL = 2.6; EXPRESSED IN LUNG, SIGNAL = 3.3; EXPRESSED IN HELA, SIGNAL =   3; EXPRESSED IN PLACENTA, SIGNAL = 4.1; EXPRESSED IN BT474, SIGNAL = 4.4; EXPRESSED IN BONE MARROW, SIGNAL = 2.7; EXPRESSED IN HBL100, SIGNAL = 2.9; EXPRESSED IN ADULT LIVER, SIGNAL = 2.1; EXPRESSED IN BRAIN, SIGNAL = 2.6; EXPRESSED IN HEART, SIGNAL = 2.3
tgatttatcttaatagtccgggtcaatcaacccagccaacgctgtaactcccttcttagcctgttgactcaaaggtagcaagagcccaaagtgtccaggtggcaatcttaacttccaaattaatggaattgttgttgtgtctcctggtggcagcgttcctccctccggaactaagacctctaggccagcagaacgtaatgtcacaggaacaggaagcaaaaattttgctagtgaatcactaggggtgatggtgagtggtgccgcttccacgtccccccccgattgctggacccatgaaacctggatatataggagaaacaccaccatatattggacactgattcagagcaaactcagtcttcaggagaactttgcccagccctgcaaagtattgtcactagttggaattgtaattgtgatttcaaaaggccattccaccattctctcaatgctgcttcagga

SEQ ID NO: 476 - DNA, 470 bp, Homo sapiens
  MAP TO AL035610.2; EXPRESSED IN BT474, SIGNAL = 5.2; EXPRESSED IN FETAL LIVER, SIGNAL = 5.1; EXPRESSED IN HELA, SIGNAL = 7.2; EXPRESSED IN PLACENTA, SIGNAL = 5.9; EXPRESSED IN BONE MARROW, SIGNAL = 6.8; EXPRESSED IN HBL100, SIGNAL = 5.4; EXPRESSED IN LUNG, SIGNAL = 6.8; EXPRESSED IN ADULT LIVER, SIGNAL = 5.7; EXPRESSED IN BRAIN, SIGNAL = 9.3; EXPRESSED IN HEART, SIGNAL =   7
ggcctgggcaatatagtgagaacttgtctctgcaacaaattaaataattaactgtgatggttagtattgagtgtcaacttgattggattgaaggatgcaaagtattgtttctgggtgtgtctgtgcaggtgttgccaaaggagattattatttgagtcagaggactgggagaagcagacctaccctcgatctgggtgggtgtcatctagtcagctgccagtgtggctagaatgaagcaggcagaagttggaaagagcagacctgctgagtcttctggccctcaccgttctcccgtgctggattcttctggccctcaaacatcagactccacgttcttcagcttttggactcatggacttacaccagtggtgtgccagggcctcttgagcctttggtcacagactgaaggctacactgtcagcttctctaattttgaggttttgggactcagactgatccaccactggctt

SEQ ID NO: 477 - DNA, 484 bp, Homo sapiens
  MAP TO AL035610.2; EXPRESSED IN ADULT LIVER, SIGNAL = 2.6; EXPRESSED IN BRAIN, SIGNAL = 2.8; EXPRESSED IN BT474, SIGNAL = 2.1; EXPRESSED IN PLACENTA, SIGNAL = 2.3; EXPRESSED IN HEART, SIGNAL = 2.1; EXPRESSED IN HELA, SIGNAL =   3; EXPRESSED IN LUNG, SIGNAL = 2.7; EXPRESSED IN FETAL LIVER, SIGNAL = 2.3; EXPRESSED IN HBL100, SIGNAL = 2.3; EXPRESSED IN BONE MARROW, SIGNAL = 2.1
ccagaggttgctctcacaggttgttatgtgcctgcagcttttccacagcaagggtgcaaactgccagtggatctacccagtctggaggatggtgaccttcttccacagctcaaccaatgagaactctgtctgtgggatctgacccacattttccctctgtactaccctggtagaagttttccatgaggactctgccacttcagcaggcttctgcctggacacctaggcttttctatacatcctaggaaatgtatgcagaggttcccaagcctcaaacactcttgcattctgtgcacctacaaagtaaacaccatgtagaagccaccaacacttatggcttgcaccctctggtgctgtggcctaagctgttcctggactactttgagccactgctggagctgaagctgacaggatacagggagccatgtcctaaggctgtgcagggcagcagggccctgggcatggcccacaaaaccattctctc

SEQ ID NO: 478 - DNA, 410 bp, Homo sapiens
  MAP TO AL035470.7; EXPRESSED IN BT474, SIGNAL = 4.3; EXPRESSED IN BONE MARROW, SIGNAL = 4.7; EXPRESSED IN HBL100, SIGNAL = 8.2; EXPRESSED IN ADULT LIVER, SIGNAL = 2.7; EXPRESSED IN PLACENTA, SIGNAL =   3; EXPRESSED IN FETAL LIVER, SIGNAL = 4.4; EXPRESSED IN LUNG, SIGNAL = 3.8; EXPRESSED IN HELA, SIGNAL = 3.2; EXPRESSED IN BRAIN, SIGNAL = 2.6; EXPRESSED IN HEART, SIGNAL = 2.9
ggaaagcattttctgcatcctgctggttgtggaagtgttttccctgcataaagttgttgagatgtttgaagaacaggtagtcggttggcaagaggtcaggtgaatatgtcggatgaggcaaaacttcgtagcccaattcattcaacttttgaagcactggttgtttgatgtgcggttgggcattatcatgagaatttggccttttctgttgaccaatgtcggctgcaggcattgcagttttcggtgcatctaattgatttactgagcatacttcttagatgtgatggttttgctgggattccgaaagctgtagtggatcagactggcagcaggccaccaaacagtgcccatgatcttcttttggtgcaagaagctttggagtttctttttggtccaatcactgagctggt

SEQ ID NO: 479 - DNA, 469 bp, Homo sapiens
  MAP TO AL035470.7; EXPRESSED IN LUNG, SIGNAL = 2.3; EXPRESSED IN ADULT LIVER, SIGNAL = 2.1; EXPRESSED IN BRAIN, SIGNAL = 2.7; EXPRESSED IN PLACENTA, SIGNAL = 1.1; EXPRESSED IN BT474, SIGNAL = 2.4; EXPRESSED IN HEART, SIGNAL = 1.3; EXPRESSED IN FETAL LIVER, SIGNAL = 2.7; EXPRESSED IN HELA, SIGNAL = 2.9; EXPRESSED IN HBL100, SIGNAL = 3.6; EXPRESSED IN BONE MARROW, SIGNAL = 1.4
aaatggagaaagtacccttttgcagtatagtccttttcttactactggggtattaggttagtgcaaaagtaattgtggttttggaccatgaattttaaatcattataactaggctcaaatacatctttattaatcaaaatcagaaccattataatcaacacatttttgccaatgataaataagtttgtttattctggtagtataaaaatctgtagtggaaagcattttctgcatcctgctggttgtggaagtgttttccctgcataaagttgttgagatgtttgaagaacaggtagtcggttggcaagaggtcaggtgaatatgtcggatgaggcaaaacttcgtagcccaattcattcaacttttgaagcactggttgtttgatgtgcggttgggcattatcatgagaatttggccttttctgttgaccaatgtcggctgcaggcattgcagttttcggtgcatctaa

SEQ ID NO: 480 - DNA, 465 bp, Homo sapiens
  MAP TO AL035417.15; EXPRESSED IN HELA, SIGNAL = 7.4; EXPRESSED IN BT474, SIGNAL =  10; EXPRESSED IN HBL100, SIGNAL = 8.8; EXPRESSED IN FETAL LIVER, SIGNAL = 9.4; EXPRESSED IN LUNG, SIGNAL = 9.4; EXPRESSED IN BRAIN, SIGNAL =  10; EXPRESSED IN PLACENTA, SIGNAL =  12; EXPRESSED IN BONE MARROW, SIGNAL =  13; EXPRESSED IN ADULT LIVER, SIGNAL = 6.3; EXPRESSED IN HEART, SIGNAL = 7.5
gaagaaggaggggaggagaggcccataggaattgggggttgggagaatgagcccctttctactgtggtcaggagggctctcctaaccagaaggatgatatggaaatggcagatctccagggtcaggacaaactgcttaggaaataagccccagatcttcccctcttcatccacctacaagtcttgtagcttatgtttccaccttacctaagtatgctagcttctccctgctttaggcccactgccttgggtgcaggacagggttgtgagaatggtctctcattcccacccagttctttaccagcttggatgactcagattgtgtactggcctcctagagcaccatggcttgctttggggcaaatatcattagcactgccacctgctcctattgctctattgaagccttccatcccttcagcttcccttctcttactagctacagtggtatgttcaggacgagcct

SEQ ID NO: 481 - DNA, 465 bp, Homo sapiens
  MAP TO AL035400.13; EXPRESSED IN BONE MARROW, SIGNAL = 4.8; EXPRESSED IN ADULT LIVER, SIGNAL =  16; EXPRESSED IN BRAIN, SIGNAL = 7.2; EXPRESSED IN PLACENTA, SIGNAL = 5.9; EXPRESSED IN BT474, SIGNAL =  10; EXPRESSED IN HBL100, SIGNAL =  19; EXPRESSED IN FETAL LIVER, SIGNAL = 8.1; EXPRESSED IN LUNG, SIGNAL =   6; EXPRESSED IN HELA, SIGNAL = 6.3; EXPRESSED IN HEART, SIGNAL =   7
acggaccaatcagctctctgtaaagtggaccaatcggctctctgtaaaatggaccaatcagcaggatatgggtggggccagataagagaataaaagcaggctgcccgagccaacagtggcaacctgctggcatccgtttccacggtgtggaagctgtgttctttcgttccttgcaacaaatcttgctgctggtcactttttgggtccacactgcctttatcagctgtaacactctccgtgaaggtctagcttcactcctgaagccagggagaccacgaacctacggggaggaacgaagaactccagacgcgccgccttaagagttgtaacattcaccgcaaaggtctgcagcttcactcctgaagccatccagaccacgaacccaccagaaggaagaaactccggacaccctccgtttaagaactgtaacactcactgcgagggtctgtggcttcgttcttgaag

SEQ ID NO: 482 - DNA, 459 bp, Homo sapiens
  MAP TO AL035086.12; EXPRESSED IN BT474, SIGNAL = 1.5; EXPRESSED IN LUNG, SIGNAL = 2.2; EXPRESSED IN HELA, SIGNAL = 1.4; EXPRESSED IN BRAIN, SIGNAL = 1.3; EXPRESSED IN PLACENTA, SIGNAL = 2.6; EXPRESSED IN BONE MARROW, SIGNAL = 1.5; EXPRESSED IN HBL100, SIGNAL = 1.3; EXPRESSED IN FETAL LIVER, SIGNAL =   2; EXPRESSED IN ADULT LIVER, SIGNAL = 1.6; EXPRESSED IN HEART, SIGNAL = 1.4
aatgaccatgtggccagaacgctctcaaaaagccacatggtacacagcactcatcattacacaaaggggccttgcggagaggccagggcccggctgctacctggactgtgtgctgcagcttgggattcttgtagtggaagacgctgaagctgagcggctcttttggaatcacctccacaagcatgaggttgccacactagagcagagagagcagagagggtgaggcacactcaggagggaacagaactggggatctgagtccctgcccatggccagcgtgcagacctaccaggatgtgagctttgtatgtaaacgtgtcatctctcttcttcgtgatgagcagcagcttgtcgaagaggaagagcgtccgctcattcttggctcgctggatgcggaaggttccctcaagcaccagttccccgtagctggtcaggtctggccccttccagttagtgagca

SEQ ID NO: 483 - DNA, 498 bp, Homo sapiens
  MAP TO AL035086.12; EXPRESSED IN BT474, SIGNAL =  13; EXPRESSED IN BONE MARROW, SIGNAL =  23; EXPRESSED IN HBL100, SIGNAL =  19; EXPRESSED IN HELA, SIGNAL =  17; EXPRESSED IN ADULT LIVER, SIGNAL =  13; EXPRESSED IN BRAIN, SIGNAL =  17; EXPRESSED IN PLACENTA, SIGNAL =  19; EXPRESSED IN LUNG, SIGNAL =  23; EXPRESSED IN HEART, SIGNAL =  13; EXPRESSED IN FETAL LIVER, SIGNAL =  21
ctcggctcacagtaacctccacctcccaggttcaaatgattcttgtatctctctcccatttcactgtgcattattcagtgtcctaccttagctggaatcttggctgcatggttctccagaatcagtctctttaggtgcagaacccagaggcgtttgtcttgctgggatttggcctgccaagacgagatgtagacagtcagacaacttgattccaccacccacaggaccctctgatgagatgggaaatgaccatgtggccagaacgctctcaaaaagccacatggtacacagcactcatcattacacaaaggggccttgcggagaggccagggcccggctgctacctggactgtgtgctgcagcttgggattcttgtagtggaagacgctgaagctgagcggctcttttggaatcacctccacaagcatgaggttgccacactagagcagagagagcagagagggtgaggcacactcaggagggaacagaactggggat

SEQ ID NO: 484 - DNA, 468 bp, Homo sapiens
  MAP TO AL035086.12; EXPRESSED IN PLACENTA, SIGNAL = 0.98; EXPRESSED IN LUNG, SIGNAL = 1.1; EXPRESSED IN HELA, SIGNAL = 1.5; EXPRESSED IN ADULT LIVER, SIGNAL = 1.1; EXPRESSED IN BT474, SIGNAL =   2; EXPRESSED IN BONE MARROW, SIGNAL = 1.7; EXPRESSED IN HBL100, SIGNAL = 1.2; EXPRESSED IN FETAL LIVER, SIGNAL = 1.1; EXPRESSED IN BRAIN, SIGNAL = 1.7; EXPRESSED IN HEART, SIGNAL = 1.4
ggaatttctttggggcaaggcttccccttaggcctagattttaatcatctttgataagaagggtcctgcaaataatttacctgtggcctgagtgacattccacttaccctgtgataagtaaatccactggtggcactgacagtaggtacttctaccaaccaattttgggttgtaggcattaagcatcctggtgccctccccaggcaaataggaggataacaatacccagtggaaataatcatcatcattccttcttccttgggttgggcagggcaacgatcatccgtggggccaggtacccatgcactattattaacatatacttcaatagaattatccacccatgtaactgcccgaattaagggcaggaaaggcacataggcccagtaagcataattagctgcagctgctcctgcagacatgggaagacttatcaccgttgatacaatcatcaaagctgcaagcagc

SEQ ID NO: 485 - DNA, 490 bp, Homo sapiens
  MAP TO AL035086.12; EXPRESSED IN LUNG, SIGNAL = 4.9; EXPRESSED IN HELA, SIGNAL = 2.8; EXPRESSED IN ADULT LIVER, SIGNAL = 5.8; EXPRESSED IN PLACENTA, SIGNAL = 4.3; EXPRESSED IN BT474, SIGNAL = 3.5; EXPRESSED IN BONE MARROW, SIGNAL = 3.9; EXPRESSED IN HBL100, SIGNAL = 3.1; EXPRESSED IN FETAL LIVER, SIGNAL =   6; EXPRESSED IN BRAIN, SIGNAL = 3.5; EXPRESSED IN HEART, SIGNAL = 2.6
aaaccgctctcccctcttactttggagaaggaagaagggcagggtgcacataccaatggcgggccctccttgcttcttctcttccaagatggcagccaggtctttgtgcatggatttctgatgctgactggccggcggctgctccagctccagacttttcacttttaaaagttgattcgccttcttaatcttctgactgtactgccgagccatcataaacaccctgctttttgtcttatctgtggcctccatccccaggtcagggttttctgggtctgtttgagacaggccactgttggccaggtcgtagggattgtccatgaggggcatttcactagccagagaaagccggttaaggctcataaaggagccttctttagaaatcaggtcttcctcaaaggggcagttggcgcggctggctctgccagccctgctcttcacgggcgtgaggagagcctggctctcaggcagggacagcgtggacacagag

SEQ ID NO: 486 - DNA, 470 bp, Homo sapiens
  MAP TO AL034420.16; EXPRESSED IN PLACENTA, SIGNAL = 1.8; EXPRESSED IN FETAL LIVER, SIGNAL = 1.5; EXPRESSED IN LUNG, SIGNAL = 1.3; EXPRESSED IN HEART, SIGNAL = 0.92; EXPRESSED IN HBL100, SIGNAL = 1.1; EXPRESSED IN BRAIN, SIGNAL = 1.2; EXPRESSED IN BT474, SIGNAL =   1; EXPRESSED IN BONE MARROW, SIGNAL = 1.4; EXPRESSED IN HELA, SIGNAL = 0.83; EXPRESSED IN ADULT LIVER, SIGNAL =   6
taagccagcgtgtgtactgggtgtagcacatgtccagaagcaggaaaccctcactgtcctctataagctgctgttctgtcaggaacattgtgacagcactgctgctgatattatcgttttcatatcccagaatgggaatggtttcttgccatcctcagacagagttgcctcatcttgatgacagtggtaggatgagtaataattatctaccattgtctaacttagatatcaagcactttgcaccaattcttattgggtgctcaaagaaacctcaggaggaatatgctatcagtataactccctttttatagctaaggccacaaaggctctgagtggcgaagtggtccatgagggtctcagagcagtaatggggaagaatgagattttgaatcctaaagcactagaggaaatgttcttcaactatgcctcagaggtgtcctagaaaatcagaccggaagagtattcaccaa

SEQ ID NO: 487 - DNA, 464 bp, Homo sapiens
  MAP TO AL034420.16; EXPRESSED IN BRAIN, SIGNAL =   2; EXPRESSED IN BONE MARROW, SIGNAL = 1.8; EXPRESSED IN PLACENTA, SIGNAL = 1.8; EXPRESSED IN BT474, SIGNAL = 1.7; EXPRESSED IN HEART, SIGNAL = 1.6; EXPRESSED IN ADULT LIVER, SIGNAL = 1.6; EXPRESSED IN HELA, SIGNAL = 1.9; EXPRESSED IN LUNG, SIGNAL = 1.8; EXPRESSED IN FETAL LIVER, SIGNAL = 2.1; EXPRESSED IN HBL100, SIGNAL = 1.8
agacagaccttggcttccagctttctggctgagcaaagccacagctgcagaaacctgctgagacatgtggctgcccaaggtcttcagagtgtcggcccctgccccgcttgagtggagggcgtgggaggcccacatgttcacctggatgcggatctgctcggtgagctggatctgctgtagctgctgctgctgcagacacaagatctgctcgaggacccacgggatgctgttggcaccaggcacgggggcagggagtgcatccgcgctccgctgattcaccgccaccttggtgccccgtagtgcctgcaaggtcacattagtgttggccactttgcctttggctaaatagcttatgtcctggggggtgggtggcagggctgtctctgtctttaggtacaccacagactccgcatccggcttctccttcatgtcctctgagctgccgccattctccctgtgacagt

SEQ ID NO: 488 - DNA, 466 bp, Homo sapiens
  MAP TO AL034406.1; EXPRESSED IN BT474, SIGNAL = 8.8; EXPRESSED IN BONE MARROW, SIGNAL = 1.3; EXPRESSED IN FETAL LIVER, SIGNAL = 2.6; EXPRESSED IN LUNG, SIGNAL = 1.8; EXPRESSED IN HELA, SIGNAL = 3.4; EXPRESSED IN ADULT LIVER, SIGNAL = 2.4; EXPRESSED IN BRAIN, SIGNAL =   1; EXPRESSED IN HEART, SIGNAL = 1.5; EXPRESSED IN PLACENTA, SIGNAL = 4.5; EXPRESSED IN HBL100, SIGNAL = 2.6
tgaggtgatgctgagtggaccagtctttgtcaggcagagagcacaatggctaacattataggaattataatacaattctaccacagcaaaacagtgaagataactaaatgtttccaaaatgagattatgacttgtaactgttttctaatttcagtgtacaaatgttagcaatagagctaatcatccctcttgagtatctttataaccaaagtagacttattattctctcctccatcctcatcccacctctctcctgccccacaatagaacagtaagagtcattggtctgggattctggaagacactcacctgtgttagaattaagatcatcaggctctgattcggtcccattttggcttccatttccctgaagagtgttcatagccataagcttcatcttctgaagtttcatcgcctcagccatcgctgcagctgttatacctaaaagcagaattattccattcca

SEQ ID NO: 489 - DNA, 452 bp, Homo sapiens
  MAP TO AL033397.7; EXPRESSED IN BT474, SIGNAL = 1.7; EXPRESSED IN BONE MARROW, SIGNAL = 3.1; EXPRESSED IN HBL100, SIGNAL = 1.4; EXPRESSED IN FETAL LIVER, SIGNAL = 5.2; EXPRESSED IN LUNG, SIGNAL = 1.2; EXPRESSED IN HELA, SIGNAL = 1.4; EXPRESSED IN ADULT LIVER, SIGNAL = 2.4; EXPRESSED IN BRAIN, SIGNAL = 2.3; EXPRESSED IN PLACENTA, SIGNAL = 1.2; EXPRESSED IN HEART, SIGNAL = 1.4
tgtgaaactgtgcatgaatacagcattattttaaaagactactttaagaaattgaacattctaagattataccatgctgtctatattatgagattaagaaaaatagatatcataccagatgctctcttcttaattagctttaggtagttcagaatactacatctggtgtccacatccacttccatgttttcaaggtaagagttcagaattgggatcagtccaggaaacacaccttcctacaagaagcaggacactttatgaactccctgccgggggatgtgcacagtgaggggtactgtacagggccaccctcctaccttcccattgatgatggtgtctatgctcatgagggtgtactcctctgcagcgagctccgtgctgttctgggccttgccacaaccatccaccactgcattgccacctgccggagaagagggtcaggggagctttag

SEQ ID NO: 490 - DNA, 475 bp, Homo sapiens
  MAP TO AL031770.12; EXPRESSED IN ADULT LIVER, SIGNAL = 1.2; EXPRESSED IN BRAIN, SIGNAL = 1.5; EXPRESSED IN BONE MARROW, SIGNAL = 1.7; EXPRESSED IN HBL100, SIGNAL = 1.3; EXPRESSED IN LUNG, SIGNAL = 1.6; EXPRESSED IN HELA, SIGNAL = 1.7; EXPRESSED IN PLACENTA, SIGNAL = 1.8; EXPRESSED IN BT474, SIGNAL = 1.6; EXPRESSED IN FETAL LIVER, SIGNAL = 1.3; EXPRESSED IN HEART, SIGNAL = 1.5
ggcacagagcaggactcaacatacacctgacgagacgatgtgcagactgatagttaccaaagaccaatgtcacctcctcggcatcacgctgcctgccccgaaacgtcaacgctgtccaccaatcgcaaaaacagacatgataaaagagttgtcccttttcattagtacaatgctaaccagtggccaaaaaaaccacaaaacaagcaaaagacaataataagagataccaagtaaattaggtagtcagtgccttcatcattaaacattcccagaatgcatcaaaatgacatgaaggaatcacacaacacattggaagagaaatccttgcctttcagatctttcacgtagccctctttgcaactgtgcatgagctgaaggatccacttgtgttgggctccaatgcattgccaagcagggtcaccagacgcatgaaggtcagacaggtacctgaaaaagcaagtccaaggttgaggcc

SEQ ID NO: 491 - DNA, 473 bp, Homo sapiens
  MAP TO AL031770.12; EXPRESSED IN PLACENTA, SIGNAL = 1.8; EXPRESSED IN BONE MARROW, SIGNAL = 1.1; EXPRESSED IN HBL100, SIGNAL = 1.2; EXPRESSED IN ADULT LIVER, SIGNAL = 0.91; EXPRESSED IN BRAIN, SIGNAL = 1.1; EXPRESSED IN HEART, SIGNAL = 1.2; EXPRESSED IN BT474, SIGNAL = 1.4; EXPRESSED IN HELA, SIGNAL = 0.96; EXPRESSED IN FETAL LIVER, SIGNAL = 0.92; EXPRESSED IN LUNG, SIGNAL =   1
atcacaggaagcaggaatgcattactaaaacgatcaattattacaagttatcattaattattctctagaatttaagaacagctttaagccactaataatacaaagtgtccaatttccaaactatccaagaaatgggtttaagcaaacaaaaagttaaaatcaaattaatctctcactctcagtagatatgagaaaaatgagaataaaatgaaaagaattcaagcaagtatcaattgataaaagtatatccacatctattactcaagaaactttattacttacctgttggaggcaggcagtccttccaatcaaaatatcctgcataaattccaggttctaaggagccaacgatgggatctgctttcaactcgatgtaattttcaaagagtctttgatctagttctttcaatgaggccatgctaacctataaacacataatgaagagtatgagttgcctatttgagggtgatgga

SEQ ID NO: 492 - DNA, 471 bp, Homo sapiens
  MAP TO AL031676.2; EXPRESSED IN HBL100, SIGNAL = 1.6; EXPRESSED IN FETAL LIVER, SIGNAL = 1.7; EXPRESSED IN ADULT LIVER, SIGNAL = 1.6; EXPRESSED IN BRAIN, SIGNAL = 1.6; EXPRESSED IN HEART, SIGNAL = 1.4; EXPRESSED IN PLACENTA, SIGNAL = 1.8; EXPRESSED IN BT474, SIGNAL = 1.4; EXPRESSED IN HELA, SIGNAL = 1.7; EXPRESSED IN LUNG, SIGNAL = 2.4; EXPRESSED IN BONE MARROW, SIGNAL = 1.8
cctgacgatacatgcaacagtttgcctatcagacagctctgccagcctacaagttccagaaaggcaagcacagcatgttatccacatcttcagcagtaagtgctacatagaagatgctcagtcaacgtgcgtgtttgctttttttttaccatttgcagtcaccttcctaaaaaggaagggtgtgtggggaggggaggaagaaagggaagcaaaagagatttcctgttgcagaagaaaaatggcataaactctagagaggctaccatatctctaatttgacctgagctgagcaatatatccaggatttaaatgatgctggtcactcacttctttctaggtcacctttgtccaaggagacatccttagaatcacaatagtaggagaagacgatggaagaggagaggagagaagggaaaggaggagggaagggagggaaagaagaaaagggtagggaggagaggaagagggaga

SEQ ID NO: 493 - DNA, 480 bp, Homo sapiens
  MAP TO AL031656.10; EXPRESSED IN BRAIN, SIGNAL = 4.1; EXPRESSED IN HEART, SIGNAL = 3.2; EXPRESSED IN BONE MARROW, SIGNAL =   3; EXPRESSED IN PLACENTA, SIGNAL = 3.1; EXPRESSED IN BT474, SIGNAL = 2.6; EXPRESSED IN ADULT LIVER, SIGNAL = 2.4; EXPRESSED IN HELA, SIGNAL = 5.4; EXPRESSED IN LUNG, SIGNAL = 2.4; EXPRESSED IN FETAL LIVER, SIGNAL = 2.9; EXPRESSED IN HBL100, SIGNAL = 2.8
tagaaattccacacaggccctccttgtggccattctcctccctgcccaagagaaagaaacatagacaccgtatacttggggctaaaattgcagcttgtgttaagggcccaagatagcaggcatgctctacacgttccactttgcatttcccgtaggtctctgtcttggtctttctctttccatagctacctcctaagtggcttgaacaagttgcttaacattctgtggcctcagtgccctatcataataaagacattatgaatgtattacttaataaattgtacttccctctttttccatatatttgctgtgtgatcttagggaatacagtctctagcagtttcagttttacaacacctgaaatgggtgatgactacccatgcctacctccataggaatgttgctagcattggcattaacgagcagaattacactgttaaaggtcaagccagagagaggacaccaaatcccatccatagc

SEQ ID NO: 494 - DNA, 481 bp, Homo sapiens
  MAP TO AL031587.3; EXPRESSED IN BT474, SIGNAL = 2.5; EXPRESSED IN BONE MARROW, SIGNAL =   4; EXPRESSED IN FETAL LIVER, SIGNAL = 3.4; EXPRESSED IN LUNG, SIGNAL = 3.5; EXPRESSED IN ADULT LIVER, SIGNAL = 3.7; EXPRESSED IN PLACENTA, SIGNAL = 3.4; EXPRESSED IN HBL100, SIGNAL =   3; EXPRESSED IN BRAIN, SIGNAL = 4.5; EXPRESSED IN HEART, SIGNAL =   3; EXPRESSED IN HELA, SIGNAL = 2.5
aggctggtaggatgggctggcctgaggatggccctgcctggcagaggagtggactccagtggtcgagcttgggctaccctgcccgtctctggagacagattaagtggtggcaagacccttcctaagttcctcactccttctgtggtcaatgtcttccatttcccggagtttctgcaaagggcatcagggaaagcaggtgtatcagggctaggaacctgaggagctgtcacagcagtgagctagagcctgacccctgaaccctgccacagcagaccctgtatttccattcgcacttggcgctgggcccttcccctccccactttcctggttgtttctcctacctgggagatttcagcaaggatgattcctcggtactgtttgccctgtcccagggcctccatgtcagccaggaattctttcctctcctggatttccttcaccactggacagaggagagggctgtcaggttcccatgagggat

SEQ ID NO: 495 - DNA, 466 bp, Homo sapiens
  MAP TO AL031390.4; EXPRESSED IN BRAIN, SIGNAL = 2.7; EXPRESSED IN HBL100, SIGNAL = 4.4; EXPRESSED IN LUNG, SIGNAL = 2.3; EXPRESSED IN HELA, SIGNAL = 3.5; EXPRESSED IN ADULT LIVER, SIGNAL = 3.1; EXPRESSED IN PLACENTA, SIGNAL = 1.7; EXPRESSED IN BT474, SIGNAL = 3.2; EXPRESSED IN BONE MARROW, SIGNAL = 1.6; EXPRESSED IN FETAL LIVER, SIGNAL = 6.3; EXPRESSED IN HEART, SIGNAL = 2.2
ggaaaagggcctcccttagccactaagtggaccatcatgcaacattctctgatggggcggggatctccatggaggggggaggcacacttgttgcgtcgcctcagcaactccaattgcgtgacagaatgtgcttccgcttccgcctctgagccctatgagcgagagttacgctacttagtcgttgtgacgccattcttctgcgacggcgcggacctggagcttccgcgcggtggcttcactctcctgtaaaacgctagagcggcgagttgttacctgcgtcctctgacctgagagcgaaggggaaagcggcgagatgactgaccgctacaccatccatagccagctggagcacctgcagtccaagtacatcggcacgggccacgccgacaccaccaagtgggagtggctggtgaaccaacaccgcgactcgtactgctcctacatgggccacttcgaccttctcaac

SEQ ID NO: 496 - DNA, 492 bp, Homo sapiens
  MAP TO AL031320.6; EXPRESSED IN HEART, SIGNAL = 1.1; EXPRESSED IN FETAL LIVER, SIGNAL = 1.9; EXPRESSED IN PLACENTA, SIGNAL = 1.7; EXPRESSED IN BONE MARROW, SIGNAL = 1.9; EXPRESSED IN HBL100, SIGNAL = 4.8; EXPRESSED IN LUNG, SIGNAL = 1.3; EXPRESSED IN ADULT LIVER, SIGNAL =   2; EXPRESSED IN BRAIN, SIGNAL = 1.1; EXPRESSED IN BT474, SIGNAL = 1.3; EXPRESSED IN HELA, SIGNAL = 1.9
ccattgagttggattttactcctgatttatttacccttgattatgttgagtaaatagtgatatatctaataagtattatttacaatgattttctccccccataccaccaatgacttaaaatgaaatatttcaagaggtgaaggaattaaaatgttagaaatatattaggaatatggagggtaactgcagcaatctcatagcatacacacctttcattatataaccaggccaagaagcctgtgctgttccagtattgatccggtgctcctccgtcaccatccgaccacagaacctcaggctgatagttgttcactaactcatagagctctggcaatgtcttagaaactggaaattgccgcttatggaatgaactggattcatcctcaaggaagagcggatgaaaccattcaaaaagggaatagtacagtccaaaacgcaggtcagttctgttcctaatggctacctcaagttccttgacaatgtccctcttgg

SEQ ID NO: 497 - DNA, 463 bp, Homo sapiens
  MAP TO AL031320.6; EXPRESSED IN BT474, SIGNAL =  14; EXPRESSED IN LUNG, SIGNAL =   4; EXPRESSED IN HELA, SIGNAL =  18; EXPRESSED IN ADULT LIVER, SIGNAL = 6.6; EXPRESSED IN BRAIN, SIGNAL =  14; EXPRESSED IN HEART, SIGNAL = 2.7; EXPRESSED IN PLACENTA, SIGNAL = 2.6; EXPRESSED IN BONE MARROW, SIGNAL = 8.2; EXPRESSED IN FETAL LIVER, SIGNAL =  10; EXPRESSED IN HBL100, SIGNAL =  30
tgcatagagaaatgagatagaactgcttctactttctgtatttgaaattttaaaaaggtatttcaaaatgagcatttaaacaacaaagaaggccctgacagtggctgaactcccccagcagatgtctgatgctaagaacatgatggctgcctatgacccccagtatggcctctatctaacagaggctgccattttcaggggctggatgtccatgagggaggtagaggagaaaatgcttcatgtccaaaccaagaacagcagctactttgctgactggatcccctacaatgggaaaacagctttctgggacatcccatccgcaggactaaaaacgtccaccactttcatcagtaacaacacggccatccaggagctgctcagagacgtctcagagcagttcacagccatgttcaggtgcaaggccttcctgcactggtacatgggcgagggcaagaatgagatg

SEQ ID NO: 498 - DNA, 414 bp, Homo sapiens
  MAP TO AL031297.4; EXPRESSED IN LUNG, SIGNAL = 1.1; EXPRESSED IN HELA, SIGNAL = 1.1; EXPRESSED IN BRAIN, SIGNAL = 1.3; EXPRESSED IN HEART, SIGNAL = 1.1; EXPRESSED IN BT474, SIGNAL = 2.7; EXPRESSED IN BONE MARROW, SIGNAL = 1.5; EXPRESSED IN PLACENTA, SIGNAL = 1.8; EXPRESSED IN ADULT LIVER, SIGNAL = 1.4; EXPRESSED IN FETAL LIVER, SIGNAL = 1.3; EXPRESSED IN HBL100, SIGNAL = 1.5
ttccttaatgctatccttcccataagtgtagttcttacctttaaccagtattttatgagaataattattttccctacaggcgatccattttctcagcctattaaatttcccataaatggactctcagatgtaaaaaatacttcggaggacagtgaaaacttcccatcaagttctaaaaagtctgaggagtggcctgactggagtgaacctgaggagcctgaaaatcaaactgtcaacatacagatttggcctagagaaccttgtgatgatgtcaagtcccagtgcactaccttggatgtggaagagtcatcttgggatgactgcgagcccagcagcttagatactaaagtaaacccaggaggtggaatcactgctacaaaacctgttacctcaggggagcagaagcctattcct

SEQ ID NO: 499 - DNA, 467 bp, Homo sapiens
  MAP TO AL031287.3; EXPRESSED IN ADULT LIVER, SIGNAL = 1.2; EXPRESSED IN BRAIN, SIGNAL = 1.3; EXPRESSED IN HEART, SIGNAL = 1.6; EXPRESSED IN PLACENTA, SIGNAL = 0.95; EXPRESSED IN BT474, SIGNAL = 1.3; EXPRESSED IN HELA, SIGNAL = 1.1; EXPRESSED IN LUNG, SIGNAL = 1.1; EXPRESSED IN FETAL LIVER, SIGNAL = 1.4; EXPRESSED IN HBL100, SIGNAL = 0.81; EXPRESSED IN BONE MARROW, SIGNAL = 0.9
tctgaggtttcctattttaagcctttttttaatgcactctgagaatggaaatatataaaattctgtgtataaacaagttttatgtaataggaaagattgattgctttaacaagaatatgttgtagataagtttttatccctcttgactggcctattttgtcaaatgggccaaatcaccagtagttattatcactgaaattatatatttgtgtgtgtaaatataaatgtgttttctgagcatatctgtttagagttgttggttttagaaaatatttaaaatttgaatttgccttaacatgtgttttgaaggtggaacaagtcaatcagatatttcaactcttcctacggtcccatcaagtcctgatttggaagtgagtgaaactgcaatggaagtagatactccagctgaacaatttcttcagccttctacatcctctacaatgtcagctcaggctcattcgacatca

SEQ ID NO: 500 - DNA, 468 bp, Homo sapiens
  MAP TO AL031287.3; EXPRESSED IN FETAL LIVER, SIGNAL = 1.8; EXPRESSED IN LUNG, SIGNAL = 1.2; EXPRESSED IN HELA, SIGNAL = 1.1; EXPRESSED IN PLACENTA, SIGNAL = 1.2; EXPRESSED IN BT474, SIGNAL =   2; EXPRESSED IN BONE MARROW, SIGNAL = 1.4; EXPRESSED IN HBL100, SIGNAL = 1.4; EXPRESSED IN ADULT LIVER, SIGNAL = 1.3; EXPRESSED IN BRAIN, SIGNAL = 1.3; EXPRESSED IN HEART, SIGNAL = 4.2
aatttcaaaagtcagtcaaagtagttcgttgttatttattgagattttatgagtgagtcagataaactaaataaatggaaatatgcatgttttattttcatgatactgttcctgttgatggtactcaatcttattcacatctcacagggaacaaaagaaaatatatgggattctgatttttttaaattataatagcttgcagtctagtgataatctttcactgagatgagaatgttaatgagaatgtattactggctatgattatattaaaaatgaatatttctaggaaataataagttaccattaactgctttctttgtgtgttttaggttttgacaacaattcgttcagggcaccgagcaaacatatttagtgcaaagttcttaccttgtacaaatgataaacagattgtatcctgctctggagatggagtaatattttataccaacgttgagcaagatgcagaaa

SEQ ID NO: 501 - DNA, 479 bp, Homo sapiens
  MAP TO AL031280.6; EXPRESSED IN HEART, SIGNAL = 1.6; EXPRESSED IN HBL100, SIGNAL = 1.8; EXPRESSED IN FETAL LIVER, SIGNAL = 3.4; EXPRESSED IN BRAIN, SIGNAL = 3.2; EXPRESSED IN PLACENTA, SIGNAL = 4.1; EXPRESSED IN BT474, SIGNAL = 1.5; EXPRESSED IN BONE MARROW, SIGNAL = 2.2; EXPRESSED IN LUNG, SIGNAL = 2.3; EXPRESSED IN HELA, SIGNAL =   2; EXPRESSED IN ADULT LIVER, SIGNAL = 2.1
ttctcagtgctgtgtgtggggttgaagggagatctaagatgaaacctttgcacctgcaaggagttaaaaatatgtaatgaaagaaatatcacaggatagcctgctcattccctcatctatttgttttgcaaatacaagtcctaccccacatcaggtgctataagctctataaactgtaaagccaaatgatctacggtctctccccttgaggaatttttttaacttgggggcaatttataatccagattgctggccagcgaacagtggtcagaatgctctggaaaccttccccatctctctggagtcatcaggcccttgcaggtagtcagcctcctctctctctgttgtcccctcacttataattgacctcagtttataattctgcatctgtttttgtgtttgattgatgtctatctctctcacaagaatgtcagctccaggaggcagggacccatgtctgtcctgttcactgagcctgg

SEQ ID NO: 502 - DNA, 422 bp, Homo sapiens
  MAP TO AL023807.6; EXPRESSED IN BT474, SIGNAL = 1.3; EXPRESSED IN HBL100, SIGNAL = 1.4; EXPRESSED IN BRAIN, SIGNAL = 1.4; EXPRESSED IN HEART, SIGNAL = 1.5; EXPRESSED IN PLACENTA, SIGNAL = 1.3; EXPRESSED IN BONE MARROW, SIGNAL = 1.7; EXPRESSED IN FETAL LIVER, SIGNAL = 1.3; EXPRESSED IN LUNG, SIGNAL = 1.5; EXPRESSED IN HELA, SIGNAL = 1.3; EXPRESSED IN ADULT LIVER, SIGNAL = 1.3
gttagaggagggaagtgggggaatatgagaagtaaggaatctgaatgaccagcccctgaataactgaagattgattttgttaccagtgagcattttgctgagtatcagagggacacttagcaccaaaaggagtgagaaatttgaccagcccctggccagtgatactgattatagctgtggttcttgagataggattagaacaggctttacctacacaaattatatggtcagaatctaagacaagttgggtgacggcatggaatccagaaaagacaaagcttactttcccctggggttatgaagaacaatccatcttagctcttggattatggaaacccattaaaatgctgctgtataccttgtacttattgaagacattgtccttggcaataagagtttcagctttagcaaggaaggcatgc

SEQ ID NO: 503 - DNA, 480 bp, Homo sapiens
  MAP TO AL023807.6; EXPRESSED IN ADULT LIVER, SIGNAL = 9.3; EXPRESSED IN HEART, SIGNAL = 5.3; EXPRESSED IN BT474, SIGNAL =  12; EXPRESSED IN BONE MARROW, SIGNAL =  11; EXPRESSED IN HBL100, SIGNAL =  18; EXPRESSED IN FETAL LIVER, SIGNAL =  12; EXPRESSED IN HELA, SIGNAL =  17; EXPRESSED IN BRAIN, SIGNAL = 4.3; EXPRESSED IN PLACENTA, SIGNAL = 7.1; EXPRESSED IN LUNG, SIGNAL =  13
ttatttatatgactctaccgaacattgttgacattgagctatgaattgttcaatgaattcttgtcatacaaaactttttgttttgcctggcgttaatgattgttgcttttttccctcatttttctttattttgcttttttttctgtgtacttaattactttagcatccaaactctctgccacttcccgaaatcttttttcaagactttcaaacatatcaggtgctctctagagttcctcttcttagagacatttctccttggcccttcttacgtgttctgttgtgatctggtagccctcttggcttggagcggttgcctcccaggggtttcccacaccatcattcaggggattcccttgacctgtcttctgtgtggaatctcctatttttctattttccttcccttcttcttggtttcctgcctccattttgtagagcacatccttcagtagtttcctaagaaagcatgattggaaggtg

SEQ ID NO: 504 - DNA, 476 bp, Homo sapiens
  MAP TO AL023656.8; EXPRESSED IN PLACENTA, SIGNAL = 0.87; EXPRESSED IN LUNG, SIGNAL = 0.85; EXPRESSED IN HBL100, SIGNAL = 0.69; EXPRESSED IN FETAL LIVER, SIGNAL = 0.8; EXPRESSED IN HELA, SIGNAL = 0.69; EXPRESSED IN BRAIN, SIGNAL = 1.8; EXPRESSED IN BT474, SIGNAL = 0.77; EXPRESSED IN BONE MARROW, SIGNAL = 0.92; EXPRESSED IN ADULT LIVER, SIGNAL = 0.77; EXPRESSED IN HEART, SIGNAL = 0.89
cccctgatgtaattcaaaatgcactataaaatgcaacacaaactagaggagatgccgtgtgtaaatcgcaaaaacaattggaatatgtggctcttttgtacttgttctcatgtaagaagcccatacctttcaatatatataaacaacattcaaacagaatgttgatctattgattgataaacattagggttctcactacttatgaggcactcgttgctgttttctgacatggaggtctcctactaacagaatacacttaaatttcttttttcagaataagtggataagccgtagccccatgctgcagagaagggtctaccattccatggctgctgtacaaaggaagctttatgttcttggaggcaatgacctagactacaataatgaccggatccttgtgcgccatatagattcttacaacatagacactgaccagtggacacgttgtaatttcaacctgctgactggcaagtacc

SEQ ID NO: 505 - DNA, 486 bp, Homo sapiens
  MAP TO AL022397.1; EXPRESSED IN PLACENTA, SIGNAL = 2.1; EXPRESSED IN BONE MARROW, SIGNAL = 1.9; EXPRESSED IN HBL100, SIGNAL = 1.6; EXPRESSED IN FETAL LIVER, SIGNAL = 2.3; EXPRESSED IN ADULT LIVER, SIGNAL = 2.2; EXPRESSED IN BRAIN, SIGNAL = 1.5; EXPRESSED IN BT474, SIGNAL =   2; EXPRESSED IN LUNG, SIGNAL = 2.1; EXPRESSED IN HELA, SIGNAL = 1.4; EXPRESSED IN HEART, SIGNAL =   2
tttcccctctcttccacctctaattactctgatgtgttggggtaaggaacaggaatagcagaaattgctgagactgccttactgtttgcatgcaggtagtagaaaggtaccctaaacctcactctagcactggttggctgtggtagcttttgctgatatggtggtttcttcataaattacgcagataattcatttgggtgatattcagcttcatctcagcctctgcagtcacggaggaactaccaagaggagggcagccaagtcttcccctgtggtcagcagtccatactcctaatcccctaattaggtaacaaattccctggtttgctggttgcctgattagccctataactcttgcctcctctattttccatgctccttcaaagggagcctcaaaaatatctccgtgttcttcacaaatctcaagtgcccactgaaaaagacgatgaggcagaagagctgtaaccacagtacctcccaacttca

SEQ ID NO: 506 - DNA, 459 bp, Homo sapiens
  MAP TO AL022240.8; EXPRESSED IN HBL100, SIGNAL = 7.2; EXPRESSED IN FETAL LIVER, SIGNAL = 5.8; EXPRESSED IN HEART, SIGNAL = 5.1; EXPRESSED IN PLACENTA, SIGNAL = 3.2; EXPRESSED IN BT474, SIGNAL =  11; EXPRESSED IN BONE MARROW, SIGNAL = 4.5; EXPRESSED IN LUNG, SIGNAL = 5.6; EXPRESSED IN HELA, SIGNAL = 7.4; EXPRESSED IN ADULT LIVER, SIGNAL =  14; EXPRESSED IN BRAIN, SIGNAL = 5.7
tgggaaccttcattcttagtccagagctcttttcactctaacaagcctgctcccatcccagcctccttcctgtcctttaaaactagatagatgctgcctcttgctccaaagaccaccttccatcaaggaaggagggacacttgcaatactgtgacctccaaccccatgggtttcccatctccgttcttacccaagaagtcctggtcatgtcatggccacataagcttagtggaaaaaaacaccactgatacaactgtcattgtgaaagtatggaggtctggagtctctcataagcctgggattttgggtcatcagggcctatggccaccttacctgggctgagcttttggacaaggtgctgtgccagtctacacccctcagccagctgttcttggaggtcctgcccctgggacttgtccggctcatccggagtgaggagggcctggagatgctcattca

SEQ ID NO: 507 - DNA, 473 bp, Homo sapiens
  MAP TO AL022240.8; EXPRESSED IN HEART, SIGNAL = 2.6; EXPRESSED IN FETAL LIVER, SIGNAL = 7.6; EXPRESSED IN PLACENTA, SIGNAL = 7.8; EXPRESSED IN BT474, SIGNAL =  19; EXPRESSED IN BONE MARROW, SIGNAL =  17; EXPRESSED IN HBL100, SIGNAL =  17; EXPRESSED IN LUNG, SIGNAL =   7; EXPRESSED IN HELA, SIGNAL =  11; EXPRESSED IN ADULT LIVER, SIGNAL =  14; EXPRESSED IN BRAIN, SIGNAL = 4.3
caaatgcccagctcgttcatggatgcaagaattttagacactgaaattagaatgaaggaggaaatctacaaacccttgagtccaaatcatacttctgtgaattttttacatctgcctgggtccaatgtgctgagagcgggctcaggttgccacaggcatggctggagactaggaatggagccttgctcactgacccatttcatgtctaggcttccaactgagactacagtttcattacaacctatatgcgcccataggtcctgcctgcggcaatgacatctctcgggtcagtaagggccacttggaacaggaatatcacccctatctggaagaccaggtggaggcttatcaccttcatagtaaggtactcactgtccacgtcaagagccaagccaaggtactgttcctccaatgagtaaacagcactgctgtagggctggcctaagtcaggcagttcaagataacctgaagga

SEQ ID NO: 508 - DNA, 461 bp, Homo sapiens
  MAP TO AJ010597.1; EXPRESSED IN PLACENTA, SIGNAL = 4.4; EXPRESSED IN BONE MARROW, SIGNAL = 5.3; EXPRESSED IN FETAL LIVER, SIGNAL = 4.9; EXPRESSED IN BRAIN, SIGNAL = 5.4; EXPRESSED IN HEART, SIGNAL = 3.9; EXPRESSED IN BT474, SIGNAL = 5.2; EXPRESSED IN HBL100, SIGNAL = 4.2; EXPRESSED IN LUNG, SIGNAL =   7; EXPRESSED IN HELA, SIGNAL = 6.3; EXPRESSED IN ADULT LIVER, SIGNAL = 5.8
ggagccaaatgttaatccccaagacaatagggaaaatgtctccaggatatgttataggtcttcctggcagcccctcccatcatagacccagagaagcctaggaggaaaaaatagtttcgtgggctgcccgtggtactcatgctgtgtgcagcctaggaacttggtgccctgtgtctcagctgctccagcttttgctagaaggggccaaggtgtagctcggcccattgtttcagagggtgcaagccccaaaccttggcaccttccacgtggtgttgagcctgcgggtgcacagaagtcaagaagtgaggtttgggcacctccacctagatttcagaagatgtatagaaatgcctggatgtccaggcagaagtttgctacagagttggggtcctcatggacaacctctgctagggcagtacggaagagaaatgtggggttggagcccacacagagagtcccta

SEQ ID NO: 509 - DNA, 476 bp, Homo sapiens
  MAP TO AJ006996.1; EXPRESSED IN BONE MARROW, SIGNAL = 1.3; EXPRESSED IN ADULT LIVER, SIGNAL = 1.3; EXPRESSED IN PLACENTA, SIGNAL = 1.2; EXPRESSED IN BT474, SIGNAL = 0.98; EXPRESSED IN FETAL LIVER, SIGNAL = 1.1; EXPRESSED IN LUNG, SIGNAL = 1.5; EXPRESSED IN HELA, SIGNAL = 1.2; EXPRESSED IN BRAIN, SIGNAL = 1.8; EXPRESSED IN HEART, SIGNAL = 1.9; EXPRESSED IN HBL100, SIGNAL = 0.99
gtgttcagcacaggctttggcaaaagtctttctatgtaaatccaaacagtaactgttgaattactcatttaaacttacgtgtttcacagcacaagttgttagtgaaaggtttcaacttcttattttagacattaaacagatacctcaaatgtttgggaattcttcgtttacatctcagcaatggaaatatttagctttttttttttttttttttttagctagccaagagtccctgtacagtgagcaatcttttggggtcttatcttctcagcactgaagaatttctatgtggacactaaagtaatattaaaaccactcactctcactggtaatttacaaaatacagttttaataaacagcaatatcgacaacaacaatagcagtgatgaaacctctgaggcaagagagaatgttaattttagcaaagagtgtcttgtcaactggacaagccttaccagttcctagcctctagtttg

SEQ ID NO: 510 - DNA, 472 bp, Homo sapiens
  MAP TO AJ006996.1; EXPRESSED IN PLACENTA, SIGNAL = 1.6; EXPRESSED IN HBL100, SIGNAL = 1.4; EXPRESSED IN FETAL LIVER, SIGNAL = 1.7; EXPRESSED IN BRAIN, SIGNAL = 2.1; EXPRESSED IN BT474, SIGNAL = 1.5; EXPRESSED IN BONE MARROW, SIGNAL = 1.8; EXPRESSED IN HELA, SIGNAL = 1.8; EXPRESSED IN ADULT LIVER, SIGNAL = 1.8; EXPRESSED IN LUNG, SIGNAL = 1.8; EXPRESSED IN HEART, SIGNAL = 1.7
caagatgagacttgggtggggacacagccaaaccataccccccccttttttttttaatgtaaagggacagagagcaaatactttaggttttgtgggtcacagttgtttgtgttgcaactactcaactcttccacataacaggaaaccagtcagaggcaatgtgtaaaccaaagggcatgtggtgtttctatacaatgttatttataaaatgaggcagctagtcatacatggcccccaggcagtaccatgcccatcccttgtataaaacaaaaataactaattaaagatatgatttctttattccttactggcagctttctgaaaggtaatgtggccgtttgttgagaagtcagaggacaacataactaaattagaaaaatttacagaagagcaggtatttttatcctttagacaagaaacattatcttacagacatgaatgatattttcagcaattagatcatcactagtgg

SEQ ID NO: 511 - DNA, 488 bp, Homo sapiens
  MAP TO AC009307.1; EXPRESSED IN LUNG, SIGNAL = 1.4; EXPRESSED IN ADULT LIVER, SIGNAL =   1; EXPRESSED IN BRAIN, SIGNAL = 1.1; EXPRESSED IN HEART, SIGNAL = 1.6; EXPRESSED IN PLACENTA, SIGNAL =   1; EXPRESSED IN BT474, SIGNAL = 2.7; EXPRESSED IN BONE MARROW, SIGNAL = 0.97; EXPRESSED IN HBL100, SIGNAL =   1; EXPRESSED IN HELA, SIGNAL = 1.7; EXPRESSED IN FETAL LIVER, SIGNAL = 0.92
ttccagagcagaaggatcacttaaagaccattaagtacagccttattgtgtttacagattagtaaactgaggcttagaaaaggtaagtgcctgacccacggccacgaagctggcttgtatctggagtgtcttcccatgtgaagacagtgaacacagggcaccttggtatccctgagataatccttccagggaaaggtgtggccttacctgcaactgagttgggccgtggcattattagtgagctggagccctgagaataagggactggaccatctccagctgaggattctgctttgggcagcgtgctctctgctgacccggtggtctcctcttctgccactggggagcagttatctgccctgcggtcatgaagcactcccttctgaacccctaatcttaggtttccatctttattccattccaaactggagccactccggtcatcattttcggatgaacttgtaattgtggctgaaatgaaagaccaa

SEQ ID NO: 512 - DNA, 488 bp, Homo sapiens
  MAP TO AC009307.1; EXPRESSED IN BT474, SIGNAL = 1.6; EXPRESSED IN BONE MARROW, SIGNAL = 1.1; EXPRESSED IN HEART, SIGNAL = 2.3; EXPRESSED IN ADULT LIVER, SIGNAL = 1.1; EXPRESSED IN HELA, SIGNAL = 2.9; EXPRESSED IN LUNG, SIGNAL = 1.6; EXPRESSED IN FETAL LIVER, SIGNAL = 1.8; EXPRESSED IN PLACENTA, SIGNAL = 1.2; EXPRESSED IN BRAIN, SIGNAL = 1.1; EXPRESSED IN HBL100, SIGNAL = 0.97
tccttctgccaaaaaggaagaaaaataataaaacaaagcagtaacactgaattagtcattctggattgcccttccattgagacacgtgcatcacatttaaatcctttccccaactgcacacgagattccctgcaaagagctgaaagaaagcgcctgccgtacctgggctcacacaggaaggccgtgttttccccgtctgctctccatacaagccactccctgaaggacgggtggcagaacatgcgggttttgtctcgcctcttaatgaggaagcaggagagggcgtccatcctctgctgaaagtcttcccatccctgctccccctggatgtggccagcattaatagcctgaaagatctgctcgtctgtcatggggtggagggatgcgagggccacgttgagaatcggaagtgccctctcaaaggcggactgggtcatgaacttcatgttgcactgaagcaaatagagctcagagagagacacgggcac

SEQ ID NO: 513 - DNA, 471 bp, Homo sapiens
  MAP TO AC009307.1; EXPRESSED IN LUNG, SIGNAL = 2.8; EXPRESSED IN PLACENTA, SIGNAL =  12; EXPRESSED IN HBL100, SIGNAL = 1.9; EXPRESSED IN FETAL LIVER, SIGNAL = 2.3; EXPRESSED IN BRAIN, SIGNAL = 1.7; EXPRESSED IN BT474, SIGNAL = 2.4; EXPRESSED IN BONE MARROW, SIGNAL = 1.9; EXPRESSED IN HELA, SIGNAL = 2.1; EXPRESSED IN ADULT LIVER, SIGNAL = 1.4; EXPRESSED IN HEART, SIGNAL = 2.9
acaaacctctctgaggctgccacattacaaagtgaccaatccctggagcccgaccctttctgtgtatgctgtggtttcagagacaagagagtctggcccagcaaataacaattctagcaatgagatgaagccatttccctgccccagccccaaaagagcaggctgccgcttactctcactcccttcttggtcagcagacacaccagcttcatgtggccagcagctgctgcgtaacagagggcagtcatgccgttctctgacgttccgtccaggcaggcaccaaattccaggagcagagtgacaacttcctcgtggccaaggtgagactggacgcacaggattggggcattatttaacacttctgtcctgtagttcacgttggcccctcccaaaatcaggagacggctcacctgttggacaaggccccccaacaagattgtcacatgtatgtcatctaaacatttctggaaa

SEQ ID NO: 514 - DNA, 457 bp, Homo sapiens
  MAP TO AC009307.1; EXPRESSED IN BT474, SIGNAL =  24; EXPRESSED IN HELA, SIGNAL =  35; EXPRESSED IN ADULT LIVER, SIGNAL =  27; EXPRESSED IN PLACENTA, SIGNAL =  28; EXPRESSED IN BONE MARROW, SIGNAL =  26; EXPRESSED IN FETAL LIVER, SIGNAL =  26; EXPRESSED IN LUNG, SIGNAL =  37; EXPRESSED IN HBL100, SIGNAL =  23; EXPRESSED IN BRAIN, SIGNAL =  48; EXPRESSED IN HEART, SIGNAL =  37
tttgcaagcaggtatttttaagcttttaagagtcgactaaaatcttaagtcctggaatagactgcatgtcacagaattagagaaaaatgaaagatccctgacaagacacacacacacacacacacacacacacacacacacacacacactctctgatgacactgagacacaacctcatgcaggccctggattgagctgttcacttcctggggtttctttccaatgcaggtggaggtggggaacacctgctggtactcacagtctcggcatcgccatagaaggcagccaggtccaagggtgtgcggccattcttgtctgtctggtctattgcagctccttcttcaaccagatactggaccactgccctgtgacctttcagacaagcccagcttaatgctgacagaccctctttgtctagagaagaaagggctgcacctgaaaggaaagcccattcaca

SEQ ID NO: 515 - DNA, 487 bp, Homo sapiens
  MAP TO AC009307.1; EXPRESSED IN BT474, SIGNAL =   2; EXPRESSED IN FETAL LIVER, SIGNAL = 1.3; EXPRESSED IN HELA, SIGNAL = 1.5; EXPRESSED IN HEART, SIGNAL =   2; EXPRESSED IN PLACENTA, SIGNAL = 1.6; EXPRESSED IN BONE MARROW, SIGNAL = 1.2; EXPRESSED IN HBL100, SIGNAL = 1.9; EXPRESSED IN LUNG, SIGNAL = 1.9; EXPRESSED IN ADULT LIVER, SIGNAL =   1; EXPRESSED IN BRAIN, SIGNAL = 1.3
tgttccctctaaatgctgggttctgctcccagcaggagtggcagcgattctccctggcatgggacttggaggagggttctgagaagagatctgaactttcatactgccatttctcactgccgactggccagagcccaggtgctggctggttttcacgatctgggcctgcttggagggctgcaggagcagccctgactgggccacaggctctctcagggacttgccgattcctgccctgctctgtggcgataccggccttcctttggactgtaacccttcttgaaggtttcggatgtatgaggaagggacagatgaggatggctgggacctgggagttggggaaacagattcttcctggggagaagtttcttcctcttcagtctcctcagagtgaaagtggtcacttaagccaggggttggggtgtcctcttcgttctcggagtcgttgagtggagctggtagcgggccctgctgtttttgctgttga

SEQ ID NO: 516 - DNA, 474 bp, Homo sapiens
  MAP TO AC009277.1; EXPRESSED IN HBL100, SIGNAL = 0.78; EXPRESSED IN LUNG, SIGNAL = 1.2; EXPRESSED IN ADULT LIVER, SIGNAL = 0.9; EXPRESSED IN BRAIN, SIGNAL = 1.5; EXPRESSED IN PLACENTA, SIGNAL =   1; EXPRESSED IN BT474, SIGNAL = 1.4; EXPRESSED IN HEART, SIGNAL = 1.2; EXPRESSED IN HELA, SIGNAL = 0.95; EXPRESSED IN FETAL LIVER, SIGNAL = 0.93; EXPRESSED IN BONE MARROW, SIGNAL =  13
tcccctcaaaagatgtttgccattttttaaattatagaacatttaaagggccaacccattccagtaaaccctaggaaaagataaatgaccaatgatcgcaactgccataaaaaaaattgtgtatgaaaataccttgatcatatatcgcttcaaacctccaaaatgtttccaagttttttttaggtattgctaaagaagacatgaaagtgacttggagaactaaggggaaataaaggtgccaacgaaactacagctcacacatgaatcccgcttgtaattctcttttaagatttgctctaacatgtcatctgtggtttattttcagggttacggaggatgcagatccctatgtgcagcctgaagatgaaaactatgaaaatgactctgtccggcagctggagaatgagctccagatggaggaatacctgaaacagaagctgcaagatgaagcttatcaggtacagggatccaggc

SEQ ID NO: 517 - DNA, 395 bp, Homo sapiens
  MAP TO AC009266.1; EXPRESSED IN BT474, SIGNAL =   1; EXPRESSED IN FETAL LIVER, SIGNAL = 0.97; EXPRESSED IN LUNG, SIGNAL = 0.98; EXPRESSED IN PLACENTA, SIGNAL = 1.4; EXPRESSED IN HEART, SIGNAL = 1.2; EXPRESSED IN BRAIN, SIGNAL =   1; EXPRESSED IN ADULT LIVER, SIGNAL = 1.2; EXPRESSED IN HELA, SIGNAL = 0.74; EXPRESSED IN HBL100, SIGNAL = 1.2; EXPRESSED IN BONE MARROW, SIGNAL = 1.4
  unsure 271
  unsure 272
acagacaggccagagaaagcccagtccccagaacaccctttttcacaaccaaaactttacagagaatataaacagggatccttatatttcctagcccagtgaaccatcttcttaaaggaaaaaaaactttaaaagttaactgctgatgcagtgtataagagaaaagaaaagaagaacagttttaaaatgcctggggaagaacctcttattctcatgcaagtggttcctccaccagggagattagtttaattactgtccaatggagttgaannccccttggctggagaagaggaagtattgggcagttcatggcagggactaccagccagccacccaggattccctgggccatgcggcccagtcccagcagggaggggagggtgatagtgagctgc

SEQ ID NO: 518 - DNA, 485 bp, Homo sapiens
  MAP TO AC009266.1; EXPRESSED IN PLACENTA, SIGNAL = 1.9; EXPRESSED IN BT474, SIGNAL = 2.3; EXPRESSED IN BONE MARROW, SIGNAL = 2.9; EXPRESSED IN HBL100, SIGNAL = 1.9; EXPRESSED IN LUNG, SIGNAL = 2.7; EXPRESSED IN HELA, SIGNAL = 1.6; EXPRESSED IN BRAIN, SIGNAL = 2.8; EXPRESSED IN FETAL LIVER, SIGNAL = 3.2; EXPRESSED IN HEART, SIGNAL = 1.9; EXPRESSED IN ADULT LIVER, SIGNAL = 1.9
  unsure 298
  unsure 306
  unsure 310
  unsure 340
  unsure 344
  unsure 361
  unsure 396
  unsure 423
  unsure 426
  unsure 435
aaagtttaaccatatgctgctcatagtaaaaatacttaaataacagaatgcacaatgatttattaaacatagagaaatgtaaaggattaagttaaaaagtcaagaataaaacttgctaggctttgtggcacgcctgtgatcccagtacttttggagggctgggcatgctggcatgcctgtgatcccagcatttcgagagtccgagataggcagatcgcttgagcccaggagttctagattggcctgggcaacgtggcaaaactccatctcttcaaaaattacaaaaaatatttgggtnatggtggncatngcgcctgtggtcccagctatttgggaggtngaangatgggaggaacatctngagcccaagtggccaaggtcgcagtgagccacgantcgctttcctgcacttcagccttggtngancagagtgangaccctgtctcagggaaaaaaaacagtcaacaataaaacatcaaaagaaa

SEQ ID NO: 519 - DNA, 383 bp, Homo sapiens
  MAP TO AC009266.1; EXPRESSED IN BT474, SIGNAL = 0.67; EXPRESSED IN HBL100, SIGNAL = 0.68; EXPRESSED IN HELA, SIGNAL = 0.78; EXPRESSED IN BRAIN, SIGNAL = 3.2; EXPRESSED IN PLACENTA, SIGNAL = 0.63; EXPRESSED IN BONE MARROW, SIGNAL = 0.93; EXPRESSED IN LUNG, SIGNAL = 0.82; EXPRESSED IN ADULT LIVER, SIGNAL = 0.94; EXPRESSED IN HEART, SIGNAL = 0.83
  unsure 120
  unsure 215
  unsure 241
  unsure 258
  unsure 268
  unsure 269
aaacatggtaaggatgatatgtacaagcttatcatattaataaaaattccttagacaccaaaatgctacataaaagattgtttataaatactttaagcactgaaaataaattaccctaancatttctcttgatgatctctctattcattaacatttttccttcagataattcaattcccgagagaggaattagaacttccccaatgatatcatcntcttgaaaacctgtcaaaactcaaanattgtgaagtgcaaggnccaattcttnnggatttgggtgtagggtatcccatagaatgtaaaggtctcatcaaaagctggatccaaggtttttctcagcactctagttttcactttatgcttcttctctgggaggatcgtca

SEQ ID NO: 520 - DNA, 471 bp, Homo sapiens
  MAP TO AC009237.1; EXPRESSED IN PLACENTA, SIGNAL = 1.2; EXPRESSED IN BONE MARROW, SIGNAL = 1.6; EXPRESSED IN HBL100, SIGNAL = 1.9; EXPRESSED IN LUNG, SIGNAL = 1.8; EXPRESSED IN BT474, SIGNAL = 1.4; EXPRESSED IN FETAL LIVER, SIGNAL = 1.3; EXPRESSED IN HELA, SIGNAL = 1.1; EXPRESSED IN ADULT LIVER, SIGNAL = 1.5; EXPRESSED IN BRAIN, SIGNAL = 1.1; EXPRESSED IN HEART, SIGNAL = 1.1
tcagaacaggcaaggttgagaagttgagatgggtcacagacaaaattggagatttccacattcttgaagaaggtgaattgtaacacaatccaactgtgcagctgggaatccaacaggctgaggaaaaaggacaccaaaactaagaagacaccaaggtgaggattcatgatgactgggtagtgcagggggtgacagatggccacaaatcggtcataggccatcactgtcaggagcatgtcttctatacatgcaaaaaggacaaagaaagacatctgtgtcaggcagcccgcataagagatgactctgctatgcgactgcatgtccacaatcatcttgggaaccatggccgaggtgaaaccgatgtcagcccagcacaggttggagaggaagaagcacatgggggtgtggaggtgggagtcagagctgacagccaggatgatgagcaggttcctcagcaccgtgaccaggtac

SEQ ID NO: 521 - DNA, 451 bp, Homo sapiens
  MAP TO AC009236.1; EXPRESSED IN BT474, SIGNAL = 1.6; EXPRESSED IN HELA, SIGNAL = 1.6; EXPRESSED IN ADULT LIVER, SIGNAL = 1.5; EXPRESSED IN PLACENTA, SIGNAL = 1.8; EXPRESSED IN BONE MARROW, SIGNAL = 1.9; EXPRESSED IN HBL100, SIGNAL = 1.4; EXPRESSED IN FETAL LIVER, SIGNAL = 1.8; EXPRESSED IN LUNG, SIGNAL = 1.7; EXPRESSED IN BRAIN, SIGNAL = 1.8; EXPRESSED IN HEART, SIGNAL = 1.5
tatcaatctctggcccaaccgtgcgaggccccaggcatcacctcacaagcgtgcacagagcagcctggttttatttgtaaatgcacaggaaccatctgaaacccaaccccagggtaaggctgatggggcaggggccatgtggagtaggagtcaggaccaaatggaaattcccttggatttattttcctcctgacttcatgccagtggaacacacactaaattcatccccaaactgacaaattagtggggccccatctaagagatggaaaagggcctgaggcaagaaagaaaggccagggctggctggtgccaaggacagaagacctgcctccctggcctgtacctgcacgaactcaactcccaggaactgaggccactcctgtctctcatctccgtgctcaaggctttgagcccagtatccagccttagttcacctaaccctctgcacatg

SEQ ID NO: 522 - DNA, 453 bp, Homo sapiens
  MAP TO AC009236.1; EXPRESSED IN FETAL LIVER, SIGNAL = 1.6; EXPRESSED IN BRAIN, SIGNAL =   2; EXPRESSED IN HEART, SIGNAL = 1.4; EXPRESSED IN PLACENTA, SIGNAL = 1.9; EXPRESSED IN BT474, SIGNAL = 1.3; EXPRESSED IN BONE MARROW, SIGNAL = 1.4; EXPRESSED IN ADULT LIVER, SIGNAL = 1.6; EXPRESSED IN HELA, SIGNAL = 1.8; EXPRESSED IN LUNG, SIGNAL = 1.5; EXPRESSED IN HBL100, SIGNAL = 1.4
tcaccactcactccatccacaagtctccaacacctttaagggttatctgcggtttgcaaaacaaagcatctcaaaactcctaattccactttccactcccaccaacacactcacacaaacacatacacaccccacacacaccccacaggtgcttaactttctcctccattcatttgggaccactcatcattccccagatacaatttttacttttattcctcagtgttttgctggttccttgcctcggaacattatcctccccttttgaaatcctacgtggcttgtaaggctcacctcttccatgaagctttctcctgttccccctggcacagcacacttcttcctcctgtgaagtcaggtagaattttgcttgtctctccatcacaggacttatttcatccttgtctttgttacgcctgtatcctgaaagagcccagcaacatggatcttact

SEQ ID NO: 523 - DNA, 485 bp, Homo sapiens
  MAP TO AC009227.1; EXPRESSED IN BT474, SIGNAL = 2.1; EXPRESSED IN BONE MARROW, SIGNAL = 1.8; EXPRESSED IN FETAL LIVER, SIGNAL = 2.2; EXPRESSED IN ADULT LIVER, SIGNAL = 2.3; EXPRESSED IN BRAIN, SIGNAL = 3.1; EXPRESSED IN PLACENTA, SIGNAL =   2; EXPRESSED IN HBL100, SIGNAL = 2.2; EXPRESSED IN LUNG, SIGNAL = 2.5; EXPRESSED IN HELA, SIGNAL = 2.3; EXPRESSED IN HEART, SIGNAL = 2.4
aagggtgttttaaattctgacctcaattgtttagacaatgttgatttcacagcctccaccttatatatattatcatgtaggagatagagtgcttgctgcagtaagttcaggtgttttgtgttgcagagaaaactgtaaaatctgttttagatgtttgcatgtttacctagtttttcacttcaaaaaattggtgaagagacttctgtcaaaagaatttcagtgggctacctaccacctctttcccacagtggaagcagagattggtgattaatatcctctgtcctgcgggggaaaaaattcatgatgtcagaaaatgagtgagtcaacagaaagcctacctaagagtctccttggctgaggaggaagacgaaagcacagttctgagcatgagagctcacattctgtttctaccaggtgctgaagaaaagcaagacagggtaagttatggatctatcaaagcctgaagtgggtggggttgctttatt

SEQ ID NO: 524 - DNA, 448 bp, Homo sapiens
  MAP TO AC009227.1; EXPRESSED IN PLACENTA, SIGNAL = 1.9; EXPRESSED IN FETAL LIVER, SIGNAL =  56; EXPRESSED IN LUNG, SIGNAL = 3.4; EXPRESSED IN HELA, SIGNAL = 2.3; EXPRESSED IN ADULT LIVER, SIGNAL = 1.4e+02; EXPRESSED IN BRAIN, SIGNAL = 2.2; EXPRESSED IN HEART, SIGNAL = 2.2; EXPRESSED IN BT474, SIGNAL = 1.7; EXPRESSED IN HBL100, SIGNAL = 1.7; EXPRESSED IN BONE MARROW, SIGNAL = 2.2
agctattgctggactctgccaattctagttcacctgcttggctgaaaggtttctaatactcagcactgtggcggcctgcctcccacaaaagaaagcctccctggggattttttcttcttacctgtctctttgctataattcttgactccaaatttggacatgttataacctgtgatagatgcatataaggactggataaattcagttgccatagaaaagctttcctggctgatttaaaaaaaaaaaaaaaaaaaaacaggggtatgaatgtagtgatggacttaccacggtcctgtccaaaccatctttttcatggccaagcctaaaaatgagagaggaggtttgccgtctgatggaaatcgaggtctccatcatggatctccggcaattagaggataaaaatgatgtactcctcaggggaatctgagtaaaaacaattccattgaca

SEQ ID NO: 525 - DNA, 407 bp, Homo sapiens
  MAP TO AC008277.1; EXPRESSED IN FETAL LIVER, SIGNAL = 0.95; EXPRESSED IN LUNG, SIGNAL = 1.4; EXPRESSED IN BT474, SIGNAL = 1.5; EXPRESSED IN BONE MARROW, SIGNAL = 1.1; EXPRESSED IN ADULT LIVER, SIGNAL = 0.9; EXPRESSED IN BRAIN, SIGNAL = 0.99; EXPRESSED IN HEART, SIGNAL = 1.1; EXPRESSED IN PLACENTA, SIGNAL = 1.7; EXPRESSED IN HELA, SIGNAL = 0.6
gaatattaaagctatgccaaaggccatgaataattatacatctaagtttaatttaaaaatgaaattcctaaagcttatactaatgttgtaaattccaaaatatatgtgatttttagctagaattttcttacatgttgatctcttgtgtttattttgtttgtaatatattatttctataaaatgttaattaaaagggaatgcagtggtgtcttttgaaagaagaggatgtcattcctcgtatcagggcaatggaaggtcgtagaggaagaccaccaaatccagatagacaacgagcaagagaggaatccaggatgagacgtcggaaaggtcgacctccaaatgttggcaatgctgaattcctagataacgcagatgcaaagttgctaagaaaactgcaagctcaaggt

SEQ ID NO: 526 - DNA, 468 bp, Homo sapiens
  MAP TO AC008277.1; EXPRESSED IN HELA, SIGNAL = 1.1; EXPRESSED IN BT474, SIGNAL = 2.3; EXPRESSED IN HBL100, SIGNAL = 1.3; EXPRESSED IN FETAL LIVER, SIGNAL = 1.1; EXPRESSED IN LUNG, SIGNAL = 1.3; EXPRESSED IN BRAIN, SIGNAL = 1.7; EXPRESSED IN PLACENTA, SIGNAL = 1.6; EXPRESSED IN BONE MARROW, SIGNAL = 2.2; EXPRESSED IN ADULT LIVER, SIGNAL = 0.94; EXPRESSED IN HEART, SIGNAL = 1.2
tggagtaactgatgttcataatgctttttcattttgtaggactagaagaaattgcaaaagaaagagaaaaactgaaaaaggcagaaagtgtccagatcaaagaagaaatgtttgagacttctggggacagtttaaattgttcaaatacagatcactgtgaacaaaaggaagatcttaaagaaaaagataacacaaatctattccttcagaaacctggctctttttccaaattaagcaagcttttggaagtagctaagatgcctcctgagtcagaggttatgacccccaaaccaaatgctggtgcaaatgggtgcacgttgtcttatcagaacagtggaaaacattcactgggcagcgttcagtcaacagcaacgcaaagcaatgtggaaaaggcagactctaataatctgtttaatactggttcaagtggtccagggaagttctacagtcctctccccaatgaccagt

SEQ ID NO: 527 - DNA, 436 bp, Homo sapiens
  MAP TO AC008267.1; EXPRESSED IN FETAL LIVER, SIGNAL = 3.8; EXPRESSED IN HELA, SIGNAL = 3.4; EXPRESSED IN HEART, SIGNAL = 1.6; EXPRESSED IN PLACENTA, SIGNAL = 1.6; EXPRESSED IN LUNG, SIGNAL = 2.9; EXPRESSED IN ADULT LIVER, SIGNAL = 3.3; EXPRESSED IN BRAIN, SIGNAL = 2.3; EXPRESSED IN BT474, SIGNAL = 7.2; EXPRESSED IN BONE MARROW, SIGNAL =   7; EXPRESSED IN HBL100, SIGNAL = 3.4
ttttgagtggtttatgtctcctgttaggactctgacaaatacagaattgatgctaggaagggtcccgggagatagacccagacaactgggatttggggatgggtttggttatccaaggggcagcgctgagctccttgccaatgggaaatgggatgctggtgatttccaggaagtgacctcataatgactcaagctaccacttactgttgattgtgatgaaatgccagtggaggcacatgccttgggagctaagtggctgctgcacttgaccactatgaagactggtgtgggaagaatccttttggatgcacttcagcagggacccctgatccctgggtcacaggcctgtactgggccacacaacaggaggtgagtaagggtgggtgagcgaagcttcatctgtatttacagccgctccccacattaccacctgatc

SEQ ID NO: 528 - DNA, 457 bp, Homo sapiens
  MAP TO AC008267.1; EXPRESSED IN BT474, SIGNAL = 2.6; EXPRESSED IN HBL100, SIGNAL = 1.8; EXPRESSED IN FETAL LIVER, SIGNAL = 1.4; EXPRESSED IN LUNG, SIGNAL = 1.8; EXPRESSED IN BRAIN, SIGNAL = 1.4; EXPRESSED IN PLACENTA, SIGNAL = 1.4; EXPRESSED IN HELA, SIGNAL = 1.2; EXPRESSED IN HEART, SIGNAL = 1.3; EXPRESSED IN ADULT LIVER, SIGNAL = 1.5; EXPRESSED IN BONE MARROW, SIGNAL = 1.5
tcaaagcatgatagattttggcaaagaaaatactaatagaacaacttttatttcagtaggaatatcttttagataatgtagttttgtctactcatactttctacttgtaaaacagatttagtttaagggaagttgtccaaccactcaaacataaaatgatttaaattcaagtttaactttgatgaaacataatttaaataaccttaggtaagatacttaaagtaattccatgcatggatcttttatgtcttgaaacttactatgtttaattttcccagctgaaattcaggaagcaaaagctcccagtccttccataaaccggcaaaccagcattgaaatggatagagtgtctaaggagttcatagaatttctcaagaccttctgcaagacaggccaagaaatctataaactgaccaagctgtttttggaagggatgcattacaaaagggtaggttga

SEQ ID NO: 529 - DNA, 466 bp, Homo sapiens
  MAP TO AC008267.1; EXPRESSED IN PLACENTA, SIGNAL = 8.4; EXPRESSED IN BT474, SIGNAL =  19; EXPRESSED IN HBL100, SIGNAL =  18; EXPRESSED IN FETAL LIVER, SIGNAL =  14; EXPRESSED IN LUNG, SIGNAL = 6.8; EXPRESSED IN HELA, SIGNAL = 9.3; EXPRESSED IN BRAIN, SIGNAL =  28; EXPRESSED IN BONE MARROW, SIGNAL =  11; EXPRESSED IN ADULT LIVER, SIGNAL = 7.9; EXPRESSED IN HEART, SIGNAL =  11
ttgacttgccactgcttttgtctactgtttgtctaatattaacaattataaacagagcagtgcaactagtatttggaacaatccttacagtgttacagtgtcaggcacaacatttcacttctcttcacaccactggttctctttgcgtacctgggcttcctcctcttcagtaaagtcatttttgatattgaatgtcttgcgaatctcctcaggagttttccccttgatcatattggcaacagtcttgcatgtaacatcaagcaaacctttgatgtctaagtagtttgcagcccgaatgagttcaaaaagtgttccttgagcaactttcaggaattcttggtcccaaacagggatatcgtctgtttgcttttctttgttctcatcatcttcagggggaggagggtcatccttgtggtgggtgcaccactgaatgaccttttttaatactgctgcattcacatttggt

SEQ ID NO: 530 - DNA, 467 bp, Homo sapiens
  MAP TO AC008267.1; EXPRESSED IN FETAL LIVER, SIGNAL =   4; EXPRESSED IN HELA, SIGNAL = 4.7; EXPRESSED IN BRAIN, SIGNAL = 4.3; EXPRESSED IN HEART, SIGNAL =   4; EXPRESSED IN PLACENTA, SIGNAL = 4.5; EXPRESSED IN BT474, SIGNAL = 4.5; EXPRESSED IN BONE MARROW, SIGNAL = 4.5; EXPRESSED IN HBL100, SIGNAL = 5.4; EXPRESSED IN LUNG, SIGNAL = 4.2; EXPRESSED IN ADULT LIVER, SIGNAL = 3.9
tattgtcctccagcaggtccttcttgttgaggaaggtgatgacgggggagttctggaaccaggggtagtcgatgatggtccggaacagggctttgctctcctccatccggttctcgttgtccgactccaccaggacttggtcgtattcactgagggcgacgagaaacgggatggacgtcaggttctcaaagcagtggatccacttcctctgcgccgaccgctgtcccccaacatccgccatcctgaagatgatgttctccaggtcgaaagacgccggtggtgggcacgcggacccgcagcacgtcctgctgggtgggcaggtagctcgaggtggcgatgcagtctacgtcggtcacgcagtacttggccgagtccgagagctggtactcgcgcctgcggtcgtagcactcgtggatgccggggtcgtcccacagggtcttgatggcgctgacgtaccgatgctcaaa

SEQ ID NO: 531 - DNA, 482 bp, Homo sapiens
  MAP TO AC008266.1; EXPRESSED IN BT474, SIGNAL = 1.8; EXPRESSED IN BONE MARROW, SIGNAL = 2.2; EXPRESSED IN LUNG, SIGNAL = 2.3; EXPRESSED IN ADULT LIVER, SIGNAL = 2.1; EXPRESSED IN HELA, SIGNAL =   2; EXPRESSED IN HBL100, SIGNAL = 1.6; EXPRESSED IN PLACENTA, SIGNAL = 1.9; EXPRESSED IN HEART, SIGNAL = 1.8; EXPRESSED IN BRAIN, SIGNAL = 2.7; EXPRESSED IN FETAL LIVER, SIGNAL = 1.8
agaaatctaagcagcaggaggtatatttgaataaaattaacgaatagttacaaaaacaattagagaatggctggaaagcactgtgtggtccttagcgcgggactgacaggggcctggattcctggattctgtctctgattaaatgacagttatacagtcacgtaaaccacaatcctatgtatgcctcagaggaggtgagatgacttctgtcagttcagacatgtttctctcactccattcctgaacaggagaaaggacaagtgagttctgcctcacctgtgaaaaccttctttaagcttttactgatccagatgttgtccagagacttcgagccttgagggttcttggtgctgatgttggtgaaggtgtgcgcggggatcaggtggtggaacttttctttcctcaggatatcatagtcattgctgtctggcccttggccaaaatcccctaagataatgacatccttttctcctggaagtgga

SEQ ID NO: 532 - DNA, 381 bp, Homo sapiens
  MAP TO AC008167.1; EXPRESSED IN HELA, SIGNAL = 2.5; EXPRESSED IN BT474, SIGNAL =   7; EXPRESSED IN FETAL LIVER, SIGNAL = 3.1; EXPRESSED IN LUNG, SIGNAL = 2.8; EXPRESSED IN PLACENTA, SIGNAL = 2.1; EXPRESSED IN BONE MARROW, SIGNAL = 1.7; EXPRESSED IN HBL100, SIGNAL = 3.8; EXPRESSED IN ADULT LIVER, SIGNAL = 1.8; EXPRESSED IN BRAIN, SIGNAL = 2.1; EXPRESSED IN HEART, SIGNAL = 1.8
atcaggccatcgaagaagactgctggttagatcatccttacttccagtctctgaaccaacagccccgtgaaataacaaaccaggtcgttcctcaggaacggcagcctgaagcagaactgggccgcttgttgtttcagcatgaattcccagggcccgcttttccaaggccggaaccccagcaaggtgggatttcaggcccctcttctcctcagcctgcccatcctctaggagagtttgaagaccagcagttagcaagtgatgatgaagagccaggtccagcctttccaatgcaagaatctcaagagcccaatttggaaaacatttgggggcaagaagctgcagaggtagatcaagagctcgttgaactactagtgaaagaaa

SEQ ID NO: 533 - DNA, 456 bp, Homo sapiens
  MAP TO AC008166.1; EXPRESSED IN PLACENTA, SIGNAL = 5.1; EXPRESSED IN BONE MARROW, SIGNAL = 5.5; EXPRESSED IN LUNG, SIGNAL = 4.3; EXPRESSED IN ADULT LIVER, SIGNAL = 3.3; EXPRESSED IN HEART, SIGNAL = 4.3; EXPRESSED IN BT474, SIGNAL = 4.9; EXPRESSED IN HBL100, SIGNAL = 5.6; EXPRESSED IN FETAL LIVER, SIGNAL = 3.3; EXPRESSED IN HELA, SIGNAL = 5.1; EXPRESSED IN BRAIN, SIGNAL = 5.3
gatgggtgcaccaaaatctcacaaatcaccactaaataacttattcatgtaaccaaataccaccttgtgatgattaagtgttgactgagtgtcaacttgattggattgaaggatgcaaagtattgatgctgagtgtgtctgtgagggtgttgccaaaggagattaacatttgagtcagtgggctgggaaaggtgaaccaaacttaatctcggtgggtgccatctaatcagttgccagtgtggctagaatataaagcaggcagaaaaatgtgaaaagaataaactggcctagcctcccagcttacatttttctcccatgctggatgcttcctgcccttgaacatcggactctgagttcttcagttttgggacttggataggctctccttgctcctcagcttgcagctggcctactgtgggacattgcgagtgtgtgagtgaatacgtaataaactcc

SEQ ID NO: 534 - DNA, 456 bp, Homo sapiens; identical to SEQ ID NO: 533
  MAP TO AC008166.1; EXPRESSED IN FETAL LIVER, SIGNAL = 2.7; EXPRESSED IN ADULT LIVER, SIGNAL = 3.1; EXPRESSED IN BRAIN, SIGNAL = 3.2; EXPRESSED IN HEART, SIGNAL = 3.2; EXPRESSED IN BT474, SIGNAL = 2.5; EXPRESSED IN PLACENTA, SIGNAL = 3.9; EXPRESSED IN HELA, SIGNAL =   4; EXPRESSED IN LUNG, SIGNAL = 3.6; EXPRESSED IN HBL100, SIGNAL = 3.2; EXPRESSED IN BONE MARROW, SIGNAL = 4.1

SEQ ID NO: 535 - DNA, 393 bp, Homo sapiens
  MAP TO AC008166.1; EXPRESSED IN HELA, SIGNAL = 2.9; EXPRESSED IN BRAIN, SIGNAL = 4.3; EXPRESSED IN HEART, SIGNAL = 2.6; EXPRESSED IN PLACENTA, SIGNAL = 3.8; EXPRESSED IN BT474, SIGNAL = 2.5; EXPRESSED IN BONE MARROW, SIGNAL = 2.8; EXPRESSED IN HBL100, SIGNAL = 2.9; EXPRESSED IN LUNG, SIGNAL = 3.6; EXPRESSED IN ADULT LIVER, SIGNAL = 2.5; EXPRESSED IN FETAL LIVER, SIGNAL = 2.6
tggcttagcattgtgtgtgtgtgtgtgtgtgtgtgtgtgtgtgtgtatgagaaagaaagatttaatttttgtattgagcatggatattatgtttactgaacaaaacacaattgagatggcaagtgatggcaagtaattaataataataagttcataacagagttaccacaacccataatttaccaccatttccaaaatggattatatcattagtgactcacagcaggctagaagtacaaaactctcaagtggaaatagtcttgaaatagctgataaaacaagctgtgaagctgagaaacactttagcacttatgtattcatacttcactgtgcctgtcttaataacacatccaggagctcctatttcagagtcagggacttcagagtgttcca

SEQ ID NO: 536 - DNA, 466 bp, Homo sapiens
  MAP TO AC008166.1; EXPRESSED IN FETAL LIVER, SIGNAL = 4.5; EXPRESSED IN BONE MARROW, SIGNAL = 5.1; EXPRESSED IN HBL100, SIGNAL = 3.9; EXPRESSED IN ADULT LIVER, SIGNAL = 3.9; EXPRESSED IN BRAIN, SIGNAL = 5.8; EXPRESSED IN PLACENTA, SIGNAL = 4.8; EXPRESSED IN BT474, SIGNAL = 5.3; EXPRESSED IN LUNG, SIGNAL = 5.3; EXPRESSED IN HELA, SIGNAL = 5.1; EXPRESSED IN HEART, SIGNAL = 5.8
tcatcctgtggtcatttccccagtgccagaatgcataattggcatggacatatttagcagctggcagaacccccacattggccccctaactggtagagtgagggatattatggtgggaaaggcaaaatggaagctattagagctgcctctacctagaaaaatggtaaataaaaaacaatattgcatctctggagggatggtggagattagtgccaccatcaaggacttaaaagatgcaggagtggtgattcccaccacatccccgttcaactctcctatttggcctgtgcagaagacagacggctcttggagaatgacagtggattatcataagctaagccaggtggtgactccaattgcagctgttgtaccagatgtggttttattgcttgagcaaattaacacatctcctggtacctggtatgtagacactgatttggcaaatgcattcttctccattcctgtc

SEQ ID NO: 537 - DNA, 467 bp, Homo sapiens
  MAP TO AC008157.1; EXPRESSED IN PLACENTA, SIGNAL =  11; EXPRESSED IN LUNG, SIGNAL =   9; EXPRESSED IN HELA, SIGNAL =  13; EXPRESSED IN BT474, SIGNAL =  54; EXPRESSED IN HBL100, SIGNAL =  17; EXPRESSED IN FETAL LIVER, SIGNAL = 7.7; EXPRESSED IN BRAIN, SIGNAL =  21; EXPRESSED IN BONE MARROW, SIGNAL =  16; EXPRESSED IN ADULT LIVER, SIGNAL = 6.3; EXPRESSED IN HEART, SIGNAL = 5.2
  unsure 74
  unsure 106
gacccacaatccctttcttgccatcaccagcggcaacctcagccaagtaacggtagtaatctcctttcattttncaaatagaagactttgctctctgcttgtgaangcattggagatcaagaacttttccaaaagagatagtacatcattggagatatctcttagctccatctcaattttctctctgtattctcgagccatctgctgttttttctcaacaccttccgtcttttgttcaatacttgagatgaccctccaagatgacctacgggctcctacaacatttttataagcaactgagagaagattcctctcctcattggataattcagctccttgctcagttacagacttcatgcaggctgccatgttatcatattgctcagcctgctcagccagtttggccttctgaaccagctcatttttttccatgactggatgttctgtgtccagagtgggtggtggta

SEQ ID NO: 538 - DNA, 474 bp, Homo sapiens
  MAP TO AC008087.1; EXPRESSED IN FETAL LIVER, SIGNAL =  35; EXPRESSED IN HELA, SIGNAL =  97; EXPRESSED IN ADULT LIVER, SIGNAL =  16; EXPRESSED IN BRAIN, SIGNAL = 6.8; EXPRESSED IN HEART, SIGNAL =  11; EXPRESSED IN BONE MARROW, SIGNAL =  21; EXPRESSED IN PLACENTA, SIGNAL = 4.4; EXPRESSED IN BT474, SIGNAL =  30; EXPRESSED IN LUNG, SIGNAL =  22; EXPRESSED IN HBL100, SIGNAL =  51
  unsure 72
  unsure 93
  unsure 106
  unsure 110
tcatggatgtcatcagcattgacaagacaggagagaatttccatctgatccgtgacaccaaaggttgctttngctgtacacctgaggagaccnaagtacaagttgntgcnaaagtgagaaaaatctttgtgggcacaaaaggaatccctcatctggtgactcatgatgctcgcaccatccgctaccctgacccctcatcaaggtgaatgacaccattcagattgatttggagactggcaagatgaccgatttcatcacgttcgacactggcaagccatatatggtgactggaggtgctcacctgggaagagttggtgtgatccccaacagagagaggtacccgggatcttctgacgtggttcatgtgaaagacaccagtggcaacagctttggcactcaagtttccaacattttcactattggcaagggcaacaaacgatggatttctcttccccgaggaaagggtatccgcct

SEQ ID NO: 539 - DNA, 458 bp, Homo sapiens
  MAP TO AC007967.2; EXPRESSED IN HEART, SIGNAL = 0.89; EXPRESSED IN BONE MARROW, SIGNAL = 1.6; EXPRESSED IN HELA, SIGNAL = 1.1; EXPRESSED IN ADULT LIVER, SIGNAL = 1.1; EXPRESSED IN BRAIN, SIGNAL = 1.1; EXPRESSED IN PLACENTA, SIGNAL = 1.1; EXPRESSED IN BT474, SIGNAL = 1.7; EXPRESSED IN HBL100, SIGNAL = 1.1; EXPRESSED IN FETAL LIVER, SIGNAL = 2.1; EXPRESSED IN LUNG, SIGNAL = 1.2
ttcatctcaaagtgtggagttttctctaactcgcttgggtataacacattcaaatggttcccggcacccccacccccctccacaccgcctcactttgtgacttcatacaaatgcttggctaatactgcaaagtttgggatccacagtctggaaaaacccacagctcctaagaattctctcacctgccttctggtcttagtctcttgtagacggcaaatgacctgctttctttctgatcccaggctgtgctacacctgtcagatagtaaatcccaagtaatgtacctgctgttggcagatctgagctttttccttggacaccttatacctacagtcctccaggtgccagaggagggcatccgttcccttggtgcacccgactgtcatggggtgtcccagcaggtcatcaacttactggagcaacactcagcctaggtctctggtgggaaacttctggag

SEQ ID NO: 540 - DNA, 464 bp, Homo sapiens
  MAP TO AC007967.2; EXPRESSED IN BT474, SIGNAL =   4; EXPRESSED IN BONE MARROW, SIGNAL =   3; EXPRESSED IN HBL100, SIGNAL = 2.5; EXPRESSED IN BRAIN, SIGNAL = 1.8; EXPRESSED IN HEART, SIGNAL = 1.9; EXPRESSED IN PLACENTA, SIGNAL = 1.7; EXPRESSED IN FETAL LIVER, SIGNAL = 1.5; EXPRESSED IN LUNG, SIGNAL = 1.7; EXPRESSED IN HELA, SIGNAL = 1.8; EXPRESSED IN ADULT LIVER, SIGNAL = 1.9
catagccactcaaggaaggcagactgattttcttcctttctctgagttatggtggacatcattgaataatgcatggtctttttcctaattctccttaatccttttagaacacaggttaacagatgtttatgaccgcagtccccatgatctgagtcaaggcctcagtggggatccatactggggatggcttactgaccagtagaagatttgtccctttcccccgctgtcattctatcatttacttgactaagataccaggtatctccaaactctcgggctgcaggtaagctgcattcttttcattgaaggccagggattgatctaacaatagcatgacatctctgaaagcaagatcaaaggtttgccctagaccctgtaggacatctatgtacctatttgaaacttccaaaaacttccccaggtcttcctttatctgatttaaatcagagatggagaaggggaca

SEQ ID NO: 541 - DNA, 493 bp, Homo sapiens
  MAP TO AC007967.2; EXPRESSED IN BRAIN, SIGNAL = 1.7; EXPRESSED IN HEART, SIGNAL = 1.5; EXPRESSED IN HBL100, SIGNAL = 1.1; EXPRESSED IN PLACENTA, SIGNAL = 1.4; EXPRESSED IN BT474, SIGNAL = 0.74; EXPRESSED IN BONE MARROW, SIGNAL = 0.86; EXPRESSED IN FETAL LIVER, SIGNAL = 1.7; EXPRESSED IN LUNG, SIGNAL = 1.2; EXPRESSED IN HELA, SIGNAL = 1.1; EXPRESSED IN ADULT LIVER, SIGNAL = 1.4
ctcaggcctgcctagttttgtaggggtgagtctttttgaaacttgctccactgagatttctagatagagttggcctgtgtccgtgcagtagctctctcccaggtatggcttcctgaagaaccacacagcctcagggtctacagggctgtatgtttctgtggaattgttgctagtgttggatgtctacgggtctatattgcattgtgtgtttgtgagtgcttgtgtgtgtgtgtgtgtttgcctgtaagaggagacttcttaagggaatgtggctaatgcacttcagtgcttttttgttgttgttgggtctctaaatcttttggttacttgtctgtgtggttctgcttgggctgcaggggttccatgtccttcatttttctgtgggtctgaactgggaggtgggcaagacccaccagctttcaaatcacctccccctgcaaaaaaccagaacaaaacaaaacaaacctatcttctagaaagaaaaggagccccc

SEQ ID NO: 542 - DNA, 417 bp, Homo sapiens
  MAP TO AC007966.2; EXPRESSED IN HELA, SIGNAL = 1.2; EXPRESSED IN HEART, SIGNAL = 1.4; EXPRESSED IN BT474, SIGNAL = 0.84; EXPRESSED IN BONE MARROW, SIGNAL = 0.89; EXPRESSED IN FETAL LIVER, SIGNAL = 0.95; EXPRESSED IN LUNG, SIGNAL =  44; EXPRESSED IN ADULT LIVER, SIGNAL = 1.1; EXPRESSED IN BRAIN, SIGNAL = 1.7; EXPRESSED IN PLACENTA, SIGNAL = 0.96; EXPRESSED IN HBL100, SIGNAL = 0.91
atcacaccaaaagcagaggcaacaaaagacaaaaatagacaagtttggactacatcagactaaaaagtaaaggaaacaatcaacagagtaaaaaagcatcctatgaaatggaagaaaatatttgtttgtgagacatatatctggtaaggtattaatatccaaattacataagggacttctacaactgaatagcaaaagaaaaaatctaattaaaaatgggcaaaggacctgaacagacatttttccaaaaagacataaaaatggttaacatgtatatgaaaagttgctcaacattactaatcatcaggaagatgaaaatcaaaaccgcaatgacatattgcctcacacctgataagacagctattataaaaaccaaaaaggtaagtcttaaggtaaaggatgtggggaaaacagaac

SEQ ID NO: 543 - DNA, 464 bp, Homo sapiens
  MAP TO AC007910.1; EXPRESSED IN BONE MARROW, SIGNAL = 1.8; EXPRESSED IN FETAL LIVER, SIGNAL = 2.1; EXPRESSED IN LUNG, SIGNAL = 1.7; EXPRESSED IN ADULT LIVER, SIGNAL = 2.5; EXPRESSED IN BRAIN, SIGNAL = 1.7; EXPRESSED IN HEART, SIGNAL = 1.7; EXPRESSED IN PLACENTA, SIGNAL =   2; EXPRESSED IN HBL100, SIGNAL = 1.7; EXPRESSED IN BT474, SIGNAL = 1.7; EXPRESSED IN HELA, SIGNAL = 1.4
aactattcatctggctcttggcatgttgattatctttaaaaaaaaaaagaaaaaaaacccttagatctgctcaactatcttgtaaattgcttggtgtaaaaacaatgtttgtagctcctggtctttcctgcacggcatttagcatataatgagtgcttaataagtaggtgcttcccacagaggacctgagctttgccaaaaaaggtttctacagttcagttaaactttcttgttaatatttttcctgtctttctttgaacccatttgagacaaatttttatgtttctccttttctgtaaggttcaagattatctaagaagatttgaaagtataccagatatgcttgaattggatcacctcacagtttcaggagatgtgacatttggaaaaaatgtttcattaaaggtatgttgttacaatgaaaattatatttcttacagcttacaatataggtctcattttct

SEQ ID NO: 544 - DNA, 464 bp, Homo sapiens
  MAP TO AC007906.2; EXPRESSED IN BONE MARROW, SIGNAL = 1.6; EXPRESSED IN HBL100, SIGNAL = 1.4; EXPRESSED IN FETAL LIVER, SIGNAL = 1.5; EXPRESSED IN LUNG, SIGNAL = 1.4; EXPRESSED IN ADULT LIVER, SIGNAL = 1.4; EXPRESSED IN BRAIN, SIGNAL = 1.9; EXPRESSED IN PLACENTA, SIGNAL = 1.4; EXPRESSED IN BT474, SIGNAL = 2.1; EXPRESSED IN HELA, SIGNAL = 1.4; EXPRESSED IN HEART, SIGNAL = 1.8
aattctgccctgggttgagattatttctgttttgttgtgagcgtagtgaagtacactgtgtttgttgttcattggcctgaaataaggcaaagtcatggtgtgccacaaagcttttattttgatgcatagagtgtgaatgtccttgttggtgaaaaggagatccattttgatttgaaatggtagtagctgtctgatggccccacattggactgccatctgatacatctggaaacaaaccattgggttggttttggggatggattggagaacaattaaactgagagtgtggagataacacatgttcagctgggctaccaaaagattgattaacatggtgaaattttattgaatcaaattgatttaactgttcaaaatcagtcatcttctgatgtgttggagtaccttgaacatggttcagtgaatctatgtgcaacggttcaaattctgcacccaaattcaattca

SEQ ID NO: 545 - DNA, 482 bp, Homo sapiens
  MAP TO AC007906.2; EXPRESSED IN BONE MARROW, SIGNAL = 4.6; EXPRESSED IN HBL100, SIGNAL = 2.7; EXPRESSED IN FETAL LIVER, SIGNAL = 3.4; EXPRESSED IN ADULT LIVER, SIGNAL = 5.4; EXPRESSED IN PLACENTA, SIGNAL = 4.6; EXPRESSED IN BT474, SIGNAL = 4.1; EXPRESSED IN LUNG, SIGNAL = 4.4; EXPRESSED IN HELA, SIGNAL = 5.1; EXPRESSED IN HEART, SIGNAL = 4.1; EXPRESSED IN BRAIN, SIGNAL = 4.3
tccaacagtccctcgaagtcttatttcagcattaaatcaaaagtccacagtccaaagtctcatctgacacaaggcaagtcccttccacctatgagcctgtaaaatcaaaagccagttagttacttcctagatacaatgaaggcacaagcattgggtaaacatatctgtttcaaatgggagaaattggccaaaacgaaggggctacaggccccattcaagtccaaaatccaacaggatggtcattaaaccttaaagttccaaaatgatctcctttgactccatgtctcacatccagggcatgctgatacaagaggtgggctcccacagccttgggcatttccatccctgtggctttgcagactacaactcccctcctggctgctgtcatgggctgctgttgagtgtctgcagcttttcccaggcgtacagtgcaaaatgtcagtggatctatcattttggggtctggaggatggtgatcctct

SEQ ID NO: 546 - DNA, 468 bp, Homo sapiens
  MAP TO AC007900.1; EXPRESSED IN PLACENTA, SIGNAL = 1.3; EXPRESSED IN BONE MARROW, SIGNAL =   1; EXPRESSED IN HBL100, SIGNAL = 1.2; EXPRESSED IN FETAL LIVER, SIGNAL = 1.9; EXPRESSED IN ADULT LIVER, SIGNAL = 1.1; EXPRESSED IN BRAIN, SIGNAL = 1.7; EXPRESSED IN HEART, SIGNAL = 1.2; EXPRESSED IN BT474, SIGNAL = 9.7; EXPRESSED IN LUNG, SIGNAL = 1.3; EXPRESSED IN HELA, SIGNAL = 1.7
  unsure 99
ttctttatccctgtatcctgaaatggtacgctgattttttttagaaagcgttaactacttttagaagcttgacatgttccttgacaattctcttagtgnggagaacagtagaattttttttctctaagaaaaggatataattttattaattattcagaatcgttgcttaaaatgccattgttctcagattggtacatgaactgaatgaaaaatgttctatgtaagaaaacataaagtaagccttttaatatatgtacctgttccatgtgttcaaatactgctggagtagcaatagtagcaggtgcttcttcaataatcttctgatgcctgcgttgtacagagcaatcacgaccaaacaaagagatagcattgccatattggtccgctaagatctgcacctccagatgacgagattgtttggctagtctcatcacaaatatgggagatccaggaacttcagcttgaacc

SEQ ID NO: 547 - DNA, 452 bp, Homo sapiens
  MAP TO AC007900.1; EXPRESSED IN LUNG, SIGNAL = 2.2; EXPRESSED IN PLACENTA, SIGNAL = 1.1; EXPRESSED IN BT474, SIGNAL = 8.4; EXPRESSED IN BONE MARROW, SIGNAL = 1.2; EXPRESSED IN HBL100, SIGNAL = 1.5; EXPRESSED IN FETAL LIVER, SIGNAL = 1.8; EXPRESSED IN HELA, SIGNAL = 2.1; EXPRESSED IN ADULT LIVER, SIGNAL = 1.2; EXPRESSED IN BRAIN, SIGNAL = 2.1; EXPRESSED IN HEART, SIGNAL = 1.3
  unsure 174
tagggaatagccccaggaacaaagctataaggtatacatgatccaagtgtgcttttctcataactacagatacttatccttcacatacagtactttcactgttgggtttgtaccctgaggcagttttgtgaggaatacaatgcttaaaagtatacaagcacaacatccaaaaangtaaggaggatccaaataggaaggaatcctacaacataaactctggcattggtagccagaaaaaaatatagtgttatcctataaatacctgctggctgggaaactgacagaggactgatgtgatgttgctagcatactgagccatttccttcttgatagacttctccacattggggggaatgcggccagacacactggtcataatatcttgcaattctaggagaggcagggagggatctctgagggttttcatcaatcgctctacccagtcttttacc

SEQ ID NO: 548 - DNA, 460 bp, Homo sapiens
  MAP TO AC007900.1; EXPRESSED IN PLACENTA, SIGNAL = 0.91; EXPRESSED IN BT474, SIGNAL = 3.8; EXPRESSED IN FETAL LIVER, SIGNAL = 1.1; EXPRESSED IN LUNG, SIGNAL = 0.98; EXPRESSED IN HELA, SIGNAL = 1.7; EXPRESSED IN ADULT LIVER, SIGNAL =   1; EXPRESSED IN BONE MARROW, SIGNAL = 1.3; EXPRESSED IN HBL100, SIGNAL = 0.9; EXPRESSED IN BRAIN, SIGNAL = 1.7; EXPRESSED IN HEART, SIGNAL = 0.93
ttccaaagaatgtggcatagcaaatatttaacactgaaaaaggcatacacttgaaagcccaaatcaacacttttgttaaatttcttcctacttatccctaggacacaggaatctgtattgaggttgactatagtgcaatcatttttatatgtctattactgacacattttaaacagaaattattttaaaaggattttacttggaagtcctatgtttgggaatccccctaagttaacattctcctacttaaaggctgtgctgttccatgttttagttttgagagtgatgctttcataatgctaataactcacctgcattggctttaaggtcttcaggtgtgaccatgacaacgaatctaattgcacgttcatttcgaaacatttcataagaccacctacggatagaccgcatgcatttcactgctgcaatgccattgttagcaataagaacctgggagggg

SEQ ID NO: 549 - DNA, 469 bp, Homo sapiens
  MAP TO AC007880.1; EXPRESSED IN ADULT LIVER, SIGNAL = 2.8; EXPRESSED IN BONE MARROW, SIGNAL = 2.8; EXPRESSED IN HBL100, SIGNAL = 2.8; EXPRESSED IN BRAIN, SIGNAL = 3.1; EXPRESSED IN HEART, SIGNAL = 2.6; EXPRESSED IN PLACENTA, SIGNAL = 4.7; EXPRESSED IN BT474, SIGNAL = 2.8; EXPRESSED IN LUNG, SIGNAL = 3.3; EXPRESSED IN HELA, SIGNAL = 2.9; EXPRESSED IN FETAL LIVER, SIGNAL = 3.4
cagaatttgtgtgtgtgtgtggttctagaagctgggaagtccaagatcaaggcaccagcagattctgtgtctcatttgtcctcacatggtggaaggggcaaagggtttctctctggcctcttttataagggtattaatcccatgcacgacggttctaccctgtgacctaatcacctctcaaaggccacgcttcctaatactatcaccttagggattaagatttcaacataagaatgggcattgggtggaagacattcagtccatagcattaagtttcttgccctccatattctctttcctacaggttggaactccaatatggtgctggtagccagctgtgaccaagaagaggacaaccggagcaacaatcttagacacaaggatggaagctgtaaggcaggggaggagttccagggtccctggagaacttcatggagctgaggacgtccttcctgttttgtagtgttgc

SEQ ID NO: 550 - DNA, 466 bp, Homo sapiens
  MAP TO AC007880.1; EXPRESSED IN PLACENTA, SIGNAL = 1.8; EXPRESSED IN BT474, SIGNAL = 3.4; EXPRESSED IN HEART, SIGNAL = 1.4; EXPRESSED IN HELA, SIGNAL = 2.3; EXPRESSED IN LUNG, SIGNAL = 2.3; EXPRESSED IN FETAL LIVER, SIGNAL = 4.2; EXPRESSED IN HBL100, SIGNAL = 1.9; EXPRESSED IN BONE MARROW, SIGNAL =   2; EXPRESSED IN BRAIN, SIGNAL = 2.9; EXPRESSED IN ADULT LIVER, SIGNAL = 1.3
tcatgaaaagctcgttgctgttgggactcccattcaaaagactctttgttatccccctttgtgacttcatacagaggcttggccagtactgcaaagtttgggatccataacctgcagaaccccacagctcctaagaattctctcaactgctttctggtctcaggctccggtaggttgcaaatgacctgctttctttttgatcccaggctgcactctccctgtcggatagtaaatcccaagtaacatacctgctgttggcagatctgagctttcttcttggacaccttatacccacagtcctccaggtgctggagcacggtatccattcccttggtgcgcccgactgctgtggggtgtcccagcaggaggtcatcaatgtactggagcaacacgcaacctaggtctctagcggggaacttttggaagtctcgagccaatgcctccctgaagatggtgggggagttct

SEQ ID NO: 551 - DNA, 469 bp, Homo sapiens
  MAP TO AC007880.1; EXPRESSED IN FETAL LIVER, SIGNAL = 1.5; EXPRESSED IN LUNG, SIGNAL = 1.6; EXPRESSED IN PLACENTA, SIGNAL = 2.2; EXPRESSED IN BT474, SIGNAL = 1.7; EXPRESSED IN BONE MARROW, SIGNAL = 1.9; EXPRESSED IN HBL100, SIGNAL = 1.4; EXPRESSED IN HELA, SIGNAL =   1; EXPRESSED IN ADULT LIVER, SIGNAL = 1.2; EXPRESSED IN BRAIN, SIGNAL = 1.4; EXPRESSED IN HEART, SIGNAL = 1.6
aaaccaatggctggaggtgggcggtggaggtggagagcaaagagcggctccttgtgggaagatgagactaaaatatcctctatgaaatcagggggagaaggtggggcggggctctgtgtaaggaaatctgagtgagctcctaagtccactttttttttttttcctggtgcacatttagctgagctcttttgaaagatggatgtgtatctgtccacaagcacatacccccaagaccaaatcagaaggatggtagaaaagtggggagaaggcaagtgggtgaatgcgggccacagtggcatgaccagcgctcaggctggggcccaggcgggatttgagaataaagggatcttcttggagtacacagtcctgggactggggaagaaggctgtcaccttcatcagaggggacttggaactcctggatttaaattttgactcccaggagggcatctggttgctcaggggataaa

SEQ ID NO: 552 - DNA, 481 bp, Homo sapiens
  MAP TO AC007877.3; EXPRESSED IN HBL100, SIGNAL = 0.74; EXPRESSED IN FETAL LIVER, SIGNAL = 0.8; EXPRESSED IN HELA, SIGNAL =   1; EXPRESSED IN ADULT LIVER, SIGNAL = 0.78; EXPRESSED IN BRAIN, SIGNAL = 0.8; EXPRESSED IN HEART, SIGNAL = 0.95; EXPRESSED IN PLACENTA, SIGNAL = 1.6; EXPRESSED IN LUNG, SIGNAL = 1.1; EXPRESSED IN BONE MARROW, SIGNAL =   1; EXPRESSED IN BT474, SIGNAL = 0.7
ttttcttgagaaattgaaatgcagtatttattttttattgtacatgcactttcctttttgaactcattgctgcttaaaaggtatcttacaaaaagacaagtaaatgtagatttatagcagaaaactgttataataagagatttcagacttttctctataaaccgtatggcagaactacctagcctctatttcctatacatatttcagatgtaagtaatctagaatctcccacattttccactgacttactaactggctgtctggaggcttcacgcttttgaaaccagcaacgtaggccatggcacaactggctctagcaccaagtgcctggcagaagcagcagaattgcccactttttccaatacaaactaaaaccagaaagatatagtactccctagctttccctgtcaatacacactgtttcatcagcaagtacctgctgactaatacctaaaaaagagatgtttgttcgattctggga

SEQ ID NO: 553 - DNA, 487 bp, Homo sapiens
  MAP TO AC007876.1; EXPRESSED IN BONE MARROW, SIGNAL = 1.9; EXPRESSED IN FETAL LIVER, SIGNAL = 0.99; EXPRESSED IN LUNG, SIGNAL = 0.7; EXPRESSED IN ADULT LIVER, SIGNAL = 0.78; EXPRESSED IN PLACENTA, SIGNAL = 0.76; EXPRESSED IN BT474, SIGNAL = 0.64; EXPRESSED IN HELA, SIGNAL = 0.7; EXPRESSED IN BRAIN, SIGNAL = 0.96; EXPRESSED IN HEART, SIGNAL = 0.87
cacacttccctgtcttccagttcagtaaaaaacaggttcaatactcaggcagcccctgatatcagaagaaagttgctgaaataggccctgtctaaaaatctttctagtttttctcaccaaacaatcccacattcctaagccctctccactgtactgtctcattcacaatcttgcaaaacttgacagaagcatttagtcttttactgtaacatggcctggtcccaatacacattagataatgacagtcgatggcccaaaaatcatacctttgacttgcaaattctcaggaagcttaacaactttacagcgagggatggcaaatggcaactggttctctatattcaggctttctttgatgtctaccttaaatgtaaccttccactgtgtcaagcttgcactgctcataaaatctttctttttaataaaaatcctccccaggtctttccttactatgaaactccttttaacccagtagataaagcccctc

SEQ ID NO: 554 - DNA, 476 bp, Homo sapiens
  MAP TO AC007876.1; EXPRESSED IN HBL100, SIGNAL = 4.5; EXPRESSED IN HELA, SIGNAL = 7.6; EXPRESSED IN ADULT LIVER, SIGNAL = 5.4; EXPRESSED IN PLACENTA, SIGNAL = 5.3; EXPRESSED IN BRAIN, SIGNAL =   8; EXPRESSED IN HEART, SIGNAL = 3.1; EXPRESSED IN LUNG, SIGNAL = 4.7; EXPRESSED IN FETAL LIVER, SIGNAL = 6.6; EXPRESSED IN BONE MARROW, SIGNAL = 2.5; EXPRESSED IN BT474, SIGNAL = 4.7
ttcttcctcacacctgatgcatatactttctgctccctgcctctttcagctatactcactctttgttgagtctcccacaattaccattgttcctggcccagacttcaatcttgcctcccacattattccggataccacacctgaccctcatgactgcatctctctgacccacctgacattcaccccatctccccacatttccttcttccctgtttctcactctgatcacacttggtttattgatggcagttccacaaggcctaatcgccactcaccagcaaaggcaggctatgcaatagtatcttccacatctgttattgaggctaccattctgccctgctccactacctctcagcaagccaagctagttgccttatctcaggccctcactcttgcaaaaggactacatgtcaatatttatactgactctaaatatgccttccatattctgcactaccatgcagtcatattggctg

SEQ ID NO: 555 - DNA, 479 bp, Homo sapiens
  MAP TO AC007860.6; EXPRESSED IN PLACENTA, SIGNAL = 1.1; EXPRESSED IN BT474, SIGNAL =   1; EXPRESSED IN BONE MARROW, SIGNAL =   1; EXPRESSED IN HEART, SIGNAL =   1; EXPRESSED IN ADULT LIVER, SIGNAL = 6.8; EXPRESSED IN HELA, SIGNAL = 1.3; EXPRESSED IN LUNG, SIGNAL = 1.2; EXPRESSED IN FETAL LIVER, SIGNAL = 3.8; EXPRESSED IN BRAIN, SIGNAL = 1.1; EXPRESSED IN HBL100, SIGNAL = 1.2
tgcagccaaagagttagtttctttaaaaagtaacaaaaccatctctctccgttcatgggggttatatgtttacaaactgcaaactatccgttgtactattatattcatttgtgaactctagctgaagtgagagatcatggatattactttaaaattacaaagatgtgtccttttgcaaactgttgtcataatactctttttttttcaagatggcaggccttggcagaattgactggagactctgttttggcctttggatttcccgtgaaacatggagatccctttctttattttcctactctgctctgatttcttcattcaccagagcacttgtaatatatctcatcatgcttataagcaggaaacctcctccttctgtgttagaacatattcttgtggtcaggggctggatttttttaccttcttcatgcctggcacataatagatgctcaaatagtgcatgaatagatcgatgaatc

SEQ ID NO: 556 - DNA, 475 bp, Homo sapiens
  MAP TO AC007860.6; EXPRESSED IN PLACENTA, SIGNAL =   2; EXPRESSED IN BONE MARROW, SIGNAL = 2.2; EXPRESSED IN HBL100, SIGNAL = 2.1; EXPRESSED IN ADULT LIVER, SIGNAL = 1.3; EXPRESSED IN BRAIN, SIGNAL = 1.7; EXPRESSED IN BT474, SIGNAL = 3.2; EXPRESSED IN FETAL LIVER, SIGNAL = 2.1; EXPRESSED IN LUNG, SIGNAL = 1.6; EXPRESSED IN HELA, SIGNAL = 1.7; EXPRESSED IN HEART, SIGNAL = 1.8
actatgaagggcccaggaacactttctgggaaagggaaatgttctgtgtcttgctggtttggtgcatttgaatacttgcatttgtcaaaactcatcaaactgtttatttacaaattgagcattgcacggcatgtgacttatgcccgattttttaaaaaaatgtacaaatgaaaaaacatagaaagagaggaaaaagcaaaatatctgtattttaattatcacatgacctgactggctgcttatcttacccaccttcccatggacacagggccagtgcctggcaggcaaggccacgtgcaagaaaagctcttaattgatgtgattaactacatctcaatagggagcctggttaacaacaggggagtgaaaaggaggctatttttcactctcccaactggtgaatgcctggaaggggtgatgggggcacttggagggctgccccctgcggtgcagggggagacaggacagctgcttt

SEQ ID NO: 557 - DNA, 448 bp, Homo sapiens
  MAP TO AC007857.1; EXPRESSED IN HBL100, SIGNAL = 7.7; EXPRESSED IN ADULT LIVER, SIGNAL = 6.8; EXPRESSED IN BRAIN, SIGNAL = 8.3; EXPRESSED IN HEART, SIGNAL = 6.8; EXPRESSED IN PLACENTA, SIGNAL =  13; EXPRESSED IN BT474, SIGNAL = 6.5; EXPRESSED IN BONE MARROW, SIGNAL =  12; EXPRESSED IN FETAL LIVER, SIGNAL = 6.3; EXPRESSED IN LUNG, SIGNAL = 9.1; EXPRESSED IN HELA, SIGNAL = 8.1
caagaccaggagtttgaggccaccctgagtaacacaacaagacccctacctctacaaaaaataaaataaattagccagtgtggtgacatgtgcctgtagtcccagctacttcggagactgaggcaggaggatctcctgagcccaggagtcagagcttgcagtgagctaggatagtgccactgtactccaacctgggtgacagagtgacaccctgtttctgaagaaaaagaagaagaagaaaggaagaagaagaagaggaggaggaggagaagaggaagaagaagaagaagaaagaagaagaagaagaagaggaagaagaagaagaagaggaagaagaagaagagaagaagaagaagaagaagaagaagaagaagaagaagaagaagaagaagaagaagaagaagaagaagaagaagaagaagaagaaacaaacaaacaaaagggccac

SEQ ID NO: 558 - DNA, 475 bp, Homo sapiens
  MAP TO AC007857.1; EXPRESSED IN LUNG, SIGNAL = 1.5; EXPRESSED IN HELA, SIGNAL = 1.8; EXPRESSED IN HEART, SIGNAL = 1.7; EXPRESSED IN PLACENTA, SIGNAL =   2; EXPRESSED IN FETAL LIVER, SIGNAL = 1.4; EXPRESSED IN ADULT LIVER, SIGNAL =   2; EXPRESSED IN BRAIN, SIGNAL = 1.8; EXPRESSED IN BT474, SIGNAL = 1.6; EXPRESSED IN BONE MARROW, SIGNAL = 1.6; EXPRESSED IN HBL100, SIGNAL = 1.4
ctatagttctggggtggggggcaggaatctgcacattcagcaagtttcccagggtccacgtacaacattttttgaaaagcattggtgtactgggggagattgtattgtgcaccccctctaggaatcccactgtgatggccacacccatgatacttctgttgaggaacttatcacactcgattgcagctgtctgtctgtgtctaccaccagacagtggaacccattcctattcatctttgtagctcatgtctctggcacatagtgccataccagagacatgaggtaaacatttatcagatgtataaagatgtgcacaactccacattagtcacacacacacacatcattgtcatcatcaccatcatcatcgtcgtcgtcatcattgtcatctactgtattcacatggaaaaagctggtcctagctctgccccactacgtggtgcctggcatgaatacctgcttttgcaacatgcta

SEQ ID NO: 559 - DNA, 478 bp, Homo sapiens
  MAP TO AC007847.1; EXPRESSED IN FETAL LIVER, SIGNAL = 1.5; EXPRESSED IN LUNG, SIGNAL = 1.4; EXPRESSED IN PLACENTA, SIGNAL = 2.5; EXPRESSED IN BONE MARROW, SIGNAL = 1.2; EXPRESSED IN HBL100, SIGNAL = 0.98; EXPRESSED IN ADULT LIVER, SIGNAL = 1.1; EXPRESSED IN BRAIN, SIGNAL = 1.1; EXPRESSED IN HEART, SIGNAL = 1.1; EXPRESSED IN BT474, SIGNAL = 0.94; EXPRESSED IN HELA, SIGNAL = 0.91
ttcccctttccttgcttctctttatttcctgaattgctttagccaacctgtaatattttgcttgcagcttgcaaggagttattacttattatggggtggattggatactcccccacaaaaaaataatgttgaagtcctaaactccagggacctcagaatgtgtgatcttctgtggaaagagatcattcttctcattgggtacattctttgcagatgtaaccaagttaaaatgagggcacttgggtgggccctaatccaaatgactggtgttctcataaagggggagtgtggatgcagacacagacgtgtgtggagggcggtctacagggagagacgcagggaaagtgccagttgcaggcggggatgggaatgctcgtctacaagcccaggagcacagagattgctgcaaagccccagaagctgggaagtggccagaagggattcccctccaagctttagagggagcatggctctgtag

SEQ ID NO: 560 - DNA, 491 bp, Homo sapiens
  MAP TO AC007847.1; EXPRESSED IN HEART, SIGNAL = 1.4; EXPRESSED IN PLACENTA, SIGNAL = 5.5; EXPRESSED IN BT474, SIGNAL = 1.4; EXPRESSED IN LUNG, SIGNAL = 2.1; EXPRESSED IN HELA, SIGNAL = 0.93; EXPRESSED IN ADULT LIVER, SIGNAL = 1.3; EXPRESSED IN BRAIN, SIGNAL =   2; EXPRESSED IN BONE MARROW, SIGNAL =   1; EXPRESSED IN HBL100, SIGNAL = 1.4; EXPRESSED IN FETAL LIVER, SIGNAL = 2.2
  unsure 22
  unsure 44
  unsure 56
  unsure 267
  unsure 280
  unsure 466
aaccccagaaagtggtgaaccngcaagactgggagaccctcttngcaaactgggtnggaaccacagtgatgggagttgctctttagagtttgttctagatccctgcagctgggtttcaggtcaggcagcacggcattgttctcacacacctcatacagcagaaccaattcctgatccctctctcgggctcgctgtggcgtggtccagctggaacgaagatgccagctgacgcccaccacaccctctccccagcctggcccaggcggncactcacagttcncaagatcaggatgacgtccgtcttgttctcatagacctcgtgcagggtgatgacattggggtgctggatctccttcaggatgctgacctcccgctcgatgtcctcgcggctcacaccccgccggctggacttagtcctccttttcttgatgaatttggcggcatactggaggccggtgcttttctncacggcatttcttcacaaccgcaaa

SEQ ID NO: 561 - DNA, 449 bp, Homo sapiens
  MAP TO AC007846.1; EXPRESSED IN BRAIN, SIGNAL = 2.1; EXPRESSED IN BT474, SIGNAL = 1.4; EXPRESSED IN LUNG, SIGNAL = 1.9; EXPRESSED IN HELA, SIGNAL = 2.4; EXPRESSED IN ADULT LIVER, SIGNAL =   2; EXPRESSED IN HEART, SIGNAL = 1.5; EXPRESSED IN PLACENTA, SIGNAL = 1.5; EXPRESSED IN BONE MARROW, SIGNAL = 1.7; EXPRESSED IN HBL100, SIGNAL = 1.5; EXPRESSED IN FETAL LIVER, SIGNAL = 1.7
  unsure 326
  unsure 367
  unsure 397
agaagatggctctggacagggccctccctctctctgagatccttctggatgaggggagtcaaggttaacaggagaggaagggaaggtgggggccagctggctgtcacccagggctgaccctggcctcgggggtctggggaggtctctggcaagaggaatcgcacaccctggattttcaagacacatacccccagagttaacggcgttcactctactgtattccaaactcagggtggtaagtggcccattcatttcctccctccattagagagatcatctgggtgatggatcttgtcactgacagggttctggatccaagcctgggnctgacgcagctgctgctcctgctggtcctccatagagacangccggggtttcctgtcccaatccatcacanggaagtcttccctgggctcctagtcactctgggtgggcttccaggaatgagt

SEQ ID NO: 562 - DNA, 395 bp, Homo sapiens
  MAP TO AC007846.1; EXPRESSED IN HBL100, SIGNAL = 1.6; EXPRESSED IN FETAL LIVER, SIGNAL = 1.5; EXPRESSED IN ADULT LIVER, SIGNAL = 1.4; EXPRESSED IN BRAIN, SIGNAL = 1.2; EXPRESSED IN HEART, SIGNAL = 1.1; EXPRESSED IN PLACENTA, SIGNAL = 1.4; EXPRESSED IN BT474, SIGNAL = 2.4; EXPRESSED IN HELA, SIGNAL = 1.4; EXPRESSED IN LUNG, SIGNAL = 1.7; EXPRESSED IN BONE MARROW, SIGNAL = 2.2
  unsure 347
  unsure 372
ttttgctctttccttcctggggacgcaggtttccatcaggttgcattcctcttcaacctggagaacatcctttggcagttcttgctgtgcaggtctgctgccaacacattctcttagcttctatttgtctgaaaatgactctatttcaccttcatttttgaagtatgtttttactgaatacaaacagtaaaactctcaaggctaacaggatttttttttcctctttaatcacttcaaatatgttattcctttgtttttcagcctccactgtttctgagaaatcagtggtagtccttatcattgttatcctatataaaatgtgtcttttttttcctctggctcccttncaagattttgtctttattttcagcnaggttgagtatgatatgggtggg

SEQ ID NO: 563 - DNA, 468 bp, Homo sapiens
  MAP TO AC007846.1; EXPRESSED IN PLACENTA, SIGNAL = 6.4; EXPRESSED IN BT474, SIGNAL = 1.6; EXPRESSED IN BONE MARROW, SIGNAL = 1.8; EXPRESSED IN HBL100, SIGNAL = 1.7; EXPRESSED IN HELA, SIGNAL = 1.4; EXPRESSED IN ADULT LIVER, SIGNAL =   2; EXPRESSED IN BRAIN, SIGNAL = 1.6; EXPRESSED IN HEART, SIGNAL = 1.8; EXPRESSED IN LUNG, SIGNAL = 1.4; EXPRESSED IN FETAL LIVER, SIGNAL = 5.5
  unsure 404
  unsure 439
acaagccatacaggaccacctggggatcttgtttggctaggcattcagattcaggggcctgggatgagcctgattgtctttctaagaaggtctcaggcaaagctgcagctactggtccagggccacacttccagtagcaagacatcttacatccagttcctgtgaggaacacagagagtgctttaaagggccaagctcatattagcagctaaataagtgggaggctttattaatactattatcatctccatcacctgtgcctgacatgcagctggtgctggaaataatggtagctagttatctcccctgctacctgcaagtgtctggagggcaggaaacgtgcctaattcctccatcaaaatgccttgcgcatagaaagctaaaaaccacgctgctgtgaaggnaaacagcaaagtcgcttctatcagtctttgcaaanggggtctgtcctgtgttctgtgcatgacc

SEQ ID NO: 564 - DNA, 458 bp, Homo sapiens
  MAP TO AC007846.1; EXPRESSED IN PLACENTA, SIGNAL =  47; EXPRESSED IN BONE MARROW, SIGNAL = 0.91; EXPRESSED IN LUNG, SIGNAL =   1; EXPRESSED IN HELA, SIGNAL = 1.4; EXPRESSED IN ADULT LIVER, SIGNAL = 1.1; EXPRESSED IN BT474, SIGNAL =   1; EXPRESSED IN HBL100, SIGNAL = 1.2; EXPRESSED IN FETAL LIVER, SIGNAL = 1.2; EXPRESSED IN BRAIN, SIGNAL = 1.1; EXPRESSED IN HEART, SIGNAL = 1.8
tgtcaaccagaagggttttggatacgagtgtattcatttattcaatgaatgtttcttgagctgcgtatcagacactgttggtgtgctatgagcacaacctaatgctggaaactttcggagaggaatgggggcaattactggaattggtttaagattatgttttgttcagtaagatcaaatttacatgaagaatacaagcagaataaacctggagttcgggacatgaagacagttcaggaacaccgttcaggagcatctcagaagaagagcatcgaagactttgaggggaagggagtgaggtctgatgggcgaggagactttaaaaactcaggtggagcatttatgggcaaggacaatgaagtatactctgactctgggctgttctgcagtgacttcagtctagacaaaagtctggataaaagaggaggaggggtcattggatagctttgtgacggtcc

SEQ ID NO: 565 - DNA, 458 bp, Homo sapiens; identical to SEQ ID NO: 564
  MAP TO AC007846.1; EXPRESSED IN BRAIN, SIGNAL = 6.5; EXPRESSED IN HEART, SIGNAL = 3.3; EXPRESSED IN PLACENTA, SIGNAL = 3.3; EXPRESSED IN BT474, SIGNAL = 4.5; EXPRESSED IN BONE MARROW, SIGNAL = 3.4; EXPRESSED IN HBL100, SIGNAL = 4.6; EXPRESSED IN FETAL LIVER, SIGNAL = 3.3; EXPRESSED IN LUNG, SIGNAL = 2.4; EXPRESSED IN HELA, SIGNAL = 3.5; EXPRESSED IN ADULT LIVER, SIGNAL = 2.9

SEQ ID NO: 566 - DNA, 456 bp, Homo sapiens
  MAP TO AC007790.1; EXPRESSED IN HELA, SIGNAL = 2.1; EXPRESSED IN ADULT LIVER, SIGNAL = 2.9; EXPRESSED IN BRAIN, SIGNAL = 2.4; EXPRESSED IN HEART, SIGNAL = 1.9; EXPRESSED IN PLACENTA, SIGNAL = 1.6; EXPRESSED IN LUNG, SIGNAL = 2.1; EXPRESSED IN FETAL LIVER, SIGNAL = 2.3; EXPRESSED IN HBL100, SIGNAL = 1.7; EXPRESSED IN BONE MARROW, SIGNAL = 1.9; EXPRESSED IN BT474, SIGNAL = 2.8
tccaaaccaatagcctcctgtaaattttatttaacagtctttgtcagaataaagatatttacttttaattttcttgaagaggagaaagtcactttttaagattcacttcacagcaaaactttgtaaaagccctcgtgagatacctcctcctcagcgcaaagtttgcagtcatggcagcagctaaaaatgtgcctacaggccgcatgccaccatgccatctccctgttaccattaccttcttctttctctccttcctgctgatgcagcagtgcctccttggatacaggatcattcctgctctaggctttttcctgagaggggcagctctcctgggattctggcgaatcaaatgcttcatctcaacagatttgtttatattcgccccttttccatgtggtgggaggaaaaactttttcactactttctttaattcaatgcttggggactgctgaatta

SEQ ID NO: 567 - DNA, 464 bp, Homo sapiens
  MAP TO AC007786.1; EXPRESSED IN BT474, SIGNAL = 1.8; EXPRESSED IN BONE MARROW, SIGNAL = 2.7; EXPRESSED IN HELA, SIGNAL = 1.7; EXPRESSED IN ADULT LIVER, SIGNAL = 1.5; EXPRESSED IN HEART, SIGNAL = 1.9; EXPRESSED IN PLACENTA, SIGNAL = 1.6; EXPRESSED IN HBL100, SIGNAL =   2; EXPRESSED IN FETAL LIVER, SIGNAL = 1.7; EXPRESSED IN LUNG, SIGNAL = 2.1; EXPRESSED IN BRAIN, SIGNAL = 2.5
accacaagaacagaatgggggaaactgtccccatgattcagttatctccacctggccccgctcttgacatatggggattattacaattcaaggtaagatttgggtggggacacagccaaaccataccaagcaggtatgtgcaaaaaaaaaaaatagcgcagatccaagcacctcggtcacaagccctggtcccaaggggcaggagtgacttttccaagctggaccccaccaaggcaagtggcagctatgaccctctttttcctcactctcatgccctctacactctcaactctgcctctcccttcctagctcagctttcatgatgataatctcagagtccacagcactgtgttagaagacagagaagagaaaaagaagctcacagtcttaagggtgacagccctaaaatattgagttagaaattgcctggggactcgacttcacagtcatggcaaagtagatgc

SEQ ID NO: 568 - DNA, 478 bp, Homo sapiens
  MAP TO AC007786.1; EXPRESSED IN PLACENTA, SIGNAL = 3.6; EXPRESSED IN HBL100, SIGNAL = 2.8; EXPRESSED IN FETAL LIVER, SIGNAL = 2.6; EXPRESSED IN BRAIN, SIGNAL = 2.1; EXPRESSED IN BT474, SIGNAL = 3.2; EXPRESSED IN BONE MARROW, SIGNAL = 3.1; EXPRESSED IN LUNG, SIGNAL = 2.7; EXPRESSED IN HELA, SIGNAL = 2.2; EXPRESSED IN ADULT LIVER, SIGNAL = 1.5; EXPRESSED IN HEART, SIGNAL = 2.4
agggtcttggacagcatctctggacctgccctgggccacaggggagctcacggtcctgatgtgtgggtcttaggcttggcagcattcaccaccagctgacagaagagccctagggtggcctagcagaacccccttgtggactggtggaagtggaggctacaggaagaggttcctctgcctgtggaaaaggaagggaaggacggaaaggactttatattgtggtttgtacgccaatttagcttcagtcgaatagaatatcaggtaaattgataaggtttttgtctccaatgtctggctcctagacatcatcactggagatgtctgggtcctgaaggaatttgctgccctgaaggaaagggccttgggtgaggccagtgctgtgctggcttccagtctcactcagcactggccaagtggtggtggccataggggtgcttgcatcaccatatcctgagttccaggtggctcagcagagata

SEQ ID NO: 569 - DNA, 410 bp, Homo sapiens
  MAP TO AC007786.1; EXPRESSED IN HELA, SIGNAL = 1.5; EXPRESSED IN PLACENTA, SIGNAL = 1.1; EXPRESSED IN BT474, SIGNAL = 1.1; EXPRESSED IN BONE MARROW, SIGNAL =   1; EXPRESSED IN FETAL LIVER, SIGNAL = 1.1; EXPRESSED IN LUNG, SIGNAL = 1.1; EXPRESSED IN ADULT LIVER, SIGNAL = 1.4; EXPRESSED IN HBL100, SIGNAL =   1; EXPRESSED IN BRAIN, SIGNAL = 1.2; EXPRESSED IN HEART, SIGNAL = 2.2
aagcaggtcctaggttagatgctttacaaatatctcataaaattcctccaacaattctagaagggattgtatagggaagtatggagttaatactccccattttactgataagaaacgatacttggagagacgggagtaacttttccaaagtcccagagctgttaagtggcagagaacaatggatccttggtctggctgactcgtaggttcatattcttttttatcattatgcattactatttcaataaaaactccagaaaggcctacaaagttacacacaatcacatacatgcaatagagggtgatccattccaaactaaggcaggaaagcaaatacaacatgtgccataagattctggaagccttcctgcaggcagtggtccctgagctggtctttgaggcacagaagg

SEQ ID NO: 570 - DNA, 448 bp, Homo sapiens
  MAP TO AC007786.1; EXPRESSED IN HBL100, SIGNAL = 1.8; EXPRESSED IN ADULT LIVER, SIGNAL = 1.7; EXPRESSED IN BRAIN, SIGNAL = 1.2; EXPRESSED IN HEART, SIGNAL = 2.6; EXPRESSED IN BT474, SIGNAL = 1.1; EXPRESSED IN BONE MARROW, SIGNAL = 1.3; EXPRESSED IN FETAL LIVER, SIGNAL = 1.6; EXPRESSED IN HELA, SIGNAL = 1.6; EXPRESSED IN PLACENTA, SIGNAL =   1; EXPRESSED IN LUNG, SIGNAL = 0.96
tcctagaaatctggactcagggtctttcctctgtgcttccactttacctgtcttagtgtaattgcatctttacaggtttgtgttccctgaggtttaagactgactgtgaactttccagcatggtgtctggaactcagtatgtatgcaatgctgattctttgtaataaacttttgttacaggagctctttgaagctctagttgtcatcatcatggtacccgtcagaagacggtaatagaccaggcagaaatgactgtgaaccctgcctgctgtagatgaggtcatcaaaagtagatgctgcatgccaggtggacacagttgtccaggtacctcagtggccattgtcagcagactcaacaggtctgtaagtgtgaccagatccagcagaggggctctggagtggcagtggaagcaaatgagatatcactccggacaactgaacacactca

SEQ ID NO: 571 - DNA, 487 bp, Homo sapiens
  MAP TO AC007786.1; EXPRESSED IN LUNG, SIGNAL = 1.4; EXPRESSED IN ADULT LIVER, SIGNAL = 4.1; EXPRESSED IN HEART, SIGNAL = 2.6; EXPRESSED IN BONE MARROW, SIGNAL = 2.7; EXPRESSED IN HBL100, SIGNAL = 7.9; EXPRESSED IN PLACENTA, SIGNAL = 1.8; EXPRESSED IN BRAIN, SIGNAL = 2.6; EXPRESSED IN HELA, SIGNAL = 3.9; EXPRESSED IN FETAL LIVER, SIGNAL = 4.7; EXPRESSED IN BT474, SIGNAL = 4.2
ggcttcctctcaaataagtctcctgaggtgacataaagactgaaagaagcctatgacttgagtccaagtctcttaaccaacaatcaccatatcgtcactggtgaactcatacgtggggacttcaaggttgagaggagcaggacccaatctgatcctgccagatgcatcatagtgtgacccatggcaagggcagtaataaccaccaaaatctcctgcatttgcaatgggtacacagccaagatgagtgcaaacacctatcaggataacccattcaggtttctttactcgatctagatcatgctgtgggtccctcaactgtgataattcaactgcagcttcctgctcaatttccttctgggttctatgacgcacaaacaggggtttgcctctccatttgaaagccatgttcttgccttctggaatatcggataacttgatttcgattttcgccagggccaacacatcagcagaagcactcatgctggaa

SEQ ID NO: 572 - DNA, 490 bp, Homo sapiens
  MAP TO AC007777.1; EXPRESSED IN BONE MARROW, SIGNAL = 2.4; EXPRESSED IN HBL100, SIGNAL = 2.1; EXPRESSED IN FETAL LIVER, SIGNAL = 2.2; EXPRESSED IN HELA, SIGNAL = 1.6; EXPRESSED IN ADULT LIVER, SIGNAL = 2.1; EXPRESSED IN BRAIN, SIGNAL = 9.3; EXPRESSED IN BT474, SIGNAL =   2; EXPRESSED IN HEART, SIGNAL = 2.3; EXPRESSED IN PLACENTA, SIGNAL = 2.5; EXPRESSED IN LUNG, SIGNAL = 1.9
gttttcccgtgctgttcttgtgatagtgaataagtctcacaagatatgatggttttacagaggggagttcccatgcacaagctctcttgcttgccaccatgtaagacgtgattttgctcctcatttgccttctgacatgattgtgaggcctccccagacatgtggaactgtgagccagttaaacctctttcatttataaattacccagtctcaggtatatctttattagcaccatgagaacaaactaatacatctgcctttttcccctcagccctcaccagtcacatagttgctgacagcagcttactgcaagaatatgaaaaactcttcttgacatccttcttccatttcacccactcctggactactagtagtttctccttcccaggagcagccctccaccagtgctggatcaacttaaaaataaacatcctggttttctctccctataggtagctctgaggtatattctgcattgcttccttcacag

SEQ ID NO: 573 - DNA, 403 bp, Homo sapiens
  MAP TO AC007776.1; EXPRESSED IN PLACENTA, SIGNAL = 1.7; EXPRESSED IN HBL100, SIGNAL = 5.5; EXPRESSED IN LUNG, SIGNAL = 1.5; EXPRESSED IN HELA, SIGNAL = 2.3; EXPRESSED IN ADULT LIVER, SIGNAL =   2; EXPRESSED IN BRAIN, SIGNAL = 0.74; EXPRESSED IN HEART, SIGNAL = 1.1; EXPRESSED IN BT474, SIGNAL =  35; EXPRESSED IN BONE MARROW, SIGNAL = 2.9; EXPRESSED IN FETAL LIVER, SIGNAL = 2.8
  unsure 120
  unsure 275
tagttgtggctcaccgtctgtttgaagccgacagctgtgtgctgaggggccttgcgaagggcgttggtcatcgttctccgggcctctgagtactccagctggatggctttgattcgcccntgggagtggaggagaggagagttggtcaacagagtagggtcatccaactccccaccgacaagccagggtgccaaatgggcctcttatgcaccaccccttggaaaatttgcaccaggcaggcctgagacaccttctgatttatgggttgggccccntctgctcacctgtgtagtagaggtacctggcccactcattgttgttggcctgctctgggaacacagacttggacaccagcttctcagcctggtcgtacaagctgtagtgtaggtaattccgcagcagg

SEQ ID NO: 574 - DNA, 468 bp, Homo sapiens
  MAP TO AC007776.1; EXPRESSED IN HEART, SIGNAL = 1.4; EXPRESSED IN BT474, SIGNAL =  15; EXPRESSED IN LUNG, SIGNAL = 2.1; EXPRESSED IN HELA, SIGNAL = 2.2; EXPRESSED IN ADULT LIVER, SIGNAL = 4.5; EXPRESSED IN BRAIN, SIGNAL = 1.8; EXPRESSED IN PLACENTA, SIGNAL = 1.7; EXPRESSED IN BONE MARROW, SIGNAL = 2.4; EXPRESSED IN FETAL LIVER, SIGNAL = 3.9; EXPRESSED IN HBL100, SIGNAL = 1.9
  unsure 85
  unsure 87
  unsure 102
  unsure 133
  unsure 189
ctatgagtggcctggaggggggcagcatctcggtgcctatcttgtggccaacttccaccgtgcattctcatgccaggcctagccncngtcccccagggagtnccccttgttcttctcctgccatactcccagnctgctccatcctgacctccagcccatatccccctgcccagcagagggaggctccangatcactgggagttacttgtgtctgtgactgggtggaggagctgggcaggggggcctttcccttttgtatcctctaacaaagacttcttcctccagggcatgtatatcttcctgcacacggtgaaggggacaccctttgagaccccggaccagggcaaggcgaggctgctaacccactgggagcagatggattatggggtccagttcacggcctctcggaagttcttgaccatcacacccatcgtgctgtgagtgcctgggctacaggaagacaccagc

SEQ ID NO: 575 - DNA, 360 bp, Homo sapiens
  MAP TO AC007750.2; EXPRESSED IN BT474, SIGNAL = 2.7; EXPRESSED IN LUNG, SIGNAL = 1.2; EXPRESSED IN HELA, SIGNAL =   1; EXPRESSED IN FETAL LIVER, SIGNAL = 1.4; EXPRESSED IN PLACENTA, SIGNAL = 1.1; EXPRESSED IN BONE MARROW, SIGNAL = 1.1; EXPRESSED IN HBL100, SIGNAL = 1.7; EXPRESSED IN ADULT LIVER, SIGNAL = 0.95; EXPRESSED IN BRAIN, SIGNAL = 1.1; EXPRESSED IN HEART, SIGNAL = 1.1
gcctagaagattgaaaagggcatgaaattatgcaggcttggtattagatcccagctctgctactttctctttccagtagtcactggtccacatgggtttttatcaggtatttcacagtacaccctttaaaaacagaatcctttactgtttcctcaagacacttgtgcatgttaccagtggtagacaatctgtgatcatttattgaaaatatctaatcaaacgctaattttaacacttattttcttagtttcccagaagaggtcgccattgttgaagaacttggccgcagacatgctgatggttctttctctgatgagatgaacaccattcttgataatcttgccgccagggactttataa

SEQ ID NO: 576 - DNA, 467 bp, Homo sapiens
  MAP TO AC007750.2; EXPRESSED IN PLACENTA, SIGNAL = 1.7; EXPRESSED IN BT474, SIGNAL =   1; EXPRESSED IN FETAL LIVER, SIGNAL = 1.1; EXPRESSED IN HELA, SIGNAL = 1.5; EXPRESSED IN ADULT LIVER, SIGNAL = 1.3; EXPRESSED IN BONE MARROW, SIGNAL = 1.2; EXPRESSED IN HBL100, SIGNAL = 0.93; EXPRESSED IN LUNG, SIGNAL = 1.2; EXPRESSED IN BRAIN, SIGNAL = 1.3; EXPRESSED IN HEART, SIGNAL = 1.3
attccttgaaatgccaaccctagatgtatccgttttggggaataggagaggctgtgtcccaaaacaacttccttgtagcaaacctctgggaaaagcctggactcctcttgattttgagccagttctaacgccattgttattttatcacataattgtactggaattactagaagcaatgcttggccaggatgggaaattgagttttacaaagcaatcaaagattcttgttttttttgtttttcctttaggtatggtggtccctgcagtcagagtgtaaggtctgtatttgctgttaattggatatcttatcttgcaagtaaggaagggatggtcattgccttggtggatggtcgaggaacagctttccaaggtgacaaactcctctatgcagtgtatcgaaagctgggtgtttatgaagttgaagaccagattacagctgtcaggtgagcaccttctcattcaagcag

SEQ ID NO: 577 - DNA, 460 bp, Homo sapiens
  MAP TO AC007750.2; EXPRESSED IN PLACENTA, SIGNAL = 1.6; EXPRESSED IN FETAL LIVER, SIGNAL = 1.6; EXPRESSED IN LUNG, SIGNAL = 1.5; EXPRESSED IN HELA, SIGNAL = 1.5; EXPRESSED IN BT474, SIGNAL = 1.4; EXPRESSED IN BONE MARROW, SIGNAL = 1.3; EXPRESSED IN HBL100, SIGNAL = 1.7; EXPRESSED IN ADULT LIVER, SIGNAL = 1.3; EXPRESSED IN BRAIN, SIGNAL = 1.1; EXPRESSED IN HEART, SIGNAL = 1.4
ttgctgaggcagaactcaagcagcaagtctaggagttggaaaacttgccctgtttcagagctcaggacacattttgagccttaacttgcccattttaaaaccaaggtgaagccagttttgcagttagtaacatatattcaagtccatggcacaattttagggggtttatatgcttattatttcacttacataatatattttttcacagctgcaaaagaaggaaatcgcaaagaacgtgtttgtgcagaacatttgaggaagtacaatgaggccctacaaattaatgacacaattcgaatgatagatgcgtatactcatcttgaaactttctataatgaagagaaagataagaagtttgcagtcatagaagatgatagtgatgagggtggtgatgatgagtattgtgatggtgatgaagatgaggatgatttaaagaaacctttgaaactggatgaaacag

SEQ ID NO: 578 - DNA, 450 bp, Homo sapiens
  MAP TO AC007746.1; EXPRESSED IN HEART, SIGNAL = 2.1; EXPRESSED IN HBL100, SIGNAL = 3.9; EXPRESSED IN FETAL LIVER, SIGNAL = 2.6; EXPRESSED IN BRAIN, SIGNAL = 5.2; EXPRESSED IN PLACENTA, SIGNAL = 3.8; EXPRESSED IN BT474, SIGNAL = 9.7; EXPRESSED IN BONE MARROW, SIGNAL =   4; EXPRESSED IN LUNG, SIGNAL = 3.4; EXPRESSED IN HELA, SIGNAL = 3.5; EXPRESSED IN ADULT LIVER, SIGNAL =   2
tcactgtgcttcaggtttgccatgcattaactcattcaggcctctgtgaattttatgagatacggtatcaccttcattctggaggcaaagagaggctcaaagatgttacattgtatggacaaagatcacagcagctgtggagttaggatttatacctaggatttatgcccagcttcaaactctatgttaatgaccactaggagaaagatgataacctcaagagaagtaatcaatagaaagttaaatgttgctcaagagacatcatattgcatgtaaagtacctcaatgctgggcatatattaaatatacaataaatactactattgactatcatcatcatcatcatcatcatcatcatcatcatcatcatcactatcaacatccttagtcttgataatcctcatattgtgtttctagatcctgaaactcacatctgagcaaattctgggc

SEQ ID NO: 579 - DNA, 461 bp, Homo sapiens
  MAP TO AC007740.1; EXPRESSED IN HBL100, SIGNAL = 6.6; EXPRESSED IN FETAL LIVER, SIGNAL = 5.8; EXPRESSED IN LUNG, SIGNAL = 5.4; EXPRESSED IN HELA, SIGNAL = 8.5; EXPRESSED IN ADULT LIVER, SIGNAL = 2.9; EXPRESSED IN BRAIN, SIGNAL = 1.9; EXPRESSED IN HEART, SIGNAL = 3.2; EXPRESSED IN PLACENTA, SIGNAL = 2.5; EXPRESSED IN BT474, SIGNAL = 3.8; EXPRESSED IN BONE MARROW, SIGNAL = 3.9
atctgccatttgctctctgggtacacacttagaacccagtcttattctcagatactcacatgccattccatgtggcccaaggtgaccctaagccctgtgtccaggtataagctggctgcattcagtcacactcaaatcaggatcatattggtcaggaatcattagcagggcattcagaactgtctctttcttctatatcttcttatattactcttacaaatactttccatttttttagggccttttaatcatatcaagtcaagcctcctgggatccacatcagattcaaacctcaacaaatacagcaccattaacaagattccacagctcactctgaatttttcagaggtcaaaactgagaaaaagaattcatcacctccttcttcagataaaaccattattgcacccaaggttaaagatcgaacacacaatgtgactgagaaagtgacccaggtaggaca

SEQ ID NO: 580 - DNA, 478 bp, Homo sapiens
  MAP TO AC007720.1; EXPRESSED IN BT474, SIGNAL = 8.3; EXPRESSED IN BONE MARROW, SIGNAL = 6.7; EXPRESSED IN HELA, SIGNAL =  16; EXPRESSED IN ADULT LIVER, SIGNAL =   8; EXPRESSED IN PLACENTA, SIGNAL = 9.4; EXPRESSED IN FETAL LIVER, SIGNAL = 7.4; EXPRESSED IN LUNG, SIGNAL = 8.5; EXPRESSED IN BRAIN, SIGNAL =  17; EXPRESSED IN HEART, SIGNAL = 6.5; EXPRESSED IN HBL100, SIGNAL = 9.7
  unsure 263
  unsure 268
  unsure 316
  unsure 364
  unsure 368
  unsure 452
acacccttaaaacgtgggtgtataatcagagaggcatccctgaaatgattaaacaccaagggaaggctgccttcccagtccgtgacctgcgccggagttttgggtccacagataaaacgtgtctcctttgtctctcccagaaaatgaaaggaattgaaattaagagaagggagagattgaagagtggaaaggagaaagtggttgaggaacagtgagacaggttggagaagagagtgagaagaggccgcttacctgatttaaanattgngtgagatgttccttgggctggttggtctgaggacctgaggtcataggntggatctttctcacggagcaaagaacaggagtacaggggattgatctncccnaagggaggtcccccgatctgagtcacggcaccaaatttcatgcgcgtccctgtgaagagaccaccaaacaggctttgtgtgagncaacatggctgtttatttcacctggg

SEQ ID NO: 581 - DNA, 491 bp, Homo sapiens
  MAP TO AC007720.1; EXPRESSED IN HEART, SIGNAL = 3.8; EXPRESSED IN LUNG, SIGNAL =   5; EXPRESSED IN ADULT LIVER, SIGNAL =   5; EXPRESSED IN BRAIN, SIGNAL = 5.2; EXPRESSED IN PLACENTA, SIGNAL =   3; EXPRESSED IN BT474, SIGNAL = 3.3; EXPRESSED IN BONE MARROW, SIGNAL = 3.4; EXPRESSED IN HBL100, SIGNAL = 3.2; EXPRESSED IN FETAL LIVER, SIGNAL = 2.7; EXPRESSED IN HELA, SIGNAL = 4.7
ttttccccactgtcttggtgattaacattcaactccatgttacttctgcaaatttctgcaggcagcttgaatttctctccagcaaatgggtttctcttttgtattacataatcagcctgcaaatttttcaaacttttatggtttgcttcctcttgcacattttgcatcttagaaatttcttccagcagataccctaaatcatctctctcaagttcagagttccaccgatctctagggaaggggaaaaatgctaccagtctctttgagaaagcatagcaagagtcacctttattccagtttccaaaaagttcctcatcgccatctgagaccacctcagcctggatttcattgtccatatcagtatcagcatattggtcaaaggcattccacaagtctccgggaaatttccatactttcccacatctatcttcttctgagccctgcaaacttttctaaacttctgcctattacctagttccaaagtgccttcc

SEQ ID NO: 582 - DNA, 481 bp, Homo sapiens
  MAP TO AC007707.10; EXPRESSED IN PLACENTA, SIGNAL = 2.5; EXPRESSED IN FETAL LIVER, SIGNAL = 2.5; EXPRESSED IN LUNG, SIGNAL = 1.7; EXPRESSED IN ADULT LIVER, SIGNAL =   2; EXPRESSED IN BT474, SIGNAL = 1.4; EXPRESSED IN HEART, SIGNAL = 1.9; EXPRESSED IN BRAIN, SIGNAL = 2.5; EXPRESSED IN HELA, SIGNAL = 1.4; EXPRESSED IN HBL100, SIGNAL = 1.4; EXPRESSED IN BONE MARROW, SIGNAL =   2
aggaacagagtggggaggacggaccatgagatgaggggaaggcggggagaaaggggcaagccactcatctatggaaattaagggagccacgggtcatgacagagactagaggacgcttcccgctcacccgagctactttgcaagataaatcatctttctctataagtaaacccttaagtcctagggaaggtgcctcatagcctctcaaaggaagctcaagtttgtttcttctggagccagccctcttccatgtctaggtaccttgtactcaagttgcccggttggttgcaagttttgcataggcaacaggttgtgcatgaagttcacattaggggccacctgcaggaatggagcctgggggttgactccaggaaagccaggtaggagcttctgcagatcttccataacttccgtgctgatacaaaacagaatgacagagaagtttagttaacattcttactcaaaagtgcttatatcccaa

SEQ ID NO: 583 - DNA, 468 bp, Homo sapiens
  MAP TO AC007707.10; EXPRESSED IN PLACENTA, SIGNAL =  15; EXPRESSED IN BT474, SIGNAL =  27; EXPRESSED IN BONE MARROW, SIGNAL =  13; EXPRESSED IN LUNG, SIGNAL =  14; EXPRESSED IN HELA, SIGNAL =  16; EXPRESSED IN ADULT LIVER, SIGNAL =  14; EXPRESSED IN BRAIN, SIGNAL =  27; EXPRESSED IN FETAL LIVER, SIGNAL =  20; EXPRESSED IN HEART, SIGNAL =  15; EXPRESSED IN HBL100, SIGNAL =  15
gtcttggaagccatccttggccccctcacacgagcagtcctcctccatgctctctgaatgcatcagtgccggctggtgagcatacccgtggggcggggtgggtgaggaagcctgtgagacacattcttgtgccctgatttgtagcagatgctgggggctggtgtgatggtgataagagtcagcattttgataagataaagcctggcgctctgtcatgctctgtcccccaaggctgggagccagactccccgcatccccttggttcatgtgcctgaacagttcctggtattcttgctgttgctgctgctgctgctgctgctgccgttgttgctgctgccttttaatgagctgtgcaaactctgttgggggcagccggatgtccgagtggccggtgagcgaatgccggggagaaagcagtccttgaaggatgtggggtacctgctggtgtcttgtatagtctggcggcgt

SEQ ID NO: 584 - DNA, 492 bp, Homo sapiens
  MAP TO AC007707.10; EXPRESSED IN HEART, SIGNAL = 5.3; EXPRESSED IN FETAL LIVER, SIGNAL =   6; EXPRESSED IN LUNG, SIGNAL = 7.3; EXPRESSED IN PLACENTA, SIGNAL = 7.1; EXPRESSED IN BT474, SIGNAL =   4; EXPRESSED IN BONE MARROW, SIGNAL =  15; EXPRESSED IN HBL100, SIGNAL = 4.2; EXPRESSED IN HELA, SIGNAL = 5.9; EXPRESSED IN ADULT LIVER, SIGNAL =   8; EXPRESSED IN BRAIN, SIGNAL =   7
atgcagggcagaaatgtaccctgtaccatcactccaggaaactccctaacactagaaaccaggctgacatctctgtttaccagatcagggagtggtcggcctcatgcctttcacttcagagaagattctggagccagaaaacctcaaatctaagggtcaggcaggttcaaatccagctgcctgaccctggatgagttatgatacatcacctccccacacatcagtttctgattgaagataatgatagaatatgccatcgccctgagttatggcaggggttactgtgtggcaagcagaataacgctccccaaagatgtccacagcctcatccctggaacctgtggctttgctaccttccatggcaaaaaaagattttgctagtgtgattaaggacctggagatggggtggttggcctggattctccaggtgggcccattgtcatcacaggggtccttaattatacaagagggaggcagtggcctcagagtcag

SEQ ID NO: 585 - DNA, 489 bp, Homo sapiens
  MAP TO AC007707.10; EXPRESSED IN ADULT LIVER, SIGNAL =   4; EXPRESSED IN PLACENTA, SIGNAL = 3.3; EXPRESSED IN BT474, SIGNAL = 3.8; EXPRESSED IN BONE MARROW, SIGNAL = 5.1; EXPRESSED IN HBL100, SIGNAL = 3.7; EXPRESSED IN LUNG, SIGNAL = 3.8; EXPRESSED IN HELA, SIGNAL = 4.4; EXPRESSED IN BRAIN, SIGNAL = 4.6; EXPRESSED IN HEART, SIGNAL = 3.7; EXPRESSED IN FETAL LIVER, SIGNAL = 3.5
gtacaggtggtgtgagccaggctgtccaaatggtgagaatactattcataacaactactgctcatttcataccctcagacaacatttacaaagcattttcacaaatcttatctcacttgagctgatgacaacaccagtaccattttacaaaagaaactaaggctaggagacatagggggatttatttaagatccgaccgcctggaccagagctctgaccccagtaccgaatctctctctagaatactgaggtacctgctctgaggtcctctcacctccagagccctgacagacaaagtgtagcgcactccctggtcctggatcctgcctgccgactggatctccgtgttgttccagccacagtgctcgcaggaaaaggagctcactattatttctctgaagaagggaatcttggtgagcaggaggcgcgtcatgccctggtgaagtagaaagtagctaaggaaaaaaatcaatgaaactccctttcccc

SEQ ID NO: 586 - DNA, 467 bp, Homo sapiens
  MAP TO AC007707.10; EXPRESSED IN BT474, SIGNAL = 1.7; EXPRESSED IN HBL100, SIGNAL = 2.4; EXPRESSED IN LUNG, SIGNAL = 1.7; EXPRESSED IN HELA, SIGNAL = 2.3; EXPRESSED IN ADULT LIVER, SIGNAL = 2.3; EXPRESSED IN PLACENTA, SIGNAL = 1.3; EXPRESSED IN BONE MARROW, SIGNAL = 2.1; EXPRESSED IN FETAL LIVER, SIGNAL = 1.9; EXPRESSED IN BRAIN, SIGNAL = 1.5; EXPRESSED IN HEART, SIGNAL = 1.4
tacccctggttcatttctgggtttcctcctaggccaattcaaaacttccaaaataaggtcaagtaacacaataggctcacacttgcatcacaagctgtttagaaagtgtgcacagatctctgactcagaccagatgtcctccccaccatgggcaagggctggtgggaaagacactcccagccttcgccttcatccaatactaataaataacctacagaaagagcagcgctggaggctggcccttgagccacccactgctaccgttgcggagccaggcctgcctcatagccctctgtcttcatgtcattgagccctagctcctcattttggtcaaaggtgcgcttgtaacgctccaccttcatctcaggatcatcttcaggcgcatacacattctgcaaggtcaaggagagacaatcagtgccgctgtgccactccccctctctgcaggcagcttccaattcccacct

SEQ ID NO: 587 - DNA, 454 bp, Homo sapiens
  MAP TO AC007707.10; EXPRESSED IN HBL100, SIGNAL = 2.1; EXPRESSED IN FETAL LIVER, SIGNAL = 2.2; EXPRESSED IN LUNG, SIGNAL = 2.1; EXPRESSED IN ADULT LIVER, SIGNAL = 1.5; EXPRESSED IN BRAIN, SIGNAL = 1.8; EXPRESSED IN HEART, SIGNAL = 1.7; EXPRESSED IN PLACENTA, SIGNAL = 1.9; EXPRESSED IN BT474, SIGNAL = 2.2; EXPRESSED IN HELA, SIGNAL = 3.3; EXPRESSED IN BONE MARROW, SIGNAL = 1.8
gctcctgactccttccaatgtggagaagtcttgctagaggctctttctggggctttaccacttttggttctgggcagggaataagtgacattaggagccaaatcaggggagtcatgacgggcccttctgagttgctgtgtgtctgaagagccaagagtcctcctagatgtgtcaggggagttgttatggacccttctgggggaagagatatctgaggaaccatgacgggctcgcctaggaggagagggatctggtgaatcatgacggactctcctaggagatgcacctgaagaattatgctgaggcctccttgggggagaaggatctggagaatcatgacgggccctccttgggggtgaagtgtctgaggagtcatgacggatcctcctgggaggagatgtgtctgagtcatgacgagcccctctgaggggagaaggatctggggtgtcatgac

SEQ ID NO: 588 - DNA, 486 bp, Homo sapiens
  MAP TO AC007707.10; EXPRESSED IN BT474, SIGNAL = 4.3; EXPRESSED IN HBL100, SIGNAL = 3.1; EXPRESSED IN HELA, SIGNAL = 2.4; EXPRESSED IN BRAIN, SIGNAL = 2.7; EXPRESSED IN PLACENTA, SIGNAL = 4.4; EXPRESSED IN HEART, SIGNAL =   3; EXPRESSED IN ADULT LIVER, SIGNAL = 2.3; EXPRESSED IN LUNG, SIGNAL = 2.6; EXPRESSED IN FETAL LIVER, SIGNAL = 3.1; EXPRESSED IN BONE MARROW, SIGNAL = 4.6
ccctgggataactgtgtgagtcctgaaacagaaataaacctttctcacctccaaaccctcaccaggaaaaaaaaattaattttacaccacagtctcaggaagagaaatttagggacacacaggctgggcctttggcctgtgaaaacctcagcttcttagccccgttaggaaaatctgggctcttagagagaaggtaaagacttggataacgctattctctctatttctcacctccaaccctcttttctgagtcctctacatctttcaaaggccagattcccaccttggccctgtccagaagccttcccaactgccagaatttccagcatccactgttcctctgaagagcaaaagctcttcaccaggctcttcacctcccagcttattctgtggtcttctctggacaaggaagaccatctccctaaggtccatggtgactgggggtggagcagggagatggatttcccatcatcagccacctttcct

SEQ ID NO: 589 - DNA, 474 bp, Homo sapiens
  MAP TO AC007670.1; EXPRESSED IN HELA, SIGNAL = 1.9; EXPRESSED IN HEART, SIGNAL = 0.79; EXPRESSED IN BT474, SIGNAL = 1.7; EXPRESSED IN BONE MARROW, SIGNAL = 3.1; EXPRESSED IN FETAL LIVER, SIGNAL = 2.3; EXPRESSED IN LUNG, SIGNAL = 0.84; EXPRESSED IN ADULT LIVER, SIGNAL = 0.94; EXPRESSED IN BRAIN, SIGNAL = 0.75; EXPRESSED IN PLACENTA, SIGNAL = 0.8; EXPRESSED IN HBL100, SIGNAL = 8.1
  unsure 109
  unsure 422
aaagtcctgtatgatccttgtgacaaatagtttaagactgcttgagtgattcatggattccttataaaatagaactaccaccaactatccaaatcacgtctactttatnttgctaattctggttattaagttttaaggcatcatccagacttcttgcaagaaattgatctccttgtggaggttcttgtggtccctcctgagaactaaattaattctattctttaaaggtcgattcttctcaggaatggagaaccagatcttcctacccataatcaccaaattctgtttaccttctactgaggaggttgtggtcactctctggaaatacctgaattcattcctgagcggtggccagggcaggtcctcgttcttgccgatgcccatgttctggggggacacagtgacgacgcagtttagcaaanctaaccatgacagcagcgatgagcacctccgagcctgctcactacaccaaga

SEQ ID NO: 590 - DNA, 474 bp, Homo sapiens; identical to SEQ ID NO: 589
  MAP TO AC007670.1; EXPRESSED IN PLACENTA, SIGNAL = 1.1; EXPRESSED IN BONE MARROW, SIGNAL = 1.7; EXPRESSED IN FETAL LIVER, SIGNAL =   3; EXPRESSED IN LUNG, SIGNAL = 1.2; EXPRESSED IN HELA, SIGNAL = 2.9; EXPRESSED IN HEART, SIGNAL = 1.2; EXPRESSED IN BT474, SIGNAL = 2.2; EXPRESSED IN HBL100, SIGNAL = 6.2; EXPRESSED IN ADULT LIVER, SIGNAL = 1.7; EXPRESSED IN BRAIN, SIGNAL = 2.1
  unsure 109
  unsure 422

SEQ ID NO: 591 - DNA, 474 bp, Homo sapiens
  MAP TO AC007656.2; EXPRESSED IN PLACENTA, SIGNAL = 2.1; EXPRESSED IN BONE MARROW, SIGNAL =   3; EXPRESSED IN HBL100, SIGNAL = 2.2; EXPRESSED IN FETAL LIVER, SIGNAL = 2.3; EXPRESSED IN LUNG, SIGNAL = 3.4; EXPRESSED IN HELA, SIGNAL = 3.6; EXPRESSED IN ADULT LIVER, SIGNAL = 3.2; EXPRESSED IN BRAIN, SIGNAL = 3.7; EXPRESSED IN BT474, SIGNAL = 2.3; EXPRESSED IN HEART, SIGNAL = 2.6
ataaatgaggccgggtacagaggctcatgcctgtaatccagcagtgagccatgatcgtaccactgcatactccagcctggatgacagagtaaaactctgtctcaaaataaatacataaataaaaaataataaaatactttaaaaaaagaaataaatgaataaacacagggagtacagcaatattcagtggtcaggggtgtggactctattcacccctttactttcatgtggtgtaggtgaaaacaccatttctgatgtttcctccatgtagagggatatctatcagacattctacctggcgtctgctgctccatcatcactgcatccatcatcaccagaggagtctcctctccttctgtgggtgagttctggagaagacctgggcacactgagctcagccacttccccttcctggtatgggtcttccctcatgacttcaccaccaccttaatcacctcctaaaggcctcacctt

SEQ ID NO: 592 - DNA, 481 bp, Homo sapiens
  MAP TO AC007637.5; EXPRESSED IN FETAL LIVER, SIGNAL = 1.7; EXPRESSED IN ADULT LIVER, SIGNAL = 4.7; EXPRESSED IN PLACENTA, SIGNAL = 2.8; EXPRESSED IN BT474, SIGNAL = 0.78; EXPRESSED IN BONE MARROW, SIGNAL = 0.9; EXPRESSED IN HBL100, SIGNAL = 0.87; EXPRESSED IN LUNG, SIGNAL = 0.96; EXPRESSED IN HELA, SIGNAL = 0.98; EXPRESSED IN BRAIN, SIGNAL = 1.3; EXPRESSED IN HEART, SIGNAL = 2.7
ggggttgtttgtgattagccatctctcgagcagttgttcattgttcttccccacctggggccgtcccccacctggggcccctttctcctcgttactgtggagtcgggactccacagaatattatgtctgtgagacaacaaaagtaaaagatcagcagagtcctggatgagtaccctaaacacatcactgcgtttgttttatgttctctcctgagaacttccagaagcttccagagctggtttccccatgaagatcaggctgctctgcttcccccgacaggtacagagtgagatcccaggctcgcccatctttctcatgaagctggcccagcacgcccgtcacctggaagttcagatcctcgctgaccagtatgggaatgctgtgtctctgtttggtcgcgactgctccatccagcggcggcatcagaagatcgttgaggaagcaccggccaccatcgccccgctggccatattcgagttca

SEQ ID NO: 593 - DNA, 477 bp, Homo sapiens
  MAP TO AC007637.5; EXPRESSED IN HELA, SIGNAL = 1.3; EXPRESSED IN ADULT LIVER, SIGNAL = 4.6; EXPRESSED IN PLACENTA, SIGNAL = 0.64; EXPRESSED IN BT474, SIGNAL = 0.67; EXPRESSED IN BONE MARROW, SIGNAL = 0.69; EXPRESSED IN LUNG, SIGNAL = 0.83; EXPRESSED IN FETAL LIVER, SIGNAL = 0.88; EXPRESSED IN BRAIN, SIGNAL = 0.76; EXPRESSED IN HEART, SIGNAL = 1.5
tctgaatggtcttgcttctttgtctatcttgtctgattttctcctgtctgaccttttcctggttaaaaatctgggggaaaatgacggactccaagccgatcaccaagagtaaatcagaagcaaacctcatcccgagccaggagccctttccagcctctgataactcaggggagacaccgcagagaaatggggagggccacactctgcccaagacacccagccaggccgagccagcctcccacaaaggccccaaagatgccggtcggcggagaaactccctaccaccctcccaccagaagcccccaagaaaccccctttcttccagtgacgcagcaccctccccagagcttcaagccaacgggactgggacacaaggtctggaggccacagataccaatggcctgtcctcctcagccaggccccagggccagcaagctggctccccctccaaagaagacaagaagcaggcaaacatca

SEQ ID NO: 594 - DNA, 493 bp, Homo sapiens
  MAP TO AC007626.1; EXPRESSED IN BT474, SIGNAL = 4.1; EXPRESSED IN BONE MARROW, SIGNAL = 5.5; EXPRESSED IN HBL100, SIGNAL = 4.8; EXPRESSED IN BRAIN, SIGNAL =  13; EXPRESSED IN PLACENTA, SIGNAL = 4.8; EXPRESSED IN FETAL LIVER, SIGNAL = 5.9; EXPRESSED IN LUNG, SIGNAL = 5.1; EXPRESSED IN HELA, SIGNAL = 6.4; EXPRESSED IN ADULT LIVER, SIGNAL = 5.6; EXPRESSED IN HEART, SIGNAL = 4.5
gtaccaggtgaacctcagccctgccccatgcttcagaaaattattaaggttcttaaactttctgggagggtcatgacaagctgtctggctgtccaagtagggcctatcttgtctttgtccctcctttggtaaataagtatcttcttttgtagaaggaagccatgggtgcaccaagggttggtttcttggagctggggatgcagtccacatgcttgggtgcacacctgcaggcctgtgttagaagaggggggtttggagcctgctgcccgtattacctgatgacacccttctgctcaggcatgttcccgaagtctgtggccatgccagccagcacacaggtggagcctcggcgcttggcacagcgcacgctcacaaagtcacggggccccaccaggtttcctgctgcctcggcagccagctcgtgagtaatgaatgtatcttttccgatcttctgcaggacctaccaggccatggggaaccagaatcacgactc

SEQ ID NO: 595 - DNA, 469 bp, Homo sapiens
  MAP TO AC007626.1; EXPRESSED IN LUNG, SIGNAL = 1.3; EXPRESSED IN BT474, SIGNAL = 3.1; EXPRESSED IN BONE MARROW, SIGNAL = 2.2; EXPRESSED IN HBL100, SIGNAL = 3.1; EXPRESSED IN FETAL LIVER, SIGNAL = 3.7; EXPRESSED IN HELA, SIGNAL = 1.1; EXPRESSED IN ADULT LIVER, SIGNAL = 1.4; EXPRESSED IN BRAIN, SIGNAL = 1.4; EXPRESSED IN PLACENTA, SIGNAL = 1.8; EXPRESSED IN HEART, SIGNAL = 1.2
aatttcaccaaaactaccttgctcaataaagctaatccttttcacttccttgttttgcctgaagagggcagagttacttatttgagtaatgagaagtatttgctgtgaagttgcatgtattctagctgaaataaaccagaggcctttcttacacagttgaatgcatttgagctaaagggggttttagttttttgatgttattttttcctttctgcagtgaccctttgttttctgctcagcgccttccccctcatggctacccattggaacacccgtttaacaaagatggctatcggtatattctagctgagcctgatccgcacgcccctgaccccgagaagctggaacttgactgctgggcaggaaaacctattcctggagacctctacagagcctgcttgtatgaacgggttttgttagccctacatgatcgaggtatgtaaagtattggagatcatatggatgcagg

SEQ ID NO: 596 - DNA, 459 bp, Homo sapiens
  MAP TO AC007607.2; EXPRESSED IN PLACENTA, SIGNAL = 2.8; EXPRESSED IN HEART, SIGNAL = 1.6; EXPRESSED IN BRAIN, SIGNAL = 2.3; EXPRESSED IN ADULT LIVER, SIGNAL = 1.4; EXPRESSED IN HELA, SIGNAL = 1.6; EXPRESSED IN LUNG, SIGNAL = 2.4; EXPRESSED IN HBL100, SIGNAL =   2; EXPRESSED IN BONE MARROW, SIGNAL = 2.6; EXPRESSED IN BT474, SIGNAL =   2; EXPRESSED IN FETAL LIVER, SIGNAL = 2.2
gttgaggctgggttggacaaagggcttctagctcctgtgtgcagagggcgaggagagggtgccaaccagcctgctgatgaggagaggccagagagcactgaaggagggcgcgtgtcagctctgaactgagggacgtggggcaaagggcctgttaatccctcagggtatccccaacggagtcctggtctataacaggcctgccaaggaaagaggaagagcacacactgggatcccgcaataacagggcagggctcctgtgttcatctctctcccctgaggggcacaagctgggtaccttacctgtgaaacacacggggcatttgaaggtgccgcccatgccctcgaagctgtgctcaatgaggtgacagaggagcttggccggggagtcgaacatctggttgcacagcttacactcgtggttgatgccttcctctgcaaggaaaacccgtgaccagtcag

SEQ ID NO: 597 - DNA, 479 bp, Homo sapiens
  MAP TO AC007607.2; EXPRESSED IN BT474, SIGNAL = 3.8; EXPRESSED IN BONE MARROW, SIGNAL = 9.4; EXPRESSED IN HELA, SIGNAL = 3.1; EXPRESSED IN PLACENTA, SIGNAL =  14; EXPRESSED IN FETAL LIVER, SIGNAL = 2.5; EXPRESSED IN LUNG, SIGNAL = 4.3; EXPRESSED IN ADULT LIVER, SIGNAL = 2.7; EXPRESSED IN BRAIN, SIGNAL = 3.3; EXPRESSED IN HBL100, SIGNAL = 2.2; EXPRESSED IN HEART, SIGNAL = 3.1
ttcaccccactgctgagtccctccagcagccccacctgcccaggacgcaagggccccttgaaggcccccttcctggcaaaggaaagctgagaaaacaacgtgaagcacagtccgggttgtctcctcgaggaggcagagctgtagaagggtttctgctttttaaactccctggcgggtcccacccacacccggaacacatccggactctgaccacagcccagatggccctccatggtctggttcttgctggcccacagcctcagccaccaccttctgccaggcccccaaacaccgcagcccggaagcccctccccctcccagcagcactcccgctatccagagtgtcccccacaccccagttttcctggggcttctccacatcggagccatcctcctggagcaggcttcctgtccgctgaccacagactcccatcacaacatcgctctgcaccttgcagaggcttcaactctgcatgtcc

SEQ ID NO: 598 - DNA, 473 bp, Homo sapiens
  MAP TO AC007607.2; EXPRESSED IN BONE MARROW, SIGNAL = 1.6; EXPRESSED IN HBL100, SIGNAL = 0.83; EXPRESSED IN FETAL LIVER, SIGNAL = 0.94; EXPRESSED IN ADULT LIVER, SIGNAL = 0.85; EXPRESSED IN PLACENTA, SIGNAL = 1.9; EXPRESSED IN BT474, SIGNAL =   1; EXPRESSED IN LUNG, SIGNAL = 1.4; EXPRESSED IN HELA, SIGNAL = 0.9; EXPRESSED IN BRAIN, SIGNAL = 1.1; EXPRESSED IN HEART, SIGNAL = 1.1
ggatattgtggtcccgcagccggtgattctgcagcagcacctccatggtgtaggccgccccacagatgtcacagccgtacatgggctccgacgcgtccacgtcatcctcgctggcctcatggctgttaggtgcctcagggttcttaagcagcatgccctgcaggtcagcaggctcagctttcttggtggccattgggggtaccccattggccgtgccgttctcggtcgcagcatcaaacacacagtgcttctcccgcaggtgcttctccagcaggatgatggcgtggaaggccttgctgcagaacttacagttatacttcttgctgtgtgtggtgatgtggcactgcagctccacctcggtgctgaaggtctccccacagaagatgcacttgtgagccttggccgggttgcccaggtggctgtgtttgacgtgcacctgcaggtcagcctccttgcggaagtcccagttgcag

SEQ ID NO: 599 - DNA, 468 bp, Homo sapiens
  MAP TO AC007600.2; EXPRESSED IN HELA, SIGNAL = 2.3; EXPRESSED IN BRAIN, SIGNAL = 1.6; EXPRESSED IN HEART, SIGNAL = 3.4; EXPRESSED IN PLACENTA, SIGNAL = 1.3; EXPRESSED IN BT474, SIGNAL = 2.1; EXPRESSED IN BONE MARROW, SIGNAL = 1.8; EXPRESSED IN HBL100, SIGNAL = 6.7; EXPRESSED IN FETAL LIVER, SIGNAL =   3; EXPRESSED IN LUNG, SIGNAL = 1.3; EXPRESSED IN ADULT LIVER, SIGNAL = 2.5
gccagttctgggaaagacagaaagagccacttagcaccctactctattgccacatgagatttcccaaaatatgtgcaaatcaaagatgtctagagtggcagatttttaagagcatgaatatatgttcatttttgtaagagtttgctatgtgagagtgtgttcccttgattaaaaattccttggcctcatttctccagtcaccctaaccttaagtctacagcacaacctgatctcctgctttttctgattttcttgactgtaggtttaagacgctaaacgacgaaaactccagtcacctcctctactttaactgtgctctcaggtggtttgcgctgagaatggatgtcctcatgaacatccttaccttcactgtggccttgttggtgaccctgagtttctcctccatcagtacttcatccaaaggcctgtcattgtcatacatcatccaggtaatgcctggtgcaaagt

SEQ ID NO: 600 - DNA, 465 bp, Homo sapiens
  MAP TO AC007600.2; EXPRESSED IN HEART, SIGNAL = 3.8; EXPRESSED IN FETAL LIVER, SIGNAL = 2.7; EXPRESSED IN ADULT LIVER, SIGNAL = 2.9; EXPRESSED IN BRAIN, SIGNAL = 4.3; EXPRESSED IN PLACENTA, SIGNAL = 2.6; EXPRESSED IN BONE MARROW, SIGNAL = 3.1; EXPRESSED IN LUNG, SIGNAL = 3.3; EXPRESSED IN HELA, SIGNAL = 4.2; EXPRESSED IN BT474, SIGNAL = 3.9; EXPRESSED IN HBL100, SIGNAL = 3.4
ggccttgtggttaaagaggcaactgtcccagatagcatgagctagtggactatttctgctgcagcttctcctgggggaataatttcagaacctctttcctggatgtggtgggttagaatagccaaaattgtgatttggggtcattagaagatacattgggatgattcttgcaaatggatgacatctgctcagttaattttgtctctttaatcttagaaaattctcatagataaaagccccccatcttacatcacccaaccagaagacccagatactgtcttgcttttagcaaatgccaccttgacatgggagcatgaagccagcaggaaaagtaccccaaagaaattgcagaaccagaaaaggcatttatgcaagaaacagaggtcagaggcatacagtgagaggagtccaccagccaagggagccactggcccagaggagcaaagtgacagcctcaaatcggtt

SEQ ID NO: 601 - DNA, 487 bp, Homo sapiens
  MAP TO AC007600.2; EXPRESSED IN BT474, SIGNAL = 2.4; EXPRESSED IN FETAL LIVER, SIGNAL = 2.1; EXPRESSED IN LUNG, SIGNAL =   2; EXPRESSED IN PLACENTA, SIGNAL = 2.5; EXPRESSED IN HELA, SIGNAL = 1.6; EXPRESSED IN HEART, SIGNAL = 1.9; EXPRESSED IN BRAIN, SIGNAL = 1.8; EXPRESSED IN ADULT LIVER, SIGNAL = 1.8; EXPRESSED IN HBL100, SIGNAL = 1.9; EXPRESSED IN BONE MARROW, SIGNAL = 2.3
tctcaagactagacgcagggtatgcatttcctgcaggaatactgcatgcgggccgtcttgagaagaagtgactggggtctgtcaccaaagcatgttgaggcccgatctggtgggccagagggaaattctccctgagaggctggtttgccatgtcttggattctatgattctcccccaaataatttcagctgggtttcagaacttgccgtgagctctttcttcttcatcagctaacctgctttcctacctctgctttgctcaggttaccaagggcagggcagtggcccagcggccactgggaggtcgtaggttgttgatcatggaccacagcttgactgtccgctgtgcccggcagttgcagagcgggtggacatgtggtagaaagaccgtgcccaaaggccgtacttgggttcaggcttcttttcttgcttccgatccagaccagggctgggttctgttcatgcagggagccaaggacctatgcaag

SEQ ID NO: 602 - DNA, 496 bp, Homo sapiens
  MAP TO AC007600.2; EXPRESSED IN BONE MARROW, SIGNAL = 5.2; EXPRESSED IN ADULT LIVER, SIGNAL = 5.8; EXPRESSED IN BRAIN, SIGNAL = 5.5; EXPRESSED IN PLACENTA, SIGNAL = 4.2; EXPRESSED IN BT474, SIGNAL = 4.9; EXPRESSED IN HBL100, SIGNAL = 4.3; EXPRESSED IN FETAL LIVER, SIGNAL = 5.3; EXPRESSED IN LUNG, SIGNAL =   5; EXPRESSED IN HELA, SIGNAL = 4.4; EXPRESSED IN HEART, SIGNAL = 3.9
gttgccactaggccattttcatttccaagaacttaattctctggccactaaaatgcagttagctcctggttgagacctaacgttctcttcataaggtaatggataatcagcaatcagagcgggctttgcactcggcataattctcccatttcccagctaaagaaatggagacctggagaggaagggccctggtgaattagtggtaaaccagggctagacccaggtctctagggcctgaagtagacaccttcacccctgttttgtattcatcagatcatccttatcgatgaagccacagcctccattgacatggagacagacaccctgatccagcgcacaatccgtgaagccttccagggctgcaccgtgctcgtcattgcccaccgtgtcaccactgtgctgaactgtgaccacatcctggttatgggcaatgggaaggtgaaggctgcgtccttgggctggtgggaggatgagggctcaggctgctaccccagat

SEQ ID NO: 603 - DNA, 451 bp, Homo sapiens
  MAP TO AC007600.2; EXPRESSED IN HELA, SIGNAL = 0.7; EXPRESSED IN ADULT LIVER, SIGNAL = 2.1; EXPRESSED IN BRAIN, SIGNAL = 0.76; EXPRESSED IN PLACENTA, SIGNAL = 1.1; EXPRESSED IN BT474, SIGNAL = 2.6; EXPRESSED IN BONE MARROW, SIGNAL = 0.68; EXPRESSED IN LUNG, SIGNAL = 0.81; EXPRESSED IN HEART, SIGNAL = 0.96; EXPRESSED IN FETAL LIVER, SIGNAL = 0.97
ttgtgtgtgtcccctgtctcctgtcaggatgaggacagccacctaaggttgcagaactgggtcagttgaactcctaagtctcctccaactggaccttaaccttcttgagggcaggattgtacttgagtcagttttgatccttcaacaaacccccagcatgaatcagacctcccaacccttcttccagcaacaaaacatcaaacgtgtctggcagggtggtctgaatgatccaaactcccatttccttgtagatattgattataccaaagatcctggaatattcagaagagcagttggggaatgttgtccatggagtgggactctgctttgccctttttctctccgaatgtgtgaagtctctgagtttctcctccagttggatcatcaaccaacgcacagccatcaggttccgagcagctgtttcctcctttgcctttgagaagctcatcca

SEQ ID NO: 604 - DNA, 461 bp, Homo sapiens
  MAP TO AC007600.2; EXPRESSED IN PLACENTA, SIGNAL = 0.61; EXPRESSED IN BT474, SIGNAL = 1.3; EXPRESSED IN HBL100, SIGNAL = 0.83; EXPRESSED IN LUNG, SIGNAL = 0.74; EXPRESSED IN FETAL LIVER, SIGNAL = 1.2; EXPRESSED IN HEART, SIGNAL = 0.89; EXPRESSED IN HELA, SIGNAL = 1.3; EXPRESSED IN ADULT LIVER, SIGNAL =   2
gacagtagaagttagaaggaaagctgtagaaataacatttggaaaactttagaaagggtaggccaatatgtcctggaatgatttaggtacaaccccagataagagtaaatcagaattaatatataatgttactaactcatttaaatgtatactgtcctaaaacttcactatccaacagattcaccatatcttaggaaagcaaaagaaccaaagaaaaatgggttttaagaaaaaataaaagcaacttacttgtactgcatatttgtaaaactgctctgatagttctcctagctcctccctcattttacaggtgttgggaaactcctcaagtcggtccaactgctccacttcagcaatgggatatggcttctcttttaagacctgtacaatctggaaacggcataggcctgtaatcaacagagtgtagtggggcttgggccagttactgcccacaacctgaa

SEQ ID NO: 605 - DNA, 468 bp, Homo sapiens
  MAP TO AC007590.1; EXPRESSED IN BT474, SIGNAL =   2; EXPRESSED IN BONE MARROW, SIGNAL =   2; EXPRESSED IN FETAL LIVER, SIGNAL =   2; EXPRESSED IN HELA, SIGNAL = 1.9; EXPRESSED IN ADULT LIVER, SIGNAL = 1.7; EXPRESSED IN BRAIN, SIGNAL =   2; EXPRESSED IN PLACENTA, SIGNAL = 1.8; EXPRESSED IN HBL100, SIGNAL = 1.7; EXPRESSED IN LUNG, SIGNAL = 2.4; EXPRESSED IN HEART, SIGNAL = 1.8
taaacgactcagcccattgccaaggatggttaacgctctaataaactggccattaactgcagtaacaatgaatttcgaggggattattgctattataaaccttaatcaatggtttataacagcaataatgtggtcctttctcttaatggtaagtagggcagcttgcaccatcgccttgaaaatgtttttgtggtggcggcgaagtccgaggggaggcatgggaagtgctgcccactcttcaggaatggaccatggaaggcaagggacacagctgaagctcatggctgccctggtctgctctccagggatcaggtgtggaacaaggagctggggattctcctccaacccacatgtcctctgccattacagaccggtgaggcactgggctttgggactcctgggcttgcttgtccagcacaagatctggattgaggatgtgactctgtgtgggcctccttatgagcaata

SEQ ID NO: 606 - DNA, 452 bp, Homo sapiens
  MAP TO AC007567.1; EXPRESSED IN BRAIN, SIGNAL =   4; EXPRESSED IN PLACENTA, SIGNAL =   1; EXPRESSED IN BT474, SIGNAL = 4.1; EXPRESSED IN HEART, SIGNAL = 1.1
cccaatgtcttacacaggacttctgtaaaagatatattggattggtaaagcattggactaaggagcttcctagggtaaggtggaaaggagcaataactttcatgcaaaacaaagtcagaatattggaagcaatgccactgctttgttgaatagtatttggatgatgtcacagaagctgagtcttggagcaatactttaaaaagggtcatgttggttgacaagtttccacttactggatgggcggacaacaatgttattagaaactgcagctccgcgttcgttccttgctgtacactgatagactccttcataggtctcagctttcccttcgctcatgatgttaattatgagcgttcctgtgccaggcttcatggtgaccagagggtctttatcgatgtcaaaatgagtcccattacgggtccaggaaaagctgcccaacacacgaagtgtta

SEQ ID NO: 607 - DNA, 465 bp, Homo sapiens
  MAP TO AC007566.1; EXPRESSED IN ADULT LIVER, SIGNAL = 2.9; EXPRESSED IN BRAIN, SIGNAL = 3.2; EXPRESSED IN HEART, SIGNAL = 1.4; EXPRESSED IN BT474, SIGNAL = 2.8; EXPRESSED IN PLACENTA, SIGNAL = 2.2; EXPRESSED IN HELA, SIGNAL = 2.6; EXPRESSED IN LUNG, SIGNAL = 3.2; EXPRESSED IN FETAL LIVER, SIGNAL = 3.6; EXPRESSED IN HBL100, SIGNAL = 2.8; EXPRESSED IN BONE MARROW, SIGNAL = 1.9
aatagaatgggcctgtgaggctggaaggagatattttccttggtctaagaaccatttgccttgtgtgagaagagattgataggcggaagtttcaatgggggagtaggtgggaatgactgatgggaaggagaaaaactggccatgagggacagaagttggaacgctaggtgcttctttagctaccttatcagcataagcatttcctagagtaatgggatctgacgccttttggtggcccttgcagtgtgtgactccagcttcctttggaagtaaagcagccttgagaagagtttttattaaagaggcattaatgatggaggacccttgcgtagtgaggaaacctctttcagcccatataacagcatggtggtgcaagatatggaaggcatatttagagtcagtataaatattgacgtgtagtccctttgcaagagtgaaggcccgagttaaggcaatcagttcggc

SEQ ID NO: 608 - DNA, 476 bp, Homo sapiens
  MAP TO AC007566.1; EXPRESSED IN BRAIN, SIGNAL =  18; EXPRESSED IN PLACENTA, SIGNAL =   2; EXPRESSED IN BT474, SIGNAL = 1.2; EXPRESSED IN BONE MARROW, SIGNAL = 0.96; EXPRESSED IN HBL100, SIGNAL = 1.7; EXPRESSED IN FETAL LIVER, SIGNAL = 1.1; EXPRESSED IN LUNG, SIGNAL = 1.5; EXPRESSED IN HELA, SIGNAL = 2.1; EXPRESSED IN ADULT LIVER, SIGNAL = 1.3; EXPRESSED IN HEART, SIGNAL = 1.4
tctggaatgtaagactccctgagatctggtagtgaattctctaaccctaatgatggatatagggcgagggttggtggagattaagggttcccactgtcctacctattcatgaacaggagacaatgtttagaggcttagcaacaagaggtgagattgaaacaaacagtgcaaacggtgctttgttactcctgcaggcaggcagaggaagggatgttttcaaggtaaggagtcagcaactcctgttacaatgtaaaataaatggtgttatcaataagaaccttgcttttcgattgagagccttggatagactgaaaacagaaggttatttgattgagctgcaagcagttgcaacactgttcaaatgccgaagtgaaggcaatgccatgcctaaaagtgcagagcaggccacagctgattcagccagtaatgagggcaaggtgctgggtgcaggagtgacagaaggtgccgaagacttc

SEQ ID NO: 609 - DNA, 459 bp, Homo sapiens
  MAP TO AC007557.1; EXPRESSED IN BT474, SIGNAL = 1.7; EXPRESSED IN BONE MARROW, SIGNAL = 2.2; EXPRESSED IN HBL100, SIGNAL = 1.8; EXPRESSED IN HELA, SIGNAL = 2.2; EXPRESSED IN BRAIN, SIGNAL = 2.5; EXPRESSED IN PLACENTA, SIGNAL = 1.4; EXPRESSED IN FETAL LIVER, SIGNAL = 1.7; EXPRESSED IN LUNG, SIGNAL = 1.6; EXPRESSED IN ADULT LIVER, SIGNAL = 1.4; EXPRESSED IN HEART, SIGNAL =   2
ggtcatttaagccttcaacaagttgtaatagttttgctgctggagagtcgtgaattggtgctgatggctactgactggtcaggctggtagttgctaaggattggggtagctgtggcaatttcttaaaatgatacaacaatgaagtttgccatgtggaatgactctttcgagaaagattttggagcatgtgatggtgtttgatatcattttatccacagtagaacttctttcaaaattgaaatcaatcctttcaaatcctgctgctgctttatcaactattttcattgaatgttccaaatcctttattgttatttcaacaacattgacagcatcttcaccaggagtagattccaccttaagaaaccactttttctgctcatccacaagaagcaacttctcatccattaaagcttgattgtgagattgcagcaattcagtcacatcttcaggctccacttc

SEQ ID NO: 610 - DNA, 429 bp, Homo sapiens
  MAP TO AC007556.2; EXPRESSED IN PLACENTA, SIGNAL =   2; EXPRESSED IN BONE MARROW, SIGNAL = 0.85; EXPRESSED IN ADULT LIVER, SIGNAL = 1.2; EXPRESSED IN HEART, SIGNAL = 0.96; EXPRESSED IN HELA, SIGNAL = 1.9; EXPRESSED IN BT474, SIGNAL = 1.5; EXPRESSED IN HBL100, SIGNAL = 0.76; EXPRESSED IN FETAL LIVER, SIGNAL = 1.8; EXPRESSED IN LUNG, SIGNAL = 0.85; EXPRESSED IN BRAIN, SIGNAL = 1.2
tgggagacagtaatagtcaaaagaagaagtgctccatgtagtagtactgactgataagtacattaggaaataagtcctctaaaaagaaatcatgatcctgctatccaggattcactgatgtcaattaggagctttcattcttgatgccttccaagctgataaccaaatgtccctgctctcagagaatcaccactgtgactccaatgaatggcagtgcgccaacaaacgttgcatcccagaatcctggcagtgtgacacatttaacgactgtgaggataactcagatgaagacagttcccactgtgccagcaggacctgccggccgggccagtttcggtgtgctaatggccgctgcatcccgcaggcctggaagtgtgatgtggataatgattgtggagaccactcggatgagcccattgaagaatgcag

SEQ ID NO: 611 - DNA, 488 bp, Homo sapiens
  MAP TO AC007556.2; EXPRESSED IN BONE MARROW, SIGNAL = 1.5; EXPRESSED IN FETAL LIVER, SIGNAL = 2.3; EXPRESSED IN ADULT LIVER, SIGNAL = 1.9; EXPRESSED IN BRAIN, SIGNAL = 3.8; EXPRESSED IN HEART, SIGNAL = 2.2; EXPRESSED IN PLACENTA, SIGNAL = 2.3; EXPRESSED IN BT474, SIGNAL = 1.9; EXPRESSED IN HBL100, SIGNAL = 1.5; EXPRESSED IN LUNG, SIGNAL = 1.7; EXPRESSED IN HELA, SIGNAL = 2.1
gactttgatttgtgcttaaattacttgatttgtgcctaaaacaattttaaaaatgtatacaacatattttgcttaatctaactaattaaaagtgttatctcactttgcatgcagtccattttgcagcgttttttgccttggaaggtaaattcaaagtgtctcttttatttaattgtatctttttaaaaattaggataatgttttaatcaagagggtttgttctcatgtttttcctgttcttagcacttcacacctgctcaccgacagccttcacctgtgccaatgggcgatgtgtccaatactcttaccgctgtgattactacaatgactgtggtgatggcagtgatgaggcagggtgcctgttcagggactgcaatgccaccacggagtttatgtgcaataacagaaggtgcatacctcgtgagtttatctgcaatggtgtagacaactgccatgataataacacttcagatgagaaaaattgccgt

SEQ ID NO: 612 - DNA, 462 bp, Homo sapiens
  MAP TO AC007556.2; EXPRESSED IN LUNG, SIGNAL = 0.95; EXPRESSED IN PLACENTA, SIGNAL = 0.98; EXPRESSED IN BT474, SIGNAL = 0.89; EXPRESSED IN BONE MARROW, SIGNAL = 1.3; EXPRESSED IN FETAL LIVER, SIGNAL = 0.73; EXPRESSED IN HELA, SIGNAL = 0.94; EXPRESSED IN BRAIN, SIGNAL = 0.92; EXPRESSED IN ADULT LIVER, SIGNAL = 1.7; EXPRESSED IN HEART, SIGNAL = 0.93
tccaatggatatgaaggatggtaaatcctcagacaaattagagcaaaccctgaacagcctgtggaactcacccaagtgcatgctgcacttagctcttgtctgggcatcatattgaaggtggcatgagactgcataataaatattgcataagagtgaatcaaagaagcaaagattcttgattttcttttttcattattctctttcttttttctagatgggaacagctgctcagatttcaatggtggttgtactcacgagtgtgttcaagagccctttggggctaaatgcctatgtccattgggattcttacttgccaatgattctaagacctgtgaagacatagatgaatgtgatattctaggctcttgtagccagcactgttacaatatgagaggttctttccggtgctcgtgtgatacaggctacatgttagaaagtgatgggaggacttgcaaagttaca

SEQ ID NO: 613 - DNA, 490 bp, Homo sapiens
  MAP TO AC007546.5; EXPRESSED IN BONE MARROW, SIGNAL = 1.9; EXPRESSED IN HBL100, SIGNAL = 1.5; EXPRESSED IN ADULT LIVER, SIGNAL = 2.1; EXPRESSED IN PLACENTA, SIGNAL =   2; EXPRESSED IN BT474, SIGNAL = 1.7; EXPRESSED IN LUNG, SIGNAL = 2.1; EXPRESSED IN HELA, SIGNAL = 1.5; EXPRESSED IN BRAIN, SIGNAL = 3.2; EXPRESSED IN FETAL LIVER, SIGNAL = 1.6; EXPRESSED IN HEART, SIGNAL = 1.8
cttagtcacttgttgcctgccaccacgtaagacgtacttttcactttccaccatgattgtgaggccttcccagccatgtggaactgtgagtccattaaacctcttttctttgtaaattacctagtctcgaatatgtctttattagcagcatgagaacagacaaatacatccatcaaggggcactcacaggcaagtctggatgaggaggagccctggagtggcagggaaataaggatggagggtgaggttgagcccatggaaccctcaggctgcttgtgctggactcaccagatggagacgaaggtgtccaccataaagttgttcttcagagtcccaatccacatgctctgaatataagtgactttcgcagacttaccttggcattgcaggtaggatgggccccatgccagcatggttagattgttcttcaagctctgcagggaggatgtgcctttcagcaaagttcctctcccccttacagctcctaagg

SEQ ID NO: 614 - DNA, 452 bp, Homo sapiens
  MAP TO AC007546.5; EXPRESSED IN PLACENTA, SIGNAL = 2.3; EXPRESSED IN BT474, SIGNAL = 2.1; EXPRESSED IN BONE MARROW, SIGNAL = 3.4; EXPRESSED IN HELA, SIGNAL =   2; EXPRESSED IN ADULT LIVER, SIGNAL = 1.8; EXPRESSED IN HEART, SIGNAL = 1.7; EXPRESSED IN HBL100, SIGNAL = 2.2; EXPRESSED IN FETAL LIVER, SIGNAL = 1.8; EXPRESSED IN LUNG, SIGNAL = 2.1; EXPRESSED IN BRAIN, SIGNAL = 1.9
aaggtgtctatgagagcctgttgatgaagaacctgagttttgctttaaaacagatccaagttcaattcccagccctatcacttactggttgggtggtcttgggcaagattgtggggtttctcacccgtatacaacacctacaccgccagttatgtgggattaattggcatcatgcatattaaatgcctggcacagtgtgcccttggtaagcggttaagaaatgtagttactgctgccaccatgatgatgatagtagtgactctccctttttatctgttttccaacccagggccatccaggagagcctcctcaccagcacagaaggcctgtgccccagcgccctgagcgagacaagccgttttgataatgacttgcagctagccatggagctctctgccaaagagctggaggaatgggagctccggctccaggaggaagaggctgagctccag

SEQ ID NO: 615 - DNA, 454 bp, Homo sapiens
  MAP TO AC007546.5; EXPRESSED IN HEART, SIGNAL = 0.91; EXPRESSED IN PLACENTA, SIGNAL = 1.9; EXPRESSED IN BT474, SIGNAL = 1.8; EXPRESSED IN BONE MARROW, SIGNAL = 1.9; EXPRESSED IN HBL100, SIGNAL = 0.96; EXPRESSED IN FETAL LIVER, SIGNAL = 0.75; EXPRESSED IN LUNG, SIGNAL = 0.89; EXPRESSED IN HELA, SIGNAL = 0.72
cacagttacatgttgtgtgatcgtatagttaaagccaactgtctaaacacattatcaggatttcgcaaccagtggtaagaataggggtcgggagaggtggacggggtttgatcaaggtgctaagggtactctatgttttttactcagtgaagagctagcaatcagaagtcatgatcatcctggtaaggttggactgcagcccttttcttctgaagaaaatactggtctttgatctagatactttttcagcctggttttggaatttgtcagaaagtatgagaattaaatttcacccttttgttttctagttttacatgaggctgtgagcactggcgatcctgagatggtgtacacagttctccaacatcgagactaccacaacacatccatggcccttgagggagttcctgagctgctccaaaaaattctcgaggtatccatgaaaatgtggcca

SEQ ID NO: 616 - DNA, 468 bp, Homo sapiens
  MAP TO AC007540.3; EXPRESSED IN BT474, SIGNAL =   2; EXPRESSED IN BONE MARROW, SIGNAL = 1.9; EXPRESSED IN HBL100, SIGNAL = 1.3; EXPRESSED IN FETAL LIVER, SIGNAL = 1.4; EXPRESSED IN LUNG, SIGNAL = 2.4; EXPRESSED IN ADULT LIVER, SIGNAL = 1.2; EXPRESSED IN BRAIN, SIGNAL = 1.9; EXPRESSED IN HEART, SIGNAL = 1.5; EXPRESSED IN PLACENTA, SIGNAL = 1.8; EXPRESSED IN HELA, SIGNAL = 1.7
atcactgcagaggcccttaccctctggaatttgcagacccacttatctgacataggccagttttatcctaaacagaaccagccctataaaaacccatttcaaggacccccacacgggtctaagatatcccctcagggtgcaaggttcccaccgggaccactctggcaagttttaggaagtgagtcctttctacccccatcatcctccccatcctggacacttgccccaccctggaggcagtacccacccaccacaaggcaaggcaaggcagttcttacctttccacctggaggttgactttggaaggctccacgttggggttttcccattccatttgtgggcagtgcatgaaatagcaaagggtgtacagggcctcgggctcccagtacagtgccccctgcttgtggtgcaggggggtgccattgccgtggtgcttggcattgaggggctgcaggtgatgcattgcac

SEQ ID NO: 617 - DNA, 476 bp, Homo sapiens
  MAP TO AC007540.3; EXPRESSED IN ADULT LIVER, SIGNAL = 2.5; EXPRESSED IN BRAIN, SIGNAL =   2; EXPRESSED IN HEART, SIGNAL = 1.4; EXPRESSED IN BT474, SIGNAL = 1.1; EXPRESSED IN BONE MARROW, SIGNAL = 2.3; EXPRESSED IN HBL100, SIGNAL = 1.7; EXPRESSED IN HELA, SIGNAL = 1.8; EXPRESSED IN PLACENTA, SIGNAL =   2; EXPRESSED IN FETAL LIVER, SIGNAL = 1.9; EXPRESSED IN LUNG, SIGNAL = 2.1
ccagctggaagaaaacacagagaacagtgtcaacagcaaagacgcatcatctcaaagccattcggtggatgccccaactcaggcttagttcctgagacctctaggacatccattccaaatggttgcccatttccatgtcaccagtgaccaagagctcactaccttaaggggagaagactgcccattttgaacagtttcatcagtcagatagtttgatacctgttgaaacttgtctccatatgttttcccacccccagttccatgcccacccccaagaccaaactaaacaaccctaagctgctgctcctcatgacggcttttccatctactcatgataatcacggggtcttctcccacctcccgccccagtcatgctgcgcggaactgctgtacacgtggcatggctttaagaacctgcaccagagggttgttcccctgcgaacatggcccagtttgactcaaagcctcctgttgaa

SEQ ID NO: 618 - DNA, 475 bp, Homo sapiens
  MAP TO AC007540.3; EXPRESSED IN LUNG, SIGNAL = 1.3; EXPRESSED IN ADULT LIVER, SIGNAL = 2.4; EXPRESSED IN BRAIN, SIGNAL = 1.6; EXPRESSED IN HEART, SIGNAL = 1.1; EXPRESSED IN PLACENTA, SIGNAL = 1.1; EXPRESSED IN BT474, SIGNAL = 1.4; EXPRESSED IN BONE MARROW, SIGNAL = 1.3; EXPRESSED IN HBL100, SIGNAL = 1.2; EXPRESSED IN FETAL LIVER, SIGNAL = 1.4; EXPRESSED IN HELA, SIGNAL = 1.1
ccaactgtcaacctggaacctgagtgacctttaaaaggcctcaatccattcactggacagtggtccccggcagtgggtgttcaatggtcctaggggtgctttcaattggggttaacttggttgtccagttgcccattaaactctggacccagctgatctgatctgcagaccagtggaaagtcctttgtttttcaacaggaacacgtgggagcagtagaggcagctccttggcccagccaaaaacaggtgccaggtggaatttgtctgtgtttgtgtaaagccaatgcggcaggagaactggaaagttcccgggaagcattccctgcactaggcgtttcataccacggaacctttggaagacgacaagtggatggactgaattctgatggccaacgtcctctgtaagtcctggagcacatcctggccggtcccttcaccatttttgtcatacaggagctgcttgaatgcttcgttt

SEQ ID NO: 619 - DNA, 466 bp, Homo sapiens
  MAP TO AC007537.3; EXPRESSED IN BT474, SIGNAL = 1.2; EXPRESSED IN HBL100, SIGNAL = 2.6; EXPRESSED IN HELA, SIGNAL = 1.3; EXPRESSED IN HEART, SIGNAL = 1.3; EXPRESSED IN PLACENTA, SIGNAL = 1.4; EXPRESSED IN BONE MARROW, SIGNAL = 1.4; EXPRESSED IN FETAL LIVER, SIGNAL = 1.2; EXPRESSED IN LUNG, SIGNAL = 1.4; EXPRESSED IN BRAIN, SIGNAL = 1.3; EXPRESSED IN ADULT LIVER, SIGNAL = 1.1
tggcttttccctctctaccctccagcacaaacacaatagatgttcaataaatgtttcctgagttttcacccctgtctctcctaacctgcaaagggtaagtggccctgcatagaagggcacagtgtggactttgttgttacaggcccaacatgtgtagcaccagtgggtgtgacctggaagaaatccccctagatgatgatgacctaaacaccatagaattcaaaatcctcgcctactacaccagacatcatgtcttcaagagcacccctgctctcttctcaccaaagctgctgagaacaagaagtttgtcccagaggggcctggggaattgttcagcaaatgagtcatggacagaggtgtcatggccttgcagaaattcccaatccagtgagaaggccataaaccttggcaagaaaaagtcttcttggaaagcattctttggagtagtggagaaggaagattcgca

SEQ ID NO: 620 - DNA, 468 bp, Homo sapiens
  MAP TO AC007527.6; EXPRESSED IN HBL100, SIGNAL = 1.5; EXPRESSED IN LUNG, SIGNAL = 0.71; EXPRESSED IN HELA, SIGNAL = 1.3; EXPRESSED IN BRAIN, SIGNAL = 1.1; EXPRESSED IN BT474, SIGNAL = 0.94; EXPRESSED IN BONE MARROW, SIGNAL = 0.78; EXPRESSED IN PLACENTA, SIGNAL = 2.4; EXPRESSED IN HEART, SIGNAL = 0.89; EXPRESSED IN ADULT LIVER, SIGNAL = 1.2; EXPRESSED IN FETAL LIVER, SIGNAL =   3
acactcctgcatttggacacccatttccttcctcagatcatagtggtcctcctttcccctggcaccgatactaacttatataactgcttcttcacaccttatgtattagctatatattgctgaataacaacattattccagaatttgtcagcttaaataacatttattatctcacagtttctgagggtcaggaatccagaagtgtcttagctaagtgcttctgactaatcaagttttcggccaggctgcaatcatttctaggcttgactggggctggaaaatctgcttctgagctccctcacatggttgtcagcagacctcagatcctcactagctattggctgcagattgcagctcctcctcaggctggtgactccataggctcctgaatgtccttgtgatacagcttctggcttcccaaagcccacaatctgagcacacacaagagaacaacctagacagaagccg

SEQ ID NO: 621 - DNA, 1450 bp, Homo sapiens
  MAP TO AC007527.6; EXPRESSED IN PLACENTA, SIGNAL = 5.5; EXPRESSED IN BONE MARROW, SIGNAL = 5.9; EXPRESSED IN HBL100, SIGNAL = 4.7; EXPRESSED IN LUNG, SIGNAL =  13; EXPRESSED IN ADULT LIVER, SIGNAL =   3; EXPRESSED IN BRAIN, SIGNAL =   5; EXPRESSED IN BT474, SIGNAL = 5.1; EXPRESSED IN FETAL LIVER, SIGNAL = 4.4; EXPRESSED IN HELA, SIGNAL = 3.8; EXPRESSED IN HEART, SIGNAL = 4.4
ggtatagattgggctgcctggaattgcacatgaaaaatgccaggcaccagggtagaatccctcaacctccctcatctcatctcacctaaatctcctgggcagagtggagggaataatgatgttaaaatcaacattagatgttgagatctaagtttgaagctcaagtgattgtttaaacctgcaatgatgaaacccaacccaagatactactgagggaagagaaaaggagatcggaaggtggtttttatgtggtaaaattgagacttcccccaagatggccatatttgaatctcatttctgatttttgactgatagtcattttcccttgtctctttactttctcaagcatatgtggagagatgtgcttcagaggttatagaaacagctgcgtgtacaacacacatcctttcagggctgatgattcatcgtaagctttcaccataggtttccctttcgtattacaaacaagtagtgaatttctgtgctgactgaagcatctgcattatctcatgaaatcttttcaaccacgcaagttcattttattatgcccatttttacagatgagggctcagaactacttgctcaaggtcaaaaatctggcaaattctgagaccgtcaaagatacccttgactcctaagtccatactcattccattgtaccactgttaaatttaggttatgaagtgcccactgtgtacaagacactgtgcttagagccaggaaacataaagaaggatgcccaatgcctgcttctgtgtagctcacattatgctaggggagatgtgccatggaaaattagttcaatgggatgttgcaaacatcaggagccaaagaaagcacagaggaggggcactcaaacctatgaggggacagcacttaatataaaaagctggattttaagtatgagtttaccaaagtgagggacatagtatgaaaagagatgattcccagagatgaccaaggatcccaggcacagtctctacattggtatagattgggctgcctggttatcatgtcacctttccccttcctatgtgacaaaactatcacctgtttgttctttattctcaatctgggccaatgtcttacttctcttggtgtttttatttgttaagctctatctcaaagtaaggaacagaacacattgtcaagaagaaattttaggtactctctggggagaggaggaagatgggggaggattattttaaggagcaagaagtctatttcctggatcctagaaatggtgccacatggactgatacctgttgcacctgccctagggctggtcctgcaaggtgctggaggagaacacagataatcacagtgacaaggacatgcatgaagcctgtgtcaaggtgaatgtggctgacgaaaggaaaaaggaggacatttctccttgcaaaactctatataatcagaagctggatttgctcagtgatgtttgcatttt

SEQ ID NO: 622 - DNA, 497 bp, Homo sapiens
  MAP TO AC007447.6; EXPRESSED IN PLACENTA, SIGNAL = 1.6; EXPRESSED IN FETAL LIVER, SIGNAL = 1.4; EXPRESSED IN LUNG, SIGNAL = 1.4; EXPRESSED IN ADULT LIVER, SIGNAL = 1.4; EXPRESSED IN BT474, SIGNAL = 1.8; EXPRESSED IN BONE MARROW, SIGNAL = 1.7; EXPRESSED IN HBL100, SIGNAL = 1.9; EXPRESSED IN HELA, SIGNAL = 1.1; EXPRESSED IN BRAIN, SIGNAL = 1.8; EXPRESSED IN HEART, SIGNAL = 2.1
tcagctgaggagatgagagataagtctcaagtcctctccaatcaattaaaattgggagtttatataaaagggaaggaatggagctacatgtgggaaaacgggaataacggagggggaaggaagtaatcatgatgaataaggggtctgttgtctcattgtctggatgtggtgacctggtgagtttcagttccttgatactcagagccctgagtttttgttttctgaggaaggaactcaggcaatgtacatttcaatctttaagaccatgagggtcaatatctatgtttattccaaaagatcataaacatcaattctacgggacaattggggtggtttcagtcccctctttccacttatcagttcctcaatcctggggaagctggtcatcaatctttctggctgctttatgctgaagaggaggcatcctggaataatgatgagaaatgaaaatttcacacctataattgtcagtactcatgagtacctggctgccatcc

SEQ ID NO: 623 - DNA, 463 bp, Homo sapiens
  MAP TO AC007447.6; EXPRESSED IN HBL100, SIGNAL = 6.5; EXPRESSED IN PLACENTA, SIGNAL = 6.6; EXPRESSED IN BT474, SIGNAL =   6; EXPRESSED IN BONE MARROW, SIGNAL = 4.6; EXPRESSED IN LUNG, SIGNAL = 5.8; EXPRESSED IN HELA, SIGNAL =  12; EXPRESSED IN ADULT LIVER, SIGNAL = 6.8; EXPRESSED IN BRAIN, SIGNAL =  10; EXPRESSED IN FETAL LIVER, SIGNAL = 6.5; EXPRESSED IN HEART, SIGNAL = 6.4
agtatcccatcccacagcacgctttaaagggattaaagcctgttatcactcgcctgttacagcatgggcttctaaaacctataaactctccttacaattcccccatttcacctgtccaaaaacctcacaagtcttacagattagttgaggatctgtgccttatcaaccaaattgttttgcttatctaccctgtggtgcccaacccatacactcttttgtcctcaatacattcctccacaactcactattccattcttgatcttaaagatgcttttttcactattctcctgtacccctcatcccagcctctctttgctttcacttggactgaccctgacacccatcagtcccagcagcttacctgggctgtgctgccgcagggtttcagggacagctctcattacttcagccaagctctttctcatgatttactttctttccacccctccgcttctcaccttat

SEQ ID NO: 624 - DNA, 482 bp, Homo sapiens
  MAP TO AC007446.8; EXPRESSED IN HEART, SIGNAL = 1.5; EXPRESSED IN FETAL LIVER, SIGNAL = 1.3; EXPRESSED IN LUNG, SIGNAL = 1.3; EXPRESSED IN HELA, SIGNAL = 3.7; EXPRESSED IN PLACENTA, SIGNAL = 1.9; EXPRESSED IN BT474, SIGNAL = 1.7; EXPRESSED IN BONE MARROW, SIGNAL = 2.3; EXPRESSED IN HBL100, SIGNAL = 1.8; EXPRESSED IN ADULT LIVER, SIGNAL = 1.9; EXPRESSED IN BRAIN, SIGNAL = 1.7
tttcaccattattccacacccttaatatccattcccatgcctgtttcctgatttctgcttatataaattagaaaactcaagcagttcttttggggagtagtgcactgccttgtgggtcacactctgaacctcacctcttgaggcctgccaggactttggttacaggtctagaagcaaacaggggtgttgggggtagttcctgaggagaatcagcattatcttgcctggcaactgcctcaagagaggccatcactgttgcctcaggcagtgtatggttaatcacctcagtcaaaggtggcaagactgatggcagtgtgagtggaggagggaatgttgccaccactgggggcagggaggctgtttcctctggcaagaaaggcttatcagagtttacaagcttagcgtccccagcttcatcagggtcctcccacatttccccattccaagatgcagggtcccattcttttccaatcattgccctt

SEQ ID NO: 625 - DNA, 467 bp, Homo sapiens
  MAP TO AC007446.8; EXPRESSED IN BONE MARROW, SIGNAL = 2.9; EXPRESSED IN FETAL LIVER, SIGNAL = 1.7; EXPRESSED IN BRAIN, SIGNAL = 1.4; EXPRESSED IN ADULT LIVER, SIGNAL = 1.5; EXPRESSED IN PLACENTA, SIGNAL = 3.9; EXPRESSED IN BT474, SIGNAL = 1.9; EXPRESSED IN HEART, SIGNAL = 1.5; EXPRESSED IN HELA, SIGNAL = 2.4; EXPRESSED IN LUNG, SIGNAL = 2.3; EXPRESSED IN HBL100, SIGNAL = 2.5
tgcacaagcccaactttatggttagataggtcagaaagcacccagttcatgataggcagttcaagtcacatggtgacttgatgacccatagtcaaacattcagtttctatcaaagcccgataacaagccaagaggtgcatgtcgaaaggaggatggttatctgcagaagatggcagggccctgctccaaaatcctagagacctttgctgtaattcatctatgggggcctgccaaaggctccaaatagcatccctatctgccactgacacctcaagcaccattggatctgctgggtcatatggcccaagtggcagagcagcttgcacagcagcctagacctgttgcagagccttcttctgttctggaccccactcaaaactggcaacatttcgggtcactagataaatgggctggagtaacacacccaaatgaagaatatgttgcctccaaaatccaaataggcccac

SEQ ID NO: 626 - DNA, 451 bp, Homo sapiens
  MAP TO AC007436.1; EXPRESSED IN BT474, SIGNAL = 4.7; EXPRESSED IN BRAIN, SIGNAL = 8.9; EXPRESSED IN HEART, SIGNAL = 6.3; EXPRESSED IN BONE MARROW, SIGNAL = 6.2; EXPRESSED IN PLACENTA, SIGNAL =  18; EXPRESSED IN ADULT LIVER, SIGNAL =  22; EXPRESSED IN HELA, SIGNAL =   8; EXPRESSED IN LUNG, SIGNAL =  13; EXPRESSED IN FETAL LIVER, SIGNAL =  30; EXPRESSED IN HBL100, SIGNAL = 6.1
tacaagcatctgggttgctgtaactgaggtttgttgggtcagacagcataagggtaaagagtggggagggagagggaagaaggcagaagtagaagaggaaagagaagaagagggaaggggaagaatatagtatcccccccaaatcacagattccttctgttccttaaaagaggatacatgatacatttaaatagcagtttaaaaacaaaaacaaaaacaaaacaaaaaccctacattttctaaatgtttgcatttaccatttcctgattgtccgttatcacaaggaggtgtgagtctctggctaggcagaattccagactagaattccagtccttttcctccactgagaaataataacaatggttaccatatttcatccagcggtctgggcagctaggacagctggcacaagtggagtagttggagcctaggagagaagaggacctggttc

SEQ ID NO: 627 - DNA, 484 bp, Homo sapiens
  MAP TO AC007436.1; EXPRESSED IN BONE MARROW, SIGNAL = 1.9; EXPRESSED IN FETAL LIVER, SIGNAL =  49; EXPRESSED IN PLACENTA, SIGNAL = 4.3; EXPRESSED IN BT474, SIGNAL = 0.67; EXPRESSED IN LUNG, SIGNAL =  25; EXPRESSED IN HELA, SIGNAL = 3.5; EXPRESSED IN ADULT LIVER, SIGNAL =  35; EXPRESSED IN BRAIN, SIGNAL = 0.76; EXPRESSED IN HEART, SIGNAL = 3.2
aaattttcccagtaattcccctaggctatttaccaccaccactcaaaaaagaatcttaaagatgtatcttttgaatgtgagaataacagataaaaataatattatatctattgataagaatgaggaatcgttggaaaaatgcgtttgaaaaacttctgtgctgtgatccgtgtatttgcctgggaatgctaatatgcctgtttacatagcttagttcccttcttgttctgccttcacagcaccctgttgtccgcaatgccctgttttgcctggagtcagcctggaagacagcacaagaaggggaccatggcagccatgtatataccaaagcactgctggcctatgcttttgccctggcaggtaaccaggacaagaggaaggaagtactcaagtcacttaatgaggaagctgtgaagaaaggtgagagcacacctgagatccttctcctggcccatcctctgtatcaagaactgcatggcaaaaa

SEQ ID NO: 628 - DNA, 471 bp, Homo sapiens
  MAP TO AC007436.1; EXPRESSED IN LUNG, SIGNAL =  17; EXPRESSED IN HELA, SIGNAL = 4.1; EXPRESSED IN PLACENTA, SIGNAL =   2; EXPRESSED IN BRAIN, SIGNAL = 1.2; EXPRESSED IN HEART, SIGNAL = 1.6; EXPRESSED IN BT474, SIGNAL = 0.64; EXPRESSED IN FETAL LIVER, SIGNAL =  23; EXPRESSED IN ADULT LIVER, SIGNAL =  23; EXPRESSED IN BONE MARROW, SIGNAL = 1.3
tgcacaggtaaagcagtcaaagaaatttcaagcaagctaatcagagcaaaggatgcctccttttatgctcttaagaaatataaatctcaatcccaggaggctctgcagtgtaaagtcacaaagcatgcctacatttgaagcagagaaacaaaatcaggggtccttctcccacttttcattgtggaacaaaagatttctagctactagttaaggtaggacagtaaacttacgtagttttgtgagaacattaatctttatgacgtataatctaaaaataatataatttttctaattcattaggtcaattacaaggatcgtagtccctgttacggctaccagtgggtgtcagaagaacacgaagaggcacatcacactgcttatcttgtgttctccccaagcaagagctttgtccaccttgagcccatgtctcatgaactaccctgtggccatactcagacagtccaggcacat

SEQ ID NO: 629 - DNA, 477 bp, Homo sapiens
  MAP TO AC007436.1; EXPRESSED IN HELA, SIGNAL = 8.4; EXPRESSED IN ADULT LIVER, SIGNAL =  19; EXPRESSED IN BRAIN, SIGNAL = 6.8; EXPRESSED IN PLACENTA, SIGNAL = 7.5; EXPRESSED IN HEART, SIGNAL = 7.7; EXPRESSED IN LUNG, SIGNAL =  20; EXPRESSED IN FETAL LIVER, SIGNAL =  22; EXPRESSED IN HBL100, SIGNAL = 5.1; EXPRESSED IN BONE MARROW, SIGNAL =   6; EXPRESSED IN BT474, SIGNAL = 5.7
ttcagatgttcacaaattgttccttaaagtgaagcatgcctacaagttttaatctgtttaagacctacctcaagtaaaatgttcactgccatggcatgtgagggaaaagggaaataattcttatgcatggccttcaacggccaaatttcatgctcatcagtacatcttctcttggtgtagaactgatgatgataattatgatgatggaaaaaagtgctgttgatagcaatgcctctcttccttcactttcctctaactgaaccgtctcattcccaggcagtatatggttctggtcccctccctgctccacactgagaccactgagaagggctgtgtccttctgagctacctgaatgagacagtgactgtaagtgcttccttggagtctgtcaggggaaacaggagcctcttcactgacctggaggcggagaatgacgtactccactgtgtcgccttcgctgtgagtgtggctgtttg

SEQ ID NO: 630 - DNA, 489 bp, Homo sapiens
  MAP TO AC007430.11; EXPRESSED IN PLACENTA, SIGNAL = 3.6; EXPRESSED IN LUNG, SIGNAL = 4.4; EXPRESSED IN HEART, SIGNAL = 3.3; EXPRESSED IN HBL100, SIGNAL = 3.2; EXPRESSED IN FETAL LIVER, SIGNAL = 3.1; EXPRESSED IN HELA, SIGNAL = 3.6; EXPRESSED IN BRAIN, SIGNAL =   5; EXPRESSED IN BT474, SIGNAL = 4.6; EXPRESSED IN BONE MARROW, SIGNAL = 5.6; EXPRESSED IN ADULT LIVER, SIGNAL = 3.6
agtatggcccaaccttcctcccattcctccctgcacacagaggctccaggagagtaatttcatcccatttcagtgtacctaggccttctctttctcactagccctctcattacccacaaccccatttgacaaatggggccctggctgacctggtggggcagccatcgctgcgggtgaccttgtcagcagtgagcccatcggtcatggtgacgctgcgccgcttcatgtggctgcccttggggcctgaggggctgacggggctagcaggcttgctactcccctgtcccaggccatagctggcctcgaggtagcgcagtgggaaggtgcggttcaccgggcagtagatgatggcaccactctgctctgacacagccttgcggctgcccacatgatagcgcacgagggcgggcacgtggtcaaagctctcctgctcaaacaggtactggatgtgtgtgtagctctcgcctgccttcaccaccaccttgttga

SEQ ID NO: 631 - DNA, 458 bp, Homo sapiens
  MAP TO AC007430.11; EXPRESSED IN LUNG, SIGNAL = 6.9; EXPRESSED IN ADULT LIVER, SIGNAL = 4.5; EXPRESSED IN BRAIN, SIGNAL = 6.1; EXPRESSED IN HEART, SIGNAL = 4.4; EXPRESSED IN PLACENTA, SIGNAL = 5.5; EXPRESSED IN BT474, SIGNAL = 6.1; EXPRESSED IN BONE MARROW, SIGNAL = 6.6; EXPRESSED IN HBL100, SIGNAL = 5.8; EXPRESSED IN FETAL LIVER, SIGNAL = 6.1; EXPRESSED IN HELA, SIGNAL = 6.7
tgaaaataacatgctaagcacaggcattggctgtggtcatgactgtcggaccaaggggcatagtgggagatgaggctggattctgatcacaaggaaactcaaatgcccctttacgggacagggagtccaggagagtgggcccagctgcaccagaggcctggcttgcccagcctgacccctggaccacggctctgcccctgccccaggtaccagcggaagtgggatgagctggctgtgcaggagaagatgttccgccaggagtttgagcagctggccaataacaagaaggagattgtggccttcctcaagcgcacgctcaaccagcaggtggatgagatcacagacctcaacgagcagctccagaacttgcagctagccaaagagatggagaaggatgccttcgaggcgcagctggcccaggtgcgccacgagttccaggagaccaaggaccagctcac

SEQ ID NO: 632 - DNA, 448 bp, Homo sapiens
  MAP TO AC007430.11; EXPRESSED IN HBL100, SIGNAL = 3.7; EXPRESSED IN HELA, SIGNAL = 4.7; EXPRESSED IN BRAIN, SIGNAL = 4.5; EXPRESSED IN PLACENTA, SIGNAL = 4.6; EXPRESSED IN BT474, SIGNAL = 4.1; EXPRESSED IN BONE MARROW, SIGNAL = 3.5; EXPRESSED IN HEART, SIGNAL = 3.3; EXPRESSED IN ADULT LIVER, SIGNAL = 3.7; EXPRESSED IN LUNG, SIGNAL = 4.6; EXPRESSED IN FETAL LIVER, SIGNAL =   4
agcagtctctgctgagtcccgcagcctggaccagggcctctggaaaggcacagtgcctggctgcagctcacagacctggctttagaatggctcagttggtgttgcatgctttgggttgtttggaattccctgctcctccaaggatatttaacaccgttggagacttttagcagtggcctgtgggttccatctcttctgggtacaggaagcagaaggccagagtggttaggagcacagacttcagcatcagcatacctgggttaaatccacccttggcctctttccacatgatcctgacaggtgactttgttccctcctgtagtgcccgtggaggcgggaagctgagcccggctcccaggaagcacagtgagggctcagccattgatgatgatgatgatgatgatgatgatgatgatgatgatggtgatgatgatgatgctgctgctgt

SEQ ID NO: 633 - DNA, 471 bp, Homo sapiens
  MAP TO AC007430.11; EXPRESSED IN PLACENTA, SIGNAL =   4; EXPRESSED IN HBL100, SIGNAL = 4.8; EXPRESSED IN LUNG, SIGNAL =   4; EXPRESSED IN BRAIN, SIGNAL =  14; EXPRESSED IN BT474, SIGNAL = 3.9; EXPRESSED IN BONE MARROW, SIGNAL = 3.3; EXPRESSED IN FETAL LIVER, SIGNAL = 3.1; EXPRESSED IN HELA, SIGNAL = 3.4; EXPRESSED IN ADULT LIVER, SIGNAL = 2.1; EXPRESSED IN HEART, SIGNAL = 3.1
gactcttgtccaatttgaccttgattcagggtgggggtgggcaggggttgctgagaagccggggggcagatggaaacacagactataggggcagctgctgatggtcctcactcaggcagagtggctggaggggaatcgggatcctcgtgttgtcctcacctatagtgaatctgatgaggtgggggagcaatgtccactaaccctgaggggagaagggccaccatccggcctgtcccattgggtgcatgggggctgtgtgtggtgatcgggtgtcttgtgccctcaggcatcacggaggaaaacctgaacaaactgatccagcacgcccagatacccccggaggatagtgagatcatcaccaacatggctcacctcggcgtgcccatcgtcaccgatgtaagaggccagctcagcttccgggggaggtgggaagggagctggcagatctgtctgcttctgctctgactgaca

SEQ ID NO: 634 - DNA, 480 bp, Homo sapiens
  MAP TO AC007406.1; EXPRESSED IN BT474, SIGNAL = 8.5; EXPRESSED IN BONE MARROW, SIGNAL =  13; EXPRESSED IN FETAL LIVER, SIGNAL = 9.8; EXPRESSED IN HELA, SIGNAL = 8.4; EXPRESSED IN ADULT LIVER, SIGNAL = 7.6; EXPRESSED IN BRAIN, SIGNAL =  11; EXPRESSED IN PLACENTA, SIGNAL = 8.7; EXPRESSED IN LUNG, SIGNAL =  11; EXPRESSED IN HEART, SIGNAL = 8.1; EXPRESSED IN HBL100, SIGNAL = 8.8
aggcaatggaaagagactggaaattataaagccagtaggatgaagcaggtgcctgggggtggatcagctgcaggtcctggacagcagggagattatttacccaggagatggtggaggcgggcatccctctcactcacctccctaaaagcgtccctgttgcttccgatttcagatgggcttctttgaatcactttctcagcttccctgccttttgactacagttttcagctgtttgccttgtgttctatcatagccttgcctcagctctggaactcatttcaaattagatctaccacatgttgacgctggaagaaaccaaagaagatgtcacttacatttttagtttggaactaaaattgtgctctgaggacttcttcatccctgagcttctcactaaacaaatactactacgaatccaattccttgattgccctcccctccccgccaagcacaagagtggctacttggagctgtgaattt

SEQ ID NO: 635 - DNA, 489 bp, Homo sapiens
  MAP TO AC007406.1; EXPRESSED IN BT474, SIGNAL = 9.9; EXPRESSED IN HELA, SIGNAL = 7.9; EXPRESSED IN FETAL LIVER, SIGNAL = 8.6; EXPRESSED IN PLACENTA, SIGNAL = 7.9; EXPRESSED IN BONE MARROW, SIGNAL = 8.7; EXPRESSED IN HBL100, SIGNAL =  11; EXPRESSED IN LUNG, SIGNAL =   8; EXPRESSED IN ADULT LIVER, SIGNAL = 5.4; EXPRESSED IN BRAIN, SIGNAL = 6.8; EXPRESSED IN HEART, SIGNAL = 5.8
cggtggatcttcttagaaatggcctgtatctgctcatgaatgaccaagtgtaggctggaacccaggtcagcaaattgtctgggttccaccttcaaaatatccagactgatccttctgtcacctctaccaccacccggtacagggtggcagcatcagctcccggctcctacctggccttcggttttcacccttgttcccctcgtggaatctccattttgttaaaccttagatcactctatgtcacaccccaggtaaaggcctcccgtgggtttcccgtcccactcaaagaaaaaagctgcagcccctttagttgccttcaaggccatattggatgcattccacaccattcccctcagccacctgctctaccacgtccaccctgttccctgcacacgtggggtgtgttggatccattcccacaccatttccctcagccacatgctctaccacgtccaccctgttccctgccccttcagccacgtgctctac

SEQ ID NO: 636 - DNA, 466 bp, Homo sapiens
  MAP TO AC007397.21; EXPRESSED IN PLACENTA, SIGNAL =  21; EXPRESSED IN HBL100, SIGNAL =  13; EXPRESSED IN LUNG, SIGNAL =  18; EXPRESSED IN HELA, SIGNAL =  14; EXPRESSED IN BT474, SIGNAL =  18; EXPRESSED IN BONE MARROW, SIGNAL =  14; EXPRESSED IN FETAL LIVER, SIGNAL =  23; EXPRESSED IN ADULT LIVER, SIGNAL =  14; EXPRESSED IN BRAIN, SIGNAL =  20; EXPRESSED IN HEART, SIGNAL =  12
ccaggaattaggagacccagactcaactaaatgggccaaagcatgacatcattgtcccaagcttcagagtgttcagctctaaatatgaacagttagactgtgatccaaaagtcccttcaaatgctaactcccctgacacccaggcaatgtaaaaaataggtaataataataacaactaatacataatgcttactctgtgatagggagaattctaagtcctttatatatgttgagagcttgtttggaggttctagaatggaagcccagctactcacatacccttgaccgaagaccggtcctcctttattgggaatggtcatcctcttccactgagcctgcagcttagggacggatgcacatggagtagtgagggaggaaggggacacccgcctagccagccagatcagctgaatcaaccctggcaatcgatggagtgacagatgccgcagccagatcaccctcacat

SEQ ID NO: 637 - DNA, 458 bp, Homo sapiens
  MAP TO AC007397.21; EXPRESSED IN ADULT LIVER, SIGNAL = 3.6; EXPRESSED IN BRAIN, SIGNAL = 2.9; EXPRESSED IN HEART, SIGNAL = 2.9; EXPRESSED IN PLACENTA, SIGNAL = 2.2; EXPRESSED IN BT474, SIGNAL = 2.6; EXPRESSED IN HELA, SIGNAL = 2.5; EXPRESSED IN LUNG, SIGNAL =   3; EXPRESSED IN FETAL LIVER, SIGNAL =   3; EXPRESSED IN HBL100, SIGNAL = 2.4; EXPRESSED IN BONE MARROW, SIGNAL = 2.8
tgaacacaaatctttgtacccacttggttcaaaatctccattaccatctttggtttgatttttttctctcttcctttttttgtcctgttctttttctaggatgaatcctccatgttcttccagtttggcccatcaattgaacagcaagcttccgtaatgctcaacatcatggaagaatatgactggtacatcttttctatcgtcaccacctatttccctggctaccaggactttgtaaacaagatccgcagcaccattgagaatagctttgtgggctgggagctagaggaggtcctcctactggacatgtccctggacgatggagattctaagatccagaatcagctcaagaaacttcaaagccccatcattcttctttactgtaccaaggaagaagccacctacatctttgaagtggccaactcagtagggctgactggctatggctacacgtggat

SEQ ID NO: 638 - DNA, 449 bp, Homo sapiens
  MAP TO AC007390.2; EXPRESSED IN HELA, SIGNAL = 9.7; EXPRESSED IN ADULT LIVER, SIGNAL = 3.8; EXPRESSED IN PLACENTA, SIGNAL = 4.2; EXPRESSED IN BONE MARROW, SIGNAL = 2.8; EXPRESSED IN BT474, SIGNAL = 4.1; EXPRESSED IN HEART, SIGNAL = 2.6; EXPRESSED IN BRAIN, SIGNAL = 4.2; EXPRESSED IN LUNG, SIGNAL = 4.3; EXPRESSED IN FETAL LIVER, SIGNAL = 3.8; EXPRESSED IN HBL100, SIGNAL = 4.1
ggggacagacttaccttccactgtgagttacccagagagtctgtgatggtcctgtaggctttcgaggcaatcgggcagtctcagtcttcagctgctaagccgagaagatctgggaaggagtcagagagccttgggccagagttccagggcctctgggagtggctgctaggtgagttgaacagtccgattttcagtggcacagatgggacacagcttgggaggaatcctgggctgtgggcattccttgacccagtggccagatttcttgcacttgtagcaagctcttgtgggaggaggttctggaggaacgccttgcagctgccgtcaggcgtttggaagttcttgtgtgctggagatgtggctggggtttggctcacagtggaggcaaggaattgcaacacagaaatatgttgctacttggctgctgctactctattattgttcacctt

SEQ ID NO: 639 - DNA, 466 bp, Homo sapiens
  MAP TO AC007390.2; EXPRESSED IN PLACENTA, SIGNAL = 1.2; EXPRESSED IN BT474, SIGNAL =   2; EXPRESSED IN LUNG, SIGNAL = 1.3; EXPRESSED IN BRAIN, SIGNAL = 1.2; EXPRESSED IN HEART, SIGNAL = 1.1; EXPRESSED IN BONE MARROW, SIGNAL = 2.3; EXPRESSED IN HBL100, SIGNAL = 2.1; EXPRESSED IN FETAL LIVER, SIGNAL = 1.7; EXPRESSED IN HELA, SIGNAL = 1.9; EXPRESSED IN ADULT LIVER, SIGNAL = 1.4
gccaattcactttcttcatgggacagagccatttgatttaaaaagcaaattgcataatattgagctttggagctgatatttgagcggaagagtagcctttctacttcaccagacacaactcctttcatattgggatgtttacaaagtaatgtctctaacagatgggatgcttttgtggcaattctgttctgaggatctcccagtttatttaccacttgcacaagaagagccttttcttcctcaggcttgttacaaagcagctcatgagccacggtaagggctcgagttttagtggttactaatgtatcatgacttaaagtttctaagacctgcacaaattcagccactaagtgtttcagctggtgttcaaaataccataatatcagtcttctatctcttgagtccttgttgccactggacaactgttccagtttgtcaaaaggacgctggctgaaaatcctcagct

SEQ ID NO: 640 - DNA, 485 bp, Homo sapiens
  MAP TO AC007387.2; EXPRESSED IN PLACENTA, SIGNAL = 1.5; EXPRESSED IN LUNG, SIGNAL = 1.7; EXPRESSED IN BRAIN, SIGNAL = 1.4; EXPRESSED IN BT474, SIGNAL = 1.4; EXPRESSED IN BONE MARROW, SIGNAL = 2.7; EXPRESSED IN HBL100, SIGNAL =  25; EXPRESSED IN FETAL LIVER, SIGNAL = 1.5; EXPRESSED IN HELA, SIGNAL = 1.1; EXPRESSED IN ADULT LIVER, SIGNAL = 1.1; EXPRESSED IN HEART, SIGNAL = 1.3
gatgggtcacagaagccaagaggagagagcataagaaagagggagcagctggctggcagcatgtcacatgttgccaagaggttaaattggatgaagactaaaaaaaggccttgggattgagcgatgagaaggtcaccagggaccacaaggacacttcattgccctattgcatcagacacaaatgagagatgaagaagtggaagcagcaaggacagacatacaagttcaagaaatttgtaagcaggaagaaaaaagaaccgtggattaagtgaggggaggaggcttttattttcttgttttgtcttgtggtttttagggagtggatgcaaacacagatgggaaggtaagcttcaacaggacactgccaggaagaagcatgaagaaagagataaacccagaggcggaatgaaccctttggcagtggagatatctgaccatggagatggtgagaaagctcaaatctcagttctggctttcctttgcat

SEQ ID NO: 641 - DNA, 481 bp, Homo sapiens
  MAP TO AC007387.2; EXPRESSED IN PLACENTA, SIGNAL = 1.8; EXPRESSED IN LUNG, SIGNAL = 1.9; EXPRESSED IN BRAIN, SIGNAL = 2.6; EXPRESSED IN HEART, SIGNAL = 1.6; EXPRESSED IN BT474, SIGNAL = 1.9; EXPRESSED IN BONE MARROW, SIGNAL =   2; EXPRESSED IN HBL100, SIGNAL = 1.2; EXPRESSED IN FETAL LIVER, SIGNAL = 1.4; EXPRESSED IN HELA, SIGNAL = 1.3; EXPRESSED IN ADULT LIVER, SIGNAL = 1.5
aacacttcctttcatgtttctggtaactctaagtaatcaaaacctttatggctgcaaattttccttctgctagtgtagggaagattttggtgcagtggctagaacacaataggaattcagtagatgttggtcaaataaattttcaggaagggaaggaacttctgaggaattatttataataaatttagactgccaattaatctgaaacctggtccctaaagacttgtgtctttgattcgtttttctctgcagcaagtgaaagggaactttgctaggttgcagacctgcatctcagaactccgcatgttacagagagaagggtgtttcagatcacaaggtgcttctctgcggctggcagtagaggatgggctccagcaattcaaacaatacagcagacatgtgaccacaagggcagctctgacctatacctccctggaggtaagtgatgctggcctttaggactccaagctgtgttccgatt

SEQ ID NO: 642 - DNA, 468 bp, Homo sapiens
  MAP TO AC007386.3; EXPRESSED IN PLACENTA, SIGNAL = 1.9; EXPRESSED IN BT474, SIGNAL = 5.7; EXPRESSED IN BONE MARROW, SIGNAL = 3.1; EXPRESSED IN FETAL LIVER, SIGNAL = 1.8; EXPRESSED IN LUNG, SIGNAL = 1.4; EXPRESSED IN ADULT LIVER, SIGNAL = 1.6; EXPRESSED IN BRAIN, SIGNAL = 2.5; EXPRESSED IN HBL100, SIGNAL = 3.1; EXPRESSED IN HELA, SIGNAL = 1.5; EXPRESSED IN HEART, SIGNAL = 1.4
tcaagccgaatgtcagagtgtccttgtccttggtaaccagttccggctggggagcccaatgccagtgccgagaggtaagcctcaggccagcgactgggccaaagcattgcttgggagggtaaaagttggcaagggcagtgccctgtgtccatgactggcggctgggtgaacagggtgggacatcactgctggcaggcaagcccaaagcccagccccatcacagaaccgactccttggattccagttctggggcactggccacggggccagcggggttctggtgtgtcaccaggggcgatgtctcctcctcagacttgcagttggggatggcttccactttcacctcagcaagttcctgctcgcctttctttgttgccttctgattcaggtggtggagaatgcctgcacccagggcatccccttccacattcaccaccgtggtggtccggtccctggtgggaaaagaag

SEQ ID NO: 643 - DNA, 452 bp, Homo sapiens
  MAP TO AC007386.3; EXPRESSED IN BRAIN, SIGNAL = 0.69; EXPRESSED IN HBL100, SIGNAL = 1.1; EXPRESSED IN LUNG, SIGNAL = 1.6; EXPRESSED IN ADULT LIVER, SIGNAL = 0.88; EXPRESSED IN HEART, SIGNAL = 0.85; EXPRESSED IN PLACENTA, SIGNAL = 1.1; EXPRESSED IN BT474, SIGNAL = 1.9; EXPRESSED IN BONE MARROW, SIGNAL = 0.87; EXPRESSED IN FETAL LIVER, SIGNAL = 0.83; EXPRESSED IN HELA, SIGNAL = 0.83
tcttgtcctcctagagcagagcttctctgccaaagttggtccaatgctctataaaatattaaagagcaaggatcggctgccccaactagtacttgcagtttcttaaaaccatatattcattttactaaaggagttacccctccccattgtcagctagaccaatgtaactgaggacagatgaccatccctgctccccagagttcttctatggcataggagcagaagtctcaggatcctttgaaatgcacttcattgccttgtcacctcctgcacccccttctccctctcctaacttctctgctaaccaaacctcttgttatctacccaatgatgaaaccaaagtagttgtagaggttaaagatttaaaacaaactgtagcaactgaaacagagtatcaggacgcaaatgcttggctggaatggattaaatattctgttcgcacgcttaacaaa

SEQ ID NO: 644 - DNA, 411 bp, Homo sapiens
  MAP TO AC007380.3; EXPRESSED IN HBL100, SIGNAL = 9.1; EXPRESSED IN LUNG, SIGNAL =  13; EXPRESSED IN PLACENTA, SIGNAL = 9.7; EXPRESSED IN BT474, SIGNAL = 9.8; EXPRESSED IN BONE MARROW, SIGNAL = 9.7; EXPRESSED IN FETAL LIVER, SIGNAL =  11; EXPRESSED IN HELA, SIGNAL =  10; EXPRESSED IN ADULT LIVER, SIGNAL = 8.2; EXPRESSED IN BRAIN, SIGNAL =  14; EXPRESSED IN HEART, SIGNAL =  11
ggtatgtaaattttctttcttcttggtttaaaaaaagaatagtggtgatattgaaaattcaatttctattcttatctacaattggaatgatcttagtttcctcattaaatgtgatgctgacttttgagataaattcatttaattgtctttaataaaagtatatgctaaatttatgaaatacattttgaacattgctatggactgaattatttctccctaaaattcatttgttgaagcactaacttacagtgtgatggtatttggaaatttggatagtatttggaaattcacgggcctttgggtggtaataaggtttagatgaggacatgagggtggggtcctcatgatgggactacggttttataaaaagaaacaacagagaactcacttgcttcctctcccccatgtgat

SEQ ID NO: 645 - DNA, 468 bp, Homo sapiens
  MAP TO AC007380.3; EXPRESSED IN PLACENTA, SIGNAL = 1.9; EXPRESSED IN FETAL LIVER, SIGNAL = 1.6; EXPRESSED IN LUNG, SIGNAL = 2.2; EXPRESSED IN HELA, SIGNAL =   3; EXPRESSED IN ADULT LIVER, SIGNAL = 2.4; EXPRESSED IN BONE MARROW, SIGNAL = 3.9; EXPRESSED IN HBL100, SIGNAL = 3.1; EXPRESSED IN BRAIN, SIGNAL = 2.9; EXPRESSED IN BT474, SIGNAL = 1.6; EXPRESSED IN HEART, SIGNAL = 2.7
gattttctgtagtatgcaatgctgtttgatagcattttacccacactagaacttctttcacaattggagttgatcctctaaatcctacctttgctttgtcaactaagttatgtaatattctaaatatttcattgtcacttcaacaacgtttaaagcatcttaccaggaataaatttcatctcaagaaaccactgtctgtgctcattcataagaagcaacttcttatctgttaaacttttatccataagattgcagcaattcagtcacatcttcaggttccccttctaattctagttcttttgctatttccatcacatctgcagttacttcttccactgaagtcttgaaccccccatcgtcatccgtgagaattggaatcaatttcttccaaactcctgttaatgttgtaattttgacatcctcctataaatcatgaatgttcttaatggcatcttgaatggtgaatca

SEQ ID NO: 646 - DNA, 491 bp, Homo sapiens
  MAP TO AC007377.3; EXPRESSED IN ADULT LIVER, SIGNAL = 0.82; EXPRESSED IN BRAIN, SIGNAL = 1.1; EXPRESSED IN BONE MARROW, SIGNAL = 0.99; EXPRESSED IN HBL100, SIGNAL = 1.1; EXPRESSED IN HEART, SIGNAL = 2.2; EXPRESSED IN PLACENTA, SIGNAL = 1.1; EXPRESSED IN BT474, SIGNAL = 0.8; EXPRESSED IN LUNG, SIGNAL = 1.2; EXPRESSED IN HELA, SIGNAL = 0.87; EXPRESSED IN FETAL LIVER, SIGNAL = 0.9
cattgaccaatgagccacaggtaagaggcatttcagtgtcttgataactaattcattagttatgattaactcttggaaaaccctaaacttcacccacctctcatggcctcctgtcacagagtggagggatgaccgacctagataggagagattgagagagaggaagacccggcaacacaggttgtgatgaaatgtgcttccttccattctctctaggggaagatgatgacgacgatgaatgtggggaagagaagctgccctcctgtttcgattacgtgatgcactttctgactgtgttctggaaggtcctgtttgccttcgtcccccctactgaatactggaatggctgggcgtgtttcattgtctccatcctcatgattggcctactgacagctttcattggagacctggcttcccactttggctgcaccattggcctgaaagattctgtgactgcagtcgtgttcgtcgcacttggaacatcagtgcca

SEQ ID NO: 647 - DNA, 475 bp, Homo sapiens
  MAP TO AC007370.7; EXPRESSED IN FETAL LIVER, SIGNAL = 6.6; EXPRESSED IN PLACENTA, SIGNAL = 8.3; EXPRESSED IN BT474, SIGNAL = 5.6; EXPRESSED IN BONE MARROW, SIGNAL = 8.7; EXPRESSED IN HBL100, SIGNAL =   6; EXPRESSED IN LUNG, SIGNAL = 6.4; EXPRESSED IN HELA, SIGNAL = 5.8; EXPRESSED IN ADULT LIVER, SIGNAL = 4.5; EXPRESSED IN BRAIN, SIGNAL =   6; EXPRESSED IN HEART, SIGNAL = 5.4
gactatgtgaagggctccccctggagttgtacaacacagtggccctgttcacctctccattcctcactttcctaatctccagtgacttttctttccacttgactttacatattcactcccttgggtcataagcacagtgttgtcaccaggagctgcacttcattcaaaatctttcatttaaagattgaattttctgatccccatttccattcttgggtgtccttgctctagtgaccctcctgtcagttctttaccctcactagacctccaaactattgaactcactactttctcactgtccctcaggtttcttctgtccttaggacagatgagagagctgaacccaagactcaacattaagccagagattcacaagggagctgaagaggccccaggtcattggtgctggttacaagatttcctgcctttgtctgccaggcagcctaggggttacagtgctttgtgatgttgtgaa

SEQ ID NO: 648 - DNA, 475 bp, Homo sapiens; identical to SEQ ID NO: 647
  MAP TO AC007370.7; EXPRESSED IN BT474, SIGNAL = 4.3; EXPRESSED IN FETAL LIVER, SIGNAL = 6.8; EXPRESSED IN BRAIN, SIGNAL = 8.5; EXPRESSED IN HEART, SIGNAL = 7.3; EXPRESSED IN ADULT LIVER, SIGNAL = 6.4; EXPRESSED IN PLACENTA, SIGNAL = 6.7; EXPRESSED IN BONE MARROW, SIGNAL =   7; EXPRESSED IN HBL100, SIGNAL = 5.3; EXPRESSED IN LUNG, SIGNAL = 8.7; EXPRESSED IN HELA, SIGNAL = 6.1

SEQ ID NO: 649 - DNA, 465 bp, Homo sapiens
  MAP TO AC007370.7; EXPRESSED IN HBL100, SIGNAL = 4.6; EXPRESSED IN FETAL LIVER, SIGNAL = 5.3; EXPRESSED IN PLACENTA, SIGNAL = 3.8; EXPRESSED IN BT474, SIGNAL =   5; EXPRESSED IN ADULT LIVER, SIGNAL = 6.2; EXPRESSED IN BRAIN, SIGNAL = 5.9; EXPRESSED IN HEART, SIGNAL = 4.2; EXPRESSED IN BONE MARROW, SIGNAL = 6.8; EXPRESSED IN HELA, SIGNAL =   7; EXPRESSED IN LUNG, SIGNAL =   7
tgacttctgtgcaccggcaggctcaacaccatgtggaagctgccaatgcttggggcttccaccctctgaagcaacagcctgaactgtaccttagcctcttttagtcaggttggaatggctgggacgcagggcacaaagtccctagactacacacagcacaaagactctaggcctagcccacaataccattttctcctaggcctctgggcctgtgatgggaggggccactgtgaagacctctcatatgccctggagacattttccccagtgtcttggggattaacattcagctcctcgttacttacgcaaatttctgcacctggcttcaatttctcctcagaaaattgatttttcttttcaatcacattgtcaggctgcaaattttctgaacttttatgctctgcttcccatataaaactgaatgcctttaacagcacccaagtcacatcttgaatgctttgctgc

SEQ ID NO: 650 - DNA, 468 bp, Homo sapiens
  MAP TO AC007370.7; EXPRESSED IN HBL100, SIGNAL = 3.4; EXPRESSED IN HELA, SIGNAL =   6; EXPRESSED IN ADULT LIVER, SIGNAL = 3.2; EXPRESSED IN BRAIN, SIGNAL = 4.3; EXPRESSED IN HEART, SIGNAL = 4.4; EXPRESSED IN PLACENTA, SIGNAL = 3.7; EXPRESSED IN LUNG, SIGNAL = 4.9; EXPRESSED IN FETAL LIVER, SIGNAL = 3.6; EXPRESSED IN BONE MARROW, SIGNAL = 3.8; EXPRESSED IN BT474, SIGNAL = 3.9
tgaaagtagctttggagcctgatatggtttgggtgtccccattgtgatggttaatactgagtttcaacttgattggattgagggatacaaagtattgatcctggggctgtctgtgagggtattgccaaaagagattaacatttgaatcagtgggctgttgaaggcagatccacccttaatctggtgggcacaatctaatcagcttccagcaaatataaagcaggcagacaacatgaaaaagagagacaagcctagtcttccagcttacatctttctcccgtgctggatggttcctgccctcaaacatcggacttcaaatttttcagttttgggactggactggctgtccttgttcctcagcttgcagacagcctattatgggaccttgtgatagtgtattatatatcctattagttctgtccatctaagagaatcctgactaatacatcaccaaaatctcatcttgaa

SEQ ID NO: 651 - DNA, 452 bp, Homo sapiens
  MAP TO AC007367.3; EXPRESSED IN BRAIN, SIGNAL =  33; EXPRESSED IN HEART, SIGNAL =  20; EXPRESSED IN HBL100, SIGNAL =  27; EXPRESSED IN BT474, SIGNAL =  18; EXPRESSED IN BONE MARROW, SIGNAL =  21; EXPRESSED IN FETAL LIVER, SIGNAL =  17; EXPRESSED IN HELA, SIGNAL =  24; EXPRESSED IN ADULT LIVER, SIGNAL =  21; EXPRESSED IN PLACENTA, SIGNAL =  29; EXPRESSED IN LUNG, SIGNAL =  25
ctcccacaatcatgagagccaattccttaaaataaatctctctctagatacacacacacacacacacacacacacacacacacacacacacacaccccttttggtactggagaaccctaatgcaatgaccatctactagttttggcataagaaaaaaaatgactagaaagatctttaaaaattaaagaataaattgaaaatgagaaaaaaaatcaaattttcctggagataaagcaacatgactgagaaaaaagatcctgtttctctacttattatttaagggtcactgactagcatgcacaaggtggacaaaaatgtgaaaaaaatttttatatcagctccacataatcacatctctgccatttctattatgtgggattatgaaatttgtcatttgtctgctatttacaggtaaaattttaataatttataccatgtaaccatttgccgat

SEQ ID NO: 652 - DNA, 464 bp, Homo sapiens
  MAP TO AC007366.2; EXPRESSED IN BT474, SIGNAL = 4.7; EXPRESSED IN HBL100, SIGNAL = 4.2; EXPRESSED IN FETAL LIVER, SIGNAL = 4.8; EXPRESSED IN HELA, SIGNAL = 4.8; EXPRESSED IN ADULT LIVER, SIGNAL = 3.5; EXPRESSED IN BRAIN, SIGNAL =   5; EXPRESSED IN PLACENTA, SIGNAL = 5.1; EXPRESSED IN BONE MARROW, SIGNAL = 4.9; EXPRESSED IN LUNG, SIGNAL = 4.8; EXPRESSED IN HEART, SIGNAL =   4
gagactgacttcctgcccactggctctttgccagcaatcgcagcccacctaaaacgagctgtgggtcaacctggctctctcatccctggttgcaagtgtctcctacacatgagagttaaactctggttcccaatctttccctgcctgacctgccacaactaccaccacctttctcattgccaagcagtgtagattccatcggagttcacgttcctcttacctgtctaccagcttcttggcgaacccaaagtccgtgagcttaatgtggccatccctatccagcaggatgttctctggcttcaagtccctgtagacgatctctttggagtgcaggtactcgatggcacagatgatctctgcagagtagaagagccccgtggtgctggagaagcgcccccggttgcgcaggtagctgaagagctcgccgcccggcacgtactccatgagcatgtagaggaagcgct

SEQ ID NO: 653 - DNA, 493 bp, Homo sapiens
  MAP TO AC007360.2; EXPRESSED IN HELA, SIGNAL = 1.9; EXPRESSED IN ADULT LIVER, SIGNAL = 1.9; EXPRESSED IN BT474, SIGNAL = 1.9; EXPRESSED IN HEART, SIGNAL = 1.9; EXPRESSED IN PLACENTA, SIGNAL = 1.6; EXPRESSED IN BONE MARROW, SIGNAL = 2.3; EXPRESSED IN FETAL LIVER, SIGNAL = 1.7; EXPRESSED IN LUNG, SIGNAL = 2.3; EXPRESSED IN BRAIN, SIGNAL = 2.7; EXPRESSED IN HBL100, SIGNAL = 1.8
gccagaattggtaatcccaggtatctctgaagtgataaaggtaggactcaagtaaaaaagatttggacagaagactttgaatctcattttttgttttgtttgtttgggggtttttttgtttgcttttttttgtttttttttgttttgtttttggtgagagtgcaaacagtgtctctggacttgaaaacactaggcccagttcacactgaggatactataaacaaaaagattaagtgaaaggtttcatactgaatattgagaccttcaaccttcttttcccactaggttcccagaacactggcagccaatcatatttcttccaagaaggagatcaaaaggtatttgaggacccagtccaccgaaagtacctaaaggtactgagatgtgggttctcaaggccgcagctcatccagatcaccctccagcgatgaccacactcaacacaacacacccatttgcacagaacttctagagcaatgaggtctcagcagaa

SEQ ID NO: 654 - DNA, 493 bp, Homo sapiens; identical to SEQ ID NO: 653
  MAP TO AC007360.2; EXPRESSED IN ADULT LIVER, SIGNAL = 2.3; EXPRESSED IN BRAIN, SIGNAL = 3.7; EXPRESSED IN HEART, SIGNAL = 2.9; EXPRESSED IN BT474, SIGNAL = 2.7; EXPRESSED IN PLACENTA, SIGNAL = 3.1; EXPRESSED IN HELA, SIGNAL = 3.7; EXPRESSED IN LUNG, SIGNAL = 4.4; EXPRESSED IN FETAL LIVER, SIGNAL = 2.7; EXPRESSED IN HBL100, SIGNAL = 2.2; EXPRESSED IN BONE MARROW, SIGNAL = 3.4

SEQ ID NO: 655 - DNA, 455 bp, Homo sapiens
  MAP TO AC007326.22; EXPRESSED IN PLACENTA, SIGNAL = 3.1; EXPRESSED IN BT474, SIGNAL = 5.6; EXPRESSED IN BONE MARROW, SIGNAL = 2.5; EXPRESSED IN HBL100, SIGNAL =   3; EXPRESSED IN FETAL LIVER, SIGNAL = 2.6; EXPRESSED IN LUNG, SIGNAL = 2.9; EXPRESSED IN HELA, SIGNAL =   3; EXPRESSED IN ADULT LIVER, SIGNAL = 2.1; EXPRESSED IN BRAIN, SIGNAL = 3.4; EXPRESSED IN HEART, SIGNAL = 1.7
ttaaacaaaaagaagggggagacagtaaggagtgtaccactcctcagatgcaacttaatctagcactctatactttaaattttttaaacatttatagaaatcagactactacttctgcagaacaacatcttactggtaaaaagaacagcccacatgaaggaaaactaatttggtggaaagataataaaaataagacatgggaaatagggaaggtgataacgtgggggagaggttttgcttgtgtttcaccaggagaaaatcagcttcctgtttggatacccactagacatttgaagttctacaatgaacccatcggagatgcaaagaaaagggcctccgcggagatggtaacaccagtcacatggatggataatcctatagaagtatatgttaatgatagcgaatgggtacctggccccacagatgatcgctgccctgccaaacctgaggaagaa

SEQ ID NO: 656 - DNA, 496 bp, Homo sapiens
  MAP TO AC007320.2; EXPRESSED IN FETAL LIVER, SIGNAL =  42; EXPRESSED IN HEART, SIGNAL =  34; EXPRESSED IN HELA, SIGNAL =  47; EXPRESSED IN ADULT LIVER, SIGNAL =  38; EXPRESSED IN BRAIN, SIGNAL =  65; EXPRESSED IN PLACENTA, SIGNAL =  32; EXPRESSED IN BT474, SIGNAL =  31; EXPRESSED IN BONE MARROW, SIGNAL =  31; EXPRESSED IN HBL100, SIGNAL =  29; EXPRESSED IN LUNG, SIGNAL =  53
ccacagcacatttactttccctcattttcctttctaagtagtaggttatcctttccatagaaccttaacctactactatgagaattttccaaatatcaaacagatactacaaaataagagtttaaaatgcataaggcattttaatgtaggtatacaatgaactttgaaaaaatatattttttcaaaacatatatatataacatacatattttaaacatacctattgaaatatacatgtgaaaatacacacacacacacacacacacacacacacacacacacacggttttaagagttaccttctgatatgggaccatgtttcccaaatactgctttaagcatcttctcattggtttctctattgaggccaccaatgaaaagcttgccaggatgatctgcttctaccattgtgctgtaaatggtaaaaaattatctatatttagatataaataagctaaaaagataaaattttattacatactgtgctgaaaaccca

SEQ ID NO: 657 - DNA, 425 bp, Homo sapiens
  MAP TO AC007317.3; EXPRESSED IN PLACENTA, SIGNAL = 1.4; EXPRESSED IN BT474, SIGNAL = 1.1; EXPRESSED IN LUNG, SIGNAL = 2.5; EXPRESSED IN HELA, SIGNAL = 1.4; EXPRESSED IN BRAIN, SIGNAL = 1.5; EXPRESSED IN HBL100, SIGNAL = 1.1; EXPRESSED IN FETAL LIVER, SIGNAL = 1.1; EXPRESSED IN ADULT LIVER, SIGNAL = 1.2; EXPRESSED IN BONE MARROW, SIGNAL = 1.5; EXPRESSED IN HEART, SIGNAL = 1.4
gaaggttgggtttgatggagatataattaaaagataatgtcagtagaatagaacattgtcccacagtaatgttcagctctcctgccagaacataaaggaagggggcaaagcggaagcactgattttccaagcaggagacatttattcagtgacaatgtcttattacaattaatttacttttagtatacaaatgacaaatacaagagtaattgcagccactgtggattagaaaacattgttctcctggttcctttcttcaagaccagtacaagtcacagttggcagctgcttgtggcagagcttaatatttccttctgtctgaaatttatatctctcattcttttcctcgttatgagtttttgcaatattttttcttttctctttgcaccctctcttctcagttcccccatccccttccatcttat

SEQ ID NO: 658 - DNA, 390 bp, Homo sapiens
  MAP TO AC007317.3; EXPRESSED IN HEART, SIGNAL = 0.95; EXPRESSED IN FETAL LIVER, SIGNAL = 1.2; EXPRESSED IN BRAIN, SIGNAL = 1.2; EXPRESSED IN BT474, SIGNAL = 2.1; EXPRESSED IN BONE MARROW, SIGNAL = 3.3; EXPRESSED IN HBL100, SIGNAL = 1.8; EXPRESSED IN HELA, SIGNAL = 1.3; EXPRESSED IN ADULT LIVER, SIGNAL = 1.1; EXPRESSED IN PLACENTA, SIGNAL = 1.8; EXPRESSED IN LUNG, SIGNAL = 1.3
ccctttcccagttctaaggcttgggtaagtgccactagttctggtaactgggcaatggtccttgggggaagaggcttactttcaagtactgttacatcactaactatgacataacctgcccttcataccccattctccacaaatgaacttccatcggtatataggttaaggtcaggattagctaaggggacttctaaaagatcctctcgagcagcagaagtctggactataatttgttggcagtcatgctcgattggttccccatcctttgggagaaaagtggcagggtcgagggctgcacacatgcatatttgaagcacaggtccctcaaggagtaatgcctggtatctaagtaggcagttgtctgatagccataaacttcctttggca

SEQ ID NO: 659 - DNA, 460 bp, Homo sapiens
  MAP TO AC007317.3; EXPRESSED IN PLACENTA, SIGNAL = 1.4; EXPRESSED IN BONE MARROW, SIGNAL = 1.6; EXPRESSED IN ADULT LIVER, SIGNAL = 1.1; EXPRESSED IN HEART, SIGNAL = 1.2; EXPRESSED IN LUNG, SIGNAL = 1.1; EXPRESSED IN BT474, SIGNAL = 1.3; EXPRESSED IN HBL100, SIGNAL = 1.2; EXPRESSED IN FETAL LIVER, SIGNAL = 1.3; EXPRESSED IN HELA, SIGNAL = 0.91; EXPRESSED IN BRAIN, SIGNAL = 0.92
aagacaagcctaaatcattgcctcttgtatcagttagacatgttgtgaatgcaaagaaaacattattgaaggaaattaaaagtgctattccgttgaacacatggataataaaacaaaacagcctattgctgctgtgaagtaagttttaatgatccagataataatagaaaagcaaaccagtcacaacattcccttaagccaaagcttaatttagagcaatgtcctaagtctcttcaattctatgaaggctgaaagaggtgagaaagctgcagaagaaaagtttgaagctagcagaagttggttcataaagtttaaggaaagacatcatctctataatataaacgtgcatggtgaagtagcaaatgctgatgtagaagctgcaggttatccagatgatctacctaacatcattgaagaaggtggctacactaaacagaattttaatgtagacaaaacaaga

SEQ ID NO: 660 - DNA, 480 bp, Homo sapiens
  MAP TO AC007316.2; EXPRESSED IN BONE MARROW, SIGNAL = 0.83; EXPRESSED IN FETAL LIVER, SIGNAL = 2.8; EXPRESSED IN HEART, SIGNAL = 1.2; EXPRESSED IN PLACENTA, SIGNAL = 1.6; EXPRESSED IN BT474, SIGNAL = 0.63; EXPRESSED IN BRAIN, SIGNAL = 1.3; EXPRESSED IN ADULT LIVER, SIGNAL = 2.5; EXPRESSED IN HELA, SIGNAL = 1.3; EXPRESSED IN LUNG, SIGNAL =   2; EXPRESSED IN HBL100, SIGNAL = 0.79
taccagcacatgaacaagccacctggaggcccaagaatcagcccttctggacctgctaacactggtgctagtgtatgccaccctggggctcaaggataggcatgcttggtctgccactgccaacagtggggtctaaggattggcctacctcctgtcccatccccagtaaaaatgtaccacagactccactaacaattgcaccctaaggaaatcacagacatcactggtgctgtttacagccaaagaaatcacacggagattacactattacacatttttagaatcaaagtcaaagagccctacacaaccaacaccatagatatagcctcaggaaatgtcctctcctatgaaagcaaattcaaaggattggaagaagcaactggtacatcagacatgcagctatcaatgtaaggacataagaactatgaaaaagcaaggaaatatgacatgttcaaaggaacacaatattcttcagcaaca

SEQ ID NO: 661 - DNA, 472 bp, Homo sapiens
  MAP TO AC007316.2; EXPRESSED IN BT474, SIGNAL = 8.4; EXPRESSED IN BONE MARROW, SIGNAL = 6.7; EXPRESSED IN LUNG, SIGNAL = 7.6; EXPRESSED IN ADULT LIVER, SIGNAL =   9; EXPRESSED IN HBL100, SIGNAL = 9.1; EXPRESSED IN FETAL LIVER, SIGNAL = 7.1; EXPRESSED IN HELA, SIGNAL = 6.4; EXPRESSED IN PLACENTA, SIGNAL = 7.1; EXPRESSED IN HEART, SIGNAL = 4.5; EXPRESSED IN BRAIN, SIGNAL = 4.4
cctgattatggtggaaatgaccatggtgacgttaacatctaatggtttggctaccgaaaactcctcaatggcaaattgtatcagaggtgcctctgacctagaacccctgcctagggctggtacataagaaacaaaggaagctcctgttctaaaagctgatgaatgtatggaacctcttgtttacaacagctcagcctgtattcattaattgtttgctcctgcattcttgttttgttgcactctctcttgtcttctttacagtgtatttctccagccacatactccctgtgctatattcttgcagctgctgctgctgctgctgctgctgttgcctcccatgctgttcttattgactgctcagagttctggaccacccactagcctatatgatgctttagtgagtattaggaaaggcatctttttagggtggtcaaaataaaaggcaccttttccggctgatgtactccatgag

SEQ ID NO: 662 - DNA, 481 bp, Homo sapiens
  MAP TO AC007297.22; EXPRESSED IN ADULT LIVER, SIGNAL = 4.8; EXPRESSED IN HELA, SIGNAL = 1.2; EXPRESSED IN HEART, SIGNAL = 0.97; EXPRESSED IN PLACENTA, SIGNAL =   1; EXPRESSED IN FETAL LIVER, SIGNAL = 4.5; EXPRESSED IN LUNG, SIGNAL = 4.5
aatggaatcttcttgcaggcgtctgtaatcggcagagatcctggcattttatgagcacacagtacaacacaacttgatgtggcaatagacttcaaatcagccaagtttcagtgtaaaattctctgcaatggttcaggaccacttgttttaaaagccctcctgtaaatattgttttcatgacagaaaattaccaggcagagtcacatttaacaacttggagatgatagtggaagacgttaataatccctgtcctataaggcacagaatcatggcaattatttgaaagatagaagtgactttttctctccctatagacaagtcatgcatggcccaccacaggactctgtgttaaatgcctttgttaacattatctctaaatcaggtttaagttggaaccatgtgagcataagtcatagggctataaggagtcttaagaagcatcttatccagcattccatccagtgcttgaatcccctccata

SEQ ID NO: 663 - DNA, 445 bp, Homo sapiens
  MAP TO AC007297.22; EXPRESSED IN BT474, SIGNAL = 1.3; EXPRESSED IN BONE MARROW, SIGNAL = 1.3; EXPRESSED IN HBL100, SIGNAL = 0.89; EXPRESSED IN LUNG, SIGNAL = 1.1; EXPRESSED IN HELA, SIGNAL = 0.94; EXPRESSED IN ADULT LIVER, SIGNAL = 0.89; EXPRESSED IN BRAIN, SIGNAL = 0.95; EXPRESSED IN PLACENTA, SIGNAL = 2.3; EXPRESSED IN FETAL LIVER, SIGNAL = 0.89; EXPRESSED IN HEART, SIGNAL = 0.95
ctcgtggttatcagaagggcacagttagagagctgtctgctcactaaatgaagcaagaataaagcttcatattcttccggcaccctaagtacttcctcaccttttcatgaagcagtatccaaagaggtaactattgcaaagagccctacggtagagttctcattcacatcccagctctgaaacctttatgcattcgtccaaccaatattcagcctaaccctgggctgaatgatgaatgacccagtcacccccacccctgtacaccaggctccaccagtagccagagcactgccctctgcagtgtcaattccaacaagcatggattgtttctgaagtgccagacaggtttccctgccctaaggatttcattgcacatgcaggacgatcagaggatcttcgaccccaaccacctctcccacttggtccaggaatcctaaattggaga

SEQ ID NO: 664 - DNA, 491 bp, Homo sapiens
  MAP TO AC007297.22; EXPRESSED IN BONE MARROW, SIGNAL = 1.6; EXPRESSED IN HBL100, SIGNAL = 1.1; EXPRESSED IN HEART, SIGNAL = 1.5; EXPRESSED IN PLACENTA, SIGNAL = 1.2; EXPRESSED IN BT474, SIGNAL = 1.1; EXPRESSED IN BRAIN, SIGNAL = 1.5; EXPRESSED IN ADULT LIVER, SIGNAL = 1.1; EXPRESSED IN HELA, SIGNAL = 1.2; EXPRESSED IN LUNG, SIGNAL = 1.4; EXPRESSED IN FETAL LIVER, SIGNAL = 1.6
aaagaccagtgttctgttatacttcctatattagacaggaacagagttatcagctgggagcagtttgccctccacccccatgataaatccaagtaaagtttgacctgccaatcttgtgccccatcaggacatccatgggcagagggtttctcgacttaattagaatctgtcttaatgggctcaccaggccctgggaacccaaagatgctcctacacagcaattttctttctctccctcttcttctagtttggcacagccttgtcaacaggtgtgatcaacagtaaggaagcatgcagtgccagtgctcccattctggtccaggatgagaacccacgactgaaaagatggtactcacagcctcaggcaagctgccatgagattgtcattccttggcactggtgcctgtggcgagcatcttaggcaacttttgattgggcaccatgccctccaaacagatgggcatgaatgtaggcaggcaagagaccattta

SEQ ID NO: 665 - DNA, 474 bp, Homo sapiens
  MAP TO AC007286.17; EXPRESSED IN FETAL LIVER, SIGNAL = 0.64; EXPRESSED IN LUNG, SIGNAL = 0.7; EXPRESSED IN PLACENTA, SIGNAL = 0.8; EXPRESSED IN HEART, SIGNAL = 0.84; EXPRESSED IN BRAIN, SIGNAL = 1.6; EXPRESSED IN ADULT LIVER, SIGNAL = 0.71; EXPRESSED IN HELA, SIGNAL = 0.64; EXPRESSED IN HBL100, SIGNAL = 0.69; EXPRESSED IN BONE MARROW, SIGNAL = 0.78; EXPRESSED IN BT474, SIGNAL = 0.84
ccaattggaaaatagtacaaaccacgtatgcaacttaaagttttctggtaaccataattttaaaagtaaaaaaaaaaacagtaaaattcattttaataagtctaaatgcaatatatccaaagtactattatttcaacatgtaatacaaatttttaaaaatatattgagatgattcaaaattcagtgtgtgttgtacacccacagcacatcttaatgcattctacctacatttgaagtcctcagtagtcacatgttaccatactaaacagcataactctataatatagtattatgcccctcagaaagcttttaggtaaacctcagtctacagtcctgaaaaatattatgagtggcagagctaatgctgaatcaatatttacattttatgtaatacttagcatgcaattagagaatatattgattatattatttattcaacaaatatttatcaagtcattaaaatatgctatgcca

SEQ ID NO: 666 - DNA, 494 bp, Homo sapiens
  MAP TO AC007277.2; EXPRESSED IN BT474, SIGNAL = 5.5; EXPRESSED IN BONE MARROW, SIGNAL =  10; EXPRESSED IN HELA, SIGNAL = 6.9; EXPRESSED IN BRAIN, SIGNAL = 6.8; EXPRESSED IN PLACENTA, SIGNAL = 6.8; EXPRESSED IN HBL100, SIGNAL =   6; EXPRESSED IN FETAL LIVER, SIGNAL = 5.4; EXPRESSED IN LUNG, SIGNAL = 6.9; EXPRESSED IN ADULT LIVER, SIGNAL = 4.5; EXPRESSED IN HEART, SIGNAL = 5.6
ccatctacaggctgaggagcaaggagagtcagctgagtcccaaaactgaggaacttggagtcccacgttcgaggacaggaagcatccagcatgggtgaaagatgtgggctgggaggctcgtcttgtctcgtctcttcctttcacatttttctgcctgctttatattctagccacactggcagctgattagatggtgcccatccacattaagggtgggtctgcctttcccagcccactgactcaaatgataatctcctttggcaacaccctcacagacatacccaggatcaatactttgtatccttcaatccagtcaagttgacactcagtattaaccatcacaggactcggacttgggagagtgttataggcccagctaggactagagatgatgattttgtgagtggcatcaatctgcattaatatgctttttagcagtagtgcttagaatctcaggtgtggtagtagagaaggaaggattaatgtggagcttg

SEQ ID NO: 667 - DNA, 472 bp, Homo sapiens
  MAP TO AC007277.2; EXPRESSED IN HEART, SIGNAL = 4.6; EXPRESSED IN FETAL LIVER, SIGNAL =  21; EXPRESSED IN HELA, SIGNAL =  17; EXPRESSED IN ADULT LIVER, SIGNAL = 6.6; EXPRESSED IN BRAIN, SIGNAL =  10; EXPRESSED IN PLACENTA, SIGNAL = 3.9; EXPRESSED IN BT474, SIGNAL =  19; EXPRESSED IN BONE MARROW, SIGNAL = 9.6; EXPRESSED IN LUNG, SIGNAL = 9.4; EXPRESSED IN HBL100, SIGNAL =  22
actgggtgactgtgtgcctcgctgaggaaaaataactcaacatgggcaaaggagaccctaagaagccgagaggcaaaatgtcatcatatgcattttttgtgcaaacttgtcgggaggagtgtaagaagaagcacccagatgcctcagtcaacttctcagagttttctaagaagtgctcagagaggtggaaggccatgtctgctaaagataaaggaaaatttgaagatatggcaaaggtggacaaagaccgttatgaaagagaaatgaaaacctatatccctcctaaaggggagacaaaaaagaagttcgaggattccaatgcacccaagaggcctccttcggcctttttgctgttctgctctgagtattgcccaaaaatcaaaggagagcatcctggcctgcctattagcgatgttgcaaagaaactggtagagatgtggaataacacttttgcagatgacaagcagctttg

SEQ ID NO: 668 - DNA, 491 bp, Homo sapiens
  MAP TO AC007276.2; EXPRESSED IN BT474, SIGNAL =   2; EXPRESSED IN HBL100, SIGNAL = 1.3; EXPRESSED IN FETAL LIVER, SIGNAL = 1.4; EXPRESSED IN LUNG, SIGNAL = 1.2; EXPRESSED IN BRAIN, SIGNAL = 1.2; EXPRESSED IN PLACENTA, SIGNAL = 1.8; EXPRESSED IN HELA, SIGNAL = 1.3; EXPRESSED IN HEART, SIGNAL = 1.2; EXPRESSED IN ADULT LIVER, SIGNAL = 1.3; EXPRESSED IN BONE MARROW, SIGNAL = 1.6
ttagtagccaccatccaggggggcaagaagaaagggcccccatcacaaaacactggccaggggaccccgggtccccaccagaaaggccaaaaaggtgagtgggctcccctacaaagaaaccagtgcatgtattgcaaacagattggacactggaaaaagaaatgcccattaaaaccagaagaaaaaacagaaaagaaaaagatcctcatcctccccactgtggaggaatctgatgattgacggggctggggctccctctcccttggcccccaggagcccatggtgaccgtcacagttgggggccagcctgtacacttcctaattgacactggggtggaacagtcagtactgcaaacacccttgggcagtgtctctaataataaggtggctgtgcaaggggctactggagctattcaggaatatcctgtcacccactcacgagaggtgagtttgggacagaaaagagtaacccactcgtttcttgtggtccc

SEQ ID NO: 669 - DNA, 466 bp, Homo sapiens
  MAP TO AC007240.2; EXPRESSED IN BONE MARROW, SIGNAL = 5.5; EXPRESSED IN FETAL LIVER, SIGNAL = 2.7; EXPRESSED IN PLACENTA, SIGNAL = 2.7; EXPRESSED IN BT474, SIGNAL = 3.4; EXPRESSED IN HBL100, SIGNAL = 3.9; EXPRESSED IN LUNG, SIGNAL = 2.9; EXPRESSED IN HELA, SIGNAL = 5.5; EXPRESSED IN ADULT LIVER, SIGNAL = 2.8; EXPRESSED IN BRAIN, SIGNAL = 3.9; EXPRESSED IN HEART, SIGNAL = 2.7
agttttgctccttgctctgcaaaccaaccctgcccataggaactgaacttgtaaaggggcaggtgacgtattttagtgagaaccttccatggcgtaacctagtagaatgcctaatgttggaacctcgggcatcacagctggcctatttattttaaataaatgagttcatgaataaatgaaggaataaaggaatgaatgagaggaggggtaagtgactaaatgaatgcatttctgggaagagcattattgggtactcacctgtgtcaaacacctctggtcatcttcataaatgctgccatatgtaatccttgccacaaccctttgagatgggatggctaccttgattttacggatgaaaaaaataacaaggctcagagaatccaggtcatttaactcttctgagctctccattttcccatgtacgaaatgggtgtcagtagagctccgcagattgttgagtgggtga

SEQ ID NO: 670 - DNA, 477 bp, Homo sapiens
  MAP TO AC007237.3; EXPRESSED IN PLACENTA, SIGNAL = 1.8; EXPRESSED IN BRAIN, SIGNAL = 0.83; EXPRESSED IN HEART, SIGNAL = 1.1; EXPRESSED IN FETAL LIVER, SIGNAL = 2.3; EXPRESSED IN LUNG, SIGNAL = 0.68; EXPRESSED IN HELA, SIGNAL = 0.65; EXPRESSED IN BONE MARROW, SIGNAL = 1.4; EXPRESSED IN ADULT LIVER, SIGNAL = 1.1
gcttgtgtaccctaaagcaatgatgaacaatttaaagagagaagacaaagttgaaattatatttttctttcttagggagaggcagaagagggagtagttttgcaggaagactgttgtgttcctaaatttattacctatgtgaattacttgatgtatttagcatagcaatttgaagcttcagccatccaagcacaagtcactgaggagctgagtgccctggaacgctaattctgccttcttctccatgctaggagattggcttcttgtgacctctggtgtggagggtttcaaaagaacagtttggtcctggagctgatctccagtctcatcaaggatgactggcataactccaggagcttgggtcatctttacaaattccacagctttgtcccttggtgatcccaggacattgggaaaatttttcacatttagcttcaggcatttgcggaatagcaatgtaggtgtgctggctgtgaa

SEQ ID NO: 671 - DNA, 472 bp, Homo sapiens
  MAP TO AC007227.2; EXPRESSED IN BRAIN, SIGNAL = 1.6; EXPRESSED IN HEART, SIGNAL = 1.2; EXPRESSED IN BONE MARROW, SIGNAL = 2.5; EXPRESSED IN HBL100, SIGNAL = 2.6; EXPRESSED IN FETAL LIVER, SIGNAL = 1.8; EXPRESSED IN LUNG, SIGNAL = 1.9; EXPRESSED IN ADULT LIVER, SIGNAL = 2.3; EXPRESSED IN PLACENTA, SIGNAL = 1.4; EXPRESSED IN BT474, SIGNAL = 2.7; EXPRESSED IN HELA, SIGNAL = 1.7
tggggtctttaggccagtatcaaatacagggactgagtgagggagcccagctcagaagagaattttaaatagtgggggcaagggatccaggcgtggagcctcttcagcaagagcagttcaaagtctctatccctatcccagataggccacttggcccagggcagggctgggtgtgtggtgggagcacctggagagggtgctgtcctctccactctgcccctgacccacggtagtgtggaaaacagcaggcttctctccccaccactggttaccagtgtctcgagtccaccagctcaggtcggaggctgagtttcttgaggctctcatagcccaccacaatgacaatggtggaaggtgtggctgagatgattctggccgagaggcccttcatgaggccccaaggcccttcttctgccatcagctgtctgaaggtcaggatgatggagttcttgccctcaacctggaaaagtca

SEQ ID NO: 672 - DNA, 468 bp, Homo sapiens
  MAP TO AC007227.2; EXPRESSED IN HELA, SIGNAL = 4.7; EXPRESSED IN BT474, SIGNAL =  15; EXPRESSED IN FETAL LIVER, SIGNAL = 5.4; EXPRESSED IN LUNG, SIGNAL = 3.7; EXPRESSED IN PLACENTA, SIGNAL = 4.9; EXPRESSED IN BONE MARROW, SIGNAL = 4.6; EXPRESSED IN HBL100, SIGNAL =  16; EXPRESSED IN ADULT LIVER, SIGNAL = 6.6; EXPRESSED IN BRAIN, SIGNAL = 4.5; EXPRESSED IN HEART, SIGNAL = 4.4
tcatgtcaacatacggctgcaggctgagctggaagagggcgagaatcccgtcccggcattccagagtgatggcacaggtgggagaatcggggaggtcatcactatggaaaggttggtgtggggcatggggatgaaggaaaggaacacagactcgggggaagtggtgttggagagcacattccagcttccaggctccacctgttcctcgggctccacctgaccttcctctttccgcagatgaaccagagtccaaggaacctgtggagaaagaggaggagccagatcctgagcctcctcctgtaacaccccaagtgggtgagggcagaaagagccgtaagttctctcgcctctcctgtctccgccgtcgccgccacccacccaaagttggtgatgacagtgacctgagtgaaggctttgaatcggactcaagccatgactcagcccgggccagtgagggctcagacagtg

SEQ ID NO: 673 - DNA, 471 bp, Homo sapiens
  MAP TO AC007130.2; EXPRESSED IN FETAL LIVER, SIGNAL = 0.94; EXPRESSED IN ADULT LIVER, SIGNAL = 1.6; EXPRESSED IN HEART, SIGNAL = 1.1; EXPRESSED IN PLACENTA, SIGNAL = 0.89; EXPRESSED IN BT474, SIGNAL = 2.4; EXPRESSED IN BONE MARROW, SIGNAL = 0.66; EXPRESSED IN HBL100, SIGNAL = 1.6; EXPRESSED IN LUNG, SIGNAL = 0.6; EXPRESSED IN HELA, SIGNAL = 0.84
tcagaaaactgatacagagctaaaacaaggccctctgaccaaatgtgcaaaatgttccaagtcacctgccaaagaatagatacccctgaatgtctaacgagaactctcctttactgcaaatctggatgttggatgaatgattacatatatataaaattaacactgaattaggtttacaactccattgggtatacttctaagaagctgtcacttatttgaatgtatattcatttttcattctcaaaatctaaaacaaatctaaagaaaaggtcttacctgttcacctgcatcttgaaactctttgcaggcatcagggaacacatcataaataataagtggatagccatgtttcatgagattttttgccattggattccccatgttgcccagtccaatgaatccaactggagtctttgaagccactgacctagaacacactgatttcaatacattattttcaataggggcaaa

SEQ ID NO: 674 - DNA, 411 bp, Homo sapiens
  MAP TO AC007130.2; EXPRESSED IN FETAL LIVER, SIGNAL =  12; EXPRESSED IN BRAIN, SIGNAL =  14; EXPRESSED IN PLACENTA, SIGNAL =  15; EXPRESSED IN HEART, SIGNAL =  13; EXPRESSED IN ADULT LIVER, SIGNAL =  12; EXPRESSED IN HELA, SIGNAL =  20; EXPRESSED IN LUNG, SIGNAL =  15; EXPRESSED IN HBL100, SIGNAL =  12; EXPRESSED IN BONE MARROW, SIGNAL =  14; EXPRESSED IN BT474, SIGNAL =  14
gtgatcctcctgtctcagcctcccaaagtgttgggattacaggcatgagccatcacgtctggccaataatggaagttttttaaataagtaaattggctgatgtctgcttaagcccaccaggaatgatgcaaaactaatttattccaaataaatgttttaaaatctgagcaaagaatccataggttgaagaaagaagaataaaaatatggtcaggaaagagaaaggaacattagtcaattttacatcatcaagtcaaggtcattaatgtaaaaatcttacctgcccagtcccaacagctccacagtacaccacgttggagcccatgcaccccagcaactcttgggcagcagcaaattcatcttcaactcctcccaccataaacgtgaggttcccagatcgtgcagctcctac

SEQ ID NO: 675 - DNA, 453 bp, Homo sapiens
  MAP TO AC007106.6; EXPRESSED IN LUNG, SIGNAL = 8.9; EXPRESSED IN HELA, SIGNAL =   9; EXPRESSED IN PLACENTA, SIGNAL =  11; EXPRESSED IN BT474, SIGNAL =  10; EXPRESSED IN HBL100, SIGNAL = 7.6; EXPRESSED IN FETAL LIVER, SIGNAL = 9.8; EXPRESSED IN BRAIN, SIGNAL = 9.1; EXPRESSED IN BONE MARROW, SIGNAL =  10; EXPRESSED IN ADULT LIVER, SIGNAL = 6.5; EXPRESSED IN HEART, SIGNAL = 6.3
gtggatttaccattctgggggctgaaggacagtggccctcttctcacaattccagtaggcagtgtcccagtggggactctgtgtgggaggtccaactccacattttccctccacactcttctactagaggttctccatgagggctctgcccctacagcaagcttctttctggacatccaggtttttcagtacatcccctgaaatttaggtggaggcttccaagcctctactcttgtactctgtgtacccacaggctgaacaccacaaggaagccatcaaggtttatggcttgcaccctcaggagcagcagcctgagctgtacctgggctcctttcagccacagctgaagctagagtggctggtttgcagggagcagtgtcttgaggctgctcagggcatcagcgctctaggcctggtccaggatactgttcttctctcctaggcctccagacc

SEQ ID NO: 676 - DNA, 467 bp, Homo sapiens
  MAP TO AC007106.6; EXPRESSED IN BRAIN, SIGNAL = 2.7; EXPRESSED IN HEART, SIGNAL =   2; EXPRESSED IN PLACENTA, SIGNAL =   4; EXPRESSED IN BT474, SIGNAL = 3.1; EXPRESSED IN HBL100, SIGNAL = 5.1; EXPRESSED IN FETAL LIVER, SIGNAL =   4; EXPRESSED IN HELA, SIGNAL = 4.9; EXPRESSED IN ADULT LIVER, SIGNAL =   4; EXPRESSED IN BONE MARROW, SIGNAL =   8; EXPRESSED IN LUNG, SIGNAL = 2.7
tcacaaactatgctcaactcactgtctacagttctcataacttccaaaatctattttcttcttcccacctgatgcatatactttctgctccctggctccttcagctatactcactctttattgagtctcccacagttaccattgttcctgtcctggacttcaatccggccttccacattattccggataccacacctgaccaccatgactgtatctctctgatccacttgacattcactccatttccccatatttccttctttcctgttcctcaccttgaacacacttggtttattgatggcagttccaccagacctaactgccactcaccagcaaaggcaggctatgctatagtatcttccacatctatcattgaggctactgctctgccccgctccactacctctcaacaagccaaactcattgcctatactgactctaaatgtgccttccatatcctgcaccac

SEQ ID NO: 677 - DNA, 464 bp, Homo sapiens
  MAP TO AC007090.2; EXPRESSED IN ADULT LIVER, SIGNAL =  11; EXPRESSED IN HEART, SIGNAL =  10; EXPRESSED IN BONE MARROW, SIGNAL =  13; EXPRESSED IN HELA, SIGNAL =  12; EXPRESSED IN BRAIN, SIGNAL =  13; EXPRESSED IN PLACENTA, SIGNAL =  11; EXPRESSED IN BT474, SIGNAL = 8.6; EXPRESSED IN HBL100, SIGNAL = 9.1; EXPRESSED IN FETAL LIVER, SIGNAL =  11; EXPRESSED IN LUNG, SIGNAL =  15
gaaaagaaatagagcttttgacggtagtgtatttttgcaatgaatgtcgtaatttaaatgctcttacatggaacttcttgatttctcagtagaattggacttagaaatttatatgtatatattgcattaaccacttaactaaatgtgcatcgatactataagcctttaaaaaaaatctttgtttcctgctgtaacgaaaatgctgtgacatgaagagaagattctatgtatacctgtttatctcagaaaacctattaaaattaagcccttggaaatggaatagttgttaggctagtggtttccccaacaaggatgggaactggaaggatgagaaacaagaagaccaagaaaactaacagtggaagacccagaaaaccaacaatcaatgagcaccttgtgggcactggaaactgtgctggaaagtggggcattcaataacacagtgctgggattacattacacca

SEQ ID NO: 678 - DNA, 459 bp, Homo sapiens
  MAP TO AC007077.2; EXPRESSED IN HBL100, SIGNAL = 1.8; EXPRESSED IN HELA, SIGNAL = 2.5; EXPRESSED IN BRAIN, SIGNAL = 2.2; EXPRESSED IN BT474, SIGNAL = 1.8; EXPRESSED IN BONE MARROW, SIGNAL = 2.6; EXPRESSED IN HEART, SIGNAL = 1.7; EXPRESSED IN ADULT LIVER, SIGNAL = 1.7; EXPRESSED IN LUNG, SIGNAL = 2.4; EXPRESSED IN FETAL LIVER, SIGNAL = 1.9; EXPRESSED IN PLACENTA, SIGNAL = 2.4
atgcaaaatgtccaaggtccacccttgctccgcttttgccaatcagtgcttataaaactcctagggcaagtttccttatttttgacatgagttctttgtcataatcatctcaggaaaaggaataatttctcctgctgcatctatagcattttcacagtgttacatccaaactgacttgatacagtctcaaggggatgacaggatgtttctgtggaaagtcttctcagaggtggggattttgttagagagccacatgccccacttttgaggcaattaccccagttttcacattctctctctcctgtgtttcagagaacagatcgaacgttctcttcctccaggtccctgttgattgcctgaactgtgagagtgctgcttgaaatgacaagggaatggggtagaattggagtcatccaaataaaaaacatgtggtaggaggctcactattcaataatacat

SEQ ID NO: 679 - DNA, 471 bp, Homo sapiens
  MAP TO AC007076.2; EXPRESSED IN BT474, SIGNAL =  13; EXPRESSED IN BONE MARROW, SIGNAL =  18; EXPRESSED IN HBL100, SIGNAL =  11; EXPRESSED IN FETAL LIVER, SIGNAL =  14; EXPRESSED IN LUNG, SIGNAL =  15; EXPRESSED IN HELA, SIGNAL =  15; EXPRESSED IN ADULT LIVER, SIGNAL = 9.8; EXPRESSED IN PLACENTA, SIGNAL =  12; EXPRESSED IN BRAIN, SIGNAL =  16; EXPRESSED IN HEART, SIGNAL =  12
aaatgagggatggtggcagcagaaatagaaaagtaggaagcgatgtaggcaaatcagaaatgactatgtatggtactcagtgactgattggatatggaggacaagatgatgctaagttttcaggactagataactataaagaattattgacattgatgtacttagaaaattcacaggcacccatctgacttccacctcctctctcttcaagattagtttacccatagtagaaatcttgttttccagcctacatttcataggtagtggtagcagagacgcctggcggtagtgatgatggtggagatagtagtgatgatggaggtagtgataatggaggtggtggtagatatggcagtagtgatggcaaaggtggtgttaacagtagtgatgtgaatgttcaaggtggtggtagtggtggtagtaatggtgagagtggtgataattatgaggaatgtgaggtgaaatagtgga

SEQ ID NO: 680 - DNA, 486 bp, Homo sapiens
  MAP TO AC007076.2; EXPRESSED IN BRAIN, SIGNAL = 2.3; EXPRESSED IN HBL100, SIGNAL = 1.7; EXPRESSED IN ADULT LIVER, SIGNAL = 1.8; EXPRESSED IN HEART, SIGNAL =   2; EXPRESSED IN BT474, SIGNAL = 1.7; EXPRESSED IN BONE MARROW, SIGNAL = 2.5; EXPRESSED IN HELA, SIGNAL = 1.9; EXPRESSED IN PLACENTA, SIGNAL = 1.9; EXPRESSED IN FETAL LIVER, SIGNAL = 1.5; EXPRESSED IN LUNG, SIGNAL = 2.4
tgggtccacatttctaatgaatactcaaattgaaatttaagaaaaactttgaaatgaattactgcctaacgaaacataaacttaaagacagtgttttctctatgcacaaactacctttctcagagcctagcccatgttttgtgtagtcaatcctggagtgtccaggcttggaatgctctcttgccagagcccgctgctttaaaaatacacttgcttaaaattcacacaagccagaaacattctgacagatgcactaacagttttctcagtgaaaaatctggaggcacgaacctggctggcaacggcgggtcggccttgccagccaccagccaggaggaccggtggtaggcgtagcggtacctcttgttgtccacagggacgatgtccatcaggactatgtacttggcctcaggatccacccccgaaaaggacacccggatggttggaaacatcctcctgacagagagagagagagagaatgggccc

SEQ ID NO: 681 - DNA, 447 bp, Homo sapiens
  MAP TO AC007056.4; EXPRESSED IN PLACENTA, SIGNAL = 2.9; EXPRESSED IN LUNG, SIGNAL = 3.3; EXPRESSED IN ADULT LIVER, SIGNAL = 5.9; EXPRESSED IN BT474, SIGNAL = 2.6; EXPRESSED IN BONE MARROW, SIGNAL = 3.9; EXPRESSED IN HBL100, SIGNAL = 2.9; EXPRESSED IN FETAL LIVER, SIGNAL = 2.8; EXPRESSED IN HELA, SIGNAL = 2.6; EXPRESSED IN BRAIN, SIGNAL = 2.6; EXPRESSED IN HEART, SIGNAL = 2.7
tattggtggctatgtgcctgtgcatagggcttgctctggggtttcaaaggctgtctcaccctgtgtgttaggcagagcactggatattttctctaagcactgaaggtctaaatgaaatttagctttctcaaacatcctaattatttctacattcctaaagctctgagaaggccgtatatatagtactgatattgttctcccaggtggttggcgacatgatttttaaacttcctttgtttggaggaaccagagatgaacagatgaatctggaatgtttggggcagcaatgaagtatatagttgggtggactcacagtcaaaaagtctaagatcctgagggtcatgactgactcagcttaggctgtcatggcactgagtgacttcagagtacccagtgggaaggtgggctggaggtacatggatggggggatggagaatggggtgtgag

SEQ ID NO: 682 - DNA, 460 bp, Homo sapiens
  MAP TO AC007050.23; EXPRESSED IN BRAIN, SIGNAL = 2.4; EXPRESSED IN ADULT LIVER, SIGNAL = 3.2; EXPRESSED IN PLACENTA, SIGNAL = 3.8; EXPRESSED IN BT474, SIGNAL = 3.9; EXPRESSED IN HBL100, SIGNAL = 6.9; EXPRESSED IN LUNG, SIGNAL = 3.5; EXPRESSED IN HELA, SIGNAL = 3.3; EXPRESSED IN HEART, SIGNAL =   2; EXPRESSED IN BONE MARROW, SIGNAL =  18; EXPRESSED IN FETAL LIVER, SIGNAL = 7.2
tgcacaggtaccacagcaagccagtgctgtgtgctccgagttccagggcgtcctccagctcagccactgcactgagaacatggactctctgtggggcccaggagctgggagtcacccctttggggtccacaacagccggctgtccccagacttgtgtccagggaagatagtgttgagggccctcaaggagagcggggcagggatgcctgagcaggacaaggaccctagagtccaagagaatcctggtgatcagagaagggtccccgaggtcaccggggatgcaccgtctgcatttcggcccctgcgggacaatggaggcctctctccctttgtgcccgggcccgggcctctgcagacagacctccatgcccagaggtcagaaatcagatatgaccagtcatcccagacctcctggacgagctcgtgcaccaaccgaaatgccatctccagctcctacagc

SEQ ID NO: 683 - DNA, 445 bp, Homo sapiens
  MAP TO AC007050.23; EXPRESSED IN HBL100, SIGNAL = 1.8; EXPRESSED IN LUNG, SIGNAL = 2.6; EXPRESSED IN HELA, SIGNAL = 2.8; EXPRESSED IN ADULT LIVER, SIGNAL =   2; EXPRESSED IN BRAIN, SIGNAL = 2.8; EXPRESSED IN BT474, SIGNAL = 2.4; EXPRESSED IN PLACENTA, SIGNAL = 2.4; EXPRESSED IN HEART, SIGNAL = 1.7; EXPRESSED IN FETAL LIVER, SIGNAL =   2; EXPRESSED IN BONE MARROW, SIGNAL = 2.4
ttttaagttttgggggaggcataacgtcactttactcttctgcttctgcccatgacagaaggaaactgacatttactgagcacctacagtatgcaagactagctgccaggggctttctacatgctcctcacttaatcctgaaaacaaaccctccactgtggcacctgggggtacaatggtgatttaatgaaacctctgtccccaggggtccccattgttcactgccctctcttaggactcaggcataaaatttatccccaatctgtagatgatgaaactgaggctcagaacggttcatgtaaattcactgaaaccaggcattcaggtaatagaggaggagaggttcaagctccaaagccagtatctcctggtatcgctgacatagagtaggcactgataactgcccctcggagactacacggcaacaaagacctatgtacatcca

SEQ ID NO: 684 - DNA, 471 bp, Homo sapiens
  MAP TO AC007050.23; EXPRESSED IN PLACENTA, SIGNAL = 1.4; EXPRESSED IN BONE MARROW, SIGNAL = 1.3; EXPRESSED IN HBL100, SIGNAL = 1.3; EXPRESSED IN FETAL LIVER, SIGNAL = 1.2; EXPRESSED IN LUNG, SIGNAL = 1.2; EXPRESSED IN ADULT LIVER, SIGNAL = 0.98; EXPRESSED IN BRAIN, SIGNAL = 1.2; EXPRESSED IN HEART, SIGNAL = 1.2; EXPRESSED IN BT474, SIGNAL = 1.4; EXPRESSED IN HELA, SIGNAL = 0.93
gtccaggaaacagcagaaccttccagttctgtcctgttgtaagcttgtgtcatggtctcctgccctcttcacagccagcacatcccatggtccacacagccaagagccatctgggtatcatggtcccctctggggaccatgcccctcccagggacaatggtccctatcattctagcacccgaggttgttgtgaaatggtgtggaggcttcaaaaagcacggcaccccacatattaggagttatgtacaaggtcggagacagaatcctatcttatctacttcccaggtgtcaacggcgaggctgtggctaccaagtcagtcctaggatccagtgtcaggagcagcacctgccaaatctctccaagttatgctcagaagacacagccaggacctggtggatagcactcagggagtgagccagtccacaccatcgtgagaggctggagccccccaggacagacaagggactctg

SEQ ID NO: 685 - DNA, 439 bp, Homo sapiens
  MAP TO AC007050.23; EXPRESSED IN HBL100, SIGNAL = 5.3; EXPRESSED IN LUNG, SIGNAL = 5.4; EXPRESSED IN PLACENTA, SIGNAL = 5.1; EXPRESSED IN BT474, SIGNAL = 5.1; EXPRESSED IN BONE MARROW, SIGNAL = 4.8; EXPRESSED IN FETAL LIVER, SIGNAL = 7.4; EXPRESSED IN HELA, SIGNAL = 4.5; EXPRESSED IN ADULT LIVER, SIGNAL = 3.8; EXPRESSED IN BRAIN, SIGNAL =   6; EXPRESSED IN HEART, SIGNAL = 4.3
aacaccagtcttcaccccaccagcctctaacagtggcaacgagagcacccggacatgacactcggggtgtgggcctgcctcccacaacaccgggttcatctgcatggggcctgggacggatgcatgctgaccatgggcaaagggggagtggatccttcggggaaggggaccctaacggccgtggaacaggccccattgctcatactcggaatatctggcgcaggtacgccagggcctcctccaggcactcgtccatcttctggacgctgtcctgccccatctcgcccaggtcatggctgaataggagccgttggtgtctgtggggccaaagcccagccacaacaggaaggagtggccagctggagtctccacacactggtccgagatggacctggccgtgtgcttggcctgcgtgatgagctgagtaaggtgcaggacc

SEQ ID NO: 686 - DNA, 436 bp, Homo sapiens
  MAP TO AC007050.23; EXPRESSED IN FETAL LIVER, SIGNAL =  25; EXPRESSED IN ADULT LIVER, SIGNAL =  18; EXPRESSED IN BRAIN, SIGNAL = 9.4; EXPRESSED IN BONE MARROW, SIGNAL =  33; EXPRESSED IN HBL100, SIGNAL =  39; EXPRESSED IN HEART, SIGNAL =  12; EXPRESSED IN PLACENTA, SIGNAL =  21; EXPRESSED IN BT474, SIGNAL =  34; EXPRESSED IN LUNG, SIGNAL =  24; EXPRESSED IN HELA, SIGNAL =  24
cccaaaatcaacacaaatgctacttcgtattctatctttctgtctgtggtaaatggaacgttcagattccagcggcagccgtggcagtggggcttttgctggctgttttgtcccttgctgtgcagccctgcagcgtttctgggaatctgccctgtggactgactggcgactctggtcttttctcagcccagctgcagctccagcaggtggcgctgcagcagcagcagcaacagcagcagttccagcagcagcagcaggcggcgctacagcagcagcagcagcagcagcaacagcagcagttccaggctcagcagagtgccatgcagcagcagttccaagcagtagtgcagcagcagcagcagctccagcagcagcagcagcagcagcagcatctaattaaattgcatcatcaaaatcagcaacaggtaccaggtcc

SEQ ID NO: 687 - DNA, 493 bp, Homo sapiens
  MAP TO AC007040.2; EXPRESSED IN HBL100, SIGNAL = 3.5; EXPRESSED IN FETAL LIVER, SIGNAL = 2.1; EXPRESSED IN LUNG, SIGNAL = 2.2; EXPRESSED IN HELA, SIGNAL = 2.6; EXPRESSED IN BRAIN, SIGNAL = 3.1; EXPRESSED IN PLACENTA, SIGNAL = 2.5; EXPRESSED IN BT474, SIGNAL = 2.3; EXPRESSED IN BONE MARROW, SIGNAL = 2.8; EXPRESSED IN ADULT LIVER, SIGNAL = 2.4; EXPRESSED IN HEART, SIGNAL = 2.2
tccacaacctcttctttcccaaactctccttcaaacttacctctctgggaaagccctccctgtctgagtccccagccccaacaaattctattcactagagccaaggtgggctctagagtcctcagcagtaagaaccgcatcttcccaactagcctggcttcctggaggacttcaacagctggcttcctttttctgtatcccctttagtgcccaggatggagatgggcacacccaaccacatcagctgcctccccaactctgtcccctctcaccacacgacaggatgaagttaggcgaggtcagcatgatgaaggggaaggtctggaggaggccaaagtagacgaggttggtgaataggcccactccaatcatgctggtggggaagcgctcaaagacgtagaggccaatcagtacagcggtggagaactgaaacaaccagaggcagacagtgcagggcgcttcttccaggcaacgttcctggactcaccaaccc

SEQ ID NO: 688 - DNA, 467 bp, Homo sapiens
  MAP TO AC007040.2; EXPRESSED IN PLACENTA, SIGNAL = 6.1; EXPRESSED IN BT474, SIGNAL = 5.5; EXPRESSED IN BONE MARROW, SIGNAL = 6.8; EXPRESSED IN HEART, SIGNAL = 4.5; EXPRESSED IN BRAIN, SIGNAL = 5.9; EXPRESSED IN ADULT LIVER, SIGNAL = 5.5; EXPRESSED IN LUNG, SIGNAL =   7; EXPRESSED IN FETAL LIVER, SIGNAL = 5.3; EXPRESSED IN HBL100, SIGNAL = 6.3; EXPRESSED IN HELA, SIGNAL = 5.9
cctggcagttgtactgaggcctattcacatacatttagccacccattagatataataccctgcattgggtggttaaggaatctgggcccagagagggtgagcaacttgtcacaggtcatgcaaccagatccaggcctgaggagctctgcgatagatcacaccaccttttattaagatgctttctggtgatctaactccctagctaatgaactaagctggctcctttcatggcctctgcagatgccaaagggacaattcgggaaattgtcctgcctaagggcctggacctggaccggcccaagcggacacgtacatccttcactgccgagcagctgtaccgcctggagatggagttccagcgctgccagtatgtggtgggccgcgagcgcactgagctggcccgccagctgaacctctccgagacccaggtaagagaccagggccaggccactccactcttgtcctgg

SEQ ID NO: 689 - DNA, 427 bp, Homo sapiens
  MAP TO AC006987.2; EXPRESSED IN HBL100, SIGNAL = 1.7; EXPRESSED IN LUNG, SIGNAL = 3.3; EXPRESSED IN HELA, SIGNAL = 3.6; EXPRESSED IN BRAIN, SIGNAL = 1.7; EXPRESSED IN BT474, SIGNAL = 2.5; EXPRESSED IN BONE MARROW, SIGNAL = 1.4; EXPRESSED IN PLACENTA, SIGNAL = 1.8; EXPRESSED IN HEART, SIGNAL =   2; EXPRESSED IN ADULT LIVER, SIGNAL = 3.3; EXPRESSED IN FETAL LIVER, SIGNAL = 3.4
aaatctgtaaggaatcactgtcaggaatctacaggacttggctcatatttacattggacacacacttagaaatttcataaatgatgagatgcaggccaagggtattcctcaaagggctccacccaaaaggaaaagaaagagagttaaacagagaattaccacacgtatttgtgggtaatcagcttattcctcagcctctagacagtgaggaggatgaaaaaatggaagaagatagtaaagaagaggaagaaaaagatcacagtgaagcgatgaagccagaggagccacctcaaaatttactgagagaaaaaatcatgaaactgcccctccctgaatctttaaaagcttacttgacatattttagagacaaataacttagatcaagaagaaagaatgactactgataattcctttagtcttgaaaatg

SEQ ID NO: 690 - DNA, 425 bp, Homo sapiens
  MAP TO AC006987.2; EXPRESSED IN HBL100, SIGNAL = 2.3; EXPRESSED IN HELA, SIGNAL = 2.3; EXPRESSED IN BT474, SIGNAL = 2.2; EXPRESSED IN BONE MARROW, SIGNAL = 2.3; EXPRESSED IN FETAL LIVER, SIGNAL = 2.3; EXPRESSED IN LUNG, SIGNAL =   3; EXPRESSED IN ADULT LIVER, SIGNAL =   2; EXPRESSED IN BRAIN, SIGNAL = 2.7; EXPRESSED IN PLACENTA, SIGNAL = 2.2; EXPRESSED IN HEART, SIGNAL = 2.4
gcaactcactgttgttccccaaataatcacatcgacgccgagctgcccatcagttacttacacttccccaagagcacctctcaactagaaaggcagaagaaatactgaaaaggttacaacattggcccagcagccagggatgttctggatgatggcgcctgtgcagtacaggcgcggcttgtgcctcctctccagcttttcccactgctgagaaaaggccttcctggctcaggcattaactggctccagctccacctgaatggccagcagctcctccagtgcagactctggggtcatgggcccagggccaggctgtgcccgctgggcctcctcctgccactccacgagggcctcctcctgggccaccacctccacctccacctccacctccacctccaccattatgtcatccagcactagcacca

SEQ ID NO: 691 - DNA, 472 bp, Homo sapiens
  MAP TO AC006970.2; EXPRESSED IN BT474, SIGNAL = 1.5; EXPRESSED IN BONE MARROW, SIGNAL =   2; EXPRESSED IN HBL100, SIGNAL = 1.4; EXPRESSED IN ADULT LIVER, SIGNAL = 1.8; EXPRESSED IN BRAIN, SIGNAL = 1.9; EXPRESSED IN HEART, SIGNAL = 1.9; EXPRESSED IN PLACENTA, SIGNAL = 1.8; EXPRESSED IN FETAL LIVER, SIGNAL = 1.5; EXPRESSED IN LUNG, SIGNAL = 1.7; EXPRESSED IN HELA, SIGNAL = 1.7
gagagaaagatggggtggtggaaaaaaagaaaggttattgggttaccagggaggagaggaacctgttgtctatcataggtccttcaggaaggaccttgtagcaagagtttctctgaactttccagatctatcattgtgccagacaagccacgaggctaaaattttttttttaaggcaaaaattcaatggtggcctgtgcagagctgaaagggcaaaactggaaggaagtaagagaataaccttttacaacaggcaaaattgatggctgattcaacagccccagaggcttgtgtagctcagcaacttacagcagccattcttcttgttcattttggtgaagttattcgtgcgaagagtaagggtccccactctgcccaggtgcaggaggagattcagaaaatttaaagaaatatgggcataatttaattcatccttgatgctgatagaaagttccagagacatggccataaca

SEQ ID NO: 692 - DNA, 459 bp, Homo sapiens
  MAP TO AC006970.2; EXPRESSED IN PLACENTA, SIGNAL =  13; EXPRESSED IN BONE MARROW, SIGNAL =  16; EXPRESSED IN HBL100, SIGNAL =  48; EXPRESSED IN FETAL LIVER, SIGNAL =  88; EXPRESSED IN LUNG, SIGNAL =  53; EXPRESSED IN HELA, SIGNAL = 1.1e+02; EXPRESSED IN BRAIN, SIGNAL = 9.2; EXPRESSED IN HEART, SIGNAL =  19; EXPRESSED IN BT474, SIGNAL = 7.5; EXPRESSED IN ADULT LIVER, SIGNAL =  88
cgcagcagcaccagaaacatatacactttattgaatgccattgtagaaaagtgtgtgagtataaagggctgatacaggacttggctccggggcagggcaaggagtggaaggtggagtacatgggatacaggtcatgggcagagctcctggcctcagtgatgcctcctgatctatcaatgggcttggatgatcaacactgggatgacgatgagcagaatggtcatgaggatgcccaaagtcagggcccagatgttcaggcacttggcggtggaggcataggcctgggccccggtcaggtcgccaaccatcttcctgtccctagacttcatggagtaggtgaacgctatgaagcccaggcagcaggggttcatgaagagggtgttgaacagggaccagacaacatggttgggcatggaggtctcgctgcagatgtggatcacgtcgggagagcagggttgt

SEQ ID NO: 693 - DNA, 458 bp, Homo sapiens
  MAP TO AC006966.3; EXPRESSED IN FETAL LIVER, SIGNAL = 5.8; EXPRESSED IN PLACENTA, SIGNAL =   7; EXPRESSED IN BT474, SIGNAL = 5.2; EXPRESSED IN BONE MARROW, SIGNAL = 7.6; EXPRESSED IN HBL100, SIGNAL = 6.5; EXPRESSED IN LUNG, SIGNAL = 6.5; EXPRESSED IN HELA, SIGNAL = 4.8; EXPRESSED IN ADULT LIVER, SIGNAL = 4.7; EXPRESSED IN BRAIN, SIGNAL = 5.4; EXPRESSED IN HEART, SIGNAL = 5.9
tcccaccaagtaactgggaccacaggtgcacaccagcacacccagccactgtctaatgtttttgtagagatgatgtctcactgctattccccaggctggagggatgtgttgatcatataaaaacatgacaggacattatttctcatgtccattttaaaccttttttaaatgttaattttcacgtgtcctgcttttctctttgcaggtccatcggctggtggtggtaaatgaagcagatagtattgtgggtattatttccctgtcggacattctgcaagccctgatcctcacaccagcaggtaaaatgctggtttctgacctttgccatcggcgtctaggaagggtgggaggtagaacaggaagtgcagcatttaaaccatcatttctccacccacctacagatcaaggctttgagtatattactttgaaaccattttcgttttctcttcagttgggaa

SEQ ID NO: 694 - DNA, 468 bp, Homo sapiens
  MAP TO AC006840.13; EXPRESSED IN ADULT LIVER, SIGNAL = 1.2; EXPRESSED IN HEART, SIGNAL = 1.7; EXPRESSED IN BONE MARROW, SIGNAL =   2; EXPRESSED IN HBL100, SIGNAL = 2.4; EXPRESSED IN FETAL LIVER, SIGNAL = 2.5; EXPRESSED IN PLACENTA, SIGNAL = 1.6; EXPRESSED IN BT474, SIGNAL = 1.4; EXPRESSED IN LUNG, SIGNAL = 1.4; EXPRESSED IN HELA, SIGNAL = 1.4
aacggtggaatggtcttttgaagtcacaattacaatgccaactaggtgacaatactttgcagggctgggggcaaagttctccagaatgctgtgtatgttctaaatcagcattcaaaatatggtactgtttcttccgcagccaggattcatggtccaggagtcaaggggtggatgtggaagtggcatcactcaccatcacccctagtgacccactagcaagacttttgcttcctgttcccatggcattatgttctgctggcccagaggtcttagttccaaaggaaggaacactgccaccagaatacacaacaatgattccattcaactggaagttatgattgccacctggacactttgggctcctcctgcctctagggctaagaagagagttacagtgttgactggagtgattaacccagactatcaagatgaaatcagactattacttgcaacggaagtaaggatgga

SEQ ID NO: 695 - DNA, 460 bp, Homo sapiens
  MAP TO AC006840.13; EXPRESSED IN PLACENTA, SIGNAL = 5.8; EXPRESSED IN BRAIN, SIGNAL =   7; EXPRESSED IN HEART, SIGNAL = 3.4; EXPRESSED IN BONE MARROW, SIGNAL = 8.2; EXPRESSED IN HELA, SIGNAL =  14; EXPRESSED IN LUNG, SIGNAL = 8.2; EXPRESSED IN BT474, SIGNAL = 7.3; EXPRESSED IN ADULT LIVER, SIGNAL = 6.8; EXPRESSED IN FETAL LIVER, SIGNAL = 6.6; EXPRESSED IN HBL100, SIGNAL = 7.2
tggcctgttcctgtcttacctgatgccattaccttgtgaaattctttctcctggctcattctggctcaaaagctcccccactgagcaccttgtgacccccacccctgccagccagagaacaaccccctttgattgtaattttccactacctactcaaatcctataaaacggccccacccctatctccctttgctgactctcttttcggactcaacccgcttgcacccaggtgattaaaaagctttattgctcacacaaagcctgtttggttgtctcgtcacacagacgcgcgtgatatttggtgccgtgactcggatcgggggacctaccttggagatcaatcccttgtcctcctgctctttgctccatgagaaagatccacctatgaccttgggtcctcagaccaaccagcccaaggaacatctcaccaattttaaattgggtaagcggcctcttttta

SEQ ID NO: 696 - DNA, 454 bp, Homo sapiens
  MAP TO AC006576.15; EXPRESSED IN HBL100, SIGNAL =   4; EXPRESSED IN HELA, SIGNAL = 4.1; EXPRESSED IN ADULT LIVER, SIGNAL = 3.5; EXPRESSED IN BRAIN, SIGNAL = 4.3; EXPRESSED IN PLACENTA, SIGNAL = 6.4; EXPRESSED IN BONE MARROW, SIGNAL = 4.9; EXPRESSED IN BT474, SIGNAL = 5.3; EXPRESSED IN HEART, SIGNAL = 7.7; EXPRESSED IN LUNG, SIGNAL =  13; EXPRESSED IN FETAL LIVER, SIGNAL = 4.3
ctctgcagcaccaggtcaggagcctctcgggggagcgtctcaaagtcctggatgaggataggggcattgggccagccaatcctctccagctcctgcacgttggcattagggcccactccaatgggcaccacctggatgtctccaggcagcctcttgatctcatcagaggcaggatttccggtgaccatgtagaccaggttgggcgcctgctcccggtcaccctggctgaccaagaagctgtggtcagagaggtaccgcagggccagcccagtgttggtcctgttgccgccctggtagcggatctctcgcacccgctgcaggatgtcccctttggactgtgcctcgctgaaggggtactccacagtcaccatgtaggagtactgcagcaccgtgacgtggatgctgtcctggcccacatccatccgctgaatcacctcctccatgaactccttgc

SEQ ID NO: 697 - DNA, 493 bp, Homo sapiens
  MAP TO AC006560.8; EXPRESSED IN PLACENTA, SIGNAL = 1.3; EXPRESSED IN HBL100, SIGNAL = 0.8; EXPRESSED IN FETAL LIVER, SIGNAL = 0.69; EXPRESSED IN LUNG, SIGNAL = 1.1; EXPRESSED IN BRAIN, SIGNAL = 0.71; EXPRESSED IN BT474, SIGNAL = 0.8; EXPRESSED IN BONE MARROW, SIGNAL = 0.81; EXPRESSED IN HELA, SIGNAL = 3.3; EXPRESSED IN ADULT LIVER, SIGNAL = 0.75; EXPRESSED IN HEART, SIGNAL = 1.1
tgtgtgtgtgataaatcatttggaatctgacaaaaattaagacattctcccctggaaaatgcacctccactcagaactctgcctaaaaatttgttacccacccaaatattccagactaataatatctggaatcccttgttacccaacaaaagattccagattaataatatctgataacagcaaatggtactgttggcagagcaaatagtaggtgctcggtaattgccggctgatgtgtacttctctctgttttcccaaacagattgccctgacattctcaatcgtctttggggtgatagtgtatcgaataacaactgcagccgctctgtctctcaataaggctacacgctccaatgtccgggtgacagtgacagcaacagcagtcatcatcaacctcgtggtcatcctcatcctggacgagatctacggcgctgtggccaagtggctcaccaaaattggtactgtgtcaccgagacttctggctgtcctaggc

SEQ ID NO: 698 - DNA, 477 bp, Homo sapiens
  MAP TO AC006560.8; EXPRESSED IN BRAIN, SIGNAL = 1.1; EXPRESSED IN HBL100, SIGNAL = 0.79; EXPRESSED IN ADULT LIVER, SIGNAL = 0.92; EXPRESSED IN HEART, SIGNAL = 1.2; EXPRESSED IN BT474, SIGNAL = 0.73; EXPRESSED IN BONE MARROW, SIGNAL = 0.78; EXPRESSED IN FETAL LIVER, SIGNAL = 1.1; EXPRESSED IN HELA, SIGNAL = 1.1; EXPRESSED IN PLACENTA, SIGNAL = 0.92; EXPRESSED IN LUNG, SIGNAL = 3.1
aaatattattaatccacagaagagcacttaatacatgctttaatatgatgttctttactttagtaccattcttcatttgacagtgaactcccatcgatagtcactttatctccccacagaacctagggtatgccttcacacccttttgttgaatcatgaaaatgcagcataaacccccaaacaaatctgatagggctctttgaatttggaatgtgttttatgcttttccttacctgctttcccggttgtatatagtttaggacggtggctctgcacattcttaactatcgcacgttgtgaatccaaactgggcacctttgaaattctgaaaatgtaaattcttaatcgtgtctaaaataagtagatcttattaaaagggaagaagaggaggaagaagaaggaggaggagaagaataaagagaaagaataggaggagaaagaggagcagaaggagcagcaataactactattacaaca

SEQ ID NO: 699 - DNA, 457 bp, Homo sapiens
  MAP TO AC006560.8; EXPRESSED IN PLACENTA, SIGNAL = 5.1; EXPRESSED IN BONE MARROW, SIGNAL = 1.2; EXPRESSED IN LUNG, SIGNAL = 3.4; EXPRESSED IN ADULT LIVER, SIGNAL = 1.7; EXPRESSED IN BRAIN, SIGNAL = 2.6; EXPRESSED IN BT474, SIGNAL = 3.4; EXPRESSED IN HBL100, SIGNAL = 3.2; EXPRESSED IN FETAL LIVER, SIGNAL = 2.7; EXPRESSED IN HELA, SIGNAL = 2.6; EXPRESSED IN HEART, SIGNAL = 2.9
tcatcctgtccactccactgctgaggtcacccgctggtgaacactcacatgggatacaaatatcttcacagtttttgaccactcagagaggtccatctacatacctcttccccagatttgtttgtcaccaattttccaatcatgcttcttccaagtccctgaccatccaaccaaaccattggctacagcccgtgaatcagtatataattgcacatctggccatttctccttgcttgcaaagtgcacaaccaggtgcactactcgaagtgcccactgggaagatttcccttcactgctgtccttagggatgtcctagaaaggggctgtagtgctgctgcagctgtccacttttgggtggtgcctgcgtattgtgcagacccatctgtgaaccaggcctgagtcttctcttcctctgtcaactgatcatagggagctccccacgagaccattggtgtag

SEQ ID NO: 700 - DNA, 482 bp, Homo sapiens
  MAP TO AC006536.2; EXPRESSED IN BONE MARROW, SIGNAL = 6.8; EXPRESSED IN HBL100, SIGNAL = 4.8; EXPRESSED IN LUNG, SIGNAL =   7; EXPRESSED IN HEART, SIGNAL = 5.1; EXPRESSED IN PLACENTA, SIGNAL =   5; EXPRESSED IN BT474, SIGNAL = 4.7; EXPRESSED IN FETAL LIVER, SIGNAL = 4.6; EXPRESSED IN HELA, SIGNAL = 6.4; EXPRESSED IN ADULT LIVER, SIGNAL = 5.3; EXPRESSED IN BRAIN, SIGNAL = 7.4
ggcttttgagcagggaaatgacatagtaagatgtatgttttaggaaaatgactatcagctgggcatacaatggaactagggatgagaccattagtttgcatgtatgtgtccttccaaaattcatatgttagaacttaaaccccaaggtgatggtattaggaactagggcttttggggaagtgattaagtcataaaggctccaccttcgtgagtgggactaatggccctataagagaggcatcagagagctgcttggcccttccagctcttcactcacgtgagaacacagcatttatcccctttcacccgtctgccttctgccacgtgaggatgctgcagcaaggtgccatcctggaagcagagaccaagccctcaccagacaccaaatataccagtgccttgatcttcaacttcccagcctccacagctgtgagaaataaatttctgttgtttataaattacccagcctgtggtattttgtt

SEQ ID NO: 701 - DNA, 470 bp, Homo sapiens
  MAP TO AC006516.10; EXPRESSED IN BT474, SIGNAL = 0.62; EXPRESSED IN LUNG, SIGNAL = 1.4; EXPRESSED IN ADULT LIVER, SIGNAL = 1.3; EXPRESSED IN BRAIN, SIGNAL = 1.4; EXPRESSED IN HEART, SIGNAL =   2; EXPRESSED IN BONE MARROW, SIGNAL = 0.76; EXPRESSED IN HELA, SIGNAL = 0.92; EXPRESSED IN PLACENTA, SIGNAL = 0.76; EXPRESSED IN FETAL LIVER, SIGNAL = 0.76; EXPRESSED IN HBL100, SIGNAL = 0.78
tcagagtgacaaatgcaaacgatgagtatgctatagagatgtaaagctgctgttcaaaaaggaaggaaggaaggaaggaaaggagggagggaggaaggaaggaaggaaagaaggaaggaaggaaggaaagaaagaaagaaagaaagaaagaaagaaagaaagaaagaaagaaagaaagaaagaaagagaaagaaagaaggaaagaaagaaagaaaacattgtcaaaggtttagtggtagaattagctctcatttcaggagcccttaaagctgggaagaagaggattccaaatgtgcaggaaactgggtctcttatagaagatctgagctacaagttgttcattttgcaaaatgtcagaatctaggagaagtgtgaccaccatgctccaataagttatttcatagacattcttaagctttttggagaacaccaccatttccaagaatttcctctgaatgaagaattagggc

SEQ ID NO: 702 - DNA, 460 bp, Homo sapiens
  MAP TO AC006476.3; EXPRESSED IN PLACENTA, SIGNAL = 1.9; EXPRESSED IN BT474, SIGNAL = 1.6; EXPRESSED IN FETAL LIVER, SIGNAL = 1.7; EXPRESSED IN LUNG, SIGNAL = 2.2; EXPRESSED IN HELA, SIGNAL =   2; EXPRESSED IN ADULT LIVER, SIGNAL = 1.7; EXPRESSED IN BRAIN, SIGNAL = 2.5; EXPRESSED IN HEART, SIGNAL = 1.9; EXPRESSED IN BONE MARROW, SIGNAL = 2.1; EXPRESSED IN HBL100, SIGNAL = 1.8
tgcaaagcataacaaagcccatgaaattgttttagtaactgttgctatcatctcaaaccatggaaactgttactgctaaggattaaggttatctttttaaaggtgtgtgtgaagaccctacctatccaactctctctgagttttaccagtagttcattaacaaacaatgggaagtggcctttctttttctttttttttttttaagatgcaggtggtgaccctgaaccacagctgagtgaggcgcattcccgggtgagaatgtcacgggagttcttactcaccaagcctctgccttacctttgtgtttttctgtttgagacctcagaagctctgcacattttgtttcttcctcctgtatttccagatgaaatcggcattctgggtgaatgctgttcacctgttcacggttaaaagaaatattaataactaaaaattccacaagaagaagaaaagcaagcaa

SEQ ID NO: 703 - DNA, 455 bp, Homo sapiens
  MAP TO AC006430.15; EXPRESSED IN HELA, SIGNAL = 1.2; EXPRESSED IN ADULT LIVER, SIGNAL = 3.8; EXPRESSED IN PLACENTA, SIGNAL = 1.2; EXPRESSED IN BONE MARROW, SIGNAL = 1.2; EXPRESSED IN BT474, SIGNAL =   1; EXPRESSED IN HEART, SIGNAL = 0.99; EXPRESSED IN BRAIN, SIGNAL =   1; EXPRESSED IN LUNG, SIGNAL = 1.5; EXPRESSED IN FETAL LIVER, SIGNAL =   4; EXPRESSED IN HBL100, SIGNAL = 1.2
gagtctgatatggtcttaacggtgtaagataaaacaattaactcccaaataaaaaattgatacatttatcttcctcaaggaccattcaatggattagcagattgtctctgggactaatttgtcttggatgcaaaattatggaactgttcactggactcatgtgtaaaatctgccgcatctgttctgcacactagccaaaacacatggtcaagagtacacattgtcctagaaaatacaacaggagaattcagctcacattaaactccagcaccgtcactccagatgggagattaagcacaaaggaagctactccatcatcaacacgtgttacacttttgcttggatccaagtcagatgtctcttggtttacatcaattgtttgtgcattcagtgttactgggactcctcctaccaactggtcaagcgaatctttaacctgcacctgtttgtcaaaa

SEQ ID NO: 704 - DNA, 469 bp, Homo sapiens
  MAP TO AC006430.15; EXPRESSED IN HBL100, SIGNAL = 1.5; EXPRESSED IN FETAL LIVER, SIGNAL = 9.9; EXPRESSED IN BRAIN, SIGNAL = 0.88; EXPRESSED IN PLACENTA, SIGNAL = 1.1; EXPRESSED IN BT474, SIGNAL = 1.3; EXPRESSED IN BONE MARROW, SIGNAL =   1; EXPRESSED IN LUNG, SIGNAL = 0.99; EXPRESSED IN HELA, SIGNAL = 0.9; EXPRESSED IN ADULT LIVER, SIGNAL =  12; EXPRESSED IN HEART, SIGNAL = 1.2
tctcattcgaaaaggaaggaagtgttctgtagtttggaatgcaggtgccttgcctctcattcaggcattttggtaagttgagccaaaatgctacagaaataatatttatttatatagtagagtccatctcatgatttttttgctaaaattctcttacaaagttttctataattcacaacttaaatattagtttaataaaaatattagtttagaatcacccaatttttatgtgaaatactttttttttttaccttcttttaattttttcttcagtttctgcttttcaattaatgggtcagaatgaaaaatgttccaatgatttcctgtttccaggtagtgaaaaacatagaatactgggacaacgctcatcagctccgcctctgcactccctttggggaggtgggttaggatattgatgccttcctgacttagaactgcagacaagatctcacctacaagcagtcctgaa

SEQ ID NO: 705 - DNA, 457 bp, Homo sapiens
  MAP TO AC006430.15; EXPRESSED IN ADULT LIVER, SIGNAL = 6.7; EXPRESSED IN PLACENTA, SIGNAL = 1.1; EXPRESSED IN BONE MARROW, SIGNAL = 0.68; EXPRESSED IN HBL100, SIGNAL = 0.84; EXPRESSED IN FETAL LIVER, SIGNAL = 4.8; EXPRESSED IN LUNG, SIGNAL = 0.94; EXPRESSED IN HELA, SIGNAL = 0.76; EXPRESSED IN BT474, SIGNAL = 0.65; EXPRESSED IN BRAIN, SIGNAL = 0.86; EXPRESSED IN HEART, SIGNAL = 0.93
ctttcagccaggatcaggagggcccctctgtacttccatgtacctatcaagactcttatttttcactatctgcttaaatgacaatctccctgcactacgctgattgtttgtgttttatttttgaatcctcagtgcccaggatatagcaggcatccctgtttaggacatagctgacactcaatatatgtttaagtagtgaagagatagatttataaaataaagagtggaacagatgatttcaatggtctcagccaattgtaaaatactacagaaagttcttcatttacctctactggcctcccaaggaaattcttgtctgtcattttataattatgtaaggcacctttatgcttgtaagaaacatcgatgtccatactcaagcggagttgtttaaccaggagtgaatattccgtcaggccctcaatggcattgattgtgtcctgtcagcaatcagcaa

SEQ ID NO: 706 - DNA, 478 bp, Homo sapiens
  MAP TO AC006430.15; EXPRESSED IN HEART, SIGNAL = 1.4; EXPRESSED IN PLACENTA, SIGNAL = 1.4; EXPRESSED IN BT474, SIGNAL = 1.3; EXPRESSED IN HBL100, SIGNAL = 1.3; EXPRESSED IN LUNG, SIGNAL = 1.9; EXPRESSED IN BRAIN, SIGNAL = 1.7; EXPRESSED IN BONE MARROW, SIGNAL = 2.2; EXPRESSED IN FETAL LIVER, SIGNAL = 1.5; EXPRESSED IN HELA, SIGNAL = 1.3; EXPRESSED IN ADULT LIVER, SIGNAL = 1.6
gatgggaggttatgaccttgactacagcttctaactcagcgctcttcctggaagggtgtgggataaaggggagatacgttttgatggagtgactgctgtaagcaggatgaatgattaggaggaagcctgtctgccgctctggagacaggatggggctcagccgggcttgaaggcaaacctgcctcccacactcaccctctgctccaagctcaggatgcgctcacggtccagctggctctggtggatagaggtggccagggccaggtgggaggcctccacctccttgttgaggacagcaacaatgttctcaaacacacgcagcttcccctccagctcagccagaagcttctccttcatgaagtgctgcagggccagctcctcctggctctcggagcagggtgcccggtagcaatcgacctccaggtcccccgccacttccacggctgcctgcagctgcaggtctgacaggttctgctcc

SEQ ID NO: 707 - DNA, 469 bp, Homo sapiens
  MAP TO AC006430.15; EXPRESSED IN LUNG, SIGNAL = 1.6; EXPRESSED IN HELA, SIGNAL = 1.2; EXPRESSED IN ADULT LIVER, SIGNAL = 1.4; EXPRESSED IN PLACENTA, SIGNAL = 1.3; EXPRESSED IN BT474, SIGNAL = 1.1; EXPRESSED IN BRAIN, SIGNAL = 1.3; EXPRESSED IN HEART, SIGNAL = 1.2; EXPRESSED IN BONE MARROW, SIGNAL = 1.8; EXPRESSED IN HBL100, SIGNAL = 1.3; EXPRESSED IN FETAL LIVER, SIGNAL = 1.2
cactggcctcccagtgtcgcatggtccgtgcagaggggagcagctctgcctgtctccttctggaccctttgcctttgtgggcccagcccacgtcctgccatcctaaccagatggccagcccgaagtcgacccctcagtcttgcttggatcatgccagccttcacccatctttgtgccctgaggtcttgggtgccaagggcagggcatcacagtcctctggctagctcccttctgagttggagctccctcaggagccccgcccaccctaagtgctggtctccacaatgcacttgaggaacattgtgtcgtccttcacgtaggcgtgcttgggtgactgcagtttgctgagggggaagaagagtgggcatccactggccacgttggtttcactctggggcctctggaaggacgctgagcttaggtcaggccggaaggcgtcaatggcgtgctcacggttgttctggtccag

SEQ ID NO: 708 - DNA, 389 bp, Homo sapiens
  MAP TO AC006356.3; EXPRESSED IN FETAL LIVER, SIGNAL = 1.4; EXPRESSED IN LUNG, SIGNAL = 1.8; EXPRESSED IN ADULT LIVER, SIGNAL = 1.5; EXPRESSED IN HEART, SIGNAL = 1.2; EXPRESSED IN PLACENTA, SIGNAL = 1.5; EXPRESSED IN HELA, SIGNAL = 1.4; EXPRESSED IN BRAIN, SIGNAL = 1.6; EXPRESSED IN BT474, SIGNAL =   1; EXPRESSED IN BONE MARROW, SIGNAL = 1.5; EXPRESSED IN HBL100, SIGNAL = 1.1
cctactatacaacaggcactggggataaagtgttatacaaaattaaatccctgctttcattgagtgtacattctcatggaaaagacatgccaaaaaaaataagttaaccaatatgtgccataatattagacagtgataggtgctatgaaaataaaatcatgctgagtcagggggtgaagaacagtaggcctgacagatggtcatcagggaagacttttctgaagagacaacattggaggcaagacctgaatcaaccgagggaaagagcaatgtggagatcatagggcaaagcattccaggaacaggaaacagcaacgcaaagttctttgcagcaatatgcctggtgtatttaagaaacagcacgtgggcccgtgtcgctggagaagtat

SEQ ID NO: 709 - DNA, 472 bp, Homo sapiens
  MAP TO AC006296.8; EXPRESSED IN HEART, SIGNAL = 1.8; EXPRESSED IN BRAIN, SIGNAL = 2.3; EXPRESSED IN PLACENTA, SIGNAL = 1.7; EXPRESSED IN BT474, SIGNAL = 1.3; EXPRESSED IN BONE MARROW, SIGNAL = 3.3; EXPRESSED IN HBL100, SIGNAL = 1.6; EXPRESSED IN FETAL LIVER, SIGNAL = 1.4; EXPRESSED IN HELA, SIGNAL = 2.1; EXPRESSED IN ADULT LIVER, SIGNAL = 1.9; EXPRESSED IN LUNG, SIGNAL = 1.6
gggttgcagtattgagaggcacacctcagctatggcaattcattgatggtggagatccagaaagaacatttaagaagaatcagccctaaaacccaacatccactgtgaagctggcttatgaatatctctctctggacaaattttcagtaaagctagctacacactcaaaggccttctgagagtcactttagttgcttttgttggtactaaaacccagaagcacacttgcattctctgtttggaaagattaatataggaaaagcacacgcaagatgatgaggaaacacactagtaaaagccttcaggaagagcataaatccgaaggcatatatgaacttgagaagtttagcactctaagaattaacaagtgtcttgttggtagggaggggcattggactctgcataagtcctataatgaagtttgagaccaataattttttaaatcctaagaggtcaggtcactgatgctagg

SEQ ID NO: 710 - DNA, 485 bp, Homo sapiens
  MAP TO AC006286.12; EXPRESSED IN FETAL LIVER, SIGNAL = 1.3; EXPRESSED IN LUNG, SIGNAL = 1.7; EXPRESSED IN HELA, SIGNAL = 2.2; EXPRESSED IN ADULT LIVER, SIGNAL = 1.2; EXPRESSED IN HEART, SIGNAL = 1.2; EXPRESSED IN BONE MARROW, SIGNAL = 1.3; EXPRESSED IN BRAIN, SIGNAL = 1.4; EXPRESSED IN PLACENTA, SIGNAL = 0.9; EXPRESSED IN BT474, SIGNAL = 1.5; EXPRESSED IN HBL100, SIGNAL = 1.9
tcacagaagggctcatgttgtaaaagaagtcaaaagcagccttgaataatcagaacccttctgccagattgtctaatgtcaatttgttttctagaactactgcttctacatgttcttcctcttcatctggctctggtttggaagcacttatctccatcaagtcatcttctgttaattcctcaggtgtggtgtctattagcttttgaatttatccaagatctgtatcttgaaaccctttatctcccaccttttttgggacatccacaatctctttcatgatttccttgattgcttctgtcatatatcctgataagtcatgcacaacatctggacacagttttctccagcaggaatttattgttttgggcttgatggctttcatagctttttctgtaacaatgatgatgtcttcaatggtgtaatgcttccagactgtcatgatgttcctatcagggttatcttccatactgttgacaatcctttcc

SEQ ID NO: 711 - DNA, 480 bp, Homo sapiens
  MAP TO AC006017.2; EXPRESSED IN PLACENTA, SIGNAL = 2.4; EXPRESSED IN BT474, SIGNAL = 1.8; EXPRESSED IN HBL100, SIGNAL =   2; EXPRESSED IN LUNG, SIGNAL = 1.9; EXPRESSED IN ADULT LIVER, SIGNAL = 1.5; EXPRESSED IN HEART, SIGNAL = 1.2; EXPRESSED IN BONE MARROW, SIGNAL = 2.3; EXPRESSED IN FETAL LIVER, SIGNAL = 1.7; EXPRESSED IN HELA, SIGNAL = 1.9; EXPRESSED IN BRAIN, SIGNAL = 1.6
gaagtcgaaattatgagactcaatctcttttgtgtcatttatttagtatgtgctgtgaccgtcactttaagtaaaagactggagctgttatggctgcagttactaagaggtctcagagctgtcactttttggcaatgtacttttaatgccatttaatactagtcaaaaaaaatcactagtcaaagtcactaatgaacaacacaccaaaacattctactcattaattgttggtagtttctattttgcaaacctatttattacctgttctagctgtttctgaaccatgctttgctgttcagtaacatgcttgagttgttctgcatcttcctctggaaattcacgcccagctttcttggcagtacgttgtttagctgaaagggccttcttagattttctgtgagcaccaatttgttcttcaagatacttctgctgcatttgaagcagctgttgggtctcctggagccactcttcatactgctt

SEQ ID NO: 712 - DNA, 449 bp, Homo sapiens
  MAP TO AC006017.2; EXPRESSED IN PLACENTA, SIGNAL = 4.6; EXPRESSED IN FETAL LIVER, SIGNAL = 4.7; EXPRESSED IN HELA, SIGNAL = 4.2; EXPRESSED IN BRAIN, SIGNAL = 4.9; EXPRESSED IN HEART, SIGNAL = 3.9; EXPRESSED IN BT474, SIGNAL = 4.5; EXPRESSED IN BONE MARROW, SIGNAL = 4.7; EXPRESSED IN LUNG, SIGNAL = 4.7; EXPRESSED IN ADULT LIVER, SIGNAL = 3.5; EXPRESSED IN HBL100, SIGNAL = 3.4
ggaagctggtcccagaaagatttccatgtccctgcttcacagaagaaaaatttgggcttccaacagggattgatggtgaatcaggaacaaatgaaggagggcctacctgccttcgctcattagtctgcatgaaagtttgggtggagggtgaattaattgatccttgttgtatattctgctgctgtaaaacctgccccatttgctgttggtgttgtggagactgctgaaggggtcctagaggttgcataaaatcacaaggtaagtcggaactgtagaagggaatctgggacacagatgtcctactactacttatctcagagcccaccataccatgctgctccatttccatcctctgctgcaaagctctttgtctatctacctcctgcatgagttggatccgttgtctctcttgctgttctcgtaaacgttccttacgttcccgttcttga

SEQ ID NO: 713 - DNA, 465 bp, Homo sapiens
  MAP TO AC006017.2; EXPRESSED IN BT474, SIGNAL =  13; EXPRESSED IN HBL100, SIGNAL =  11; EXPRESSED IN LUNG, SIGNAL =  18; EXPRESSED IN HELA, SIGNAL =  11; EXPRESSED IN ADULT LIVER, SIGNAL = 7.4; EXPRESSED IN BRAIN, SIGNAL =  13; EXPRESSED IN BONE MARROW, SIGNAL =  17; EXPRESSED IN PLACENTA, SIGNAL =  18; EXPRESSED IN HEART, SIGNAL = 7.7; EXPRESSED IN FETAL LIVER, SIGNAL =  13
tacaatgctacctgcctcccaggagctctcaacaagatgcaaagatgtggattccactggtctgctttccctttggggaagccaatcaccaagtcccaagactacatattaaatccctagtgttaccaagggacaggatttgatacgattttgaaaacacgtttctgtccctgcagctatgtgaaatcattttcacatactggacatcaatagcttcagattgctagactccaccctgtctctccacttcctgtacacaaagtatttcttcacctgaatccgagaccgtgccagatacacattggatttccattcagttttcatcttccggtactgcgatgacttggagtgaacaaactgtttactataaggtgcgttcagttctccagtgactgtgctctgaaatgactttgaggtgctggtgctgtttaaggtgtgaggcctgcagacaatggcatatcaaca

SEQ ID NO: 714 - DNA, 492 bp, Homo sapiens
  MAP TO AC006017.2; EXPRESSED IN HBL100, SIGNAL =  12; EXPRESSED IN FETAL LIVER, SIGNAL =  12; EXPRESSED IN BRAIN, SIGNAL =  12; EXPRESSED IN PLACENTA, SIGNAL = 9.2; EXPRESSED IN HEART, SIGNAL = 9.8; EXPRESSED IN ADULT LIVER, SIGNAL = 9.9; EXPRESSED IN HELA, SIGNAL =  14; EXPRESSED IN LUNG, SIGNAL =  12; EXPRESSED IN BONE MARROW, SIGNAL =  11; EXPRESSED IN BT474, SIGNAL = 8.3
tcgcgcgtatgatttgtatgggtccctcaatcacagcaggacactgcacgcagcattactggctgagggacgtccttgttgaccaccggcagtgaagtgtagtggagcagttaggccgtctggggctgggagggtggcagtcgtgtttcatgctgtgtcagcgcgtcatcccattggacgggtggttgtacctaaattgagtgttgtgacactctcctgagcctctgttgtttcctccccaggagaagtccttgtgttcctggacagccactgtgaagtgaatgtgatgtggctgcagcccttgctggccgccatccgtgaggaccggcacaccgtggtgtgcccagtgattgacatcatcagcgccgacacgctggcctacagctcgtcccctgtcgtccgcggagggttcaactggggactgcacttcaaatgggatcttgtccccctttctgagctaggacgagcggagggagccactgcaccaataaa

SEQ ID NO: 715 - DNA, 464 bp, Homo sapiens
  MAP TO AC006017.2; EXPRESSED IN ADULT LIVER, SIGNAL = 0.85; EXPRESSED IN PLACENTA, SIGNAL = 1.3; EXPRESSED IN BT474, SIGNAL = 2.2; EXPRESSED IN BONE MARROW, SIGNAL = 0.85; EXPRESSED IN FETAL LIVER, SIGNAL = 0.96; EXPRESSED IN LUNG, SIGNAL = 1.1; EXPRESSED IN HELA, SIGNAL = 0.91; EXPRESSED IN HBL100, SIGNAL = 1.4; EXPRESSED IN BRAIN, SIGNAL = 1.8; EXPRESSED IN HEART, SIGNAL = 0.93
cgcatagtggtcctacttggtggtttggaaaacagtgattctgtatttggtggatggtttaaagtatactgaagtgtctaacatatttattcttcttttttaggaaattgacaatggcccttcagctatgctaggtctataatgggaagtgtcacagttcggtatttctgttatgggtgcctttttacatctgcgacctggacagttttgctttttgtttatttcaacttcagtgaagtgactcagccacttaagaatgtgcccgtcaaggggtctgggccccacggaccatctccaaaaaaattctatccccgtttcactcgaggcccaagtcgagtgctcgagccacagttcaaagcaaacaaaattgacgatgtgatagacagtcgtgttgaagatccagaagaaggccacttgaaattctcttctgaattaggtaagtatatgatgtttaccagcatcca

SEQ ID NO: 716 - DNA, 488 bp, Homo sapiens
  MAP TO AC006017.2; EXPRESSED IN BRAIN, SIGNAL =   1; EXPRESSED IN HEART, SIGNAL = 1.2; EXPRESSED IN PLACENTA, SIGNAL = 1.2; EXPRESSED IN HBL100, SIGNAL = 1.7; EXPRESSED IN BT474, SIGNAL = 2.2; EXPRESSED IN BONE MARROW, SIGNAL =   2; EXPRESSED IN FETAL LIVER, SIGNAL = 1.4; EXPRESSED IN LUNG, SIGNAL = 1.2; EXPRESSED IN HELA, SIGNAL = 1.2; EXPRESSED IN ADULT LIVER, SIGNAL = 2.3
cctggaagagatgtataagccctaatgtgagtgatgtaaaaagggtgcattctactcctaactgctgcttgcaattgggtaaataaagtaatcagttgttcatctgtatgaaatcataactgagcattttcaattaactgtgtggaatgaaccatgtataaagaatcaaatcacattaataggcatattaaaagcagtcaatacctcaattacagctacgagctctgctttttgagctgaaccatagggcatctgaaaaactttaccttttgagccagaataagaagctttaccgttgctagacccatctgtaaaaacattctcagcaccttcaattggtttaaatttagttattctagggagaatccaattacttattgtgactggttgtccagctttcctcaggttttcttccgccatctgtggcagcttctcgatctgtccccaggtgggtggctgtgttcgatgggtgttgctcgtgacagttg

SEQ ID NO: 717 - DNA, 469 bp, Homo sapiens
  MAP TO AC006017.2; EXPRESSED IN HELA, SIGNAL = 1.4; EXPRESSED IN ADULT LIVER, SIGNAL = 1.3; EXPRESSED IN HEART, SIGNAL = 1.1; EXPRESSED IN BT474, SIGNAL = 2.5; EXPRESSED IN BONE MARROW, SIGNAL = 2.5; EXPRESSED IN FETAL LIVER, SIGNAL = 1.5; EXPRESSED IN LUNG, SIGNAL = 1.7; EXPRESSED IN BRAIN, SIGNAL = 1.2; EXPRESSED IN PLACENTA, SIGNAL = 1.8; EXPRESSED IN HBL100, SIGNAL = 2.2
ccagtgtccaggaggaagtcaatttcctggccttcaatggttaaatgtacccggggctcagtgagggtgatgacatgagctggcgcttgcccgaggcaccctcaagtcctgttgttggatcatctggttgggggcttctgacccagagaacctttgtcctccggggcagtgcgccttccagtgattgcctcggcatagcggacatggatgagggggtggcttgtttctcgttggacaatcttttttaaaatgtctttgtaaaccacactgataacaagccctaccgggtgattggcctgctccattttctgtcctttctgaaccaccaaaggtttgtttgtctgagggccatgactaaggctgcagcctttctctgatctcgcttttccttttgggcctgttcctcttggtccctattatagaacaccaaggttgccaggtttaataatgcctccagattttgttcagg

SEQ ID NO: 718 - DNA, 477 bp, Homo sapiens
  MAP TO AC005537.2; EXPRESSED IN BRAIN, SIGNAL = 2.4; EXPRESSED IN PLACENTA, SIGNAL =   2; EXPRESSED IN BONE MARROW, SIGNAL = 3.4; EXPRESSED IN ADULT LIVER, SIGNAL = 1.8; EXPRESSED IN HEART, SIGNAL = 1.9; EXPRESSED IN BT474, SIGNAL =   2; EXPRESSED IN HBL100, SIGNAL = 2.7; EXPRESSED IN FETAL LIVER, SIGNAL = 1.6; EXPRESSED IN LUNG, SIGNAL = 2.7; EXPRESSED IN HELA, SIGNAL = 2.2
aaaagccagggctcttatgccaaacagttaagtaagtagtgaaagcaaaggaaaagttattgaaggaaattagagatgctattccagtgagcacatgagtgataagaaagtgaaagggcctggttattgacatggagaaagtttgaatggtctgtatagaagatcgaaccagaaacaacgttaccttaaaccaaagcccaatccagagcgaggccctaactctctttaattctatgaaggccgagagaagtgacaaagctgcagaagaaacgttggaagctagcataggtttgttcatgaggtttaaggaaagaagccatctccataacataaaagcacaaggtggagcagcaagtgctgatgtagaagctgcagtgggttttctagaagatctagctaagatcattgatgaaggtggctacactaaacaacaaattttcaatgtagacaagacagccttctattggaagaagatgc

SEQ ID NO: 719 - DNA, 490 bp, Homo sapiens
  MAP TO AC005517.3; EXPRESSED IN BT474, SIGNAL = 3.3; EXPRESSED IN HELA, SIGNAL = 2.1; EXPRESSED IN BRAIN, SIGNAL = 2.1; EXPRESSED IN HBL100, SIGNAL = 2.7; EXPRESSED IN FETAL LIVER, SIGNAL = 2.5; EXPRESSED IN LUNG, SIGNAL = 2.4; EXPRESSED IN ADULT LIVER, SIGNAL = 1.4; EXPRESSED IN PLACENTA, SIGNAL = 2.3; EXPRESSED IN BONE MARROW, SIGNAL = 2.3; EXPRESSED IN HEART, SIGNAL = 1.7
aggatgtcgttctgttcccccactttgaattggattttattcctactgaatacaaggggtgcaaaatagggaggacttcaaaatctggttccaatgccttcccattttttgaagaatcaagctattgcatgtgactgcctctaaatggcctgcatttctctttgttggtaggactcacagaaaacactggacttccccggaagctacttgaaaaacatgacccctggccggcctatgtcacctatacctctcagacagtgaaaagactcattgagaaaagcaaaactagagaactggaatgcatgcgtgccctcgaggaaagaccctgggcatcaaggcagaataaaccttccagcgtcattcagccgaaaaggaggaagtcttccaagtcttctggcaaagctgtgttcagggacacgctgtcagaatccacgttatcaatgtggggcgcttattcggtattggccatggctcctaccatgatcccaga

SEQ ID NO: 720 - DNA, 473 bp, Homo sapiens
  MAP TO AC005517.3; EXPRESSED IN PLACENTA, SIGNAL = 3.6; EXPRESSED IN LUNG, SIGNAL = 4.1; EXPRESSED IN HELA, SIGNAL = 3.5; EXPRESSED IN BT474, SIGNAL =   3; EXPRESSED IN BONE MARROW, SIGNAL = 4.3; EXPRESSED IN HBL100, SIGNAL = 2.9; EXPRESSED IN FETAL LIVER, SIGNAL =   3; EXPRESSED IN BRAIN, SIGNAL = 4.1; EXPRESSED IN ADULT LIVER, SIGNAL = 2.8; EXPRESSED IN HEART, SIGNAL = 3.1
ttcactggccagaaacaaaacaaatgatctgaggggaagaaggcaacattgtatatttcttgcattctgtaccatatatatcttcatatacgtacacatatacatatgaatacatatatgtgtatatatatgaattccatctatgtaattctatttacccatcatctttcgatcatctctgcatttctaatttagaatgtctcacagtttttatgctttcttcctcacgtgtttatcctgaaataaaaaccgtatctaacctgactctggctggtctccccagaagtgattctccttgtttacctggatgccgttaaaacctctccagaagatgctggtttcccagcccagcagcttcagagttacgcagggaggggcagaggctggagctggcggctgccccagcatgaggagctcatgtccccattggcatcttctctgtgacagatgccccaggtgccgggtgaataaat

SEQ ID NO: 721 - DNA, 496 bp, Homo sapiens
  MAP TO AC005497.2; EXPRESSED IN FETAL LIVER, SIGNAL = 8.4; EXPRESSED IN LUNG, SIGNAL = 7.2; EXPRESSED IN HELA, SIGNAL =  10; EXPRESSED IN BRAIN, SIGNAL =   2; EXPRESSED IN HEART, SIGNAL =   3; EXPRESSED IN BT474, SIGNAL = 0.77; EXPRESSED IN BONE MARROW, SIGNAL = 3.3; EXPRESSED IN PLACENTA, SIGNAL = 2.7; EXPRESSED IN ADULT LIVER, SIGNAL =  11; EXPRESSED IN HBL100, SIGNAL = 5.9
tgttccacagtttggctgaggctagctcctgcctgtgactaaaggtgtccatgtgacttgagctgcattacacatcgcaatgggccactctttcttcggggttgtcccagtgacttggcctccataactatgcctctcactgcggctccttgagggagataattatagcatagagtaacagaactttaaaagtaatgactgactacatagtttcctaaatatttgtgttttacttatttgtatcattactttttaatcactgtgattctaggggttgagttttcttttcaaatttttctttgtatctaatttccttgctgttagatacaacagcaaaagtacaaaagacaaaagaaaacctaaataaattggattacatcaaaattgaaaatgttgtgctacaattgatactatcaagaaggaaaaaatacactttacagaataaggaataatatttgcaaattacatacctgataagagacctgtatctagaacg

SEQ ID NO: 722 - DNA, 468 bp, Homo sapiens
  MAP TO AC005480.3; EXPRESSED IN HELA, SIGNAL =   4; EXPRESSED IN ADULT LIVER, SIGNAL = 2.8; EXPRESSED IN HEART, SIGNAL = 2.7; EXPRESSED IN PLACENTA, SIGNAL = 2.9; EXPRESSED IN BONE MARROW, SIGNAL = 3.5; EXPRESSED IN FETAL LIVER, SIGNAL = 2.4; EXPRESSED IN LUNG, SIGNAL =   3; EXPRESSED IN BRAIN, SIGNAL = 2.9; EXPRESSED IN BT474, SIGNAL = 2.4; EXPRESSED IN HBL100, SIGNAL = 2.9
ctcctattcaggccatctgcaggcatctcacaggatgttaacgtgtcagaattcctgaaaagttcctacttgcctccagtaacacttacagctagtgtgtaaaagagggaaagttctccaaccctgtaggtttcttgcttggtcctttcttacccatcaccatcctttctccacagaagctgagctcttcaggaaaattcgcatccaaatgagagccctggacatgctccagatggcctcttcccctatcgcctcctctagtaaccgggctaacccacagccccgcacagccacccgaacccagcaggaaaagcttgggtttctgcacactaacttcagattccagcctcgggtgaatcctgtggtccctgactatgagggcctttacaaggccttccagagaagagcagccaaaagaagagaaacccaagaggccactcgcaacaagcccttcttgctgaggaccgc

SEQ ID NO: 723 - DNA, 461 bp, Homo sapiens
  MAP TO AC005480.3; EXPRESSED IN BT474, SIGNAL = 2.1; EXPRESSED IN LUNG, SIGNAL = 1.2; EXPRESSED IN HELA, SIGNAL =   1; EXPRESSED IN ADULT LIVER, SIGNAL = 2.6; EXPRESSED IN BRAIN, SIGNAL = 1.1; EXPRESSED IN HEART, SIGNAL = 1.4; EXPRESSED IN BONE MARROW, SIGNAL = 1.5; EXPRESSED IN PLACENTA, SIGNAL = 4.8; EXPRESSED IN FETAL LIVER, SIGNAL = 2.4; EXPRESSED IN HBL100, SIGNAL = 1.8
acagattaggcaggagagcggccatggagaaacagactggtgaggctgcagacgtttgctcatctttgttttgacgcctcttgtcccaagcctcagccttctcctgctttccttgaccttcctgctgttccctcattgtctccagcagcctgcctcagagagtgtccccttcccccagcgtcgttctcaccttacccctgtgcacctttgcctggcaggggaggtgggctttgagccctgctatgccgaagtgctgagggtggtacgaggaaaacttcaccagccagaggaggtccagagaggttccttctatgctttctcttactattatgaccgagctgttgacacagacatgattggtgagttcaccccaggtgtcagtccagagaggaaggtggatagggctgtggtggggaaggtcaaggagaaagagcacttgaggtgctttgtcggggtgatta

SEQ ID NO: 724 - DNA, 485 bp, Homo sapiens
  MAP TO AC005476.3; EXPRESSED IN HELA, SIGNAL = 2.8; EXPRESSED IN ADULT LIVER, SIGNAL = 2.8; EXPRESSED IN HEART, SIGNAL = 2.3; EXPRESSED IN BT474, SIGNAL = 2.3; EXPRESSED IN BONE MARROW, SIGNAL =   3; EXPRESSED IN FETAL LIVER, SIGNAL = 2.5; EXPRESSED IN BRAIN, SIGNAL = 2.8; EXPRESSED IN PLACENTA, SIGNAL = 2.2; EXPRESSED IN HBL100, SIGNAL = 2.1; EXPRESSED IN LUNG, SIGNAL = 3.6
catttcagacttctgacctccagaaatgtaaggtaataaaatggtggtgttttaagctacaaatttcatgataatttgttatagcagtaataggagactaatagtgtttaatcaggtatgtaagctctttgtagtcataatgtgtgtcttgtttgctcttaaatccctataatttaatacagttcctgacaaaaataggcactccataaatgtgcaatgaaagaatgaagtttaacagcaaagcagaatcagggctcccattctgatggagtggaaaatcccttacctggctttctggctcagaaagcaccttgatattaggaagcctttgtgagccttctgagccgtgaagttataggggtatagggtagaggcaatccaggtcttatgcaccaatgtcagctagagagaatgaggacaagtcacaagggccttgtgtgatatattcaggacttgggctttattctgtaggcaatagggagcca

SEQ ID NO: 725 - DNA, 482 bp, Homo sapiens
  MAP TO AC005300.9; EXPRESSED IN BONE MARROW, SIGNAL = 5.4; EXPRESSED IN FETAL LIVER, SIGNAL = 5.1; EXPRESSED IN PLACENTA, SIGNAL = 6.8; EXPRESSED IN HEART, SIGNAL = 3.7; EXPRESSED IN BRAIN, SIGNAL = 5.4; EXPRESSED IN ADULT LIVER, SIGNAL = 3.5; EXPRESSED IN HELA, SIGNAL =   5; EXPRESSED IN LUNG, SIGNAL = 7.4; EXPRESSED IN HBL100, SIGNAL = 7.1; EXPRESSED IN BT474, SIGNAL = 7.7
tgttgggattatattttctttggatttctctattttctatttaaagattgccctatcagaatcccatcttcatttttttgttctttctgacataggttttcaagggacatgagtgacccgaggatggtgttgagcctctctttgtaagggttgtttctttgttactcacgtactggtaattatcttaccatctctgcagagcccacccacctttgggttcctgttggacatcgatggagtgcttgtgcggggccacagagtgatccctgctgctctgaaagccttccgaaggctggtgaactcccaggggcagctgcgggtgcccgtggtttttgttacaaatgctgggaacatcttacaacacagcaaagcccaggagctgtcagccctgctggggtgcgaggtgagaaggcagccagaggcatggaagcccaaggacctggttcctaatggagccgctgccccagctccaagtccctttc

SEQ ID NO: 726 - DNA, 457 bp, Homo sapiens
  MAP TO AC005300.9; EXPRESSED IN HBL100, SIGNAL = 3.7; EXPRESSED IN FETAL LIVER, SIGNAL = 5.5; EXPRESSED IN LUNG, SIGNAL = 5.8; EXPRESSED IN HELA, SIGNAL = 4.1; EXPRESSED IN BRAIN, SIGNAL = 5.1; EXPRESSED IN PLACENTA, SIGNAL = 4.1; EXPRESSED IN HEART, SIGNAL = 3.6; EXPRESSED IN ADULT LIVER, SIGNAL = 3.6; EXPRESSED IN BONE MARROW, SIGNAL = 5.9; EXPRESSED IN BT474, SIGNAL = 3.3
agaagtgacccgatgtttgcagtgctgatgaaacatgaggaggagcataaggactggctctgttccttatgtctccttgtgactctgcccagaagtcatccccatactggggagatagtgatgggaagatgaagggagctgatggggctcaaggtctcacctcacttgtgactactctttttagggatcagagttcatctttctcccttccctcctattgcgcaggtgctgaaactggtgtctgacttgaggaaccaccctgtagccactctgatggccactgggcaccccatggtgatcagctctgatgacccagctatgtttggtgccaaaggcttgtcctatgatttctatgaggtcttcatgggcattggggggatgaaggctgacctgaggaccctcaaacagctggccatgaactctatcaagtgagtgtcctgtgtcctcccaggtcccc

SEQ ID NO: 727 - DNA, 474 bp, Homo sapiens
  MAP TO AC005280.2; EXPRESSED IN FETAL LIVER, SIGNAL = 3.9; EXPRESSED IN LUNG, SIGNAL = 4.5; EXPRESSED IN ADULT LIVER, SIGNAL = 2.9; EXPRESSED IN BRAIN, SIGNAL = 4.3; EXPRESSED IN PLACENTA, SIGNAL = 5.9; EXPRESSED IN HBL100, SIGNAL = 4.5; EXPRESSED IN HEART, SIGNAL = 3.4; EXPRESSED IN BT474, SIGNAL = 5.3; EXPRESSED IN BONE MARROW, SIGNAL = 6.4; EXPRESSED IN HELA, SIGNAL = 3.6
gctgggagagggataacaggaagcctcccctataatagtaactttgaagatgagatctgtaggagaggcaggagctagcaaatggaatccaacttagggtaaacctatgctatttgtatgagttccccaaaacttaaagttaaacccaaagttgcctcttcatataaaccctccaaagtaactaataggctatgccagctacagtgcagccaactctacttccgtacaacgtgatgctactttggaaaagtgtgaaatcctacttaagtggaaggtgtaattattgcagagtatttcagggaggaagatggcaccagggaaataggcatgaaaatcaggttcttctattatttccacaacctggtctaattctccatgcccttgggatggcctgggtctgtgataggaaatatgtttttctgtctctatttgagcaacaacatccttcttatcagctgctccaatgaggaagac

SEQ ID NO: 728 - DNA, 489 bp, Homo sapiens
  MAP TO AC005100.2; EXPRESSED IN LUNG, SIGNAL = 1.3; EXPRESSED IN HELA, SIGNAL = 1.3; EXPRESSED IN ADULT LIVER, SIGNAL = 1.2; EXPRESSED IN BRAIN, SIGNAL = 1.4; EXPRESSED IN HEART, SIGNAL = 1.6; EXPRESSED IN PLACENTA, SIGNAL = 1.2; EXPRESSED IN BT474, SIGNAL = 1.1; EXPRESSED IN BONE MARROW, SIGNAL = 1.3; EXPRESSED IN HBL100, SIGNAL = 1.1; EXPRESSED IN FETAL LIVER, SIGNAL = 1.3
atgccatgctttttaggaggtataaacaatttcttccaacatgtgcttaaaagatagtcttggacaatttgttatcatcattattaatataattactagattttccatagtatgctattatggactgaatgcttgtgttatccccagtttcacatgtagaagccaaatccccagtgtaatggtgtttggaggtgggaactttgggaggtaattaggtcatgagggcagaaccctcatgaatgggatggtgctcttgtaagaggatacgtgagagagcttgcttactcttcctctctgctatcagccagaggagggcacaaggagaagatggccatctgcaaacccagaaatgaggcctcaccagacactggatccatgagcaccttgatcttggactctccagcctccagaactgtgagaaataaatgtttgttgtttaatccacctagtctatggtatatttattacagcagcctgaactgactaaga

SEQ ID NO: 729 - DNA, 477 bp, Homo sapiens
  MAP TO AC005100.2; EXPRESSED IN FETAL LIVER, SIGNAL = 0.77; EXPRESSED IN LUNG, SIGNAL = 0.74; EXPRESSED IN HELA, SIGNAL = 0.76; EXPRESSED IN ADULT LIVER, SIGNAL = 0.81; EXPRESSED IN HEART, SIGNAL = 2.2; EXPRESSED IN PLACENTA, SIGNAL = 0.78; EXPRESSED IN BT474, SIGNAL = 0.7; EXPRESSED IN BRAIN, SIGNAL =   1; EXPRESSED IN HBL100, SIGNAL = 1.6
ttgcttaccaaaggacccagctgactgacttcacccctgctgcaagtgaggttcatcgtttgtatctgtctgttgttggaagactcagggagacagacacctcaggactgaggaggagagagaggatgtgccaaggctaacagggtagcaggtatctaagagttttgtttacaaattttcacattgctaagtttaattttaaacttttaagttaaatcttaaagtgtatctatttttgatgtgtaaaaagtattcatcaagtataaatatgcttgccaaagagaagactggagaacacaaataagtgcagagatgatgatgatgatgatgatgatgatgatgatgatgatgatgttagaaagttccaaagggttgagatattttacacaattaatcagagaggctccagctacctcaatacagaggcttagggaatcagaatgttggccctataagtggcttgtaaagtgatagcca

SEQ ID NO: 730 - DNA, 471 bp, Homo sapiens
  MAP TO AC005076.2; EXPRESSED IN PLACENTA, SIGNAL = 1.1; EXPRESSED IN BT474, SIGNAL = 1.5; EXPRESSED IN BONE MARROW, SIGNAL = 1.1; EXPRESSED IN HBL100, SIGNAL = 1.2; EXPRESSED IN FETAL LIVER, SIGNAL = 1.5; EXPRESSED IN LUNG, SIGNAL = 1.4; EXPRESSED IN HELA, SIGNAL = 2.4; EXPRESSED IN ADULT LIVER, SIGNAL =   2; EXPRESSED IN HEART, SIGNAL = 1.6; EXPRESSED IN BRAIN, SIGNAL = 0.91
tggagaacactgatagtccttggtgtgaactgtttaaagagttatgcaaaataaatgcatttgacactcctgattcattggtcatgagaggcaaggtgtttagtggctctatacataatatctttgaccgtatgtggacaaccaaggaacataatgaagctagttggttgctcctaagttcagtggacaatgatgaaagaaaatgatgaactcagggattctatctcctggtctcagaagcagatactgagcctcaaatctgctaagactgccctgagtgagagtcttatcttcggtagagaaagagctgaaattgtggaaaaacagacacaagctcttatcatgcaagtggctgacctgcaacagaaggtgcatgcacagcctcaccaggtatctactgtaaaagtgagggcattgattggaaaagaatggaaccctgcaacttggaatggggatgtgctagaggacctg

SEQ ID NO: 731 - DNA, 475 bp, Homo sapiens
  MAP TO AC005067.2; EXPRESSED IN PLACENTA, SIGNAL = 1.5; EXPRESSED IN FETAL LIVER, SIGNAL = 2.6; EXPRESSED IN HELA, SIGNAL = 2.3; EXPRESSED IN ADULT LIVER, SIGNAL = 3.2; EXPRESSED IN BRAIN, SIGNAL = 2.5; EXPRESSED IN HEART, SIGNAL = 1.7; EXPRESSED IN BONE MARROW, SIGNAL = 1.3; EXPRESSED IN LUNG, SIGNAL =   2; EXPRESSED IN BT474, SIGNAL = 1.7; EXPRESSED IN HBL100, SIGNAL = 1.5
ggctttgcagggttcaatccgaggctgctctcacagcctgtggcttttccagggacaggttgtaagatgctggtggatctaccattccggggtctggaggacagtggcccccttcccacagctccactaggcagtgccccagtgagaactctgtatggggcctccagtcccacattcctctcctaccagaggttctcggtaaggggtctgcccctttcccaggctttcccatacatcctctgaaatctaggtggaggctgccaagcctccctcactcttgcattctgtccacccacaggctcaccaccacattgaagcggccaaggctcatggctttcaccctctagtgtggcagcctgagctgtatctgggcccctttgagccaaggctggaagctgaatggccagggatgtgaggagcagtgtcctgaggctgtccctggcactgggcctgaaccacaaagcattcttccctc

SEQ ID NO: 732 - DNA, 446 bp, Homo sapiens
  MAP TO AC005067.2; EXPRESSED IN PLACENTA, SIGNAL = 5.5; EXPRESSED IN HEART, SIGNAL = 1.4; EXPRESSED IN BT474, SIGNAL = 4.6; EXPRESSED IN BRAIN, SIGNAL = 1.3; EXPRESSED IN ADULT LIVER, SIGNAL =  16; EXPRESSED IN HELA, SIGNAL = 3.9; EXPRESSED IN LUNG, SIGNAL =   3; EXPRESSED IN FETAL LIVER, SIGNAL =  12; EXPRESSED IN HBL100, SIGNAL = 2.3; EXPRESSED IN BONE MARROW, SIGNAL = 1.2
ctggtgtcattttcgcagtgcttcctgtgaaggtcatataaacagcagatagaaaagggccttataaaccccacataagagatgattaagggagagctcaagcacaatctagcaagaaggcaaaacccaagagtcaccccaaaatgctacaaggagccttgcttctttcagcctgaggcccgcatgcaggacactgcttggagtggtgacagaagagggacagagagaggaggctgagaggcggcacttacaatgtctgaattttggtgaactcggggacttcttcttttttctttctgaagaggaaccagtaggttaggagacccacgatgagcgaaaacagaatcatgtccgtcatgctgaaaagagatacttcttcggccaccgcctcggacacggtggagctggtgtccacgtgggagtctcccatgttgatcatgaaactg

SEQ ID NO: 733 - DNA, 465 bp, Homo sapiens
  MAP TO AC005060.2; EXPRESSED IN BONE MARROW, SIGNAL = 3.2; EXPRESSED IN ADULT LIVER, SIGNAL = 3.4; EXPRESSED IN PLACENTA, SIGNAL = 2.8; EXPRESSED IN BT474, SIGNAL =   3; EXPRESSED IN FETAL LIVER, SIGNAL = 3.4; EXPRESSED IN LUNG, SIGNAL =   5; EXPRESSED IN HELA, SIGNAL = 3.3; EXPRESSED IN BRAIN, SIGNAL = 3.7; EXPRESSED IN HEART, SIGNAL = 3.4; EXPRESSED IN HBL100, SIGNAL =   3
ttagactccagagcctgtgctctaaatcatgtaccctattgctataacatatctaccttctatcctaaattggtctgtatgcatttctctctctatacatatcactttacagatccctaagagatgaagttaatatatcataaagatggttaacacatcatatagttaacatatcataaagttctgactgtttttctctttaaatgttacgatggtgataacagtcttcattttacctttccagcatgcttaagttcttgcttatctttgttggcaaatccagtcattgctgcggtttcaatcattcctgtcacggcaagtactggagcaatactcagaatcaggaatgtcatctcccatccatatataaaggaaatgataactgaaagtcccatgttagttgcattttgtgttaagacgccaatcctggaacctgttgcctataatcagacatattttggggga

SEQ ID NO: 734 - DNA, 434 bp, Homo sapiens
  MAP TO AC005060.2; EXPRESSED IN HELA, SIGNAL =  79; EXPRESSED IN ADULT LIVER, SIGNAL =  36; EXPRESSED IN BT474, SIGNAL =  33; EXPRESSED IN HEART, SIGNAL =  25; EXPRESSED IN PLACENTA, SIGNAL = 9.4; EXPRESSED IN BONE MARROW, SIGNAL =  21; EXPRESSED IN FETAL LIVER, SIGNAL =  51; EXPRESSED IN LUNG, SIGNAL =  70; EXPRESSED IN BRAIN, SIGNAL =  23; EXPRESSED IN HBL100, SIGNAL =  24
cctgtgactgttcacgaaagcttgtagtagcattctgtactattttaaaaggggcatacaggacataaagagggtttacttgttataatacaggacattaagatttgcttgttacctggagggtgaaaatataaattttattttcctattattcttttgcttttcttttttttttcaactcatttggcttcattctggactatccttatacatttagaacactagtactactctaccttatgaaaaacctacatttacctagcttccaagaaaaaaatgttatgccgatgattgctgatcaacctctccactttctttctaatattaatgctgtaaaaaaggagatatctaaaaaaaaatctcatatctgtttattatatttttgcagttgagactctataattaagttttgctcttacaaattctgttcctca

SEQ ID NO: 735 - DNA, 478 bp, Homo sapiens
  MAP TO AB023056.1; EXPRESSED IN LUNG, SIGNAL = 2e+02; EXPRESSED IN PLACENTA, SIGNAL =  36; EXPRESSED IN HBL100, SIGNAL = 1.4e+02; EXPRESSED IN FETAL LIVER, SIGNAL =  55; EXPRESSED IN BRAIN, SIGNAL =  20; EXPRESSED IN BT474, SIGNAL =  17; EXPRESSED IN BONE MARROW, SIGNAL =  95; EXPRESSED IN HELA, SIGNAL =  73; EXPRESSED IN ADULT LIVER, SIGNAL =  32; EXPRESSED IN HEART, SIGNAL =  44
ttcttcctgcacatcacagcagaaaccacagctccagtgactacagctccaaggagaaccaggccagcaacgatacccacgatggggatggtgggctgagaagactgctctgggaaaaaaggggaaggtgagcgtccctgaccctcagcccccagcaccgaccctgctgaagttctccagagaggctcctgctttcctaagagacatgaccccccctccactcatctcctgccttaccccatctcagggtgaggggcttgggcaacccctcatgctgcacatggcacgggtatctctgttcctctccagaaggcaccaccacagctgcccacttctggaaggttccatcccctgcaggcctggtctctagaagctccatgtcccgagtctggtcctctccatcctgctgccaggccagtgtgatctccacagggtagaagcccagggcccagcacctcagggtggccttatagtcaga

SEQ ID NO: 736 - DNA, 465 bp, Homo sapiens
  MAP TO AB023057.1; EXPRESSED IN PLACENTA, SIGNAL = 5.6; EXPRESSED IN BT474, SIGNAL = 2.4; EXPRESSED IN BONE MARROW, SIGNAL =  23; EXPRESSED IN HBL100, SIGNAL =  23; EXPRESSED IN LUNG, SIGNAL =  27; EXPRESSED IN ADULT LIVER, SIGNAL =   7; EXPRESSED IN BRAIN, SIGNAL = 5.1; EXPRESSED IN FETAL LIVER, SIGNAL = 7.9; EXPRESSED IN HELA, SIGNAL =  18; EXPRESSED IN HEART, SIGNAL = 8.9
atgaggaaagcagatgtgggtcctggaccaaccgcccttctgaggtctgtcctcggggaccttcccctgtgacttgtgactgctgggatcaggtcccatcaccacagtcatcaaggtgataaatctgtccctcattgtaacaggtgctttacaaaagagtaagtgctggcacacagggcccaggctgggtaggcccatgagtgtggatggtgcttcccagtaaccaggcagggcacttctacctggggcttggaactctcagtgagacaagaaatctcagaccacactcctcaccccttccttacctgagctcttcttcctccacattacagcagcgaccacagctccagtgaccacagctacaagtagaaccaggccagcaacgatgcccacgatggggatggtgggctgggaagatggctctgggaaaaggggggaaggtgagggaccctgaccctgctaaag

SEQ ID NO: 737 - DNA, 466 bp, Homo sapiens
  MAP TO AB023057.1; EXPRESSED IN LUNG, SIGNAL =  41; EXPRESSED IN HELA, SIGNAL =  24; EXPRESSED IN ADULT LIVER, SIGNAL = 8.6; EXPRESSED IN HEART, SIGNAL = 6.7; EXPRESSED IN PLACENTA, SIGNAL =  11; EXPRESSED IN BT474, SIGNAL = 4.2; EXPRESSED IN FETAL LIVER, SIGNAL =  12; EXPRESSED IN BRAIN, SIGNAL = 3.6; EXPRESSED IN BONE MARROW, SIGNAL =  30; EXPRESSED IN HBL100, SIGNAL =  34
tgtcaccccttccttacctgagctcttcttcctccacagcacagcagcgaccgcagctccagtgactacagctgcaaggacaaccagaccagcaacgatacccatgatggggatggtgggcagggaagactgctctgggaaaggaggtgaaggtgagggtctctgacccccaggcctcaccaccgaccctgttaaaggtcttcagagaggctcctgctttccctaacagacatgatgcctccatctccctccttactccatctcagcatgaggggctccggcagcccctcatgctgcacatggcacgtgtatctctgctcctctccagaaggcaccaccacagctgcccacttctggaaggttccatcccctgcaggcctggtctccacgagctccacgtcctgggtctggtcctccccatcccgctgccaggtcagtatgatctccgcagggtagaagcccaggg

SEQ ID NO: 738 - DNA, 466 bp, Homo sapiens; identical to SEQ ID NO: 737
  MAP TO AB023057.1; EXPRESSED IN LUNG, SIGNAL = 2e+02; EXPRESSED IN HELA, SIGNAL = 1e+02; EXPRESSED IN ADULT LIVER, SIGNAL =  27; EXPRESSED IN HEART, SIGNAL =  33; EXPRESSED IN PLACENTA, SIGNAL =  25; EXPRESSED IN BT474, SIGNAL =  13; EXPRESSED IN BONE MARROW, SIGNAL =  69; EXPRESSED IN FETAL LIVER, SIGNAL =  53; EXPRESSED IN HBL100, SIGNAL = 1.1e+02; EXPRESSED IN BRAIN, SIGNAL =  18

SEQ ID NO: 739 - DNA, 439 bp, Homo sapiens
  MAP TO AB023057.1; EXPRESSED IN PLACENTA, SIGNAL = 1.2; EXPRESSED IN LUNG, SIGNAL = 3.1; EXPRESSED IN ADULT LIVER, SIGNAL =   1; EXPRESSED IN BONE MARROW, SIGNAL = 2.1; EXPRESSED IN HBL100, SIGNAL = 1.8; EXPRESSED IN FETAL LIVER, SIGNAL = 1.5; EXPRESSED IN HELA, SIGNAL = 1.5; EXPRESSED IN BRAIN, SIGNAL = 1.1; EXPRESSED IN BT474, SIGNAL = 0.87; EXPRESSED IN HEART, SIGNAL = 1.1
tggagggtatgagaacctggccccaccccttcggtcagccccgcccaccgagcctcgccctcgcccggacccacccgcagggattttggtaaaggcgcctggggttctcccaggtagagggtctgggcgggtcccgcggcctcggggtggatcccagacccggagactcgggagtacccggggcgtccgtggggcatggaggtggggggtcgtgatctgcgccctgggccggggttactcactggcctcgctctggttgtagtagccgcgcagggtctgcaggttcattctgtcagtctgtgcgtgggccttggtgttccgtgtctcctcttcccaatactctggcccctcctgctccacccacggcgcccgcggctccatcctcggacacgccgagtcgctgtcgaaccgcacgaactgcgtgtcgtccacgtagccc

SEQ ID NO: 740 - DNA, 482 bp, Homo sapiens
  MAP TO AC003666.1; EXPRESSED IN FETAL LIVER, SIGNAL = 0.72; EXPRESSED IN HEART, SIGNAL = 2.4; EXPRESSED IN BRAIN, SIGNAL = 2.4; EXPRESSED IN ADULT LIVER, SIGNAL = 0.65
ttgggtttaaagcctttttccttacagtgtgacgtggggaccagcaatatcggcgttaatggggaacttgtgagggatgtagtatcggatcccacccaagacctgctcaatcagaatctgcttttgagccagacccctgggtgacccagagacatgtgaaagcttgagagcccctggcttaatgcacatcacctcaaaaatcttggataatgttaggggtacaaaggatgccattcggctcttggtaaaatgtgagcttccctctctttactcacttattgcgagaatcagttccctcctctgggcaaatccaatgaggcgctcggagtctctggagaccaccacggggaagccgttgtagtcggtctccttgatgagcgtctccacgtcctcgacagtcatgctgtcctgggtgagcaccgacagtggcggctctccccgccggggccgcatgacgtcggtggccagtgtgcggtgagtaa

SEQ ID NO: 741 - DNA, 469 bp, Homo sapiens
  MAP TO AC003666.1; EXPRESSED IN HBL100, SIGNAL = 0.93; EXPRESSED IN FETAL LIVER, SIGNAL = 2.9; EXPRESSED IN LUNG, SIGNAL = 2.5; EXPRESSED IN ADULT LIVER, SIGNAL = 1.4; EXPRESSED IN BRAIN, SIGNAL = 0.97; EXPRESSED IN PLACENTA, SIGNAL = 2.5; EXPRESSED IN BT474, SIGNAL = 0.63; EXPRESSED IN HEART, SIGNAL = 0.81; EXPRESSED IN HELA, SIGNAL = 0.77
tttgcatggagcactttttgcgtagtgctgtgattttgaggaccgcatacatcacgttatagcagaacctcctccctaagccaagtgtcacatggggtggtagaaaagcaacaccaagcccttctcctgtggctccacccctttttactcaacctccctcagcccaggcagcagtccagcctggaccacccccttctctggctgcacggctgcccagccctcagtcccaagctccctgtacatttcctcctcaacacattcaccacagcttactgccattctctgtcaaggactattccaccccatggccctccacattcttcagggctgagaccatgtctcactcatctttttctccctaggtcattctggccacatgtccggctactcacccgctccgcgtcaccaggcactgccgaagccccagtttccggaagatatccaccaccgtttccatcggagtgtggtc

SEQ ID NO: 742 - DNA, 485 bp, Homo sapiens
  MAP TO AC004480.7; EXPRESSED IN BT474, SIGNAL = 6.9; EXPRESSED IN HEART, SIGNAL = 3.7; EXPRESSED IN PLACENTA, SIGNAL = 3.7; EXPRESSED IN BRAIN, SIGNAL = 7.8; EXPRESSED IN ADULT LIVER, SIGNAL = 4.5; EXPRESSED IN HELA, SIGNAL =   7; EXPRESSED IN LUNG, SIGNAL =   3; EXPRESSED IN FETAL LIVER, SIGNAL = 4.9; EXPRESSED IN HBL100, SIGNAL = 8.1; EXPRESSED IN BONE MARROW, SIGNAL = 6.1
gaaggcgtgaccgtaaaggggcccggctctgtcgtgaaagggccgcaaaaaggccgagggcgagttgacggctgcgactccattttgtaggccgcttatttgtgtgcatccacggcgattcttcccgcagagttgtgaagcgaaaggcttacaattaaaaggaagaaaaaaaaataaagataattcgggagtacaattgacaaagcgtgtgggtcgctcagcctccagcagtaactgctgatctccagttcttggagggttccggtgagaagaacgcccctactgcggtactgaggaagcggcaggaggagatgcggcccctggacatagacgaggtggaagcgcctgaggaagtggaggtgctggagcccgaggaggatttcgagcagttcctgctcccggtcatcaacgagatgcgcgaggacatcgcgtctcttatacgcgagcacgggcgggcgtacctgcggaccaggagcaagctgtgg

SEQ ID NO: 743 - DNA, 453 bp, Homo sapiens
  MAP TO AC004876.2; EXPRESSED IN BT474, SIGNAL = 0.77; EXPRESSED IN BONE MARROW, SIGNAL = 0.88; EXPRESSED IN HEART, SIGNAL = 1.5; EXPRESSED IN BRAIN, SIGNAL = 1.1; EXPRESSED IN ADULT LIVER, SIGNAL =   2; EXPRESSED IN LUNG, SIGNAL = 8.4; EXPRESSED IN HBL100, SIGNAL =   3; EXPRESSED IN PLACENTA, SIGNAL = 8.9; EXPRESSED IN HELA, SIGNAL = 1.8; EXPRESSED IN FETAL LIVER, SIGNAL =  20
ctagcccaaagaaagggttgggatctgagacttttgaagaaaggaaggagatacagaaaagagatttcatcctggaatgaaatctccctccagagagccctgggaaagcacggtagcccccatccatcagagtggagccccttgtgggggaagtgggctcggctgggaaccctcaattcagcataagcctcacatgtcctctcctctctgtcccggtgcagacaagggcatggcccccgccctccggcatctgtacaaggagctcatggggccatggaacaaggatgagatcagcaccacagacgcgatcttcgtccagcgggatctgaagctggtccagggcttcatgccccacttcttcaggctgttccggagcacggtcaagcaagtggacttttcagaggtggagagagccagattcatcatcaatgactgggtgaagacacacacaaa

SEQ ID NO: 744 - DNA, 484 bp, Homo sapiens
  MAP TO AC004887.2; EXPRESSED IN LUNG, SIGNAL = 4.9; EXPRESSED IN HEART, SIGNAL = 4.5; EXPRESSED IN PLACENTA, SIGNAL = 5.3; EXPRESSED IN BT474, SIGNAL = 4.2; EXPRESSED IN BONE MARROW, SIGNAL =   5; EXPRESSED IN HBL100, SIGNAL = 4.9; EXPRESSED IN FETAL LIVER, SIGNAL = 5.2; EXPRESSED IN ADULT LIVER, SIGNAL = 5.7; EXPRESSED IN BRAIN, SIGNAL = 7.3; EXPRESSED IN HELA, SIGNAL = 5.6
aattacctccctctgggtccctcccatgatacatggggattattacaattcaaggtgagatttgggtggggacacagagccaaaccatatcagataaagagtgagttattatgagatctggttgaaagtgtgcagcacctcctgctctcagtctcctgctcctgccctggccatgcgatgacatgcctgctccaccttcatcttctgaagcttcctgaggcctccctagaagctgagcagatgccagcaccatgcttcctgtacagcctacagaaaagggagccaattaaacctcttttctttataaattacccagtcttgggtatttctttatagcaacacaataatggccttatacaagaggagaatgaggaggatgagtaagaggaggaggaggaaagttaggaggaggaggagagggaagatgaaaaggaggaggagaaggaggaagaggaaaattaggaggaggaggaggagacaaagg

SEQ ID NO: 745 - DNA, 460 bp, Homo sapiens
  MAP TO AC004890.2; EXPRESSED IN ADULT LIVER, SIGNAL = 1.3; EXPRESSED IN BT474, SIGNAL = 2.3; EXPRESSED IN HBL100, SIGNAL = 1.7; EXPRESSED IN HELA, SIGNAL =   1; EXPRESSED IN HEART, SIGNAL = 0.78; EXPRESSED IN PLACENTA, SIGNAL = 0.96; EXPRESSED IN BONE MARROW, SIGNAL =   2; EXPRESSED IN FETAL LIVER, SIGNAL = 1.1; EXPRESSED IN LUNG, SIGNAL =   1
gcctctgagggacaagtgacttttactcagttgggtagctatcccctcccacctccagttggcgagcaggtgttctcatgccaccactgtggcaagaatctcagccaagacatgttgctgacccaccaatgtagccatgctactgagcaccccttaccctgtgcccagtgccctaagcactttactccacaggcggacctcagcagcacctcccaggaccatgccagcgagacaccccccacctgcccacactgtgccaggacttttactcacccatcaagacttacctaccatcttcgggtccataacagcactgagcgtcctttcccctgtcctgattgccccaagcgctttgctgaccaggctcgactcaccagccaccggagagctcatgcaagcgaaaggcccttccgctgtgcccagtgcggcaggagcttcagcttgaaaatcagcctcctgc

SEQ ID NO: 746 - DNA, 461 bp, Homo sapiens
  MAP TO AC004890.2; EXPRESSED IN HBL100, SIGNAL = 1.4; EXPRESSED IN FETAL LIVER, SIGNAL = 1.8; EXPRESSED IN LUNG, SIGNAL = 1.3; EXPRESSED IN HELA, SIGNAL =   2; EXPRESSED IN BRAIN, SIGNAL = 1.4; EXPRESSED IN BT474, SIGNAL = 3.7; EXPRESSED IN BONE MARROW, SIGNAL = 0.86; EXPRESSED IN PLACENTA, SIGNAL = 2.1; EXPRESSED IN HEART, SIGNAL = 1.1; EXPRESSED IN ADULT LIVER, SIGNAL = 1.1
ttattcctggggtgcttctgaaattcacagatgtttgtttggtcctgaagaaaccaaaggtactagaatgtgatcttttttgttggtcttcttccactttgcagcaggtggggtcatgatcaaacaggagctacagtatacacaggaaggccctgcggatcttcctggagagttctcatgcattgctgaagagcaggctttcctgagcccagagcagaccgaactctggggtggtcagggcagttctgtcctcttggaaacaggtcctggggactctactctagaggagcctgttggtagtagagttcctagcagcagcagaactgtgggctgcccgaagcagaaatctcataggcaggtacagctggaccaggaatgtgggcagggcctgaagctgaaaaaggacacttcccgcccctacgaatgttctgagtgtgagatcaccttccgctataagcagc

SEQ ID NO: 747 - DNA, 463 bp, Homo sapiens
  MAP TO AC004890.2; EXPRESSED IN HELA, SIGNAL = 2.4; EXPRESSED IN BT474, SIGNAL = 4.4; EXPRESSED IN LUNG, SIGNAL = 1.3; EXPRESSED IN ADULT LIVER, SIGNAL = 1.5; EXPRESSED IN BRAIN, SIGNAL = 1.9; EXPRESSED IN HEART, SIGNAL = 0.81; EXPRESSED IN PLACENTA, SIGNAL = 2.4; EXPRESSED IN BONE MARROW, SIGNAL =   3; EXPRESSED IN FETAL LIVER, SIGNAL = 2.4; EXPRESSED IN HBL100, SIGNAL = 4.6
tagttgacccctgttcccagctgacttccccggctcacacaaggtctcatcctgggttgtcgctttctccctctgcatacaggctcaagaatgggacatggacgcccggcggccaatgccttttcagttcccaccctttccagatagggcacctgtcttccccgaccgcatgatgcgagagccccagttgcccacagcagagatctcactctggactgtggtggctgccattcaggctgtggagaggaaggtggatgcccaggccagccagctgctgaacctggaggggcgcacggggacagccgagaagaagctggccgactgtgaaaagacggccgtggaatttgggaaccacatggagagcaagtgggccgtgctggggaccctgctgcaggagtacgggctgctgcagaggcggctggagaacttggagaacttgctgcgcaacaggaacttctgggtc

SEQ ID NO: 748 - DNA, 397 bp, Homo sapiens
  MAP TO AC004890.2; EXPRESSED IN PLACENTA, SIGNAL = 3.6; EXPRESSED IN BT474, SIGNAL = 8.3; EXPRESSED IN FETAL LIVER, SIGNAL = 3.3; EXPRESSED IN LUNG, SIGNAL = 2.3; EXPRESSED IN ADULT LIVER, SIGNAL = 2.2; EXPRESSED IN BONE MARROW, SIGNAL = 1.8; EXPRESSED IN HBL100, SIGNAL = 5.1; EXPRESSED IN HELA, SIGNAL = 2.8; EXPRESSED IN BRAIN, SIGNAL =   3; EXPRESSED IN HEART, SIGNAL = 2.2
aaagaaactagataactctgagcactgatacacttgaacactgctttctttacttgatgtttggaagtgacattgaccctgtgtctttaatccatcagcacaggagaaaacgacgctccacacctttaacttcttccacacttccttcacaagcaacagagaaaagctcctattttcagaccaccgagatttcactctggacggtggtggccgctattcaggctgtggagaagaagatggagtcccaggctgcccggctacagagcctggaggggcgcacggggacagccgagaagaagctggctgactgcgagaagatggccgtggagttcgggaaccagctggagggcaagtgggccgtgctggggaccctgctgcaggagtatgggctactgca

SEQ ID NO: 749 - DNA, 455 bp, Homo sapiens
  MAP TO AC004936.2; EXPRESSED IN BONE MARROW, SIGNAL = 3.2; EXPRESSED IN ADULT LIVER, SIGNAL = 4.6; EXPRESSED IN BRAIN, SIGNAL = 6.2; EXPRESSED IN PLACENTA, SIGNAL = 3.7; EXPRESSED IN BT474, SIGNAL = 3.3; EXPRESSED IN HBL100, SIGNAL = 3.8; EXPRESSED IN LUNG, SIGNAL = 3.5; EXPRESSED IN HELA, SIGNAL = 4.9; EXPRESSED IN FETAL LIVER, SIGNAL = 3.5; EXPRESSED IN HEART, SIGNAL = 4.5
aggtaagtttcttcagccagcttaaatttctcctcagaaaataggtttttcttttctgttgcatcatcaagctgcaaattttctgaacttttaagctgtttcccttttaaaactgattgcctttaacagcactcaagacaactcttgaatactttgctgcttagaaattccttccaccacataccctaaatcatcttcctcaagttcaaagtttcacaaatgtctaagtcaggggcaaaatgctgccagtctctttgcaaaaacatagcaagagtcacctttactccagttcccaacaagttcctcatctccatctgagaccacctcagcctggatttcattgtccatatcattatcagcattttggtcaaagccattcaacaagtctctagggagttccaaactttcccacatcttcctatcttcttctgagccctccagatggtttcagcctc

SEQ ID NO: 750 - DNA, 354 bp, Homo sapiens
  MAP TO AC004936.2; EXPRESSED IN HBL100, SIGNAL = 1.1; EXPRESSED IN HELA, SIGNAL = 1.9; EXPRESSED IN ADULT LIVER, SIGNAL = 2.5; EXPRESSED IN HEART, SIGNAL = 0.98; EXPRESSED IN PLACENTA, SIGNAL = 0.96; EXPRESSED IN FETAL LIVER, SIGNAL = 1.4; EXPRESSED IN LUNG, SIGNAL = 1.4; EXPRESSED IN BONE MARROW, SIGNAL = 0.81; EXPRESSED IN BT474, SIGNAL = 1.2
ccacttgttattttcttttgtttcactttttgttgtttcctttcttcctctaactttgagcttacctttttcttctttttatagttccttggggtataaagtcaggttgtttacttgaaacatatttttcattttaaggtagggttatcccaataaacttccttcttaggactgcttttgatgcatcccattagttttggtctattgtgttctcatttttatcttcttttttagtttttggttttagttgtttctctttttttttaattttctttttgatttcttcatgacagtgattggtcaagaagatgttgtttactttccagatatttgcgaattttccaatctttcttc

SEQ ID NO: 751 - DNA, 451 bp, Homo sapiens
  MAP TO AC004967.2; EXPRESSED IN BT474, SIGNAL = 2.6; EXPRESSED IN BONE MARROW, SIGNAL = 1.2; EXPRESSED IN ADULT LIVER, SIGNAL = 2.2; EXPRESSED IN HEART, SIGNAL = 1.7; EXPRESSED IN PLACENTA, SIGNAL = 1.5; EXPRESSED IN LUNG, SIGNAL = 1.5; EXPRESSED IN HBL100, SIGNAL =   2; EXPRESSED IN FETAL LIVER, SIGNAL = 2.1; EXPRESSED IN HELA, SIGNAL = 1.5; EXPRESSED IN BRAIN, SIGNAL = 1.7
tgcttgcatccagcattaaggactggtttttatcttttatttttccaatcctctttccttctcaaggtgtccaagacacacagagccacagaatctcacagatgtctgagaattcctcctcctgggactctcagaggatccagaactgcagccggtcctcgctttgctctccctgtccctgtccatgtatctggtcatggtgctgaggaacctgctcagcatcctggctgtcagctctgtctctcccctccacacccccacctgtgctgggctgacatcggtttcaccttggccacggttcccaagatgattgtggacatgcagtcgcatagcagagtcatctctcatgcgggctgtctgacgcagatgtctttcttcatcctttttgcatgtatagaaggcatgctcctgactgtgatggcctatgactgctttgtagccatctgtcgcc

SEQ ID NO: 752 - DNA, 463 bp, Homo sapiens
  MAP TO AC004997.2; EXPRESSED IN HEART, SIGNAL = 3.4; EXPRESSED IN LUNG, SIGNAL = 4.2; EXPRESSED IN HELA, SIGNAL = 3.3; EXPRESSED IN ADULT LIVER, SIGNAL = 3.6; EXPRESSED IN BRAIN, SIGNAL = 3.5; EXPRESSED IN PLACENTA, SIGNAL =   4; EXPRESSED IN BT474, SIGNAL = 3.6; EXPRESSED IN BONE MARROW, SIGNAL = 3.7; EXPRESSED IN FETAL LIVER, SIGNAL = 2.9; EXPRESSED IN HBL100, SIGNAL = 3.6
tagcttctgcctgccctggctgggccagcctgagtgccactgtaaagaaaataaataaggaggctcaggcagaatctgtgttggaccaggcagaatctgtgttggaccagccagactccagcccagcccagtggccaggcagcttggccctcagagggtgggcaggatgtggaatgtcagttcatgaaccgtgtagttatatggagaccccgccctggaggccttagctgccagggttacaagtaggtgtcctcactctcttgggacgtcaagctctcctgggagcggtggtgggctgagacctggggagccaaatcctgaggggctgagtccttgggggctgagtccttcgggggcacatgctgtgggggacatgcatctcctgcagcggccaccaccatggcttgatttggggctgggggcttctccagctgccctctccccttcatctgtttccgctgct

SEQ ID NO: 753 - DNA, 471 bp, Homo sapiens
  MAP TO AC004997.2; EXPRESSED IN PLACENTA, SIGNAL = 2.8; EXPRESSED IN BT474, SIGNAL = 6.8; EXPRESSED IN BONE MARROW, SIGNAL = 2.1; EXPRESSED IN LUNG, SIGNAL = 3.2; EXPRESSED IN ADULT LIVER, SIGNAL = 2.9; EXPRESSED IN BRAIN, SIGNAL = 2.4; EXPRESSED IN HBL100, SIGNAL = 5.5; EXPRESSED IN FETAL LIVER, SIGNAL = 4.6; EXPRESSED IN HELA, SIGNAL =   3; EXPRESSED IN HEART, SIGNAL = 2.4
aggcaatcgcctaatggtagttagcaagcatgtatttcccttctctttagaaaccggcagtctgtgttgcacttaaagaaataactgaatagaaatcaaggttttacattaaactgggattcaaaacatttgctcagaggccccatggagaagcgatgtccttgtagacagtgagtggacacagtgcttccaagcataagatgttttcctttcctgggcccaggaccccagccccatcctgcccaggcaccttggtgtactgttccactagcttcgtgaagtagttgaagaggctgtgctgtgggcggagaaagtcaaactggtagttgcgctgctctttctgcatcagctgggtcagaaactggcgcccattcctggccacaaactgagccgtcagcttcaccacatccaagtcgaaggctgagatagagggaggatcagcaatgaactcaaactcaggaggaggctctt

SEQ ID NO: 754 - DNA, 462 bp, Homo sapiens
  MAP TO AC005006.2; EXPRESSED IN PLACENTA, SIGNAL = 1.4; EXPRESSED IN FETAL LIVER, SIGNAL = 3.4; EXPRESSED IN LUNG, SIGNAL = 1.3; EXPRESSED IN BT474, SIGNAL = 3.3; EXPRESSED IN HEART, SIGNAL = 1.3; EXPRESSED IN BRAIN, SIGNAL =   2; EXPRESSED IN ADULT LIVER, SIGNAL = 1.8; EXPRESSED IN HELA, SIGNAL = 2.8; EXPRESSED IN HBL100, SIGNAL = 4.6; EXPRESSED IN BONE MARROW, SIGNAL = 1.5
tgtcgcctccaatgtaaactctgatgacaatgcagcatgttcttctgctcagtcatcctgaacgtcaaataacacctgaccccaggaggtagatgtcccttctcctaagccttattctacaggtgacttcaaagggctttctgctcctactgcctgttccctggagctttccaccttggcagctaagggaaacagccagcgtgggcccaggggtcaaggccagcccagtcccatcccgctcacctgggtcctctccccgctgcagagccagcagcttcagcttctcaggtggaacgtaatctccttccttctcggtcacaaagggtgaaaggtgtgggggcagctgcaccccagagaagtactctgccacggggagaaggagcctggcgttcactgagtcaaacacccactggggctgcacgtagcacctggcgcagagtggcaggcaaaaacgagtcacag

SEQ ID NO: 755 - DNA, 465 bp, Homo sapiens
  MAP TO AC005006.2; EXPRESSED IN PLACENTA, SIGNAL = 1.2; EXPRESSED IN BT474, SIGNAL = 2.9; EXPRESSED IN BONE MARROW, SIGNAL = 1.4; EXPRESSED IN HBL100, SIGNAL =   4; EXPRESSED IN LUNG, SIGNAL = 1.2; EXPRESSED IN HELA, SIGNAL = 3.3; EXPRESSED IN ADULT LIVER, SIGNAL = 1.4; EXPRESSED IN FETAL LIVER, SIGNAL = 2.4; EXPRESSED IN HEART, SIGNAL = 1.3; EXPRESSED IN BRAIN, SIGNAL = 1.7
gtctaggaggcagcacaagcccgtcccctcccgacaggcacactcacgtcatgggagaaggcatagggagtgatccacacgatgggctgccccagtacctcggcctggtagtaaatgcctttgatggacaggaagacctaggggagaggaggagacatctgggtgaagaccatggggtggcaggagagggggcagggtgggatgccagccgggcagtcccaggctcaccttgcgcagggcacgggcagcgataatgtagtgcatgaactccacagtgagccggcggcacagctgaatggtctgcacgtggcacttgccagtccgcgggaaggtggaaaacaggaagcacatggagagggcatcgtccaggtcccgcagggcatcgatgaacgtgggatacctgcatggccagtgaggcagcacatggggcctgttcagcgtgggtgccaagggggaccctgatct

SEQ ID NO: 756 - DNA, 496 bp, Homo sapiens
  MAP TO AC005037.2; EXPRESSED IN FETAL LIVER, SIGNAL = 1.2; EXPRESSED IN HELA, SIGNAL = 1.9; EXPRESSED IN ADULT LIVER, SIGNAL = 1.3; EXPRESSED IN PLACENTA, SIGNAL = 1.3; EXPRESSED IN BONE MARROW, SIGNAL = 0.96; EXPRESSED IN BT474, SIGNAL = 1.2; EXPRESSED IN HEART, SIGNAL = 1.3; EXPRESSED IN BRAIN, SIGNAL = 1.1; EXPRESSED IN LUNG, SIGNAL = 1.3; EXPRESSED IN HBL100, SIGNAL = 1.2
aaacaaaatgcccaggagtggtagtcactaataactacccattgtaatttaaaatatgtggttattttgaaccctaaaaatatatactttcaagattgtgtgtgtttttttttttaactatataaactgtggaagagtggtcagagtggtcagttttaatcaaagagaaagcttttttcccagcttttaagtaatgacaatataaatattataatttcttatttaaatgtaatgtttagaaagaatttatacctgtcatgctctatttctttggatgttcttataggagctaaattgaagaaggagcgagcgcagcttttggtcaaccccaaaaaaataataaagaagccagaatatgatttggaggaagatgaccaggaggtcttaaaagatcagaactatgtggaaattatgggaagagatgttcaaggtatttgagggggtgaaatatacactcgtttctgctagtagcagaaattgctttataggatacaca

SEQ ID NO: 757 - DNA, 487 bp, Homo sapiens
  MAP TO AC005037.2; EXPRESSED IN LUNG, SIGNAL = 4.3; EXPRESSED IN HEART, SIGNAL = 0.88; EXPRESSED IN PLACENTA, SIGNAL = 2.2; EXPRESSED IN BT474, SIGNAL =   2; EXPRESSED IN HBL100, SIGNAL = 1.8; EXPRESSED IN FETAL LIVER, SIGNAL = 3.4; EXPRESSED IN BRAIN, SIGNAL = 1.5; EXPRESSED IN BONE MARROW, SIGNAL = 6.2; EXPRESSED IN HELA, SIGNAL = 1.1; EXPRESSED IN ADULT LIVER, SIGNAL = 1.7
tctaaaatgtgtgataggtaaggaggatacttaaaatgtctgaatataacaatacattactagacaaaactagtatcacttaaaataagtacctgattactaccattcgtttgtttccaatgagagattttgatggtttgtaatgtttgtaaaattaagctgcttgtgggggagtctaggtgctgtcttgaagagaatgtgaggatatttggtcttagcataaaacattgaaaataatttttatttctctagccattatttggaaagcaggtctataaatgagaaagattatcatagtcgacgctacattgatgagtacagaaatgactacactcaaggatgtgaacctggacatcgccaaagagaccatgaaagccggtatcagaaccatagtagcaagtcttctggtagaagtggaagaagtagttataaaagcaaacacaggattcaccacagtacttcacatcgtcgttcacatggggtatga

SEQ ID NO: 758 - DNA, 460 bp, Homo sapiens
  MAP TO AC005046.2; EXPRESSED IN LUNG, SIGNAL = 1.8; EXPRESSED IN HELA, SIGNAL = 1.5; EXPRESSED IN ADULT LIVER, SIGNAL = 5.9; EXPRESSED IN BRAIN, SIGNAL = 1.6; EXPRESSED IN HEART, SIGNAL = 1.5; EXPRESSED IN PLACENTA, SIGNAL = 1.1; EXPRESSED IN BT474, SIGNAL = 0.98; EXPRESSED IN BONE MARROW, SIGNAL = 1.1; EXPRESSED IN HBL100, SIGNAL = 0.81; EXPRESSED IN FETAL LIVER, SIGNAL = 1.2
ctctccattccccttcttccttctgtctagacccacattcattcgtttttgtactgttgacccactcctctccctctggttgtggtgagtgacccttcgtacagtatttcctatgggccatgagggagagacaaaccaaagggaagatggggaggagtggcaggggggaggaaaaatagagagatgtgtaacagtcaagatgaacagattgaggtgggcaagttacatgagaaggtgctcacctggatgattccagaaagcactgtgactgatgccgccgccgccaccctcaccctctcgtcatccagtagtgaagaattattcgagttgttaggcaatcccaaagtagttgcattgcgatctgggactgcttttgaaactgctcctgaaactgctagtcccaccatcatactcagaatcggaaacggacctaattaacagtgggtgaatcgtggtcagt

SEQ ID NO: 759 - DNA, 374 bp, Homo sapiens
  MAP TO AC005046.2; EXPRESSED IN PLACENTA, SIGNAL = 1.7; EXPRESSED IN BT474, SIGNAL = 2.9; EXPRESSED IN LUNG, SIGNAL = 1.1; EXPRESSED IN BRAIN, SIGNAL = 1.4; EXPRESSED IN BONE MARROW, SIGNAL = 1.4; EXPRESSED IN HBL100, SIGNAL = 1.9; EXPRESSED IN FETAL LIVER, SIGNAL = 2.8; EXPRESSED IN HELA, SIGNAL = 1.9; EXPRESSED IN ADULT LIVER, SIGNAL = 3.1; EXPRESSED IN HEART, SIGNAL = 4.1
tttgaacttggttacaggggaatatttatttaatttaaaatagcttgctaacctgaaatagatttccctgacatatatcacagatttttttgctgcaccatggtgtagcattactaagtaaggaagcattttgttttagataaattatttacagagtaatttttcctttgaatgatttatcaaacaaattactttaaactttgtgaatttataaagattattttgtaaaggttgttcatgtcaatggatatggaaagataactggcaaaaatcaagtcactgctacgaaagctgatggcggcactcaggttattgatacaaagaacattcttatagccacgggttcagaagttactccttttcctggaatcacg

SEQ ID NO: 760 - DNA, 467 bp, Homo sapiens
  MAP TO AC005046.2; EXPRESSED IN HBL100, SIGNAL = 2.6; EXPRESSED IN ADULT LIVER, SIGNAL = 0.8; EXPRESSED IN HEART, SIGNAL = 1.2; EXPRESSED IN BT474, SIGNAL =   1; EXPRESSED IN HELA, SIGNAL = 1.6; EXPRESSED IN PLACENTA, SIGNAL = 1.7; EXPRESSED IN FETAL LIVER, SIGNAL = 1.9; EXPRESSED IN LUNG, SIGNAL = 1.5
ctagggtgactcgccaagaggacggattcatgtcagttttgttctctgcggtatctccagcaccagaacggtgcctggcacatagaggatgtcaactcaatatgtactggataaacaaacaagatcctagaaaatagtgaggtggtcagaaatgaatgagcgagctgaagcctggtggagatgaattctgtggttggtctaagatgctgtctgctcagccagagatcactacattctccttactttcagcatctgcatacctttcacagttatgacccatggtgtagtcctggcagttcaagcactccccagtcactgggtcgcagtcatcggcgtggccattgcactggcagggctggcaacttggaaagccccagtgcccaggtaagcaccgatcacactgccgagcatacactccctggaaacagtggcactggccagtgacgggattgcagaaggcattgaca

SEQ ID NO: 761 - DNA, 467 bp, Homo sapiens
  MAP TO AB023056.1; EXPRESSED IN HBL100, SIGNAL =  14; EXPRESSED IN BRAIN, SIGNAL = 5.4; EXPRESSED IN PLACENTA, SIGNAL = 7.9; EXPRESSED IN BT474, SIGNAL = 5.4; EXPRESSED IN BONE MARROW, SIGNAL = 6.8; EXPRESSED IN FETAL LIVER, SIGNAL = 9.3; EXPRESSED IN LUNG, SIGNAL = 5.6; EXPRESSED IN HELA, SIGNAL = 5.2; EXPRESSED IN ADULT LIVER, SIGNAL = 4.5; EXPRESSED IN HEART, SIGNAL = 4.9
ataaggaggatcaggccagggtgggggcagcaggaacggctgtggctgtgggtgcccagtgtgtaacaggccatttttttcagggatggccctggtgcttcagagttgatgaccagccattccatatgttgctgctgttgctgctttcatcatcattagtattattagtagtattattattctctgtgtcctttgatgcaagaagaagacaacatcaggtgcagagggtccaggtgagaaaaggggacagttgctagagatgggagggtccctgtctgggctgtagtgtcccctcataccttctgtgcagataggcttgtaggtgacaaggcttctggaacaggcgatgaaagttggggtatttgggaggggaatgagagccacgttgccatctacatccctgtgagaaagaaactcacccattcaaacccaaagaatagactcagagacccagagaacagcgaaag

SEQ ID NO: 762 - DNA, 493 bp, Homo sapiens
  MAP TO AB016897.1; EXPRESSED IN LUNG, SIGNAL = 1.8; EXPRESSED IN PLACENTA, SIGNAL = 1.6; EXPRESSED IN BT474, SIGNAL = 2.3; EXPRESSED IN BONE MARROW, SIGNAL = 1.9; EXPRESSED IN HBL100, SIGNAL = 1.6; EXPRESSED IN FETAL LIVER, SIGNAL = 1.7; EXPRESSED IN HELA, SIGNAL = 1.8; EXPRESSED IN BRAIN, SIGNAL = 2.1; EXPRESSED IN ADULT LIVER, SIGNAL = 1.4; EXPRESSED IN HEART, SIGNAL = 1.6
gtgtcatgctggccatactctttaaaaagtctcttaaggccaaactaatgatgttaagtgtaattagttaataactatatgtagtttaagatcatgtcactgtttcctcttggaatgaagttgatatttttaaagtaattaaacggcacttactaccataggtaccattatctaaatctgctgcacattcaaaggcttcttcctggatgacattttgctcctcttgtcctctcaccctgtctgggcagatgatgtgctgcacacgctcacaggagccatgtccttgctacgacgctgcagagtcaatgccgccctgaccatccagctcttctctcagctcttccacttcatcaatatgtggctgttcaatagattggtgaccgacccagattcggggctgtgctcccattactggggtgcgattatccgtcagcagttgggccatattgaagcctgggctgagaagcaggggctggaactggctgcggactgt

SEQ ID NO: 763 - DNA, 485 bp, Homo sapiens
  MAP TO AB016897.1; EXPRESSED IN BRAIN, SIGNAL = 4.2; EXPRESSED IN HEART, SIGNAL = 3.2; EXPRESSED IN HBL100, SIGNAL = 2.7; EXPRESSED IN PLACENTA, SIGNAL = 4.7; EXPRESSED IN BT474, SIGNAL =   3; EXPRESSED IN BONE MARROW, SIGNAL = 4.9; EXPRESSED IN FETAL LIVER, SIGNAL = 3.8; EXPRESSED IN HELA, SIGNAL =   4; EXPRESSED IN ADULT LIVER, SIGNAL = 3.9; EXPRESSED IN LUNG, SIGNAL = 3.9
agcagcagtaggaggagggcgaggccacaggacggcacgcgggaggcgccagccgcagagaacacgcacaagcctgacggctggagcagcaccacgtgcatttccttaaagaacggaggtgcagatccgggcagggcgagctcagggttggttagttcaggagctctgcgcgtctcaggcagccaggaccctgggtcgagagaggctgcgatggtcccaccgtcacattcagatctgaccatggccagtggaagaggaagagatgtgtcctcttgggctgttttctcagggactagcaaactttgctcgggccctgtccacccacgttcccacaaatatcaatgccagaattgggccacacaagcctcccgtgctggtgcctgcggctggcggagacagacacgcaccacagcaggtgagcaccatgcgactggagttaaaatgaaaacacctttcttctagaagcatgaaggaaacatttcaaa

SEQ ID NO: 764 - DNA, 464 bp, Homo sapiens
  MAP TO Z99756.7; EXPRESSED IN BT474, SIGNAL = 6.6; EXPRESSED IN HBL100, SIGNAL = 6.8; EXPRESSED IN PLACENTA, SIGNAL = 7.3; EXPRESSED IN FETAL LIVER, SIGNAL = 8.9; EXPRESSED IN HELA, SIGNAL = 7.7; EXPRESSED IN ADULT LIVER, SIGNAL = 6.2; EXPRESSED IN HEART, SIGNAL = 5.7; EXPRESSED IN BONE MARROW, SIGNAL = 5.9; EXPRESSED IN BRAIN, SIGNAL = 7.1; EXPRESSED IN LUNG, SIGNAL =  10
ccatgccaacactcactcactgagggtttaggaagcccataaccaaacgatgtcctccttttggttcctaacaattgttctcatactgttaacatggcaactcaacagacactgattcatgacccatgctaccctaagtctgttatcaggaatttccagctcatgcagccccaccagaccacaagcttctggagaccaaggactatgttgcaccataactatcacctcccaggtatgcagaactgagcaattttcaaaggtcttcaccattcatagtctcatttgagcctgaaactactttgacagctagtgagaacaggtgatgatgatgatgatgatgatgatggtgatgatgatggtgatggtgatggtgatgatgatggtgatgatgatgatgatggtgatgatgatggtgatgatgataatgatgatggtggtgatgatggtgatggtgatgatggtga

SEQ ID NO: 765 - DNA, 473 bp, Homo sapiens
  MAP TO AB023049.1; EXPRESSED IN BT474, SIGNAL = 4.6; EXPRESSED IN LUNG, SIGNAL =   3; EXPRESSED IN HELA, SIGNAL = 3.2; EXPRESSED IN ADULT LIVER, SIGNAL = 2.3; EXPRESSED IN PLACENTA, SIGNAL =   3; EXPRESSED IN BONE MARROW, SIGNAL = 2.8; EXPRESSED IN HBL100, SIGNAL = 3.4; EXPRESSED IN FETAL LIVER, SIGNAL = 3.3; EXPRESSED IN BRAIN, SIGNAL = 2.3; EXPRESSED IN HEART, SIGNAL =   3
gctgaatttttatggagcacatctgatgtgccaagtggaaaacaaattggaaacagaagaagaaatatgctaccttgtgtctcccctcaaggagctcacagttgagttggggtatcccttccagggaaataaattctatagactctcttttcttcccttcacagtgatgaagaggggcattccccggtcctgggcggccttgggccgccttttgccttcaatttgaacagtgacacagatgtggaagaaggtcagcaaccagccacagaggaggcctcctcagctgccagaagaggtgccactgtagaggcaaagcagtctgaagctaaagttgtaactgaaatccagcttgaaaaggatcagcctttagtgaaggagagggacaatgatacaaaagtcaagaggggtgcagggaatggggtggttccagctggggtgattctggagaggagccaacctcctggagaggacag

SEQ ID NO: 766 - DNA, 463 bp, Homo sapiens
  MAP TO Z98749.11; EXPRESSED IN PLACENTA, SIGNAL = 1.4; EXPRESSED IN BT474, SIGNAL = 1.8; EXPRESSED IN HEART, SIGNAL = 1.4; EXPRESSED IN BRAIN, SIGNAL = 1.1; EXPRESSED IN ADULT LIVER, SIGNAL = 1.1; EXPRESSED IN HELA, SIGNAL = 1.2; EXPRESSED IN LUNG, SIGNAL = 1.3; EXPRESSED IN FETAL LIVER, SIGNAL =   1; EXPRESSED IN HBL100, SIGNAL = 1.4; EXPRESSED IN BONE MARROW, SIGNAL = 1.5
tgtgctagaagcaaggagggatgagggctggagggtttcagctcacggaacacaaggttcagctgagctggggtcggtagaaggtcagagaggatgcccggcactcccaggaggtgacaggtggccacaggagtgggagggggaaacggaagaggacttgctcactcaagtgtcagcagatccgagggcctgccaggggcatgagcaggagcctggcggacccccccgcagactgctgccctcaagagatgcagggccaggggtgaggaggaggcagggaggctactcacccttgctttgcaggatgagaaaagctgcggagaaggaagagggcagctctacctgggatgatggccaggaaggcagtgcagaggcggtggcgttgacctggtggggaaatgatcattctcctggccaacccgtgcccctctctgtcctaaatgcttttcacactctgcccctg

SEQ ID NO: 767 - DNA, 451 bp, Homo sapiens
  MAP TO Z83851.17; EXPRESSED IN PLACENTA, SIGNAL = 1.7; EXPRESSED IN BONE MARROW, SIGNAL = 2.9; EXPRESSED IN HBL100, SIGNAL = 1.9; EXPRESSED IN BRAIN, SIGNAL = 1.4; EXPRESSED IN HEART, SIGNAL = 1.1; EXPRESSED IN BT474, SIGNAL = 1.5; EXPRESSED IN HELA, SIGNAL = 1.4; EXPRESSED IN FETAL LIVER, SIGNAL = 1.2; EXPRESSED IN LUNG, SIGNAL = 1.5; EXPRESSED IN ADULT LIVER, SIGNAL = 1.1
ctctgtagggtggcggtaggggagtctccccaaaggaaggtcctagggcagagcatggcatctgcacttaccagggtggaggtgtaaatggctgctggaagccagaggcaaggctgggaggaggtggatgtgggggttcagaaatgcggaagtttatcttgcgggcactagggagccgttggaggtgtgtaagcaggagagaggtcggctcagatcttcactatggggctgtcaggacaaggcgaggatggagtcattcataggttcaacaagtgtttgctgagcacttactctgtgccacgccccagggagacagaggagagccagacagacaaggcgtgcaccttggggagacagacgtgaccacacaaccaccaccacagggtgagggggctatggtgggggctggactgggtaaggcacgtggcctggtccctccaaagaggaatcc

SEQ ID NO: 768 - DNA, 479 bp, Homo sapiens
  MAP TO Z83851.17; EXPRESSED IN HELA, SIGNAL =  12; EXPRESSED IN ADULT LIVER, SIGNAL =  11; EXPRESSED IN BRAIN, SIGNAL =  12; EXPRESSED IN HEART, SIGNAL =   7; EXPRESSED IN PLACENTA, SIGNAL =  12; EXPRESSED IN BT474, SIGNAL =  11; EXPRESSED IN BONE MARROW, SIGNAL =  13; EXPRESSED IN HBL100, SIGNAL =  11; EXPRESSED IN FETAL LIVER, SIGNAL =  11; EXPRESSED IN LUNG, SIGNAL =  13
atggatagctgaatgcacccacaccttcttcccagaggcagaaatgcaggaaaagccgagaagcctctgcttcctcatctgtaaaacggggatgacaactgtacctactttccaaggctgtgaggattaaatgggagagtgagctgttgcggtggtcgcggtggtggtagtggtgatggaggttatggtggtggtggtggtggtggtgatggaggttatggtggtggaggtggtggtggtgatggaggttatggtggtggtggtggtgatggaggttatggtggtggtggtgatggtggtggtggaggttatggtggtggaggtggtggcggaggttatggtggtggtggtggtgatggaggttatggtggtggtggtggtggtgatggaggttatggtggtggtggtggtggtgatggaggttatggtggtggtggtggtggtggttatggtggtggtggtggtggtggtgatagagg

SEQ ID NO: 769 - DNA, 455 bp, Homo sapiens
  MAP TO Z83845.14; EXPRESSED IN FETAL LIVER, SIGNAL = 1.3; EXPRESSED IN LUNG, SIGNAL = 0.77; EXPRESSED IN HELA, SIGNAL = 1.1; EXPRESSED IN HEART, SIGNAL = 1.8; EXPRESSED IN PLACENTA, SIGNAL =   3; EXPRESSED IN ADULT LIVER, SIGNAL = 0.73; EXPRESSED IN BRAIN, SIGNAL = 1.4; EXPRESSED IN BT474, SIGNAL = 1.3; EXPRESSED IN BONE MARROW, SIGNAL = 0.78; EXPRESSED IN HBL100, SIGNAL = 1.4
cacccagtcaaatggatgttctccccatcctagaggtgtgcacccaacaattagagcaatcacaagagcacacacttcctaatgagaaagttccagaaggattatcctgaataccttgaaaggctcagattgcaaacttggctggcaggcatttccttcacctgctgggctgttgaccactgaatctcctgattttaggctccaagattatggcccatgccccccaggccgcacctcgttccttaccaggttcttcctaccccctcccccaggagattgctgcgatgattgacactgagtttgccaagcagacctccctggacgcagtggcccaggccgtcgtggaccgggtgaagcgcatccacagcgacaccttcgccagtggtggggagcgtgccaggttctgcccccggcacgaggacatgaccctgctagtgaggaactttggctacccg

SEQ ID NO: 770 - DNA, 467 bp, Homo sapiens
  MAP TO Z83845.14; EXPRESSED IN BT474, SIGNAL =   8; EXPRESSED IN BONE MARROW, SIGNAL =  10; EXPRESSED IN HBL100, SIGNAL = 5.3; EXPRESSED IN HELA, SIGNAL = 4.7; EXPRESSED IN BRAIN, SIGNAL = 5.7; EXPRESSED IN PLACENTA, SIGNAL = 8.4; EXPRESSED IN HEART, SIGNAL = 4.4; EXPRESSED IN ADULT LIVER, SIGNAL = 4.1; EXPRESSED IN LUNG, SIGNAL =   6; EXPRESSED IN FETAL LIVER, SIGNAL = 8.9
aagcaaggaaagacaccgaccttgcagctttctcgtatgggcttgccagtgacatgtggcccgtgagaggtggcctctgctgctgtcttgccaagggcctgctctgatggggtagcgtgagcatggggaggagggtatcccagaatgtcatagccagagtgaaatgatggctaaagcagggggacccaggagggcccctgaagctgcagctgctgtcgctttagtctcccccaattcctttccctttctccctccacctccgtgagaccctggtctcaggcctccctctgccctctccctcttccaggagtgagaacaactgcttcctgtatggggtcttcaacggctatgatggcaaccgagtgaccaacttcgtggcccagcggctgtccgcagagctcctgctgggccagctgaatgccgagcacgccgaggccgatgtgcggcgtgtgctgctgcaggtaatg

SEQ ID NO: 771 - DNA, 479 bp, Homo sapiens
  MAP TO L29074.1; EXPRESSED IN FETAL LIVER, SIGNAL = 1.9e+02; EXPRESSED IN LUNG, SIGNAL = 1.3e+02; EXPRESSED IN HELA, SIGNAL = 3.5e+02; EXPRESSED IN ADULT LIVER, SIGNAL = 1e+02; EXPRESSED IN BRAIN, SIGNAL =  40; EXPRESSED IN HBL100, SIGNAL =  84; EXPRESSED IN HEART, SIGNAL =  50; EXPRESSED IN PLACENTA, SIGNAL =  15; EXPRESSED IN BT474, SIGNAL = 2e+02; EXPRESSED IN BONE MARROW, SIGNAL =  57
gccagaactaccaccaggactcagaggcggccatcaaccgccagatcaacctggagctctacgcctcctacgtttacctgtccatgtcttactactttgaccacgatgatgtggctttgaagaactttgccaaatactttcttcaccaatctcatgaggagagggaacatgctgaggaactgatgaagctgcagaaccaatgaggtggccgaatcttccttcaggatatcaagaaaccagactgtgatgactgggagcgggctgaatgagatggagtgtgcattacatttggaaaaaaatgtgaatcagtcaccactggaactgcacaaactggccactgacaaaaatgacccccatttgtgtgacttcattgagacacattacctgaatgagcaggtgaaagccatcaaagaattgggtgaccacgtgaccaacttgcacaagatgggagcgcccgaatctggcttggcggaatatct

SEQ ID NO: 772 - DNA, 479 bp, Homo sapiens
  MAP TO L29074.1; EXPRESSED IN PLACENTA, SIGNAL = 1.8; EXPRESSED IN BT474, SIGNAL = 2.2; EXPRESSED IN LUNG, SIGNAL = 1.9; EXPRESSED IN HELA, SIGNAL = 2.7; EXPRESSED IN FETAL LIVER, SIGNAL = 2.3; EXPRESSED IN BONE MARROW, SIGNAL =   2; EXPRESSED IN HBL100, SIGNAL = 2.7; EXPRESSED IN ADULT LIVER, SIGNAL =   2; EXPRESSED IN BRAIN, SIGNAL = 2.4; EXPRESSED IN HEART, SIGNAL =   2
ttcctgtccctctcttctgccatactccatattgacttcatccttatacctgcagcaagatggcttcagctcaaccagaaacaacaatgatcagagaaagagaacagaatgattctctcttaggagtaagtagattgctgtgtcattacggccccactcacaggtgatctgtaggacaacggggaagggaacctgttgggcagaactttgagtcatgtatttggttgtccccttcgtctggaacttgtcttatttgccaggaagaagaaaaaggctgtagcaaggatctatgctgaatcatggcagagactaatgttgcggctggatggtcagggtcttggaagaagcaagtttggagtattgcaagtttggagcaagtttggagcaaggaaatttgagaaagaagtatgtgaattgatctagaatgtatgtcttgcatatgaatatttatcaaaaggttctctttgtaggagagctgc

SEQ ID NO: 773 - DNA, 493 bp, Homo sapiens
  MAP TO L29074.1; EXPRESSED IN HEART, SIGNAL = 0.79; EXPRESSED IN BRAIN, SIGNAL = 0.98; EXPRESSED IN PLACENTA, SIGNAL = 1.8; EXPRESSED IN BT474, SIGNAL = 0.87; EXPRESSED IN BONE MARROW, SIGNAL = 1.4; EXPRESSED IN FETAL LIVER, SIGNAL = 1.1; EXPRESSED IN HELA, SIGNAL = 1.1; EXPRESSED IN ADULT LIVER, SIGNAL = 1.3; EXPRESSED IN HBL100, SIGNAL = 2.4; EXPRESSED IN LUNG, SIGNAL =   1
cgtggataatcttttcctccagagagtatagatgtttaaaggaacacagctatttaatgatatggcacatcaaggtttgaacttaggtggctaataacatacctttttaaaaatgagaatgaaacatgtttataaccaaaattaacctcaaatattgcaaagcccttcattttgagtttaaaattttgttttatgaaatggaaagtgataatactcttggtgggcttataaattgggaagagttttggattacccctgaaacgtctctggaagcttctgttaaccctcttttttttttttttaaagtcagacaatggtatataacttttaactctcgataggaactaattctgaagcatcaaatgcttctgaaacagaatctgaccacagagacgaactcagtgattggtcattagctccaacagaggaagagagggagagcttcctgcgcagaggagacggacggcggcgtggagggggaggaagaggacaa

SEQ ID NO: 774 - DNA, 444 bp, Homo sapiens
  MAP TO AP000339.1; EXPRESSED IN BONE MARROW, SIGNAL = 8.6; EXPRESSED IN ADULT LIVER, SIGNAL = 7.7; EXPRESSED IN PLACENTA, SIGNAL = 6.2; EXPRESSED IN BT474, SIGNAL = 6.9; EXPRESSED IN LUNG, SIGNAL =  12; EXPRESSED IN HELA, SIGNAL =  10; EXPRESSED IN BRAIN, SIGNAL =  12; EXPRESSED IN HBL100, SIGNAL = 5.9; EXPRESSED IN FETAL LIVER, SIGNAL = 6.7; EXPRESSED IN HEART, SIGNAL =  11
tgagactttggactgtgggcttttgagttaatgctgaagtaagactttgggggactgttgggaaggcatgattggttttgaaatgtgaggacatgagatttgggaggggccaggggtggaatgatatggtctgcctgtgtccccacccaaatctcatcttgtattcccatgtgttgtgggagggacttggtgggcagtaactgcatcatgggggcaggtctttcctgtgttgttctcataatagtaagtctcacaaaatctgatggttagtataagggagagttttcctgcacaagctctcactctgtcgttgcctgctgccatccacataagatgtgacttgctccttcttgccttctgccatgattgtgaggcttccccagccacgtggaactgtgaattctccattaaacctctttcctttgtatgttgcccagtctcagg

SEQ ID NO: 775 - DNA, 485 bp, Homo sapiens
  MAP TO AP000338.1; EXPRESSED IN LUNG, SIGNAL = 1.2; EXPRESSED IN BRAIN, SIGNAL = 1.2; EXPRESSED IN HEART, SIGNAL = 1.2; EXPRESSED IN HBL100, SIGNAL = 1.6; EXPRESSED IN FETAL LIVER, SIGNAL = 1.2; EXPRESSED IN PLACENTA, SIGNAL = 1.2; EXPRESSED IN BT474, SIGNAL = 1.5; EXPRESSED IN BONE MARROW, SIGNAL = 2.4; EXPRESSED IN HELA, SIGNAL = 0.95; EXPRESSED IN ADULT LIVER, SIGNAL = 1.1
ggaacttgtgttgggacaggtacagctttcagcatcagataatgctctgattctcagtaaaagctttagttggaatagacatcctgtaaaatggatctggcctgatctttagattgtaaatggccttaaatagctgtgtgacattggtgggcttcactcttctttgtgccaccctttcccaagcattcattggcccctgtgacctgtgcctgtatccatgtgacccagtctgtcttctctctgcagtgccgtattcacctggaccaacctgctggtggtggtggtggagctggatgggctagagcaggatgccctggacctggtggccctggtgaccaacgtggtgctggaggagcactacctggtcgtgggagtggtggtcatcgtggacccaggggtgatccctatcaactctcggggtgagaagcagcgcatgcacctgcgggacggcttcctggctgaccagctggaccccatctatgtcg

SEQ ID NO: 776 - DNA, 404 bp, Homo sapiens
  MAP TO AP000338.1; EXPRESSED IN LUNG, SIGNAL = 3.2; EXPRESSED IN BRAIN, SIGNAL = 1.6; EXPRESSED IN HEART, SIGNAL = 2.4; EXPRESSED IN BT474, SIGNAL = 2.4; EXPRESSED IN BONE MARROW, SIGNAL = 3.2; EXPRESSED IN PLACENTA, SIGNAL = 1.9; EXPRESSED IN ADULT LIVER, SIGNAL = 2.6; EXPRESSED IN HELA, SIGNAL = 4.8; EXPRESSED IN FETAL LIVER, SIGNAL = 2.9; EXPRESSED IN HBL100, SIGNAL = 2.8
agacaaagatttgtgcagaaggaaatttacatcagattaaggaattttttcttgtaaaaatgtgtgtctttggagctgttttgctttgtcctgaagtcctctgttttttgtgacttgagacacatttcaaccatcctcgaggagattagaatgatgagttactttttgaatgtgcagcaggtagccccatttgatagactgcattttaaatactaggacagtctgcctcttccatcgtgagggtgagaatgcatctgtgtcttgtttggcctcttgccgtgtggccatttccatgtctcatcccgcaggatcgctgtgttctctgtgaccgtgctgcacgacgaccggattgtcctggtggctgagcagcggccggatgcctcggaggaggacagcttccagtg

SEQ ID NO: 777 - DNA, 489 bp, Homo sapiens
  MAP TO AP000315.1; EXPRESSED IN BRAIN, SIGNAL = 1.6; EXPRESSED IN HEART, SIGNAL = 2.7; EXPRESSED IN PLACENTA, SIGNAL = 5.6; EXPRESSED IN HBL100, SIGNAL =  48; EXPRESSED IN BT474, SIGNAL =  21; EXPRESSED IN BONE MARROW, SIGNAL =  29; EXPRESSED IN FETAL LIVER, SIGNAL =  23; EXPRESSED IN LUNG, SIGNAL = 6.6; EXPRESSED IN HELA, SIGNAL = 9.7; EXPRESSED IN ADULT LIVER, SIGNAL = 8.1
aaaatcagcggttggacttggccacacatgccagctcatccttcttcttgatggcaaaggagttggaggagcccttggtggcagtgatgagctcatctgccaggcactcagcaatggtcatgatctcccggagggcaccctcaagagtgcctgtgcacagcaaccaggtggtctgattcacatggtgcagtggggacacgtccacagcctgtcatctcacagtccctgctcacccaaagcctgtggagtcctcctggggaccaccattgatgatggtgttcaccaggacctggaggtgagggttctcgcctgtgagcaggtggatgaaatggaaggcatacttgatgatgcgcacagtcatgagcttcttgctgttgttgtggccatgcattatcatggagttagtgagggactccacaatggggcactgagctttgcagaagcgtttggcagcataaggccctgcattgtgaggcaggtacttggcat

SEQ ID NO: 778 - DNA, 471 bp, Homo sapiens
  MAP TO AP000295.1; EXPRESSED IN BONE MARROW, SIGNAL = 1.7; EXPRESSED IN FETAL LIVER, SIGNAL = 1.6; EXPRESSED IN PLACENTA, SIGNAL = 2.4; EXPRESSED IN HEART, SIGNAL = 1.5; EXPRESSED IN BRAIN, SIGNAL = 0.92; EXPRESSED IN ADULT LIVER, SIGNAL =   2; EXPRESSED IN HELA, SIGNAL = 1.1; EXPRESSED IN LUNG, SIGNAL = 1.5; EXPRESSED IN HBL100, SIGNAL = 2.4; EXPRESSED IN BT474, SIGNAL = 1.7
gaaaatacaaaatagcgtagctggaataattccaaatgtatcagaaaccacaataaacataagtggactaaacttcattaagaaagacaaagattatcagattttttaaaagaaactaaatccaactacccttcttagccatgtcaatcaatgtcatgacaatagtatatcaaagcagtgtacttccgtggactaattgttctgcatggttatgaaaaattaatgttgaagtttttaaaatgtgatttttgattgtcattttgcttgttcttctgcttagccattattggaccccctggaatgcaagtagaagtacttgctgattctttacatatgcgtttcttagcccctaaaattgagaatgaatacgaaacttggactatgaagaatgtgtataactcatggacttataatgtgcaatactggaaaaacggtactgatgaaaaggtaaggttggctaattgcatttca

SEQ ID NO: 779 - DNA, 477 bp, Homo sapiens
  MAP TO AP000295.1; EXPRESSED IN BT474, SIGNAL = 1.2; EXPRESSED IN BONE MARROW, SIGNAL = 1.4; EXPRESSED IN ADULT LIVER, SIGNAL = 1.5; EXPRESSED IN HEART, SIGNAL = 1.6; EXPRESSED IN HBL100, SIGNAL = 1.7; EXPRESSED IN FETAL LIVER, SIGNAL = 1.8; EXPRESSED IN LUNG, SIGNAL = 1.6; EXPRESSED IN HELA, SIGNAL = 1.3; EXPRESSED IN BRAIN, SIGNAL = 0.88; EXPRESSED IN PLACENTA, SIGNAL = 1.9
tggtaaatttttgtaaatcaatgtctcataaatcacatgcccctgttttcaaaaatacgtaatcaaggaagcaagctttcttggtcaagtatgctgaatactcaaccccttggagaggcacgtagtcattaagatgttcaagtctctgagaagttctgttttgaagacacgtatttctatgtttaacacagtttccactcccgcgccgcccccccctccaaattaagtaccagtcagcctcagggagactgaagccagaactctcctgattgacctatctttttgattgtgtagttataggatattccaagataaatgcatgaatactaccttgacggaatgtgatttctcaagtctttccaagtatggtgaccacaccttgagagtcagggctgaatttgcagatgagcattcagactgggtaaacatcaccttctgtcctgtggatgacagtaagccattttgttttcccttttt

SEQ ID NO: 780 - DNA, 469 bp, Homo sapiens; identical to SEQ ID NO: 249
  MAP TO AP000295.1; EXPRESSED IN BT474, SIGNAL =   2; EXPRESSED IN BONE MARROW, SIGNAL = 2.7; EXPRESSED IN HELA, SIGNAL = 2.7; EXPRESSED IN ADULT LIVER, SIGNAL = 1.9; EXPRESSED IN PLACENTA, SIGNAL = 2.7; EXPRESSED IN FETAL LIVER, SIGNAL = 2.9; EXPRESSED IN LUNG, SIGNAL = 2.8; EXPRESSED IN BRAIN, SIGNAL = 2.1; EXPRESSED IN HEART, SIGNAL = 2.6; EXPRESSED IN HBL100, SIGNAL = 2.9

SEQ ID NO: 781 - DNA, 491 bp, Homo sapiens
  MAP TO AP000289.1; EXPRESSED IN LUNG, SIGNAL = 2.2; EXPRESSED IN BRAIN, SIGNAL = 2.1; EXPRESSED IN HEART, SIGNAL = 1.7; EXPRESSED IN PLACENTA, SIGNAL = 3.6; EXPRESSED IN BONE MARROW, SIGNAL = 1.3; EXPRESSED IN HBL100, SIGNAL = 1.4; EXPRESSED IN FETAL LIVER, SIGNAL = 1.2; EXPRESSED IN ADULT LIVER, SIGNAL =   2; EXPRESSED IN BT474, SIGNAL = 1.4; EXPRESSED IN HELA, SIGNAL = 2.1
ccaaaatgttcagacctggcggagactgatctaagaatgtgagtagtgagatgtcagggattgcggatggggcagaagggaggcttcacgcagcccgcacccttcaacacatacatgctcctcgtcctggtcaccactgagtgttacaggcaagaaaataaaaaccctaaactcctcagacagtgatcattaggtgtcattctgttcaaatcttaaaaaatagtttgagcagatgaagaatcagtaaagaaagcttggaggtgatttgataacattttatctacccagaggaccaatcaaagagagtatttgtattgtggtgatggtggtgatggtggtggtggtggtggtggtggtcgtggtgctggttttgttccatttgcttgcttccggtggcttcactcacatgcttcctctgcagtcctggttccccacagccatgggcagaaggtacagcctatatatgagtctctatcagtgcacaggtgtcc

SEQ ID NO: 782 - DNA, 476 bp, Homo sapiens
  MAP TO AP000279.1; EXPRESSED IN BT474, SIGNAL =   2; EXPRESSED IN HBL100, SIGNAL = 1.5; EXPRESSED IN HELA, SIGNAL = 1.4; EXPRESSED IN ADULT LIVER, SIGNAL = 0.93; EXPRESSED IN PLACENTA, SIGNAL = 1.3; EXPRESSED IN BONE MARROW, SIGNAL =   2; EXPRESSED IN FETAL LIVER, SIGNAL = 1.4; EXPRESSED IN LUNG, SIGNAL =   1; EXPRESSED IN BRAIN, SIGNAL = 1.4; EXPRESSED IN HEART, SIGNAL = 1.1
gcacaggccaataataatctaccaccatattgaaataagactttccaaagtcttatttaaatgtgctttaagatattatctttatttctgttttcaacaaaggtattatattgcccttaagagataatgccactaatgaagtgaagaaaaatgaagcatgacttttcatcacttctaatgttgagttcagtgggtactttctgagaattatagaatgttctacacaaggccatctagacctccctaattttgccttattcaaagagattagtatttttgcattcttaccttttcactgaaacactcaagcaagtcttggacataccctcgcatttcttgcaaaaatttataccgttcaccaatacccccagaagacccttctaatctttcaatagccctggtagagtccactcggctttgcagatgtttctcatgctgctgtcgatttgttttgtgcaattctttcatggagtcca

SEQ ID NO: 783 - DNA, 468 bp, Homo sapiens
  MAP TO AP000275.1; EXPRESSED IN HELA, SIGNAL = 1.3; EXPRESSED IN BT474, SIGNAL = 1.2; EXPRESSED IN LUNG, SIGNAL = 1.5; EXPRESSED IN ADULT LIVER, SIGNAL = 1.3; EXPRESSED IN HEART, SIGNAL = 1.3; EXPRESSED IN PLACENTA, SIGNAL = 1.9; EXPRESSED IN FETAL LIVER, SIGNAL = 1.2; EXPRESSED IN BRAIN, SIGNAL = 2.2; EXPRESSED IN BONE MARROW, SIGNAL = 2.4; EXPRESSED IN HBL100, SIGNAL = 1.4
aacgggttcataccatagaaaatcatcagttataagacatagacaaacctaaccacatagaaaaaagattaagaacaattgtcatctagtgacagttatagcaagtttcctttccattgagagcttatcatctacaagttttcctattctgtaccggagaaaacagggtgcactttatcacctaggtatgaaacttaaacgatgactctccaacatcaagcacattggccacaggaagccatacaaaactttcaaataaaatgcatactctgtgcactgggaggcccaggagttcttgacggtgctcggcttggtctgatgggaagggaaggtacaggaccctctgatattgtaggtgactggcagggactagttcggggtgaagagctgggggaagtaccaaggccggaacttgaagatggctggagatgctgaggaagaagttcctccacttcagcactatagtca

SEQ ID NO: 784 - DNA, 478 bp, Homo sapiens
  MAP TO AP000275.1; EXPRESSED IN HBL100, SIGNAL = 3.1; EXPRESSED IN ADULT LIVER, SIGNAL = 2.3; EXPRESSED IN BRAIN, SIGNAL =   6; EXPRESSED IN BONE MARROW, SIGNAL = 3.4; EXPRESSED IN LUNG, SIGNAL = 4.5; EXPRESSED IN HELA, SIGNAL = 3.8; EXPRESSED IN HEART, SIGNAL = 2.4; EXPRESSED IN PLACENTA, SIGNAL = 3.3; EXPRESSED IN BT474, SIGNAL = 2.3; EXPRESSED IN FETAL LIVER, SIGNAL = 2.8
agccagaaaatgaacttggctgattacccagtaagtctgaacaagctgactttgacttccctttcacaccaaaatcctcttcttcctcgaaggttacccatcctttcgggttgctaatttttaatgtagactggccctgtagatcaaaactgtccttaaagccatcaagtgaagatgaagccctgcttttgttatgaccaagaggctgcagagaagggaaaggactgatagtaacgggctcttctttggagaaccatgaagttgcctctgattcttcagacttggctctaaatgggtttccaggagcagcagtcctgtcactgaaaggatttgtcctggtcaagccagtaataaatgggtttggagaacttcgcatattttcctgggattgactccgagctggaattggaggcattgttggcatgcaacttacagaactcaaaacattactttgcgttgcagaaggcaactgaatcaa

SEQ ID NO: 785 - DNA, 461 bp, Homo sapiens
  MAP TO AP000268.1; EXPRESSED IN PLACENTA, SIGNAL =   2; EXPRESSED IN BT474, SIGNAL = 0.72; EXPRESSED IN FETAL LIVER, SIGNAL = 0.67; EXPRESSED IN LUNG, SIGNAL = 0.81; EXPRESSED IN HEART, SIGNAL = 0.87; EXPRESSED IN BONE MARROW, SIGNAL = 0.68; EXPRESSED IN HELA, SIGNAL =   1
aggagatgcccacagctaagtcatcctcacaaccaggaaggccctgtgccactcagcccccaggagcctcctcagatatccccattgttcaggctctgccaggttctggccctatcgccagcctgaagcgagtcctgtcctcacagacagatcctgtggctgctgacacacacctttctacatagacacctctcatttcatctgtgtggggatcaggggcagagaatggaggaaaaaccactacagtcctccaagggaaggagacccatggaaggcacgagacactgtggtcccctcacctttgaatccctcttggtcaccagggtgtacagggtctttttattcaaatcaaaatggctgcagacgtccctggcagcttccggaccctgggtcaccatggcggtcatcaggctcaggcaggcgcgagccaacctgcacagggaaccagaggaaatcggaca

SEQ ID NO: 786 - DNA, 442 bp, Homo sapiens
  MAP TO AP000248.1; EXPRESSED IN PLACENTA, SIGNAL = 1.7; EXPRESSED IN BONE MARROW, SIGNAL = 1.9; EXPRESSED IN HBL100, SIGNAL = 1.7; EXPRESSED IN FETAL LIVER, SIGNAL = 1.4; EXPRESSED IN LUNG, SIGNAL =   2; EXPRESSED IN ADULT LIVER, SIGNAL = 1.7; EXPRESSED IN BT474, SIGNAL = 1.7; EXPRESSED IN HELA, SIGNAL = 1.9; EXPRESSED IN BRAIN, SIGNAL =   2; EXPRESSED IN HEART, SIGNAL = 1.5
agacagaggattacccgcagccaactccaaaataaaataaccatgggaaccacccaggaagaatgggaaaggttcccaggaaacccatttcaaagcctcagattgcaagtggggagactcagcaaccctttaaccaccaaaacaatcgtcacaaacaatgaactttctattgtcccaaaaaaggtggatttgggcaggatcaagataataaagactttaaaagcttcaatcctcattccccagccttttgcaaacgccacacttaccccattggaaacagaagaggctttgtcaagatctccaaatgggccatctgcagggactgctcacatactaggtgagagactaggattcagagcattatgcccatggtaccaaccagcctcctcttcctcctcctgggcttcaggtctagaaaggtgggtctcagtccacagtgatt

SEQ ID NO: 787 - DNA, 487 bp, Homo sapiens
  MAP TO AP000245.1; EXPRESSED IN LUNG, SIGNAL = 0.87; EXPRESSED IN HELA, SIGNAL = 1.2; EXPRESSED IN ADULT LIVER, SIGNAL = 0.97; EXPRESSED IN BRAIN, SIGNAL = 0.78; EXPRESSED IN HEART, SIGNAL = 0.79; EXPRESSED IN PLACENTA, SIGNAL = 0.64; EXPRESSED IN BT474, SIGNAL = 2.3; EXPRESSED IN BONE MARROW, SIGNAL = 0.93; EXPRESSED IN HBL100, SIGNAL = 1.5; EXPRESSED IN FETAL LIVER, SIGNAL =   1
gcaaagccatttccagatattcaggactgtggagatttctgttctccattactataatgaacaaattcagataattaggatcttgagagtataccttgtgatacatcaagtcacattccacgttaggtgacaaatatacaagtgcattgagaaaggcaatttcaattttttcattagagagcaatctggtgtagacccttctaatggaatcagtatccacagacacatcatcagggcctaatttttgcaaattgttgtctccctgtgagctatcacctgtgcttgaggaagatgcttctgagtcttcttccatagcagcagcagaacatgcagcttttgccttttcattttcattcttctcttcatcctttgcttgaagagacttcagttcttccttggtgtgttgtttagctttccagaagctctctaccaatgcctcagcactagaaaaaactcttccaataacacagttaagggggaataatcc

SEQ ID NO: 788 - DNA, 454 bp, Homo sapiens
  MAP TO AP000245.1; EXPRESSED IN HBL100, SIGNAL = 1.9; EXPRESSED IN FETAL LIVER, SIGNAL =   3; EXPRESSED IN HELA, SIGNAL = 2.2; EXPRESSED IN BRAIN, SIGNAL = 2.3; EXPRESSED IN BT474, SIGNAL = 2.1; EXPRESSED IN BONE MARROW, SIGNAL = 2.2; EXPRESSED IN HEART, SIGNAL =   2; EXPRESSED IN ADULT LIVER, SIGNAL = 2.2; EXPRESSED IN LUNG, SIGNAL = 2.7; EXPRESSED IN PLACENTA, SIGNAL = 3.2
tatcacctttgtgccacaccaggggtgcaataatctctactagactaagagcccatctggtatacaccacgagtccaatttctctccgcaattctgctagacaaggcagcaggtgcacttttgctaggatttacgaagagcagatcctctgttctcacatcatccaagaggaatcttctagttttgggaaggactgaagtggggcagggacaagaattcttctttcatgtttttccccaccattgagtccgtccttagttgccctcttcttcttaagagctcagagtatttgaaaccaaaatcattaagacccatcctgtcctacctctccactgagacaatgaacatggagacaatttaccgcttctatggacaggaaggaaaagcaggaaatgttggaagaaaacaagttgatagaggttaatatctcaaaaatatcctaacactcagagaa

SEQ ID NO: 789 - DNA, 468 bp, Homo sapiens
  MAP TO AP000215.1; EXPRESSED IN LUNG, SIGNAL =  10; EXPRESSED IN HELA, SIGNAL =  13; EXPRESSED IN ADULT LIVER, SIGNAL = 7.6; EXPRESSED IN BRAIN, SIGNAL = 9.9; EXPRESSED IN PLACENTA, SIGNAL =  13; EXPRESSED IN BT474, SIGNAL = 7.4; EXPRESSED IN BONE MARROW, SIGNAL =  11; EXPRESSED IN HEART, SIGNAL = 6.8; EXPRESSED IN HBL100, SIGNAL =  11; EXPRESSED IN FETAL LIVER, SIGNAL = 9.2
tgattcagtgtctcccatcgtatgtgtttgctgtctaggagctgcgggcgtctttggagacacagcgtgctcagagcagtcgactctgcgtggcactgaaacacgagcagacggccaaggacaacctgcagaaggagctgcgtatcgagcactcacgctgcgaggccttgctggctcaggagcggagccagctctctgagctccagaaggaccttgcggctgagaagagccgcaccctggagctgtcagaggccttgcggcacgagcggctcctgaccgagcagctgagccagaggacacaggaggcttgcgtgcaccaggacacacaggcccatcacgctctgctgcagaagctgaaggaggagaagtcccgggtggtggacttgcaagcgatgcttgaaaaggtgcagcagcaagccctgcattctcagcagcagcttgaggctgaggctcagaagcactgtgagg

SEQ ID NO: 790 - DNA, 466 bp, Homo sapiens; identical to SEQ ID NO: 356
  MAP TO AP000209.1; EXPRESSED IN BRAIN, SIGNAL =  12; EXPRESSED IN ADULT LIVER, SIGNAL = 8.3; EXPRESSED IN BT474, SIGNAL = 7.7; EXPRESSED IN BONE MARROW, SIGNAL = 9.9; EXPRESSED IN HBL100, SIGNAL = 8.4; EXPRESSED IN HELA, SIGNAL =  10; EXPRESSED IN HEART, SIGNAL = 7.1; EXPRESSED IN PLACENTA, SIGNAL =  11; EXPRESSED IN FETAL LIVER, SIGNAL = 8.3; EXPRESSED IN LUNG, SIGNAL = 8.7

SEQ ID NO: 791 - DNA, 491 bp, Homo sapiens
  MAP TO AP000208.1; EXPRESSED IN PLACENTA, SIGNAL = 2.1; EXPRESSED IN BT474, SIGNAL = 1.6; EXPRESSED IN BONE MARROW, SIGNAL = 1.3; EXPRESSED IN HBL100, SIGNAL = 1.4; EXPRESSED IN HEART, SIGNAL = 1.1; EXPRESSED IN FETAL LIVER, SIGNAL = 1.2; EXPRESSED IN LUNG, SIGNAL = 1.5; EXPRESSED IN HELA, SIGNAL = 1.3; EXPRESSED IN ADULT LIVER, SIGNAL = 1.2; EXPRESSED IN BRAIN, SIGNAL = 1.6
cacagatcccctagaagagcacatcattgatgggggccagggctcctctactgggtttctgtctttcattcaatgtaatattgttccgtttagctattaacaatcagctatgaacaaagggtgaagaacactgacagtcacagtaaagaacttagcatcctggatgacaggctgtcgaggagatatccgatgatgtttcacgattccaaaacagcaaaaaaaaaaaaaaacccttttagagacctaacaattttgtccggacctaaacacggaagaacgattacctgatctaatattgttttctttttctttgagtcagtgactgaagacagctgcatttcacccattttcttcatcttttcatccatgtcaatcttctgttccagttttttgatctctgatttcaggagtcggagcgtgtcttccttgtggtggtgcctcgcgaccgcagtggcgcaggcagagtggatggcggtgatccagttttcaag

SEQ ID NO: 792 - DNA, 495 bp, Homo sapiens
  MAP TO AP000198.1; EXPRESSED IN PLACENTA, SIGNAL = 9.5; EXPRESSED IN BONE MARROW, SIGNAL = 9.2; EXPRESSED IN HEART, SIGNAL =  13; EXPRESSED IN BRAIN, SIGNAL =  16; EXPRESSED IN HELA, SIGNAL =  21; EXPRESSED IN LUNG, SIGNAL =  23; EXPRESSED IN HBL100, SIGNAL =  13; EXPRESSED IN BT474, SIGNAL =  14; EXPRESSED IN ADULT LIVER, SIGNAL =  13; EXPRESSED IN FETAL LIVER, SIGNAL =  20
tcccccatgctgttcttgtgatagtgactgagttctcaagagatctgacggttttagaaggggctcttcccctttcgctttctcctctctctcctgctgccatgtaagacatacctacttccccttccgccatgattgtaagtttcctgaggcctccccagccatgcagaactgtgagtgagtcaattaaacctctttcctttatttaaaaaaaaaatgtctaccatgtaaggtagtggtcaggaaaaataaggcaacacctaggaaacattaagtatattgccaaacatattataagcactgcatgtttcttattactgttattggtgtcatcattattattattggagtcatcattattattattggagtctaggataaagtagcagttgtttgcaaaatggaagacagtacctagtggtggaaaaccgaaagttccatggagacaggcatgcagcatgcagtaggccaactgcaacgaagccaggaaatgag

SEQ ID NO: 793 - DNA, 462 bp, Homo sapiens
  MAP TO AP000194.1; EXPRESSED IN BT474, SIGNAL = 1.6; EXPRESSED IN BONE MARROW, SIGNAL =   2; EXPRESSED IN HBL100, SIGNAL = 5.8; EXPRESSED IN LUNG, SIGNAL =   3; EXPRESSED IN HELA, SIGNAL = 1.9; EXPRESSED IN ADULT LIVER, SIGNAL =   2; EXPRESSED IN BRAIN, SIGNAL = 2.2; EXPRESSED IN HEART, SIGNAL = 1.8; EXPRESSED IN PLACENTA, SIGNAL = 2.1; EXPRESSED IN FETAL LIVER, SIGNAL = 1.8
ttgccggacagatcacatagcttgccctggacattcagggtgtggggctggactgagacctcaaggatgggaccattcactgcttcccgcaatgccacccactggagccatcaaggagtggccgtcatctgctacgtgattgccatgtgggtgctcagagctgcgattgctcaagtgggcgccgtccatgaaaggatggtgccctgccccgctgggcctggtcctgcaggaccctggatcacaggcccgcccacattgcctaaaaggaggtggttgtttttattctcctgtgtagatcctggaaaacacccctgaaaaccacccggaccacagccacttgaagcacgccctggagaaggcggaagagctctgttcccaggtgaacgaaggggtgcgggagaaggagaactctgaccggctggagtggatccaggcccacgtgcagtgtgaaggcctgtctga

SEQ ID NO: 794 - DNA, 479 bp, Homo sapiens
  MAP TO AP000189.1; EXPRESSED IN BT474, SIGNAL = 1.9; EXPRESSED IN BRAIN, SIGNAL = 1.6; EXPRESSED IN PLACENTA, SIGNAL = 6.5; EXPRESSED IN BONE MARROW, SIGNAL = 2.2; EXPRESSED IN HBL100, SIGNAL = 2.3; EXPRESSED IN FETAL LIVER, SIGNAL = 2.1; EXPRESSED IN LUNG, SIGNAL = 2.4; EXPRESSED IN HELA, SIGNAL = 1.5; EXPRESSED IN ADULT LIVER, SIGNAL = 1.9; EXPRESSED IN HEART, SIGNAL = 1.7
gttactaatggtagaactgggaccccagtccggccagactccagggcccaggacctgttcgtaacaactgggacctgcaggtggaaaggctgccccaggcgcctcttttctttttgtgctgcctgtaccagtagggccatctttgtagccaaaagtcgggggtgtggggccatgcccagggggacctggtaatgccatttctgcactttgacaaaaactgagttgtatgaatgacttagataatggacattgaaacatttttgtaattatttccctctctctcctcccttcctccctcttctttttctctgtccccctcaagaccctctttcccagctgcccgctcctcagcacccgaagattcgcctgtacaacgcagagcaggtcctgagttgggagccagtggccctgagcaatagcacgaggcctgttgtctaccaagtgcagtttaaatagtaagccggtatttctgttggatc

SEQ ID NO: 795 - DNA, 473 bp, Homo sapiens
  MAP TO AP000189.1; EXPRESSED IN BONE MARROW, SIGNAL =  11; EXPRESSED IN FETAL LIVER, SIGNAL =   1; EXPRESSED IN BRAIN, SIGNAL = 2.4; EXPRESSED IN PLACENTA, SIGNAL = 0.98; EXPRESSED IN BT474, SIGNAL = 0.64; EXPRESSED IN LUNG, SIGNAL = 0.75; EXPRESSED IN HELA, SIGNAL = 0.78; EXPRESSED IN HEART, SIGNAL = 0.93
tgggtcctgaactgatttccgtgggaggaaatcccagaattcccaattcagattaagggtaggacatccctaggttaaaattctcttattaaggttctctaagaagtcagatttgagcatacagatggactactactgcagcaatcactgactgagcattttacaaccctatttttaaggtgcctatgtagtttttccctcttgtcacagcttaattgaggtataactggtatctattatgccgtgcatgttttaaatatacattttgataagtttttaacatacgtgaaatcatccccacaatcaaaatcataaatatccattacccccaaaatgtcctcgttgtacacagttttgaaataaatgttgttgggattataagaggaagtaggctgggcacagtggctcatgcctataataggaagtgcatcatgttttcagtaatcaaatctgcctaatgatccatctagctt

SEQ ID NO: 796 - DNA, 462 bp, Homo sapiens
  MAP TO AP000188.1; EXPRESSED IN ADULT LIVER, SIGNAL = 1.1; EXPRESSED IN HEART, SIGNAL = 0.86; EXPRESSED IN BT474, SIGNAL =   2; EXPRESSED IN BONE MARROW, SIGNAL = 2.8; EXPRESSED IN HELA, SIGNAL = 1.1; EXPRESSED IN PLACENTA, SIGNAL =   1; EXPRESSED IN HBL100, SIGNAL = 1.9; EXPRESSED IN FETAL LIVER, SIGNAL = 1.4; EXPRESSED IN LUNG, SIGNAL = 1.4
aaaactcaaaaccctgtatatggcaaaattgcccttcaaaagcataaggaaattaagatgttcttagatagacaaaagctaagggagttcattaccgctagaactgccctgcgagaaatgcttaaggaagtcctgaaaggtgaaatgaaagggcactagacagaggggacagtgcagattcaggcaggtgcaatggcttctggggaagacccagccagtggggctattgccagcatccagtcagctgccaccttccctgaccccagtgtcaagtgatgcgcagggtgatccaggtgtgtgaggggcagctggatgtccagactgagggcactggtgccatcagtggctatcctaccactcaattcatgacccaggtggtgatccagggtgatatcaccagttatgatgcagttaacacagaggggaaagctgctgagatacactatactttcccacccctgc

SEQ ID NO: 797 - DNA, 474 bp, Homo sapiens; identical to SEQ ID NO: 263
  MAP TO AP000188.1; EXPRESSED IN LUNG, SIGNAL =   3; EXPRESSED IN HELA, SIGNAL = 2.5; EXPRESSED IN ADULT LIVER, SIGNAL = 3.2; EXPRESSED IN BRAIN, SIGNAL = 2.8; EXPRESSED IN HEART, SIGNAL = 2.2; EXPRESSED IN PLACENTA, SIGNAL = 1.9; EXPRESSED IN BT474, SIGNAL = 2.3; EXPRESSED IN BONE MARROW, SIGNAL =  15; EXPRESSED IN HBL100, SIGNAL = 2.4; EXPRESSED IN FETAL LIVER, SIGNAL = 2.2

SEQ ID NO: 798 - DNA, 434 bp, Homo sapiens
  MAP TO AP000188.1; EXPRESSED IN HBL100, SIGNAL = 1.3; EXPRESSED IN FETAL LIVER, SIGNAL = 1.3; EXPRESSED IN HELA, SIGNAL = 1.6; EXPRESSED IN ADULT LIVER, SIGNAL = 1.4; EXPRESSED IN BRAIN, SIGNAL = 0.98; EXPRESSED IN PLACENTA, SIGNAL = 1.5; EXPRESSED IN BONE MARROW, SIGNAL = 1.2; EXPRESSED IN BT474, SIGNAL = 1.1; EXPRESSED IN HEART, SIGNAL = 1.2; EXPRESSED IN LUNG, SIGNAL = 1.4
gaaaatacaaaatagcgtagctggaataattccaaatgtatcagaaaccacaataaacataagtggactaaacttcattaagaaagacaaagattatcagattttttaaaagaaactaaatccaactacccttcttagccatgtcaatcaatgtcatgacaatagtatatcaaagcagtgtacttccgtggactaattgttctgcatggttatgaaaaattaatgttgaagtttttaaaatgtgatttttgattgtcattttgcttgttcttctgcttagccattattggaccccctggaatgcaagtagaagtacttgctgattctttacatatgcgtttcttagcccctaaaattgagaatgaatacgaaacttggactatgaagaatgtgtataactcatggacttataatgtgcaatactggaaaaacgg

SEQ ID NO: 799 - DNA, 481 bp, Homo sapiens
  MAP TO AP000185.1; EXPRESSED IN LUNG, SIGNAL =  13; EXPRESSED IN HEART, SIGNAL =  11; EXPRESSED IN PLACENTA, SIGNAL =  21; EXPRESSED IN BT474, SIGNAL = 9.3; EXPRESSED IN BONE MARROW, SIGNAL =  16; EXPRESSED IN HBL100, SIGNAL =  13; EXPRESSED IN FETAL LIVER, SIGNAL =  19; EXPRESSED IN ADULT LIVER, SIGNAL =  14; EXPRESSED IN BRAIN, SIGNAL =  18; EXPRESSED IN HELA, SIGNAL =  11
acacacacacacacacacacagtatttctggattctgtgatgtttgatatttttcggcttttaacttttgtagtttgttgtgatttcatttctcattttaagtgaatatttttgtttatgcctaattttctattcatactttgacaatctttttcttaaatgtagaagctggacttgcccagtttatgactatcactcatcccaaagtgctgtcttgtagacacattcctgggctcctgggaccctggctctgacaccaccagagtccctcttcccaggaggcagcagctgctccattccttgcaggtgctggagtccaagagcaccaaggggtacctggaggccggggcctgtccagtggccttccttcctggccacatggctgcctttggccaccagctgcctgtgtgcagtctctctcccgagaatctgtgtggccattcatcacaggcctcctcttggaaaggcaaagaaggttgca

SEQ ID NO: 800 - DNA, 461 bp, Homo sapiens
  MAP TO AP000184.1; EXPRESSED IN PLACENTA, SIGNAL = 3.3; EXPRESSED IN BT474, SIGNAL = 2.8; EXPRESSED IN BONE MARROW, SIGNAL = 4.2; EXPRESSED IN LUNG, SIGNAL = 3.4; EXPRESSED IN ADULT LIVER, SIGNAL = 3.1; EXPRESSED IN BRAIN, SIGNAL = 2.9; EXPRESSED IN HBL100, SIGNAL = 2.8; EXPRESSED IN FETAL LIVER, SIGNAL = 3.8; EXPRESSED IN HELA, SIGNAL = 2.5; EXPRESSED IN HEART, SIGNAL = 2.8
actatgcagctctggatgcccccgacctgccgttcctctgaccactcatgagaagcccacaggggcagctctgccccctcaccttctacttccattgttcccacttttagagaccagaattttccccaaacaagtcaacatcttgctgtgtttgcagaaaacatcctagcattggagggactaccagatggaaaaatagctccccttttccatttagaagtggcttgtttgatttcaaaatataaaccctgtcctaataataaaaattactttttttctcagagatgtgccaaagtccctcaccatctatccacaggagaatgttccatttttttggatgcctcatagtcacctggtgtgggggacagaccctgtggtggccccacggtccgcacctcctggtattcacacccttgtgtgctgccctccccttgagtgtgggcagaccctgtgacttgctt

SEQ ID NO: 801 - DNA, 477 bp, Homo sapiens
  MAP TO AP000179.1; EXPRESSED IN HBL100, SIGNAL =   5; EXPRESSED IN BRAIN, SIGNAL = 6.4; EXPRESSED IN BT474, SIGNAL =   3; EXPRESSED IN BONE MARROW, SIGNAL = 6.7; EXPRESSED IN FETAL LIVER, SIGNAL = 5.1; EXPRESSED IN HELA, SIGNAL = 7.2; EXPRESSED IN ADULT LIVER, SIGNAL = 3.5; EXPRESSED IN PLACENTA, SIGNAL =   4; EXPRESSED IN LUNG, SIGNAL = 5.4; EXPRESSED IN HEART, SIGNAL = 5.2
aactccatgcatctgcttccttaacgccagcacctctcctccatttgccccttagtttaattcccagggtctttgcgcttgtcaacaggttacttcccacccgcttcctgcagagggctttgttttctggggtcagagacagcatgagcccacagggccatccccactgcccccttctcagggtgcagccccggggaaatgagcaatgggacttggacagagctcaccaattccttctgggggaagctgatggtgccttcaatttttgtttttgcttcagatgaattaaaaaacaaaaccgtgtgtgaagaccaggagctgaaactgcactgccatgaatccaagttcctcaacatctactctgcgacctacggcaggaggacccaggaaagggacatctgctcctccaaggcagagcggctcccccctttcggtatgtgcttttgtgtgtgtattagccagggttctctagaggga

SEQ ID NO: 802 - DNA, 471 bp, Homo sapiens
  MAP TO AP000179.1; EXPRESSED IN PLACENTA, SIGNAL = 4.9; EXPRESSED IN BT474, SIGNAL = 3.6; EXPRESSED IN BONE MARROW, SIGNAL = 4.7; EXPRESSED IN HEART, SIGNAL = 3.9; EXPRESSED IN ADULT LIVER, SIGNAL = 3.9; EXPRESSED IN HBL100, SIGNAL = 3.8; EXPRESSED IN FETAL LIVER, SIGNAL = 4.5; EXPRESSED IN LUNG, SIGNAL = 5.6; EXPRESSED IN HELA, SIGNAL = 5.5; EXPRESSED IN BRAIN, SIGNAL = 5.1
ttaccaggagaggagatgcccacagctaagtcatcctcacaaccaggaaggccctgtgccactcagcccccaggagcctcctcagatatccccattgttcaggctctgccaggttctggccctatcgccagcctgaagcgagtcctgtcctcacagacagatcctgtggctgctgacacacacctttctacatagacacctctcatttcatctgtgtggggatcaggggcagagaatggaggaaaaaccactacagtcctccaagggaaggagacccatggaaggcacgagacactgtggtcccctcacctttgaatccctcttggtcaccagggtgtacagggtctttttattcaaatcaaaatggctgcagacgtccctggcagcttccggaccctgggtcaccatggcggtcatcaggctcaggcaggcgcgagccaacctgcacagggaaccagaggaaatcggaca

SEQ ID NO: 803 - DNA, 452 bp, Homo sapiens
  MAP TO AP000178.1; EXPRESSED IN BT474, SIGNAL = 3.8; EXPRESSED IN BONE MARROW, SIGNAL = 3.7; EXPRESSED IN FETAL LIVER, SIGNAL = 3.1; EXPRESSED IN HELA, SIGNAL = 2.4; EXPRESSED IN PLACENTA, SIGNAL = 4.2; EXPRESSED IN HEART, SIGNAL = 2.4; EXPRESSED IN BRAIN, SIGNAL = 2.9; EXPRESSED IN ADULT LIVER, SIGNAL = 2.7; EXPRESSED IN LUNG, SIGNAL = 2.8; EXPRESSED IN HBL100, SIGNAL = 3.2
attgaacatgaggtccccaccagagacagaacccctgtgagagaacacatgtatcgtctaaattcttactctgcacaaggactttgggatcatgctctgtgacatcactgcctacaatcacaagtggcaggtcttctcagctgaccctcagcacccacgctaccacactgcccaccggcctgtccaaccctgcggctccaaggacacatcacttggcttccaccctagggctgcagaatggccttttccacctggtgaggtctggaaggaaagcccaaacccagatcagagcctaccttgctcagggcttctctgaagagctgcacgaattcttccatcatcacagctgtgtacacgcctgattcctgccacacctctttattcaggcagtggtcaacagtttttaatgccctcttcaaaatgacagaaataagggataaggctgtgtgcct

SEQ ID NO: 804 - DNA, 450 bp, Homo sapiens
  MAP TO AP000175.1; EXPRESSED IN LUNG, SIGNAL = 1.8; EXPRESSED IN PLACENTA, SIGNAL = 1.2; EXPRESSED IN BT474, SIGNAL = 1.2; EXPRESSED IN BONE MARROW, SIGNAL = 1.8; EXPRESSED IN HBL100, SIGNAL = 1.2; EXPRESSED IN FETAL LIVER, SIGNAL = 1.2; EXPRESSED IN HELA, SIGNAL = 1.8; EXPRESSED IN ADULT LIVER, SIGNAL = 1.4; EXPRESSED IN BRAIN, SIGNAL =   2; EXPRESSED IN HEART, SIGNAL = 1.5
tggataaaactggtccccaccctctctggtcttgtcttcctattgactactggtgcacaggcagccaccagccatagggcctgagcagtgcaggccagaggagttggcctcctaggcacagagcaggcccacaaaggctgcaaaacaaatttggagaatgaccagttcacttgactctattcgattgaaagagtgtgtgttattgcattcgttcattcccatgtgtatatctaataaacatctattgtacttctgctgtatcttaccatggttccaggtgcttgggatgcagcaaaggaaaaacaacctgatgaggcctatggaccaccagagcttacattccagtgacgggcaaggtcaggtaacaaaaaggaagcagaagttagtgatggtggaaaaggaggaggaagaggaggagatgacaaggtcacaagactggctttggagctc

SEQ ID NO: 805 - DNA, 472 bp, Homo sapiens
  MAP TO AP000175.1; EXPRESSED IN ADULT LIVER, SIGNAL = 2.6; EXPRESSED IN BONE MARROW, SIGNAL = 1.9; EXPRESSED IN HBL100, SIGNAL = 1.7; EXPRESSED IN HELA, SIGNAL = 2.2; EXPRESSED IN BRAIN, SIGNAL = 2.7; EXPRESSED IN HEART, SIGNAL =   2; EXPRESSED IN PLACENTA, SIGNAL = 1.7; EXPRESSED IN BT474, SIGNAL = 1.4; EXPRESSED IN LUNG, SIGNAL = 2.1; EXPRESSED IN FETAL LIVER, SIGNAL = 1.6
atgccctcagtgcagtgtctggcaccctgcatattctcaaaaaaggctggtggcagctgtgaaggtgctgaggagggagtttgaggaagctttgcctctcctgtcttcccatgtcacccctttgttagggaggagccacatcagctacaggccagggccctagagagctgtagcccctcacagtggcacttgccacgaggctcagcatccccacttcccacatctaccctgtcgtctttcccactcaaaaactggacatcatgaactcttatctgcagactttgaacatccttattagaaagggctgcaaaagtgtagagagatatttccctgagaagcttctcaacaacatgaatgaaaaaatagacgagctctcttggtttgcaaatgctcttaaagttgagggcaaaaatgtgaaaaagaagagtctttttttcctcctcacccacggtgaggtcagaggtggagttgc

SEQ ID NO: 806 - DNA, 475 bp, Homo sapiens
  MAP TO AP000175.1; EXPRESSED IN PLACENTA, SIGNAL = 1.5; EXPRESSED IN ADULT LIVER, SIGNAL = 1.3; EXPRESSED IN HEART, SIGNAL = 1.3; EXPRESSED IN LUNG, SIGNAL = 1.2; EXPRESSED IN BT474, SIGNAL = 1.1; EXPRESSED IN BONE MARROW, SIGNAL = 1.4; EXPRESSED IN HBL100, SIGNAL = 0.86; EXPRESSED IN FETAL LIVER, SIGNAL =   1; EXPRESSED IN HELA, SIGNAL = 1.1; EXPRESSED IN BRAIN, SIGNAL = 0.87
gaatgagaggtcttgctggctagttcagtatcaggtgaggggtggaaatgagctagaagggtgaaaataccatgttattttaatcacagtgatggttcacgtcaggctccatagacccagctggaatcccagaggctcatttcctccatccaggtctattccacccaggtctattccatccaggtccattccatcgagatccactccatccagatccactccatccaggtcctctccattcgggtccactccatccaggtccactgtatccaggtccactccatccaggtccactgtatccaggtccactccatccaagtgaattccatccaggtccactccatccaagtgaacttcatccaggtgcgctccatccaggtgcactccatccggattcactccatccagatccactctatctgggtccactccatccgagtccactccatccaggtccaatccatccagatccact

SEQ ID NO: 807 - DNA, 459 bp, Homo sapiens
  MAP TO AP000175.1; EXPRESSED IN PLACENTA, SIGNAL = 1.7; EXPRESSED IN BT474, SIGNAL = 1.8; EXPRESSED IN FETAL LIVER, SIGNAL = 1.7; EXPRESSED IN HELA, SIGNAL = 1.6; EXPRESSED IN ADULT LIVER, SIGNAL = 1.6; EXPRESSED IN BONE MARROW, SIGNAL = 1.6; EXPRESSED IN HBL100, SIGNAL = 1.6; EXPRESSED IN LUNG, SIGNAL = 1.7; EXPRESSED IN BRAIN, SIGNAL =   2; EXPRESSED IN HEART, SIGNAL = 1.5
taagctggaggtcacagcaggcaggagaagggccgtgagcactgtccggacgtcctcatgattgtttatgctttcttggtgtgcagattcctttggctgccgcaatattttccgcaaaacctcagattccaattgtgtggcttcttcttccatggagttcatccccgtgccaccgcccaggaccccgaggattgtgaagaaaccggagccccatcagccagggcccggaagcactggcatcccccacaaggaagaccccctgatgctggacatggtgcgctccttcgagtctgtggatcgcgacgaccacgtagaagtgctgtctccctctcatcactacaggattctgaactccccggtcagcttggctcgcagaaattccagcgagaggacgctgtccccgggtctgccatccggaagcatgtcgcctctccatactcctttgcatccaactctggt

SEQ ID NO: 808 - DNA, 472 bp, Homo sapiens
  MAP TO AP000174.1; EXPRESSED IN BONE MARROW, SIGNAL = 2.6; EXPRESSED IN ADULT LIVER, SIGNAL = 2.2; EXPRESSED IN PLACENTA, SIGNAL = 2.5; EXPRESSED IN BT474, SIGNAL = 2.2; EXPRESSED IN HBL100, SIGNAL = 2.2; EXPRESSED IN LUNG, SIGNAL = 3.7; EXPRESSED IN HELA, SIGNAL = 2.7; EXPRESSED IN BRAIN, SIGNAL = 4.3; EXPRESSED IN FETAL LIVER, SIGNAL = 2.6; EXPRESSED IN HEART, SIGNAL = 4.4
ttccattgtcttccttaataattggaccttttgatttttcctaatgttgtacctatatgtgtgtgtgtgtgtgtgtttgtgtggtatatgcataaatataaatgtgtatatatatattttctgttgatgctgttttaggtaaggtgtttctcctctgcagagacatagctagcatttttcttgggttcctgtgagtagccaaggcatcgctattgtctgtaatgtctgataacaggcatgttcttgttttctccttaggtggccataaaagtcattgataagaagagagccaaaaaggacacctatgtcaccaaaaacctgcggcgagagggtcagatccagcagatgatccgccaccccaatatcactcagctccttgatattttagaaacggaaaacagctactacctggtcatggagctgtgccctgggggcaacctgatgcacaagatctatgagaagaagcggctgg

SEQ ID NO: 809 - DNA, 486 bp, Homo sapiens
  MAP TO AP000169.1; EXPRESSED IN HBL100, SIGNAL = 4.7; EXPRESSED IN BRAIN, SIGNAL = 5.6; EXPRESSED IN PLACENTA, SIGNAL = 3.1; EXPRESSED IN BT474, SIGNAL = 2.9; EXPRESSED IN BONE MARROW, SIGNAL = 1.7; EXPRESSED IN FETAL LIVER, SIGNAL = 6.6; EXPRESSED IN HELA, SIGNAL =   2; EXPRESSED IN ADULT LIVER, SIGNAL = 8.2; EXPRESSED IN HEART, SIGNAL = 5.3; EXPRESSED IN LUNG, SIGNAL = 4.9
cagacagaacctaccagaaaagaacaagtacaaaacactatcattatctgttttctcaagacagtcccaaatgtccttgtgcgatcaccacaaactcagtgattggcccaagtcattcccgggtgccatgaacagtaactggtgtgcagcattagaacaaggggacacggccttgattctcttctgagcaacatgaactgggatttctgccaccccgatctcggctgccacctccgaagaagtcgtgaccagccacctccacagtaaaagattcctcccgtgagtatgatttggaatgcgtcctcgtcgcgtgccagttcagctgaggtggatcggcgtgtactccggcctcctggtctggataatttttggcttaggtctcctcattctttccatttcctcttcttcctccttctcttgatcactctcacatacatggaccaccacgctgggagtggtgtcagtcgctgcgtgcaattcatactt

SEQ ID NO: 810 - DNA, 381 bp, Homo sapiens
  MAP TO AP000168.1; EXPRESSED IN HELA, SIGNAL = 2.6; EXPRESSED IN ADULT LIVER, SIGNAL = 3.6; EXPRESSED IN HEART, SIGNAL = 3.9; EXPRESSED IN BT474, SIGNAL = 2.4; EXPRESSED IN BONE MARROW, SIGNAL = 1.8; EXPRESSED IN HBL100, SIGNAL = 1.8; EXPRESSED IN BRAIN, SIGNAL = 2.8; EXPRESSED IN PLACENTA, SIGNAL = 1.8; EXPRESSED IN FETAL LIVER, SIGNAL = 2.3; EXPRESSED IN LUNG, SIGNAL = 3.2
tcattaatccacccctcaccccttacaacagccaaaaagaaatccagtggtatccatcacaataaagagtatgagaggaatgtgattagaaaatcaggttgccaggcaggatgtgtccagttttagccagtggtggggttcatggggaaggcttcgtctcaggaaggtgtgtgttgggttgttctatggccagatggttttcaacgacatagcacgacctgtagctctccaggacccgggcctggacataggccttgtccttctcttgccaggcatcggactcgatgtagacgttgaatgggtcgttcgagtgctccagcttcttggagcggatgtagctcagcatgatgcccagggtgaagaagccgaagaatcccagta

SEQ ID NO: 811 - DNA, 482 bp, Homo sapiens
  MAP TO AP000168.1; EXPRESSED IN BONE MARROW, SIGNAL = 1.8; EXPRESSED IN FETAL LIVER, SIGNAL = 1.6; EXPRESSED IN LUNG, SIGNAL = 1.4; EXPRESSED IN PLACENTA, SIGNAL = 2.5; EXPRESSED IN HEART, SIGNAL = 2.4; EXPRESSED IN BRAIN, SIGNAL = 1.2; EXPRESSED IN ADULT LIVER, SIGNAL = 1.4; EXPRESSED IN HELA, SIGNAL = 1.4; EXPRESSED IN HBL100, SIGNAL = 1.8; EXPRESSED IN BT474, SIGNAL = 1.7
accctagcaccatcatccacagatccccagaggaagtcattcctggatgacttcctcatcgattttaaataatttccatttcagaggaaggcctttatctgacctgatcccctaaatattgggggaaacctacatagggacaaagacagcaggtgtctgcaatgttgagaatcagtgtgttctgtcactgtctctatcagggctggtggcacatgcaaatctctttcccactctccagttgaacactaacgccatggtgcccacaccttccttattagtccatgtacatggggtttgtcaagacagtggttcatggctctgaccctgagcatgtcagatttcaggggctttatgcaaaatatccataccagttggggtcatttcccatcagtattgctcacaatggagcctacaaacccctagttcccatccaacacatctccaaggcagactctcagaccagctcccagaaatgaggtgag

SEQ ID NO: 812 - DNA, 471 bp, Homo sapiens
  MAP TO AP000165.1; EXPRESSED IN BT474, SIGNAL = 1.4; EXPRESSED IN BONE MARROW, SIGNAL = 2.1; EXPRESSED IN HELA, SIGNAL =   2; EXPRESSED IN ADULT LIVER, SIGNAL = 1.6; EXPRESSED IN PLACENTA, SIGNAL = 1.5; EXPRESSED IN HBL100, SIGNAL = 1.3; EXPRESSED IN FETAL LIVER, SIGNAL = 1.5; EXPRESSED IN LUNG, SIGNAL = 2.1; EXPRESSED IN BRAIN, SIGNAL = 2.3; EXPRESSED IN HEART, SIGNAL = 2.4
cagggatcattgtttctgcctcctgggctcctccaggctctcacctctgtctaggtcatcgctttggaggtactgggctttcttggcccctccccaaactttaacccatttaaggcagccgtcactttttgcagggcctccaagctcactcagaaatcttgtgttgaatggtgcagagctaagttgttcactctgcagtatcatattagaagagatttggtttaccctgaatccactctgacgatgtttgttcgtttgaccttcaggtgtgcaagttggttgtcttcagggaagagagcagttctcactcaacaatcagacataactctgtcttataacaaaattgcacccatggagcgtctaggaactccctacccaaagtgtggtctgtgggccagcagcacctgcgtcatctgggaacttgtaagaaatgggattcttagcagatcccagaccctgctgcatcagaac

SEQ ID NO: 813 - DNA, 459 bp, Homo sapiens
  MAP TO AP000165.1; EXPRESSED IN LUNG, SIGNAL = 7.6; EXPRESSED IN BRAIN, SIGNAL = 3.1; EXPRESSED IN HEART, SIGNAL = 4.5; EXPRESSED IN PLACENTA, SIGNAL = 5.6; EXPRESSED IN BONE MARROW, SIGNAL =  34; EXPRESSED IN HBL100, SIGNAL =  48; EXPRESSED IN FETAL LIVER, SIGNAL =  23; EXPRESSED IN ADULT LIVER, SIGNAL =  11; EXPRESSED IN BT474, SIGNAL =  20; EXPRESSED IN HELA, SIGNAL =  14
aaaatcagcggttggacttggccacacatgccagctcatccttcttcttgatggcaaaggagttggaggagcccttggtggcagtgatgagctcatctgccaggcactcagcaatggtcatgatctcccggagggcaccctcaagagtgcctgtgcacagcaaccaggtggtctgattcacatggtgcagtggggacacgtccacagcctgtcatctcacagtccctgctcacccaaagcctgtggagtcctcctggggaccaccattgatgatggtgttcaccaggacctggaggtgagggttctcgcctgtgagcaggtggatgaaatggaaggcatacttgatgatgcgcacagtcatgagcttcttgctgttgttgtggccatgcattatcatggagttagtgagggactccacaatggggcactgagctttgcagaagcgtttggcagcataag

SEQ ID NO: 814 - DNA, 474 bp, Homo sapiens
  MAP TO AP000158.1; EXPRESSED IN HBL100, SIGNAL = 2.1; EXPRESSED IN HELA, SIGNAL = 2.7; EXPRESSED IN ADULT LIVER, SIGNAL = 2.4; EXPRESSED IN BRAIN, SIGNAL = 3.9; EXPRESSED IN HEART, SIGNAL = 2.5; EXPRESSED IN PLACENTA, SIGNAL = 1.9; EXPRESSED IN BT474, SIGNAL = 1.4; EXPRESSED IN BONE MARROW, SIGNAL =   2; EXPRESSED IN LUNG, SIGNAL = 2.9; EXPRESSED IN FETAL LIVER, SIGNAL = 1.7
cggactttaagggtggcagatcttctctaaactcatctagcaaaattctttgctaaaactggacttgcaaggacagacaaggaaggccaaggcggaagattagtggagaagagggctccaagacgcctgcctaaggtctggccaaggaggagtctttatcaccatcgtaccccactgcagacatcccaagaatttgtctctgaaccttgaagcttggaaagcaatggggctaaaaattagtcatcacaaagttagctttgcctggagaccctggaagcttaatacgaggcagacaaaaccaaaatgaagagcagccgtgaccccactaatcttgaggaaaagcaaggctcagtcttcaagaatagcagagatgccgttgtcatctccagcatgattcagaatagtgaggcagcagggaagatgaagattgcaaggagttgaaattccgtggcatggctgttcaggtgcttagga

SEQ ID NO: 815 - DNA, 487 bp, Homo sapiens
  MAP TO AP000154.1; EXPRESSED IN PLACENTA, SIGNAL = 1.2; EXPRESSED IN BT474, SIGNAL = 1.1; EXPRESSED IN BONE MARROW, SIGNAL = 1.9; EXPRESSED IN HBL100, SIGNAL = 0.98; EXPRESSED IN LUNG, SIGNAL = 1.5; EXPRESSED IN HELA, SIGNAL = 1.3; EXPRESSED IN ADULT LIVER, SIGNAL = 1.3; EXPRESSED IN BRAIN, SIGNAL = 1.3; EXPRESSED IN FETAL LIVER, SIGNAL =   1; EXPRESSED IN HEART, SIGNAL = 1.3
catcattgcagcttcctcagccctaggatggtttttagatctatcaagggatagaagattgtccagccccttgctgcccagtgtagtcagtgggctgacgacattagcatcacctgggtgcttgctagcaatgcaaaatctcaggccccagcccagaccactggatgagaatctgcatttgaacaaggtccccaggtcattcatgcacattcaaagtcagagacactgccccaacacctcactttagagtgagaaaacttaacaggtttaagcaacttgcagaagatgacacaactgaccagcgacagtctgtcttctagtcaggcctctttccagttctccacgctgaccttgactttcgagatcacataccaagaccttcagctggatggtccctgtagctgctgtgaccactagaagcagggttaggggcgagactaatttaatatcaattaatgtagacactaggcttagggctagggaaaat

SEQ ID NO: 816 - DNA, 494 bp, Homo sapiens
  MAP TO AP000154.1; EXPRESSED IN HEART, SIGNAL = 1.2; EXPRESSED IN FETAL LIVER, SIGNAL = 1.6; EXPRESSED IN LUNG, SIGNAL = 1.5; EXPRESSED IN HELA, SIGNAL = 1.4; EXPRESSED IN BRAIN, SIGNAL = 1.4; EXPRESSED IN PLACENTA, SIGNAL = 2.2; EXPRESSED IN BT474, SIGNAL = 1.7; EXPRESSED IN BONE MARROW, SIGNAL = 3.1; EXPRESSED IN HBL100, SIGNAL =   2; EXPRESSED IN ADULT LIVER, SIGNAL = 1.1
tagtttactgacccctgggctaaatgatctttatagccatttttggtctcagaattaatgttgaactgtaactaccatgcatttgggatagtaatgtgtgaaaaggcagaggatttaactatgaagtgtcctttttaataaaggcctcaacatatatatttaaacatatttgaaattcaattatgtgagtgtttacgtattccaccaaatttagagaaagcctttcatcttctctcttacaggagtacaaaccaccaggaacccgtaaacttcataacattcttggagtggaaacaggaggacctggtgggcgacgtgctggggagtcaggtcatacggtcgctgactacttgaagttcaaagacctcattttaaggatgcttgattatgaccccaaaactcgaattcaaccttattatgctctgcagcacagtttcttcaagaaaacagctgatgaaggtacaaatacaagtaatagtgtatctacaagcccc

SEQ ID NO: 817 - DNA, 479 bp, Homo sapiens
  MAP TO AP000154.1; EXPRESSED IN FETAL LIVER, SIGNAL = 1.9; EXPRESSED IN BRAIN, SIGNAL =   2; EXPRESSED IN HEART, SIGNAL = 1.3; EXPRESSED IN PLACENTA, SIGNAL = 1.9; EXPRESSED IN BT474, SIGNAL = 2.1; EXPRESSED IN BONE MARROW, SIGNAL = 1.5; EXPRESSED IN ADULT LIVER, SIGNAL = 1.2; EXPRESSED IN HELA, SIGNAL = 1.5; EXPRESSED IN LUNG, SIGNAL = 1.9; EXPRESSED IN HBL100, SIGNAL = 1.8
tgaaaatctcgtaggtgaaagtaagtcttaaaggttgttgctgttgctttacaaaaagattttctgaagattttctcaatacaagtttatattcattttaatcactatggatcttctataccattaaaaacataactgttgtgttgagtaacatatacctgtttgtagttagaaaagttttttaatattgaatatcctaaagttcttatttaaggaaccattagatatgtcaaatgatacaaacattaggatatgaatatttcctttaaacctcacttatcttcttgtaggaggagagacttcagcatgcaaaccttcatctgttcggcttgcaccgtcattttcattccatgctgctggccttcagatggctggacagatgccccattcacatcagtacagtgaccgtcgccagccaaacataagtgaccaacaggtttctgccttatcatattctgaccagattcagcaacctctaa

SEQ ID NO: 818 - DNA, 450 bp, Homo sapiens
  MAP TO AP000149.1; EXPRESSED IN BT474, SIGNAL =   7; EXPRESSED IN LUNG, SIGNAL = 3.8; EXPRESSED IN HELA, SIGNAL = 2.9; EXPRESSED IN ADULT LIVER, SIGNAL = 3.4; EXPRESSED IN PLACENTA, SIGNAL = 6.8; EXPRESSED IN BONE MARROW, SIGNAL = 3.7; EXPRESSED IN HBL100, SIGNAL = 4.2; EXPRESSED IN FETAL LIVER, SIGNAL = 4.5; EXPRESSED IN BRAIN, SIGNAL = 4.1; EXPRESSED IN HEART, SIGNAL = 2.6
caggaagccacatccataggaaaagggggagagtactacaacaaaagaacaccccgtgaaacaaaagaatctgaacaacggccttcagccctagaccttccctctgacagagcctacccaaatgagaaggaaccagaaaaccaactctggtaatatgacagaacagggctctttaaaccccccacaaaaatcacactagttaccagcaatggatccaaaccaagaagaaatctctgatttacctgaaaaagaattcaggaggttagttattaagctaatcagggagcaccagagaaaggcgaaccagtgcaaggaaatccaaaaatcaatacaagaagtgaagggagaaatattcaaggaaatagatagcttaaagaaaagacaattaaaacttcaggaaatattggacacacttatagaaatgcaaaaagctctgggaagtctcagcaa

SEQ ID NO: 819 - DNA, 471 bp, Homo sapiens
  MAP TO AP000144.1; EXPRESSED IN BONE MARROW, SIGNAL =  11; EXPRESSED IN LUNG, SIGNAL =  10; EXPRESSED IN BT474, SIGNAL = 8.6; EXPRESSED IN HBL100, SIGNAL = 8.4; EXPRESSED IN FETAL LIVER, SIGNAL = 8.2; EXPRESSED IN HELA, SIGNAL = 6.4; EXPRESSED IN ADULT LIVER, SIGNAL =   7; EXPRESSED IN BRAIN, SIGNAL = 7.6; EXPRESSED IN PLACENTA, SIGNAL =  13; EXPRESSED IN HEART, SIGNAL = 5.9
gcagcaaagcattcaagaggtaacttgggtgctgttaaaggcatttagttttataagggaagcagggcatgaaagtttggaaaatttgcagcctgacaatgcaatagaaaagaaaatcccatattctgaggagaaaatcaagctggctgcagaaatttgcatatgtaacaaggagttaaatgttaatccccaagacaatggggaaaatgtctccagggcatgccagaggtcttcacagcagcccctcccatcacaggcctgcaggcctaggaggaaaaagtgatctcttgggccaggcccagggtccccatgctgtgtgcagcctggggacttggtgccttgtgtcccagctgctccagccatggctgaaaggggccaacatagagctcggattgtggcttcagagggtgcaagctgtaagccttggcagcttccatgtggtgttgagcctgccagtgcacagaagtcaaa

SEQ ID NO: 820 - DNA, 466 bp, Homo sapiens
  MAP TO AP000139.1; EXPRESSED IN BONE MARROW, SIGNAL =  16; EXPRESSED IN LUNG, SIGNAL =  11; EXPRESSED IN HEART, SIGNAL =  10; EXPRESSED IN BRAIN, SIGNAL =  12; EXPRESSED IN PLACENTA, SIGNAL =  13; EXPRESSED IN BT474, SIGNAL =  14; EXPRESSED IN HBL100, SIGNAL =  34; EXPRESSED IN FETAL LIVER, SIGNAL =  13; EXPRESSED IN HELA, SIGNAL =  16; EXPRESSED IN ADULT LIVER, SIGNAL = 9.6
agaataaaagcaggctgcccgaatgagcagtagcaactcgctgtggtccgcttctgtagtgtgaggaggtgtgttctttccgtctttgcaataagtgttgctgttgctcactctgggtccagctgcgtttatgagctgtaacactcaccgctaaggtccgcagattcactcttgaagccagtgagaccacaaacccaccaggaggaacgaacaactccagctgcgccaccttaagagctgtaacactcactgaaggtttgcagcttcactcctgagccagcgtagaccatgaacacaccggaaggaagaaactcggaacacatccgaacatcagaaggaacaaactccggacacgccgcctttaagaactgtaacaccgccagggtccacggcttcatgcttgaagttggtaagaccaagaacccaccaattccggacacgttttggcgaccacgaagggactttt

SEQ ID NO: 821 - DNA, 488 bp, Homo sapiens
  MAP TO AP000139.1; EXPRESSED IN PLACENTA, SIGNAL = 2.8; EXPRESSED IN LUNG, SIGNAL = 1.5; EXPRESSED IN BRAIN, SIGNAL = 1.6; EXPRESSED IN HEART, SIGNAL = 1.1; EXPRESSED IN HBL100, SIGNAL = 1.7; EXPRESSED IN FETAL LIVER, SIGNAL = 2.8; EXPRESSED IN HELA, SIGNAL = 1.3; EXPRESSED IN BT474, SIGNAL =   2; EXPRESSED IN BONE MARROW, SIGNAL = 2.2; EXPRESSED IN ADULT LIVER, SIGNAL = 1.5
aggtagggtttgtgtgtgtgtcttattttttataaaattattttaaacttgtagaaaagttgcaagactagtaaaagaattcttgaatatccttcacccagattccccaaatgttaacttttactacatttgctttattcgatgtagtttttctctaccatttgggaacatataaactaaattattttttggtgacttctgcgttttcatttagatttacaatttttttttatccactgttcaggaattgaaccaaagttaaacatccttgaaattgttaaacctgcggacactgttgaggttgttattgatccagatgcccaccatgctgaatcagaagcacatcttgttgaagaagctcaagtgataactcttgatggcacaaaacacatcacaaccatttcagatgaaacttcagaacaagtgacaagatgggctgctgcactggaaggctataggaaagaacaagaacgccttgggatacccta

SEQ ID NO: 822 - DNA, 471 bp, Homo sapiens
  MAP TO AP000139.1; EXPRESSED IN PLACENTA, SIGNAL = 2.2; EXPRESSED IN FETAL LIVER, SIGNAL =   4; EXPRESSED IN LUNG, SIGNAL =   2; EXPRESSED IN HBL100, SIGNAL = 5.2; EXPRESSED IN HELA, SIGNAL = 3.3; EXPRESSED IN ADULT LIVER, SIGNAL = 3.3; EXPRESSED IN BT474, SIGNAL = 2.1; EXPRESSED IN BONE MARROW, SIGNAL = 2.3; EXPRESSED IN BRAIN, SIGNAL =   2; EXPRESSED IN HEART, SIGNAL = 3.5
tgctaaatgatttccaagaccctatgtatttctataaattgatgtggtttataatacatgacatgacagtaagaatgtattttaaacagcaataaatttagtaggattttcccttgtaactcatataaagatacagtttctgacttaaaaaaatcaagatccttatcttcttttttgagggcacctaatgaacctctatgtcagagatgagctcagtgaaggtctaatactttcaaataccaagtcatttttattaccaccttgaaacttacatactttgaatatttatatttacactgtagttatttattcacttactgtcgcttagatttgtattctctaatcttgtccacaaagagtttctgtataggatcaagttccttattaaatgccactgctgtaacaccaatgttcctccgcaaatggactgagacggctgaccgaatgacagaggagaacctgaagagcctc

SEQ ID NO: 823 - DNA, 471 bp, Homo sapiens; identical to SEQ ID NO: 822
  MAP TO AP000139.1; EXPRESSED IN FETAL LIVER, SIGNAL = 3.9; EXPRESSED IN LUNG, SIGNAL = 1.6; EXPRESSED IN ADULT LIVER, SIGNAL = 3.6; EXPRESSED IN BRAIN, SIGNAL =   3; EXPRESSED IN HEART, SIGNAL = 4.6; EXPRESSED IN BT474, SIGNAL = 2.4; EXPRESSED IN PLACENTA, SIGNAL = 1.3; EXPRESSED IN HELA, SIGNAL = 3.3; EXPRESSED IN HBL100, SIGNAL = 3.6; EXPRESSED IN BONE MARROW, SIGNAL = 1.3

SEQ ID NO: 824 - DNA, 463 bp, Homo sapiens
  MAP TO AP000135.1; EXPRESSED IN HBL100, SIGNAL = 3.3; EXPRESSED IN HELA, SIGNAL = 3.6; EXPRESSED IN ADULT LIVER, SIGNAL = 3.7; EXPRESSED IN BRAIN, SIGNAL = 4.1; EXPRESSED IN HEART, SIGNAL = 3.1; EXPRESSED IN BT474, SIGNAL = 3.4; EXPRESSED IN BONE MARROW, SIGNAL = 3.5; EXPRESSED IN FETAL LIVER, SIGNAL = 3.6; EXPRESSED IN PLACENTA, SIGNAL = 3.4; EXPRESSED IN LUNG, SIGNAL = 4.1
cacaagcttctcagccacacttaaattacagaaacagagtgttgttcatgagtcattaacattttactgaaccatatatttacctatatattaaatttaatttataaactcagtattattcccaacataaaagccattttttggttttaaatcttaagaggatcccttcctcattcaagagaaaactaataccacaaattttacaaaacaacttcatagaacattgttgtcattgctaaatgttacttaggttatgccttacaactattaccaattttctatctgctgaggaataaaaaaaaaaactaacaatggtgcctgtggaggaggaggagaggcagcagcgggtgcagcagcagcaggcacggtggcggtgggtgcagggggtactgcggcagcaggtgctgtcgtggtgacggcagtggtatcctctttctttgattcttccacagcttctggctca

SEQ ID NO: 825 - DNA, 470 bp, Homo sapiens
  MAP TO AP000129.1; EXPRESSED IN FETAL LIVER, SIGNAL =   2; EXPRESSED IN LUNG, SIGNAL = 2.9; EXPRESSED IN HELA, SIGNAL = 2.3; EXPRESSED IN BRAIN, SIGNAL = 2.1; EXPRESSED IN HEART, SIGNAL = 1.5; EXPRESSED IN BT474, SIGNAL = 1.8; EXPRESSED IN BONE MARROW, SIGNAL = 1.2; EXPRESSED IN PLACENTA, SIGNAL = 1.4; EXPRESSED IN ADULT LIVER, SIGNAL = 2.1; EXPRESSED IN HBL100, SIGNAL = 2.1
accaagtcagctgccaaaaccgtgtgtgcaagagcgcgacctaaggggacattcttgtcgacggtacaggagggtgggcagagttagggcaggaagtatctacacacattctctacggggcaggtgacgcagtcagatctcagtgttcagtttcctggagggggcaaagtcttcacgcctaacccaaatgacttcctcgcttgcgctctccaggcctccattgatccccgacagggcagcttgcttcttgagctgtgccatgcgggacgcgtgactatccagggttttccggcctctttcccgctgactgatggaggtggcctgaagccgctcctgcaggtctctgtccactgaggcacccttcacggactcacagaactcatcatcgtcactgaggatgtctgtctccttgatgtcatcttgctcctcatactgagcaagatcaaactgctcctctacccatcggtcag

SEQ ID NO: 826 - DNA, 474 bp, Homo sapiens
  MAP TO AP000128.1; EXPRESSED IN LUNG, SIGNAL = 0.87; EXPRESSED IN HELA, SIGNAL = 0.8; EXPRESSED IN PLACENTA, SIGNAL = 1.5; EXPRESSED IN BT474, SIGNAL = 0.82; EXPRESSED IN BONE MARROW, SIGNAL =   1; EXPRESSED IN HBL100, SIGNAL = 0.83; EXPRESSED IN FETAL LIVER, SIGNAL = 0.78; EXPRESSED IN BRAIN, SIGNAL = 0.92; EXPRESSED IN ADULT LIVER, SIGNAL = 0.84; EXPRESSED IN HEART, SIGNAL = 1.1
cagtggcaagggactctcactatcacctttgtgccacaccaggggtgcaataatctctactagactaagagcccatctggtatacaccacgagtccaatttctctccgcaattctgctagacaaggcagcaggtgcacttttgctaggatttacgaagagcagatcctctgttctcacatcatccaagaggaatcttctagttttgggaaggactgaagtggggcagggacaagaattcttctttcatgtttttccccaccattgagtccgtccttagttgccctcttcttcttaagagctcagagtatttgaaaccaaaatcattaagacccatcctgtcctacctctccactgagacaatgaacatggagacaatttaccgcttctatggacaggaaggaaaagcaggaaatgttggaagaaaacaagttgatagaggttaatatctcaaaaatatcctaacactcagagaa

SEQ ID NO: 827 - DNA, 450 bp, Homo sapiens; identical to SEQ ID NO: 334
  MAP TO AP000124.1; EXPRESSED IN PLACENTA, SIGNAL = 5.3; EXPRESSED IN BONE MARROW, SIGNAL = 6.5; EXPRESSED IN FETAL LIVER, SIGNAL =   5; EXPRESSED IN LUNG, SIGNAL = 7.2; EXPRESSED IN HELA, SIGNAL = 5.6; EXPRESSED IN ADULT LIVER, SIGNAL = 4.7; EXPRESSED IN BT474, SIGNAL = 3.9; EXPRESSED IN HBL100, SIGNAL = 5.4; EXPRESSED IN BRAIN, SIGNAL = 7.3; EXPRESSED IN HEART, SIGNAL =   6

SEQ ID NO: 828 - DNA, 422 bp, Homo sapiens
  MAP TO AP000119.1; EXPRESSED IN BONE MARROW, SIGNAL = 6.3; EXPRESSED IN HBL100, SIGNAL =   7; EXPRESSED IN PLACENTA, SIGNAL = 4.7; EXPRESSED IN HEART, SIGNAL = 9.3; EXPRESSED IN BRAIN, SIGNAL = 7.1; EXPRESSED IN HELA, SIGNAL =  12; EXPRESSED IN FETAL LIVER, SIGNAL = 6.9; EXPRESSED IN BT474, SIGNAL = 5.5; EXPRESSED IN ADULT LIVER, SIGNAL = 9.6; EXPRESSED IN LUNG, SIGNAL =  13
gttttctcagcttttccccccctgcatttatttttattttgccttcagatctaaagaacctttagctacatatagcatcctaacttgatattttactttaacactttaaagatataaatccattgtcttctggctttcatgctttctgttgaaaaagtcaaccatcagtgttaactattgctctcttcaagttaatatacttttttttttttttgagacaaggtcttcctctgtcacccaggctggagagcagtggtgtaatcatggctcactacagcctcaacctcctgggctcaagcagtcttctcacctcagactcctgagtagccaggaccacaggctcattaaaaaaagggtttttttgtgtgtgtgtaagtggggtctttctatgttgctgtattggtctgttcacatgctgctaa

SEQ ID NO: 829 - DNA, 478 bp, Homo sapiens
  MAP TO AP000119.1; EXPRESSED IN PLACENTA, SIGNAL = 1.5; EXPRESSED IN BRAIN, SIGNAL = 1.8; EXPRESSED IN BT474, SIGNAL = 1.2; EXPRESSED IN BONE MARROW, SIGNAL = 1.6; EXPRESSED IN HBL100, SIGNAL = 1.3; EXPRESSED IN FETAL LIVER, SIGNAL = 1.5; EXPRESSED IN LUNG, SIGNAL = 3.6; EXPRESSED IN HELA, SIGNAL = 1.4; EXPRESSED IN ADULT LIVER, SIGNAL = 1.2; EXPRESSED IN HEART, SIGNAL = 1.6
tccaggctctcacctctgtctaggtcatcgctttggaggtactgggctttcttggcccctccccaaactttaacccatttaaggcagccgtcactttttgcagggcctccaagctcactcagaaatcttgtgttgaatggtgcagagctaagttgttcactctgcagtatcatattagaagagatttggtttaccctgaatccactctgacgatgtttgttcgtttgaccttcaggtgtgcaagttggttgtcttcagggaagagagcagttctcactcaacaatcagacataactctgtcttataacaaaattgcacccatggagcgtctaggaactccctacccaaagtgtggtctgtgggccagcagcacctgcgtcatctgggaacttgtaagaaatgggattcttagcagatcccagaccctgctgcatcagaacctgcattttaatgagatcccaggtgatttgtgtacctg

SEQ ID NO: 830 - DNA, 471 bp, Homo sapiens
  MAP TO AP000118.1; EXPRESSED IN PLACENTA, SIGNAL = 4.4; EXPRESSED IN HBL100, SIGNAL = 1.7; EXPRESSED IN LUNG, SIGNAL = 2.8; EXPRESSED IN BRAIN, SIGNAL = 3.3; EXPRESSED IN HEART, SIGNAL = 2.4; EXPRESSED IN BT474, SIGNAL = 2.1; EXPRESSED IN BONE MARROW, SIGNAL = 2.7; EXPRESSED IN FETAL LIVER, SIGNAL = 2.4; EXPRESSED IN HELA, SIGNAL = 2.2; EXPRESSED IN ADULT LIVER, SIGNAL = 2.5
agtcccagaggtcagcacagtcatttgctgggctcagattgccagcattctttttgttctctgaaaatgaagctttaagggacatggcttacagccaaatacaggcaagacacattctgttagtcgcaggaggaaaaccatgtcgaaacgaaaagtccatattggtggtagttttttgagagctacaccacaacccccaaaattgacctctaaagtgacaacagtaagacctggataatcctgcacattcctagtgccaccacaacccagtgagattaacaaaagactcatggaaccaaacttcatccccaaagtattcaggtccgctgggctgctgaaggggagcagcactggtgtctgggtgtggcatctgaacctttgcttccagaacaccagcatcgtcacatttctcagagaaagcaatttgccttgagacagttccattgtgagtggaagagacaagggtgcatt

SEQ ID NO: 831 - DNA, 466 bp, Homo sapiens
  MAP TO AP000118.1; EXPRESSED IN PLACENTA, SIGNAL = 3.8; EXPRESSED IN LUNG, SIGNAL = 5.7; EXPRESSED IN ADULT LIVER, SIGNAL = 6.6; EXPRESSED IN BRAIN, SIGNAL = 1.7; EXPRESSED IN HEART, SIGNAL = 2.4; EXPRESSED IN BT474, SIGNAL =  15; EXPRESSED IN HELA, SIGNAL = 6.1; EXPRESSED IN FETAL LIVER, SIGNAL =  18; EXPRESSED IN HBL100, SIGNAL =  34; EXPRESSED IN BONE MARROW, SIGNAL =  25
cagctgctgtgaacatttgtgtacaagttgttgtgtggacacatgctttaatttctttggggtaaatacctagcagtggaatggctagatcataactgtaggtgtatgtttaggaaagtgccaaactataccagcaatgtatatgagagccggttttttttttttttttttttttttttgtggtggcgtggggttaccccaaagggcagactggtttattgggcatcagctgggaaaatcagcggttggacttggccacacatgccagctcatccttcttcttgatggcaaaggagttggaggagcccttggtggcagtgatgagctcatctgccaggcactcagcaatggtcatgatctcccggagggcaccctcaagagtgcctgtgcacagcaaccaggtggtctgattcacatggtgcagtggggacacgtccacagcctgtcatctcacagtccctgctca

SEQ ID NO: 832 - DNA, 474 bp, Homo sapiens
  MAP TO AP000118.1; EXPRESSED IN BT474, SIGNAL = 1.7; EXPRESSED IN BONE MARROW, SIGNAL = 1.8; EXPRESSED IN HELA, SIGNAL = 1.5; EXPRESSED IN ADULT LIVER, SIGNAL = 1.3; EXPRESSED IN FETAL LIVER, SIGNAL = 1.7; EXPRESSED IN LUNG, SIGNAL = 1.8; EXPRESSED IN BRAIN, SIGNAL = 1.3; EXPRESSED IN PLACENTA, SIGNAL = 2.1; EXPRESSED IN HBL100, SIGNAL = 1.4; EXPRESSED IN HEART, SIGNAL = 1.6
gtttacagacttggctggggttactaaaaataaataaaaagttggacacttctgtcattggagcgctattattcacaagttaccagaatgagagctgtactggacacagcagacattgccatagtggccctgtattttatcctggtcatgtgcattggtttttttgccatgtggaaatctaatagaagcaccgtgagtggatacttcctggcggggcgctctatgacctgggtaacaattggtgcctctctgtttgtgagcaatattgggagtgagcacttcattgggctggcaggatctggagctgcaagtggatttgcagtgggcgcatgggaattcaatgccttactgcttttacaacttctgggatgggttttcatcccaatttacatccggtcaggggtatataccatgcctgaatacttgtccaagcgatttggtggccataggattcaggtctattttgcagccttg

SEQ ID NO: 833 - DNA, 484 bp, Homo sapiens
  MAP TO AP000114.1; EXPRESSED IN BT474, SIGNAL = 2.5; EXPRESSED IN FETAL LIVER, SIGNAL = 2.4; EXPRESSED IN LUNG, SIGNAL = 2.1; EXPRESSED IN HELA, SIGNAL = 3.4; EXPRESSED IN ADULT LIVER, SIGNAL = 2.1; EXPRESSED IN HEART, SIGNAL = 1.8; EXPRESSED IN PLACENTA, SIGNAL = 1.6; EXPRESSED IN BRAIN, SIGNAL = 1.4; EXPRESSED IN BONE MARROW, SIGNAL = 1.9; EXPRESSED IN HBL100, SIGNAL = 2.4
ctcatgtttcggatgaagaggaagaagaacctcctttttatcatcatccctttaaactcagtgaacccaaacctatttttttcaatctgaatgtgagtattagtgcttatggattggtaaaacagtgtaacttgtggaactatttaaataaaacccaaatcgaatttagtttattaatttttgttttaaatactgtgagaaataatggataatatcatttccttcagattatgtagaaaatctcaaaccatttaatgtagatatcatattgagctttaattaagaaacactttattttttagattgctgcagcaaaaccaactccaccaaaaagccaggtaacattaacaaaagaattccctgtatcatctggatctcaacatcggaaaaaagaagcggatagtgtttatggagaatgggttcctgtggagaaaaatggtgaagaaaacaaagatgatgataatgttttcagcagcaatttgcc

SEQ ID NO: 834 - DNA, 477 bp, Homo sapiens
  MAP TO AP000114.1; EXPRESSED IN PLACENTA, SIGNAL =  10; EXPRESSED IN BT474, SIGNAL =  11; EXPRESSED IN BONE MARROW, SIGNAL = 5.8; EXPRESSED IN FETAL LIVER, SIGNAL = 9.2; EXPRESSED IN LUNG, SIGNAL = 7.3; EXPRESSED IN ADULT LIVER, SIGNAL = 2.7; EXPRESSED IN BRAIN, SIGNAL = 5.2; EXPRESSED IN HEART, SIGNAL = 4.9; EXPRESSED IN HBL100, SIGNAL = 5.8; EXPRESSED IN HELA, SIGNAL = 4.6
aatacggtagcacaggagctgcctactacattagtgggggagacttctgtaacagtaggagtggatcccttgatggccccagaatcccatatattagcttctaacaccatggagacccatatattagcatccaacaccatggactcccaaatgctagcgtccaacaccatggactcccagatgctagcatccaacaccatggactcccagatgttagcgtctagcaccatggactcccagatgttagcaactagctccatggactcccagatgttagcaactagctccatggactcccagatgttagcaactagcactatggactcccagatgttagcaaccagttccatggactcccagatgttagcaaccagctccatggactcccagatgttagcaaccagctccatggactcccagatgttagcaaccagctccatggactcccagatgttagcaaccagcaccatggattct

SEQ ID NO: 835 - DNA, 377 bp, Homo sapiens
  MAP TO AP000114.1; EXPRESSED IN BT474, SIGNAL = 1.7; EXPRESSED IN HELA, SIGNAL = 2.6; EXPRESSED IN HEART, SIGNAL = 1.3; EXPRESSED IN PLACENTA, SIGNAL = 1.3; EXPRESSED IN FETAL LIVER, SIGNAL =   2; EXPRESSED IN LUNG, SIGNAL = 1.2; EXPRESSED IN ADULT LIVER, SIGNAL = 2.7; EXPRESSED IN BONE MARROW, SIGNAL = 2.9; EXPRESSED IN HBL100, SIGNAL = 3.9; EXPRESSED IN BRAIN, SIGNAL = 1.5
aaatcagtaccactgtgattttgctaaactttccaaacttacgctatcatgaagttttttccatttgagtattgctataaccagttttgattcaaacaaaatacaaaccaagactgtatcactcccacagagagaaaagaatactgaatgacttatagggttaatgaaatgttctacatagccatttaggccagtttctgaaatggcactacagctaacttgcttagagttttacctgggctgctggaggaaagctatggcacgaaagccgacgtctttcctataaattgctccctcaaactttatagcagctagtcctttcttggcttcctcaagggctgatatgagattttcccggatggctgtgactgcaagaa

SEQ ID NO: 836 - DNA, 372 bp, Homo sapiens; identical to SEQ ID NO: 302
  MAP TO AP000114.1; EXPRESSED IN FETAL LIVER, SIGNAL =   6; EXPRESSED IN ADULT LIVER, SIGNAL = 3.5; EXPRESSED IN PLACENTA, SIGNAL = 5.3; EXPRESSED IN BT474, SIGNAL = 6.8; EXPRESSED IN BONE MARROW, SIGNAL = 4.5; EXPRESSED IN HEART, SIGNAL = 3.4; EXPRESSED IN BRAIN, SIGNAL = 4.6; EXPRESSED IN HELA, SIGNAL = 6.1; EXPRESSED IN LUNG, SIGNAL = 5.4; EXPRESSED IN HBL100, SIGNAL = 4.4

SEQ ID NO: 837 - DNA, 486 bp, Homo sapiens
  MAP TO AP000114.1; EXPRESSED IN BT474, SIGNAL =  14; EXPRESSED IN FETAL LIVER, SIGNAL =  13; EXPRESSED IN PLACENTA, SIGNAL =  11; EXPRESSED IN BONE MARROW, SIGNAL =  11; EXPRESSED IN HBL100, SIGNAL =  12; EXPRESSED IN LUNG, SIGNAL =  10; EXPRESSED IN HELA, SIGNAL = 8.1; EXPRESSED IN ADULT LIVER, SIGNAL = 8.1; EXPRESSED IN BRAIN, SIGNAL = 9.6; EXPRESSED IN HEART, SIGNAL = 7.4
actgttccagaaccaccaccagagccagaatcttcaattacgttaacacctgtagagtctgcagtagtagcagaagaacatgaagttgttccagagagaccagtgacttgtatggtatctgaaactcccgccatgtcagctgaaccaactgtgttagcatcagagcctcctgttatgtcagagacagcagaaacatttgattccatgagagcctcaggacatgttgcctcagaagtatctacatccttgttggttccagcagtaactactccagtgctggcagagagcattctggagccgccagccatggctgccccagagtcttcagctatggctgtcctggagtcttcggctgtgaccgtcctggagtcttcgactgtgactgtcctggagtcttcgactgtaactgtcctggagccttcggttgtgactgtcccggagcctcctgttgtggctgagccagactatgttaccattcctgtgcca

SEQ ID NO: 838 - DNA, 493 bp, Homo sapiens
  MAP TO AP000114.1; EXPRESSED IN PLACENTA, SIGNAL =   4; EXPRESSED IN BONE MARROW, SIGNAL = 4.5; EXPRESSED IN HBL100, SIGNAL = 4.5; EXPRESSED IN LUNG, SIGNAL = 4.2; EXPRESSED IN HELA, SIGNAL =   3; EXPRESSED IN BRAIN, SIGNAL = 4.3; EXPRESSED IN BT474, SIGNAL = 9.8; EXPRESSED IN FETAL LIVER, SIGNAL = 6.4; EXPRESSED IN HEART, SIGNAL =   3; EXPRESSED IN ADULT LIVER, SIGNAL = 2.3
tggctgaacgctctatgatgtcagcctacgagcgctctatgatgtcagcctacgagcgctctatgatgtcccctatggctgagcgctctatgatgtcagcttatgaacgctccatgatgtcagcttatgaacgctccatgatgtccccaatggctgatcgatctatgatgtccatgggtgctgaccggtctatgatgtcgtcatactctgctgctgaccggtctatgatgtcatcgtactctgcagctgaccgatctatgatgtcatcttatactgctgatcgttcaatgatgtctatggctgctgattcttacaccgattcttacactgacacatatacagaggcatatatggtgccacctttgcctcctgaagagcccccaacaatgccaccgttgccacctgaggagccaccaatgacaccaccattgcctcctgaggaaccaccagagggtccagcattgcccactgagcagtcagcattaacagctga

SEQ ID NO: 839 - DNA, 468 bp, Homo sapiens
  MAP TO AP000114.1; EXPRESSED IN FETAL LIVER, SIGNAL =  16; EXPRESSED IN ADULT LIVER, SIGNAL = 6.3; EXPRESSED IN BRAIN, SIGNAL = 0.8; EXPRESSED IN HEART, SIGNAL =   2; EXPRESSED IN BONE MARROW, SIGNAL =  14; EXPRESSED IN HBL100, SIGNAL =  28; EXPRESSED IN LUNG, SIGNAL = 5.6; EXPRESSED IN PLACENTA, SIGNAL = 3.9; EXPRESSED IN BT474, SIGNAL =  12; EXPRESSED IN HELA, SIGNAL = 9.1
caattagaagtttccaaatctcatcactttttttgggggggtgggggaggcatcccaaagggcagactggtttattaggcagcagccaggaaaatcagcggttggacttgtccccacactccagctcatccttcttgttgatggcataggagctggaggaggccttggtggcattgatgagctcatccgccaggcactcagcaatggtcttgatgttccagaaggcagcctcacgagtgcctgtgcacagcagccagacgacctgattcacacagtgcagtggggacatgtccacagcctgttgtctcacagtccctgctcgcccaatgcatgtggagtcctcccagggaccactgttgatgatggcgttcaccaggacctggagagggttctcgcctgtgagcaggtggatgaaatcgaaggcatgcttgatgatgcacatgatcatgagcttgttgctgttgttgc

SEQ ID NO: 840 - DNA, 495 bp, Homo sapiens
  MAP TO AP000109.1; EXPRESSED IN HBL100, SIGNAL = 8.2; EXPRESSED IN FETAL LIVER, SIGNAL = 8.7; EXPRESSED IN HELA, SIGNAL = 7.5; EXPRESSED IN ADULT LIVER, SIGNAL = 4.4; EXPRESSED IN BRAIN, SIGNAL = 3.4; EXPRESSED IN PLACENTA, SIGNAL = 3.1; EXPRESSED IN HEART, SIGNAL = 3.6; EXPRESSED IN LUNG, SIGNAL = 5.6; EXPRESSED IN BONE MARROW, SIGNAL = 4.3; EXPRESSED IN BT474, SIGNAL =   6
tcagtggggttccttcattcttgaaattcacctgatgacgatgaacaggttcaatatgaagttcatttttcaattcattctatctcatctgagtacctactctgggaccatggactgtatagaaattaggacttgaaattgtcctttgccacctccttccttctccttatggagtacagaacaatggctctgggcagggccagcttcaggtgtgcatgacccattgggacagtggcgtagaaccccgtgcttggaagagccttgaacgtggtcaatgctctgctgtcagcccttcctgacttttaaataagggggccccatatttacatttcatactaaggctcaaaaatcatgtagctggttttgctcttggtaatgaaagactccttgaggtggttcccacagttttccatatcccagccagggctctcttcacactgtccccacttccatggctggagccgtagttttttcctggtcataactgtggaaggc

SEQ ID NO: 841 - DNA, 486 bp, Homo sapiens
  MAP TO AP000105.1; EXPRESSED IN BRAIN, SIGNAL = 1.8; EXPRESSED IN FETAL LIVER, SIGNAL = 0.9; EXPRESSED IN HELA, SIGNAL = 0.8; EXPRESSED IN ADULT LIVER, SIGNAL = 0.88; EXPRESSED IN BT474, SIGNAL = 0.63; EXPRESSED IN LUNG, SIGNAL = 0.85; EXPRESSED IN HEART, SIGNAL = 6.9; EXPRESSED IN PLACENTA, SIGNAL = 1.1; EXPRESSED IN BONE MARROW, SIGNAL = 0.66
gaaaaagctcaaatagttaacgggttcataccatagaaaatcatcagttataagacatagacaaacctaaccacatagaaaaaagattaagaacaattgtcatctagtgacagttatagcaagtttcctttccattgagagcttatcatctacaagttttcctattctgtaccggagaaaacagggtgcactttatcacctaggtatgaaacttaaacgatgactctccaacatcaagcacattggccacaggaagccatacaaaactttcaaataaaatgcatactctgtgcactgggaggcccaggagttcttgacggtgctcggcttggtctgatgggaagggaaggtacaggaccctctgatattgtaggtgactggcagggactagttcggggtgaagagctgggggaagtaccaaggccggaacttgaagatggctggagatgctgaggaagaagttcctccacttcagcactatagtca

SEQ ID NO: 842 - DNA, 489 bp, Homo sapiens
  MAP TO AP000105.1; EXPRESSED IN BT474, SIGNAL = 3.2; EXPRESSED IN HELA, SIGNAL =   2; EXPRESSED IN ADULT LIVER, SIGNAL = 3.6; EXPRESSED IN PLACENTA, SIGNAL = 1.5; EXPRESSED IN BONE MARROW, SIGNAL = 1.6; EXPRESSED IN HBL100, SIGNAL = 3.3; EXPRESSED IN FETAL LIVER, SIGNAL = 2.7; EXPRESSED IN LUNG, SIGNAL = 2.3; EXPRESSED IN BRAIN, SIGNAL = 2.3; EXPRESSED IN HEART, SIGNAL = 2.1
tgaaagcattagaagacaattgagtttgtcagaactgtaaaatattgctgagtgtggattgctctgaaatctgaaaacatgacttgtgaattgcttatatccaaaatgcagacacaatgctgggtgttggtttacttgtttccggtttttcaaccctcttttctaagcaaaagatgtccaaactatacagacccacagaatctaacagatgtctttatattcctcctcctagaactctcagaggatccagcactgcagctggtcgtcactgggctgtgcctgtgtgcctggtcacggtgctgtggaacctgctcagcatcctggccgtcagccctgactcccacctccacacccccatgcacttcttcctctgcaacctgtccttgcctgacatcggtttcacctccaccacggtccccaagatgatcgtggacatccaatctcacagcagagtcatctcctatgcaggctgcctgactcagatgtctc

SEQ ID NO: 843 - DNA, 477 bp, Homo sapiens
  MAP TO AP000105.1; EXPRESSED IN HBL100, SIGNAL = 1.1; EXPRESSED IN BRAIN, SIGNAL = 2.2; EXPRESSED IN HEART, SIGNAL = 1.2; EXPRESSED IN PLACENTA, SIGNAL = 1.5; EXPRESSED IN BT474, SIGNAL = 1.1; EXPRESSED IN BONE MARROW, SIGNAL = 1.2; EXPRESSED IN ADULT LIVER, SIGNAL = 1.1; EXPRESSED IN HELA, SIGNAL = 1.7; EXPRESSED IN LUNG, SIGNAL = 1.3; EXPRESSED IN FETAL LIVER, SIGNAL = 1.6
tcttcttgacggcaacacacagaaggagacatttgtacctttattccagtcatcattcaatgtcaggttggagccagaaaatgaacttggctgattacccagtaagtctgaacaagctgactttgacttccctttcacaccaaaatcctcttcttcctcgaaggttacccatcctttcgggttgctaatttttaatgtagactggccctgtagatcaaaactgtccttaaagccatcaagtgaagatgaagccctgcttttgttatgaccaagaggctgcagagaagggaaaggactgatagtaacgggctcttctttggagaaccatgaagttgcctctgattcttcagacttggctctaaatgggtttccaggagcagcagtcctgtcactgaaaggatttgtcctggtcaagccagtaataaatgggtttggagaacttcgcatattttcctgggattgactccgagctggaat

SEQ ID NO: 844 - DNA, 474 bp, Homo sapiens
  MAP TO AP000104.1; EXPRESSED IN HBL100, SIGNAL = 1.8; EXPRESSED IN BRAIN, SIGNAL = 2.4; EXPRESSED IN BT474, SIGNAL = 1.7; EXPRESSED IN BONE MARROW, SIGNAL = 1.8; EXPRESSED IN FETAL LIVER, SIGNAL = 2.1; EXPRESSED IN LUNG, SIGNAL = 2.5; EXPRESSED IN HELA, SIGNAL = 2.3; EXPRESSED IN ADULT LIVER, SIGNAL = 1.5; EXPRESSED IN PLACENTA, SIGNAL = 1.8; EXPRESSED IN HEART, SIGNAL =   2
cagctactgagtggcagacctgagtttgaactcagaggagtctggctcctgagcccctctgctgtgtgtttttctcctacacatacatatattgactccgtaggcgcaaaagcttttttgaaaaaaaatgtcagtggggatatatgattattttggtgtagacagtctcaaagatgctggactggcattcttcattagccccctgcttgggcagacatctgtttctgtgggacttggcactggtggagtctgccagctcctcccagctcctgacatgttctcttcctcctgcagcccacccggagagagctgccctgctgttcgtgtccagtgtctgcatcggcctggccctcacactgtgcgccctggtcatcagagagtcctgtgccaaggacttccgcgacttgcagctggggagggagcagctggtgccaggaagtgacaaggtcgaggaggacagcgaggatgaagaag

SEQ ID NO: 845 - DNA, 482 bp, Homo sapiens
  MAP TO AP000104.1; EXPRESSED IN PLACENTA, SIGNAL = 8.4; EXPRESSED IN BT474, SIGNAL = 5.8; EXPRESSED IN FETAL LIVER, SIGNAL = 6.3; EXPRESSED IN LUNG, SIGNAL = 6.6; EXPRESSED IN HELA, SIGNAL = 8.9; EXPRESSED IN ADULT LIVER, SIGNAL =   6; EXPRESSED IN BONE MARROW, SIGNAL =  10; EXPRESSED IN HBL100, SIGNAL = 6.5; EXPRESSED IN BRAIN, SIGNAL = 9.4; EXPRESSED IN HEART, SIGNAL = 7.4
accaaaataatggcacccactcttacatcacaggagggatggctttacctgctctgtctttattcctgctgtcatgtctaagcaactctaagtagcatggggcccattttggctgaggttcccccagaggccaaaaaggtcactttgagtacatccttggatagctcctctggtagaatggaggacggtagactggacacgggtcacactgaggttccagtaacttcaggcctcttcatcagagtgttgaataagaagcagaactttagcctccaaataaggtgtagttttggccggggaccgggaaagctgagacactgctgggctggggccgccatagccctgggaacggagtatattctagtgaaaggagaccaggtgactggcatagtgacagctaaatctggagatatattcagagttgatgttggagggagtgagccagtttctttgtcttacttggcatttgaaggtgcaactaa

SEQ ID NO: 846 - DNA, 450 bp, Homo sapiens; identical to SEQ ID NO: 804
  MAP TO AP000099.1; EXPRESSED IN BRAIN, SIGNAL = 2.7; EXPRESSED IN HBL100, SIGNAL =  13; EXPRESSED IN ADULT LIVER, SIGNAL = 4.3; EXPRESSED IN HEART, SIGNAL = 3.5; EXPRESSED IN PLACENTA, SIGNAL = 3.1; EXPRESSED IN BT474, SIGNAL = 7.4; EXPRESSED IN BONE MARROW, SIGNAL = 7.4; EXPRESSED IN LUNG, SIGNAL = 5.1; EXPRESSED IN HELA, SIGNAL = 7.9; EXPRESSED IN FETAL LIVER, SIGNAL = 9.9

SEQ ID NO: 847 - DNA, 481 bp, Homo sapiens
  MAP TO AP000099.1; EXPRESSED IN HELA, SIGNAL = 5.5; EXPRESSED IN LUNG, SIGNAL = 2.4; EXPRESSED IN HEART, SIGNAL = 1.4; EXPRESSED IN BT474, SIGNAL = 4.1; EXPRESSED IN FETAL LIVER, SIGNAL = 4.7; EXPRESSED IN ADULT LIVER, SIGNAL = 2.4; EXPRESSED IN BRAIN, SIGNAL = 1.6; EXPRESSED IN PLACENTA, SIGNAL = 1.8; EXPRESSED IN BONE MARROW, SIGNAL = 3.4; EXPRESSED IN HBL100, SIGNAL = 6.8
ttccatttacccatggtctgaaaatattgaatggaaatgaaatattggtggaaaattccagaaataaacaatatataagttttcaatcatgtaccattctgattagtgtgatgaaatcttgcactgttccactccatcccacctgagatgtgaatccttcctttgtccagcgtctccaccctgtagatgcttagaagtcatctcgatgatcagatccactgaggtattgcagtacttgccttcagatcacctttatttgacttcataatgccccaaagcttaagagtagtgatgctggcagttcagatatgccaaagagaagccgtaaaatgtttgctataagtgaaaaggtgaaagttcttgacttaataagaaaaagatcattgactgaggttgctaagacctatggtaaagatgaatcttctatccatgaaattgtgaagaaagaaaaagaagtgtgtgctagttttgctgtttcagc

SEQ ID NO: 848 - DNA, 472 bp, Homo sapiens; identical to SEQ ID NO: 805
  MAP TO AP000099.1; EXPRESSED IN BONE MARROW, SIGNAL = 2.6; EXPRESSED IN HBL100, SIGNAL = 1.9; EXPRESSED IN FETAL LIVER, SIGNAL = 2.2; EXPRESSED IN LUNG, SIGNAL = 2.4; EXPRESSED IN HELA, SIGNAL = 2.7; EXPRESSED IN PLACENTA, SIGNAL = 2.4; EXPRESSED IN BT474, SIGNAL = 1.8; EXPRESSED IN HEART, SIGNAL = 1.9; EXPRESSED IN ADULT LIVER, SIGNAL = 2.5; EXPRESSED IN BRAIN, SIGNAL = 2.3

SEQ ID NO: 849 - DNA, 459 bp, Homo sapiens; identical to SEQ ID NO: 807
  MAP TO AP000099.1; EXPRESSED IN HEART, SIGNAL = 1.3; EXPRESSED IN BT474, SIGNAL = 1.6; EXPRESSED IN HELA, SIGNAL = 1.4; EXPRESSED IN PLACENTA, SIGNAL = 1.4; EXPRESSED IN BONE MARROW, SIGNAL = 1.6; EXPRESSED IN HBL100, SIGNAL = 1.4; EXPRESSED IN FETAL LIVER, SIGNAL = 1.7; EXPRESSED IN LUNG, SIGNAL = 1.5; EXPRESSED IN ADULT LIVER, SIGNAL = 1.6; EXPRESSED IN BRAIN, SIGNAL = 1.9

SEQ ID NO: 850 - DNA, 472 bp, Homo sapiens; identical to SEQ ID NO: 808
  MAP TO AP000098.1; EXPRESSED IN ADULT LIVER, SIGNAL = 2.6; EXPRESSED IN BRAIN, SIGNAL = 3.3; EXPRESSED IN BONE MARROW, SIGNAL =   2; EXPRESSED IN HBL100, SIGNAL = 2.3; EXPRESSED IN FETAL LIVER, SIGNAL =   2; EXPRESSED IN LUNG, SIGNAL = 3.3; EXPRESSED IN HEART, SIGNAL = 2.2; EXPRESSED IN PLACENTA, SIGNAL = 2.5; EXPRESSED IN BT474, SIGNAL = 1.9; EXPRESSED IN HELA, SIGNAL = 2.2

SEQ ID NO: 851 - DNA, 491 bp, Homo sapiens
  MAP TO AP000094.1; EXPRESSED IN PLACENTA, SIGNAL = 5.8; EXPRESSED IN BRAIN, SIGNAL = 7.2; EXPRESSED IN HEART, SIGNAL = 4.8; EXPRESSED IN BONE MARROW, SIGNAL = 6.9; EXPRESSED IN HELA, SIGNAL = 6.1; EXPRESSED IN LUNG, SIGNAL = 5.9; EXPRESSED IN BT474, SIGNAL = 4.5; EXPRESSED IN ADULT LIVER, SIGNAL = 4.5; EXPRESSED IN FETAL LIVER, SIGNAL = 4.5; EXPRESSED IN HBL100, SIGNAL = 4.2
ccatgctgttcttgtgatagtgactgagttctcaagagatctgacggttttagaaggggctcttcccctttcgctttctcctctctctcctgctgccatgtaagacatacctacttccccttccgccatgattgtaagtttcctgaggcctccccagccatgcagaactgtgagtgagtcaattaaacctctttcctttatttaaaaaaaaaatgtctaccatgtaaggtagtggtcaggaaaaataaggcaacacctaggaaacattaagtatattgccaaacatattataagcactgcatgtttcttattactgttattggtgtcatcattattattattggagtcatcattattattattggagtctaggataaagtagcagttgtttgcaaaatggaagacagtacctagtggtggaaaaccgaaagttccatggagacaggcatgcagcatgcagtaggccaactgcaacgaagccaggaaatgag

SEQ ID NO: 852 - DNA, 471 bp, Homo sapiens
  MAP TO AP000089.1; EXPRESSED IN PLACENTA, SIGNAL = 5.3; EXPRESSED IN BT474, SIGNAL = 8.7; EXPRESSED IN HBL100, SIGNAL = 8.9; EXPRESSED IN LUNG, SIGNAL = 5.2; EXPRESSED IN HELA, SIGNAL =   5; EXPRESSED IN BRAIN, SIGNAL =  11; EXPRESSED IN BONE MARROW, SIGNAL = 6.1; EXPRESSED IN FETAL LIVER, SIGNAL = 3.4; EXPRESSED IN ADULT LIVER, SIGNAL = 4.1; EXPRESSED IN HEART, SIGNAL = 3.2
aaaggaataccaaggagtcacctaactcagtgtttgtcaaattagatgactacctggttgggcggagtcttgtagaattaacttgggatttgccaagcagcatatacaaggtacaaaacaaactgtataataaagatttcacattatttgaaattgtttgcttgttaaaccaaaaaaatttcacaagcataagaagccttttggaaaaaaaaacatgtttttgattggggaaggcagtggtgctagggtggatatttccaactctggtattacgctttcttttccttgggggtggggggaatccaagcaaatggtggattacctcgaaccacctcttccacagactctgtggtggtggtggtggtggtggcaatgctggtggttctctctgtggcttcttcgtagggttcctcagcctcttcctctacctcatcaccatcctcatcgtcctcgtcatcatcggcttcttct

SEQ ID NO: 853 - DNA, 367 bp, Homo sapiens
  MAP TO AP000089.1; EXPRESSED IN FETAL LIVER, SIGNAL =   2; EXPRESSED IN HELA, SIGNAL = 2.6; EXPRESSED IN ADULT LIVER, SIGNAL = 2.1; EXPRESSED IN BRAIN, SIGNAL = 1.8; EXPRESSED IN HEART, SIGNAL = 1.9; EXPRESSED IN PLACENTA, SIGNAL = 2.5; EXPRESSED IN LUNG, SIGNAL =   3; EXPRESSED IN HBL100, SIGNAL = 4.1; EXPRESSED IN BONE MARROW, SIGNAL = 2.4; EXPRESSED IN BT474, SIGNAL = 3.5
tttcttcgccagagagaatgttacagacatcatttaatttgtgcttacaaaatccaactatacctggatccttcctaggcagcatgttcacggaggatgcaaaaaacccacaaactgtgcccacacagtaaacatttaaaattagaactttacatctttaaagatcttgataaagccagcaggcctgtggggagactgaggcagaggcaagctcaggtttcccaatatcgtagggctgaatgatggaagagccagacttacctgggacattctctctcggtgcttggcctcaagcctctctttggctttctggaaatgggcatgttcattctcatccccaggtgtctcgagatacttgtcaacggca

SEQ ID NO: 854 - DNA, 446 bp, Homo sapiens
  MAP TO AP000089.1; EXPRESSED IN BONE MARROW, SIGNAL = 4.1; EXPRESSED IN LUNG, SIGNAL = 6.8; EXPRESSED IN HELA, SIGNAL =  10; EXPRESSED IN ADULT LIVER, SIGNAL = 6.3; EXPRESSED IN BRAIN, SIGNAL = 8.9; EXPRESSED IN PLACENTA, SIGNAL = 3.4; EXPRESSED IN BT474, SIGNAL = 7.5; EXPRESSED IN HEART, SIGNAL = 3.3; EXPRESSED IN HBL100, SIGNAL = 7.4; EXPRESSED IN FETAL LIVER, SIGNAL = 5.2
atgccatcaattgtcaccacctcaggaatattaaatcaagtcagggcttgcaatgtgagtccctgggagtcctgtctggctgctctgtggggaagtgtgagtacctgctgtgtagagatgaccttgtggaggtagctgccctgtgaccctttgaccttcaagatggaatggacaggggttgaacctctgaataacagtgctcaaggcatttctcctcattctttttgtatggcttccagttcccagtgccccacccttactgtctgtgctgtgacctgaagtgtgaactcggctgcagcgagacctacccgaggaggaacagcctgcagagcggtgatgtagttctccagggccaggcggcggcggtcattgagcatggcttccactctggccatgtgtgtctccaccagctgctgtctctcgttggctgcttcctgttccaaaga

SEQ ID NO: 855 - DNA, 475 bp, Homo sapiens
  MAP TO AP000089.1; EXPRESSED IN BT474, SIGNAL = 8.3; EXPRESSED IN BONE MARROW, SIGNAL = 1.6; EXPRESSED IN LUNG, SIGNAL = 7.3; EXPRESSED IN ADULT LIVER, SIGNAL = 4.8; EXPRESSED IN HELA, SIGNAL =  12; EXPRESSED IN PLACENTA, SIGNAL = 4.7; EXPRESSED IN HEART, SIGNAL = 6.9; EXPRESSED IN BRAIN, SIGNAL =  17; EXPRESSED IN FETAL LIVER, SIGNAL = 5.3; EXPRESSED IN HBL100, SIGNAL = 4.4
tgccatacttcagttgaaccagttttcaagattttagtttatacaacttttgtttttctcattttagtcattggttttaatcagttccttagcaatcagttagcagtagactaagatttttacatttgttattttcataactcagaaaatgccaaaccacatattgctctaagacaagcttttagaatttaccagaagttaaagagctcttgccatagggaaaacacctataggtgctcggagaatgcgtgggatcctgtcaccaacccaagaagcaagaatcctggattgtcaaagctgcagaagatgattataccccacgcttacctgggaccggatctgagcggctttcttgggatccaccatgcgcacatgctcgaaatgctttagggtgtgctgtctgtccttctgttctgcgcggacatacttctttagcatattgaacacgtgacgaggctgtgggaggaaaatgaaa

SEQ ID NO: 856 - DNA, 463 bp, Homo sapiens; identical to SEQ ID NO: 272
  MAP TO AP000088.1; EXPRESSED IN PLACENTA, SIGNAL = 7.2; EXPRESSED IN BT474, SIGNAL =  14; EXPRESSED IN HBL100, SIGNAL = 9.5; EXPRESSED IN LUNG, SIGNAL =  13; EXPRESSED IN BRAIN, SIGNAL =  30; EXPRESSED IN BONE MARROW, SIGNAL = 2.7; EXPRESSED IN FETAL LIVER, SIGNAL = 8.5; EXPRESSED IN HELA, SIGNAL =   8; EXPRESSED IN ADULT LIVER, SIGNAL = 7.6; EXPRESSED IN HEART, SIGNAL =  11

SEQ ID NO: 857 - DNA, 476 bp, Homo sapiens
  MAP TO AP000088.1; EXPRESSED IN HELA, SIGNAL = 6.4; EXPRESSED IN BT474, SIGNAL = 5.9; EXPRESSED IN BONE MARROW, SIGNAL = 2.3; EXPRESSED IN HBL100, SIGNAL = 6.1; EXPRESSED IN FETAL LIVER, SIGNAL =   3; EXPRESSED IN LUNG, SIGNAL = 4.6; EXPRESSED IN ADULT LIVER, SIGNAL = 3.1; EXPRESSED IN BRAIN, SIGNAL =  17; EXPRESSED IN PLACENTA, SIGNAL = 3.4; EXPRESSED IN HEART, SIGNAL =   5
ggtttttgttgcttgtgtttgaaaaaaaaaagtctaagagtaatcatgcttttttaaagtcatgcattatcatttgtattattttgataacttcaacacaaattgtaagttgagataacaacacacactctcaataccttgagcagaatattcacggtaagttgcaatgaatgaaaaccaaaacaagaaagaacaactgtaacccaagcatcatggaagcacactgattcgttttttaaaagagatacttagctagttcttagcaaaaagctaagcctaattctctcatagtcttaattcccacttggaaacatgcagtcaagtttacctacctccaccacaccatgatgaatggatgtgtactgtttcttcttcagcatcaccaaggtgatgacgatcactgtcgctatgacaacaccgcccaccatgagtccaatgattgcacctttgtttgaacccacatcttctgcaaagaa

SEQ ID NO: 858 - DNA, 448 bp, Homo sapiens
  MAP TO AP000088.1; EXPRESSED IN HBL100, SIGNAL = 2.3; EXPRESSED IN FETAL LIVER, SIGNAL = 1.4; EXPRESSED IN PLACENTA, SIGNAL = 1.5; EXPRESSED IN BT474, SIGNAL = 1.8; EXPRESSED IN BONE MARROW, SIGNAL =   2; EXPRESSED IN LUNG, SIGNAL = 1.9; EXPRESSED IN HELA, SIGNAL = 2.2; EXPRESSED IN ADULT LIVER, SIGNAL = 1.8; EXPRESSED IN BRAIN, SIGNAL = 2.2; EXPRESSED IN HEART, SIGNAL = 1.7
gcatagtgatgctcaaaacccaaattagggtctgtgtagactgggaagcagcacttggacagagacagatgagtgagctgaagatccaggactgtggttgtgggtcggagttgggctctgtcgggataaatcgctccgcagaagacgggctagagtctgctcaccattgaaggaaaggccagtgcggtttttctgcccctgaaatgttattcagaactcctgctgctgacactttaccactcaggtttctgcgacagttgggtttctgtggacctgaagaagagggaggacacagactcacaagccggaacggcatgcgacgagccccccagaggcccataactgaactgcagtgtctccagccgcgccctgtgcaatgatttggttctgcattgcgccccctagaggtgagtggaagcaatgtccaagctgtgggcaagtaggattg

SEQ ID NO: 859 - DNA, 476 bp, Homo sapiens
  MAP TO AP000085.1; EXPRESSED IN BRAIN, SIGNAL =   2; EXPRESSED IN HBL100, SIGNAL = 1.7; EXPRESSED IN FETAL LIVER, SIGNAL = 1.8; EXPRESSED IN ADULT LIVER, SIGNAL = 1.8; EXPRESSED IN HEART, SIGNAL = 1.8; EXPRESSED IN BT474, SIGNAL = 1.8; EXPRESSED IN BONE MARROW, SIGNAL = 1.9; EXPRESSED IN HELA, SIGNAL = 1.9; EXPRESSED IN PLACENTA, SIGNAL = 1.7; EXPRESSED IN LUNG, SIGNAL =   2
tttgttgaaattcagtgttgagcataaacagtgaactcaaatgcacagaggaggcgtcatggaagggtgacaaaacactccagagcaataacagctaccctattttctgttccctgggagtagggagaaaagacatcaaaatcaaattataaatttaaaaaagtattaaaattctcttatggaaatatattaagaagtttgttaggcaaatggaaaacgttttgtggaaacaagaaataagaaagaatggccatcacttaaagcaacagaatgtatctctcccactagctctcccctccctacccacagctttattcacatttgttctataacatttcagcacagttcagaccttccgctgagccagtgtgaggtcagggtgttgaggaagcgagtccctgcagtcagactccagctggctgtcgtcctgcttctgcttattccacagaatgagtctggtgggggagaggaaattc

SEQ ID NO: 860 - DNA, 471 bp, Homo sapiens
  MAP TO AP000085.1; EXPRESSED IN LUNG, SIGNAL = 0.87; EXPRESSED IN HELA, SIGNAL = 1.5; EXPRESSED IN HEART, SIGNAL = 2.2; EXPRESSED IN PLACENTA, SIGNAL = 1.2; EXPRESSED IN FETAL LIVER, SIGNAL = 1.9; EXPRESSED IN ADULT LIVER, SIGNAL = 1.8; EXPRESSED IN BRAIN, SIGNAL = 1.3; EXPRESSED IN BT474, SIGNAL = 1.1; EXPRESSED IN BONE MARROW, SIGNAL = 0.95; EXPRESSED IN HBL100, SIGNAL = 1.8
tggatcccacactgactcactcacacacaccctcccaccaggggctgagggtacagtcacggcagccatgggatctgcgccagagtgcaagccaggtgtggtccagtggtctgagtagacggggtgtctcctgaggcaagcccaggcccaggaaaggcctgggcagaggtgtcaccagccagaaaatcctgtatcactttcaccttataaccaaattaaattcactccctctggcagcaagctgtttgttttcaacatcattctaatgctggtaaaactcttattcttgccaactaacttggggaagagggagtaggcacggtaccactcaaaaaaataataataataataaaatttaaaaaaaaaacactcctactgttctctttgaagttctagcagtttttttaagaataagtgtttctcaatttgttgtttgcctttagttgatttccagtgcccaaactcttcaca

SEQ ID NO: 861 - DNA, 469 bp, Homo sapiens; identical to SEQ ID NO: 367
  MAP TO AP000085.1; EXPRESSED IN PLACENTA, SIGNAL = 4.9; EXPRESSED IN BT474, SIGNAL =  11; EXPRESSED IN BONE MARROW, SIGNAL = 3.1; EXPRESSED IN HEART, SIGNAL = 7.7; EXPRESSED IN BRAIN, SIGNAL = 5.4; EXPRESSED IN HBL100, SIGNAL = 5.8; EXPRESSED IN FETAL LIVER, SIGNAL = 5.6; EXPRESSED IN LUNG, SIGNAL = 8.3; EXPRESSED IN HELA, SIGNAL = 7.4; EXPRESSED IN ADULT LIVER, SIGNAL = 5.1

SEQ ID NO: 862 - DNA, 473 bp, Homo sapiens
  MAP TO AP000055.1; EXPRESSED IN BRAIN, SIGNAL = 1.3; EXPRESSED IN BT474, SIGNAL = 1.6; EXPRESSED IN BONE MARROW, SIGNAL = 1.6; EXPRESSED IN PLACENTA, SIGNAL = 1.6; EXPRESSED IN HEART, SIGNAL = 1.3; EXPRESSED IN ADULT LIVER, SIGNAL = 1.7; EXPRESSED IN HELA, SIGNAL = 2.4; EXPRESSED IN LUNG, SIGNAL = 1.7; EXPRESSED IN FETAL LIVER, SIGNAL = 1.7; EXPRESSED IN HBL100, SIGNAL = 2.1
ggggtctctcgtcaggattcattggtaatcgtagggagattttgtagggatgatgggtcctctccacataaactatattcccttatctacaccttcaaagttcctggtagagtcaacacattggattaaggctttttccatggaatacactataataagggggctggagcgaggctgaccttcctctaacacaacgattaacaattttggctggttgattctttgttgaggggctgtctgtgcattgtaggatgttttacaacttacctggcctctacctaccagacgccagtagcatcctccaatcatggaaactaaaacatgtgcccagacattgccagatgatccatggagggcaaaatcaccccttgttgaaagccacttctcaaacccatgaccacagatctgtttcatcaggtcaacatccttcaccataaatttcagggatctggaggagtggagggtggagacta

SEQ ID NO: 863 - DNA, 484 bp, Homo sapiens
  MAP TO AP000049.1; EXPRESSED IN HELA, SIGNAL = 0.9; EXPRESSED IN BT474, SIGNAL = 1.3; EXPRESSED IN FETAL LIVER, SIGNAL = 2.2; EXPRESSED IN LUNG, SIGNAL = 0.96; EXPRESSED IN PLACENTA, SIGNAL = 1.2; EXPRESSED IN BONE MARROW, SIGNAL = 0.98; EXPRESSED IN HBL100, SIGNAL = 1.4; EXPRESSED IN ADULT LIVER, SIGNAL = 1.5; EXPRESSED IN BRAIN, SIGNAL =   2; EXPRESSED IN HEART, SIGNAL = 1.3
tttgttttgtcagtttaataccagctttattattaagaagtatttttcttattcttgtaaccactttgtaaaatacatcagaaattttctgtgttttcctaaatcatgtgatttcttctcattcagaactggagccctgattcagttgccccatctgaacaacaatgttcccttgatgttcccatcccatttactggatggagctttttttgtgaaaagaggcaacagtagtgttaacttagagttgctttcttgctgtaatcaagcgtgtttgttggcagacgagctcaggaaagggacaagcagtggctggagcatgtgcagcaggaggacgagcatcagagaccaagaaaactccacgaagaggaaaaactgaaaagggaggagagtgtcaaaaagaaggatggcgaggaaaaaggcaaacaggaagcacaagacaagctgggtcggcttttccatcaacaccaagaaccagctaagccag

SEQ ID NO: 864 - DNA, 487 bp, Homo sapiens
  MAP TO AP000049.1; EXPRESSED IN BONE MARROW, SIGNAL = 3.3; EXPRESSED IN ADULT LIVER, SIGNAL = 3.2; EXPRESSED IN BRAIN, SIGNAL =   4; EXPRESSED IN PLACENTA, SIGNAL = 3.3; EXPRESSED IN BT474, SIGNAL =   3; EXPRESSED IN HBL100, SIGNAL = 2.9; EXPRESSED IN LUNG, SIGNAL = 3.2; EXPRESSED IN HELA, SIGNAL = 3.5; EXPRESSED IN FETAL LIVER, SIGNAL = 5.3; EXPRESSED IN HEART, SIGNAL = 2.9
ctggatggtgatgtagaactgctagataaggatcttttagaaacagtgtttggcgtggaggagaagatataaacagagaggttaggcaaagggggttttcgttgtgctcattaacaaggacacagaagcttagggagttctgggtttgggtttgtactacaaatttcaaatacattggtgagttttcctttgaaaagagtccgttgaaaatcttgagttttcatagttgctgtgttccttgtctgaagtaacgtttgaagataagaagcgggagaactttgaacgtggcaacctggaactggagaaacgaaggcaagctctcctggaacagcagcgcaaggagcaggagcgcctggcccagctggagcgggcggagcaggagaggaaggagcgtgagcgccaggagcaagagcgcaaaagacaactggaactggagaagcaactggaaaagcagcgggagctagaacggcagagagaggaggagagg

SEQ ID NO: 865 - DNA, 479 bp, Homo sapiens
  MAP TO AP000049.1; EXPRESSED IN FETAL LIVER, SIGNAL =   1; EXPRESSED IN ADULT LIVER, SIGNAL = 1.6; EXPRESSED IN BRAIN, SIGNAL = 1.8; EXPRESSED IN HEART, SIGNAL = 1.7; EXPRESSED IN BT474, SIGNAL =  26; EXPRESSED IN PLACENTA, SIGNAL = 1.2; EXPRESSED IN HELA, SIGNAL = 1.7; EXPRESSED IN LUNG, SIGNAL = 1.7; EXPRESSED IN HBL100, SIGNAL = 1.4; EXPRESSED IN BONE MARROW, SIGNAL = 1.6
aaggagctggaaggaggttggcagatatccttttggcaattgaagtgcttagaattttttcaactttgctatgatgtggaggggaggagaataaagcagtgggaatagacaagagccagaaggtacaggaaggaagaagagacggggtgaagaggctggatgagggctctggaatctgagacggagggccagcagaaatggagagaaaagagggagtgagggagcactacctggaaatgggccctgagaggaaagaagggagccagacacatgaaggcaaggattagatcaactttgtgatctggttcagaatgggtgtcagggcaaacagccatatagtcatagtttgtactttcttaagacactcctgagtatgtgtcagaagggccttcagccccaacaagatcaatttgctaaactcatacaaaaaaaaaaaaaaaaaagaataagcaccctggactcttgatcccctctcctcc

SEQ ID NO: 866 - DNA, 382 bp, Homo sapiens
  MAP TO AP000045.1; EXPRESSED IN BT474, SIGNAL = 7.8; EXPRESSED IN HBL100, SIGNAL =   7; EXPRESSED IN FETAL LIVER, SIGNAL = 8.6; EXPRESSED IN BRAIN, SIGNAL = 6.4; EXPRESSED IN PLACENTA, SIGNAL = 7.5; EXPRESSED IN BONE MARROW, SIGNAL = 9.7; EXPRESSED IN LUNG, SIGNAL = 8.7; EXPRESSED IN HELA, SIGNAL = 4.8; EXPRESSED IN ADULT LIVER, SIGNAL = 5.8; EXPRESSED IN HEART, SIGNAL = 5.8
cagtattcccttttgctgcctctaaaaggcctgtccctgcagacatgagagacagcaggtctcatgggggtgacaagctttttttttttttcttaaagaattttcaaaatcaaattccagaatgattttacggagatatcccaggaaaattaaggcttctcttaaacactaaaaaggcatgtaattgcttgttagcaaaatggatatgacacatctctgatacttttttcattattggttgggctgagcagtcagaagacctggtcgtcgtcttgactttggcaaatgagccggagccccttgggcaggtcacacaacctgtcccagcgagggacaccgagtggcccttcatgtacatccatggtgtgctggcttaaaatgt

SEQ ID NO: 867 - DNA, 470 bp, Homo sapiens
  MAP TO AP000045.1; EXPRESSED IN PLACENTA, SIGNAL = 1.7; EXPRESSED IN BONE MARROW, SIGNAL = 2.7; EXPRESSED IN HBL100, SIGNAL = 1.9; EXPRESSED IN FETAL LIVER, SIGNAL = 2.3; EXPRESSED IN LUNG, SIGNAL = 2.8; EXPRESSED IN HELA, SIGNAL = 1.7; EXPRESSED IN ADULT LIVER, SIGNAL = 2.5; EXPRESSED IN BRAIN, SIGNAL = 1.8; EXPRESSED IN BT474, SIGNAL = 1.7; EXPRESSED IN HEART, SIGNAL = 1.9
ttcgtaacaactgggacctgcaggtggaaaggctgccccaggcgcctcttttctttttgtgctgcctgtaccagtagggccatctttgtagccaaaagtcgggggtgtggggccatgcccagggggacctggtaatgccatttctgcactttgacaaaaactgagttgtatgaatgacttagataatggacattgaaacatttttgtaattatttccctctctctcctcccttcctccctcttctttttctctgtccccctcaagaccctctttcccagctgcccgctcctcagcacccgaagattcgcctgtacaacgcagagcaggtcctgagttgggagccagtggccctgagcaatagcacgaggcctgttgtctaccaagtgcagtttaaatagtaagccggtatttctgttggatccttgctgggagctgtgggggcatcgtgcggaaccctggggccacatac

SEQ ID NO: 868 - DNA, 442 bp, Homo sapiens
  MAP TO AP000044.1; EXPRESSED IN FETAL LIVER, SIGNAL = 2.3; EXPRESSED IN HELA, SIGNAL = 1.9; EXPRESSED IN ADULT LIVER, SIGNAL = 1.4; EXPRESSED IN PLACENTA, SIGNAL = 1.4; EXPRESSED IN HEART, SIGNAL = 1.2; EXPRESSED IN BRAIN, SIGNAL = 1.5; EXPRESSED IN HBL100, SIGNAL = 1.3; EXPRESSED IN LUNG, SIGNAL = 1.9; EXPRESSED IN BONE MARROW, SIGNAL = 1.3; EXPRESSED IN BT474, SIGNAL = 2.7
caaaattgcccttcaaaagcataaggaaattaagatgttcttagatagacaaaagctaagggagttcattaccgctagaactgccctgcgagaaatgcttaaggaagtcctgaaaggtgaaatgaaagggcactagacagaggggacagtgcagattcaggcaggtgcaatggcttctggggaagacccagccagtggggctattgccagcatccagtcagctgccaccttccctgaccccagtgtcaagtgatgcgcagggtgatccaggtgtgtgaggggcagctggatgtccagactgagggcactggtgccatcagtggctatcctaccactcaattcatgacccaggtggtgatccagggtgatatcaccagttatgatgcagttaacacagaggggaaagctgctgagatacactatactttcccacccctgcagt

SEQ ID NO: 869 - DNA, 469 bp, Homo sapiens
  MAP TO AP000044.1; EXPRESSED IN BT474, SIGNAL = 1.2; EXPRESSED IN HBL100, SIGNAL = 1.9; EXPRESSED IN FETAL LIVER, SIGNAL = 1.5; EXPRESSED IN BRAIN, SIGNAL = 0.84; EXPRESSED IN BONE MARROW, SIGNAL = 1.4; EXPRESSED IN ADULT LIVER, SIGNAL = 1.7; EXPRESSED IN HEART, SIGNAL = 1.1; EXPRESSED IN PLACENTA, SIGNAL = 1.8; EXPRESSED IN LUNG, SIGNAL = 1.5; EXPRESSED IN HELA, SIGNAL = 0.74
agtggatcagaattcttgcttgttattcttttgatgtatgtcagcaataattccagaaaccaaactttggagaagataggaaaagggtgaaactcttcaaaaacctctgggtcctccaaccagttgctgtttctgagacgtcccccaagataaacgtacaggctctgttttcagggattgtgatggttaaaatgctcttgggatcactgtgacccgacctgtgacaagaatgtaacatgcccattacccctggcagaaacggtcccctcctggatggtggccgtcatcctcatggcctcggtcttcatggtctgcctggcactcctcggctgcttcgccttgctgtggtgcgtttacaagaagacaaagtacgccttctcccctaggaattctcttccacagcacctgaaagaggtaggtaggatggagtgagatgtggatttgaaaaccttgatcggaaagagctttc

SEQ ID NO: 870 - DNA, 460 bp, Homo sapiens
  MAP TO AP000039.1; EXPRESSED IN HEART, SIGNAL = 4.4; EXPRESSED IN PLACENTA, SIGNAL = 5.5; EXPRESSED IN BT474, SIGNAL =   4; EXPRESSED IN BONE MARROW, SIGNAL = 4.9; EXPRESSED IN HBL100, SIGNAL = 4.8; EXPRESSED IN FETAL LIVER, SIGNAL = 4.3; EXPRESSED IN LUNG, SIGNAL = 4.8; EXPRESSED IN HELA, SIGNAL = 4.8; EXPRESSED IN ADULT LIVER, SIGNAL =   5; EXPRESSED IN BRAIN, SIGNAL = 5.6
gcattgtttgtggcttttccacgtgcacggtgcaagctgttggtggatctactattctggggtctggagtatggcggccctcttctcacagcttcactaggcagtgccccagtagggactctgtgtggaagctctgacctgatatttcccttctgcactgccctagcagagattctccatgaatgccctgcccctgcagcaaacttctgcctgggcatccaggcatttccatgcatcctctgaaatctaggcggaggctctcaaacctcaattcttgacttctgtgtacctgcaggctcaataccacatggaagctgccaaggcttgggacttccaccctctgaagccacagcccatgctgttacattggcccctttcagccgcggctggagtggctgagacacagggcaccaagtccacagcatggggatcctgtgctgggcaacgaaaccactttttc

SEQ ID NO: 871 - DNA, 464 bp, Homo sapiens
  MAP TO AP000034.1; EXPRESSED IN HEART, SIGNAL =  17; EXPRESSED IN BT474, SIGNAL =   7; EXPRESSED IN FETAL LIVER, SIGNAL = 9.9; EXPRESSED IN HELA, SIGNAL =  12; EXPRESSED IN PLACENTA, SIGNAL = 9.7; EXPRESSED IN BONE MARROW, SIGNAL =  10; EXPRESSED IN HBL100, SIGNAL = 8.5; EXPRESSED IN LUNG, SIGNAL =  13; EXPRESSED IN ADULT LIVER, SIGNAL =  11; EXPRESSED IN BRAIN, SIGNAL =  16
aggcccccaaacttgaactcagtgtggtagggggtcaacttagttaagtgagggagaaaggaagggatacttctgacagcgggtatgctggagcctaggggatgagagtacactcattcttcagaagcagagatgaataaatactacattaaaaaatatatttttgctttgctgtagatatctcccttgcagttatccaatgctgatcaagtaaatgtactaatacatacatgtcttcttctttttcctcctcctctccccttcctcctcctcctcttccttcttcttcttcttttcttctccttctttcttctctcttcctctcccctccctccctgcctgcctgcctgccttcattcattctttccttccttccttctttccttactctttcttttcctcctcctcttctctcttcctcctcctcctcctcctcctcctcctcctcctcctcctccttcttc

SEQ ID NO: 872 - DNA, 500 bp, Homo sapiens
  MAP TO AP000034.1; EXPRESSED IN HELA, SIGNAL = 7.6; EXPRESSED IN BRAIN, SIGNAL = 6.2; EXPRESSED IN HEART, SIGNAL =   6; EXPRESSED IN BT474, SIGNAL = 4.3; EXPRESSED IN BONE MARROW, SIGNAL = 7.1; EXPRESSED IN HBL100, SIGNAL = 4.6; EXPRESSED IN LUNG, SIGNAL = 7.3; EXPRESSED IN ADULT LIVER, SIGNAL =   8; EXPRESSED IN PLACENTA, SIGNAL = 5.3; EXPRESSED IN FETAL LIVER, SIGNAL = 5.8
atggatcagaactccatccctttttattgctgaatactattccattgtagggacgtaggttgagcatcccaaacccgaaaatctgaaacgctgcaaaatctgcaacatactgagcactgacatgaggctcaaaggaaatgctcgctggaatatttcggatttttggatttgagatgctcagctggtaggtacaatgcaaatatttttaaatcccaaatctgaaacacttctggtctccagcattttggatgagggatactcaacctgcactgttactcactggagagcgtctgagtgacccacagactcacaccccttcttacccacctcatctgcggggaggcggaccaggacatgtagagcaagatgaggaagagcagcaccacgaaggcagccaggctcacccagaatgcgatcacgatggaatctgcgggaggaggagatgcatctcagcgctgggttatgtcaacataaagcaacgctgaggggcagtaaggagt

SEQ ID NO: 873 - DNA, 446 bp, Homo sapiens
  MAP TO AP000025.1; EXPRESSED IN PLACENTA, SIGNAL = 0.98; EXPRESSED IN BT474, SIGNAL = 0.99; EXPRESSED IN BONE MARROW, SIGNAL = 0.86; EXPRESSED IN ADULT LIVER, SIGNAL = 0.99; EXPRESSED IN HELA, SIGNAL = 1.8; EXPRESSED IN LUNG, SIGNAL = 1.1; EXPRESSED IN FETAL LIVER, SIGNAL = 0.95; EXPRESSED IN HBL100, SIGNAL = 1.3; EXPRESSED IN HEART, SIGNAL = 0.87; EXPRESSED IN BRAIN, SIGNAL = 0.91
ttggtccatcaatttgtctttcagtcataacatagtattctttactgtggcttcttctaatgctaatgtgacccagaccagtctacccaagggcagcaaatactgttcactttctcccatgaagtccttcatgagaaaagtattttttactctgacattatccagggatgtcttcattataggaattacactgcattcaattgcacacatggtgatccttgtgtccaggcatgagaggcaatctcagcaccttcacagcatcagcatctctccacaagccttcccagagaaaagggctgctcagaccatcccgctgttagtgagctactgtctggtcatgtgctgggtggacctcatcatctcatcttcttcaaccctgctgtggacgtgtaacccagtcttcctgagtatgcagaaccttgtgggcgatgtctacgccactgttg

SEQ ID NO: 874 - DNA, 421 bp, Homo sapiens
  MAP TO AP000025.1; EXPRESSED IN LUNG, SIGNAL = 2.4; EXPRESSED IN HELA, SIGNAL = 1.9; EXPRESSED IN PLACENTA, SIGNAL = 1.7; EXPRESSED IN BT474, SIGNAL = 2.6; EXPRESSED IN BONE MARROW, SIGNAL = 1.6; EXPRESSED IN HBL100, SIGNAL = 1.2; EXPRESSED IN FETAL LIVER, SIGNAL = 1.3; EXPRESSED IN BRAIN, SIGNAL =   1; EXPRESSED IN ADULT LIVER, SIGNAL = 0.95; EXPRESSED IN HEART, SIGNAL = 1.1
cctgacactgatccaaagggccaaaatgtaaagtatattaaatatctgactttaaaaactacacaaaaggagagagaaatgtctgatttcttgcattattgtctttaagatggtcctactctggcgtatttcttgggttcctcctaaaaggaagtggaaagtcatccattcagcttgtgaaaatgttgttatatgactgttaagtcaacgacataacatagtctaccctttagaaaactctatcaggtatcttttataaaatataagtgtgttgcttttaaggcagcaaaagcagaaatagtcctcaactgtttttttccgagtgttgccatttctacaacatctacactcatctgattcacctgggttgtagactttattttacgcatctctgcaaccttttcttcttcttcaacacctg

SEQ ID NO: 875 - DNA, 476 bp, Homo sapiens
  MAP TO AL109760.1; EXPRESSED IN HBL100, SIGNAL = 2.1; EXPRESSED IN LUNG, SIGNAL = 2.3; EXPRESSED IN PLACENTA, SIGNAL = 5.7; EXPRESSED IN BT474, SIGNAL = 3.3; EXPRESSED IN BONE MARROW, SIGNAL = 1.8; EXPRESSED IN FETAL LIVER, SIGNAL = 3.2; EXPRESSED IN HELA, SIGNAL = 1.8; EXPRESSED IN ADULT LIVER, SIGNAL = 1.4; EXPRESSED IN BRAIN, SIGNAL = 2.1; EXPRESSED IN HEART, SIGNAL = 1.7
cagaaccgggctccttatccagctgggggaagggatccatttggacccttctgtcttcaggaggtagtggggacagacttggtgacagggtggacaggtgagggttcaaggaggacaagaagagccccagcaaccgcagggcagccagactctgaggggccacaagtccagttgccccaggcaccggctgccgtggcacattgtgaaaggctgagtgtctcccgactcagagaagctggtcatgaagacaccagagccagcagaagggatcacgtgccacccagcatctccacagaagaacgggtcacttgggccctggccctgggtgcccatcacagagaaggaagcagggcagctattggtgggcaagtgtcccccggtagatggagccatcctgcccccaccatcctggaatggaagggtcatcagacttgggtttgaggaagaccatgccgccagtgccgcatatgtcagag

SEQ ID NO: 876 - DNA, 397 bp, Homo sapiens
  MAP TO AL096794.3; EXPRESSED IN BONE MARROW, SIGNAL = 1.8; EXPRESSED IN ADULT LIVER, SIGNAL = 1.4; EXPRESSED IN PLACENTA, SIGNAL = 1.3; EXPRESSED IN BT474, SIGNAL = 1.3; EXPRESSED IN HBL100, SIGNAL = 1.5; EXPRESSED IN FETAL LIVER, SIGNAL = 1.4; EXPRESSED IN LUNG, SIGNAL = 1.6; EXPRESSED IN HELA, SIGNAL = 1.8; EXPRESSED IN BRAIN, SIGNAL = 1.8; EXPRESSED IN HEART, SIGNAL = 1.8
tttttcctctaaatacctcaagccaaaaattttcatgtagatattagtcaacgtatgcatccagtactcaattttctttcttctgcaattgatttgcagattattataaaaacatcctttatcagtagaaatgacttgaaataaaagataaatatgatttttaatatcttgaaggaaaactacattgtaaatatgcactgcagaaaactctgccttggctacaggtgcaaagttcccagttacctcaattattcacatgatgcttgcatctttgatggatggcataacctgttcagaaatcagggtgagctctgctcaggccacccttacaaatgaaggtaagtttgaagggaaaaacagtgggaaggaccttctatggtggcttctccctttctct

SEQ ID NO: 877 - DNA, 454 bp, Homo sapiens
  MAP TO AL096755.1; EXPRESSED IN PLACENTA, SIGNAL = 0.99; EXPRESSED IN HBL100, SIGNAL = 1.6; EXPRESSED IN BRAIN, SIGNAL = 1.1; EXPRESSED IN BT474, SIGNAL = 1.4; EXPRESSED IN BONE MARROW, SIGNAL = 0.9; EXPRESSED IN FETAL LIVER, SIGNAL = 1.6; EXPRESSED IN LUNG, SIGNAL = 1.1; EXPRESSED IN HELA, SIGNAL = 1.1; EXPRESSED IN ADULT LIVER, SIGNAL = 1.7; EXPRESSED IN HEART, SIGNAL = 1.1
tgggacagcatgtcactttccttggtgtcaccaatcatctcccttaggagtctgtgaaccacccactccctccctccccaccagacaggttaccggagcgggcgtgtctggaggagcaggcagagcaggtgctgtacacctcgtgtcctctgggacccatcccttctaggcccctcctcaggacaccccctcctgccgggctccccccaagcgcagcccccttcccaaacccacgtttgcctcactgtcttccttgtccggtagagcacacccctcagcacttctctgtgtgaatgagcctggcagggacctaccttgagatctacatgtctggataccgctgccttctggcctctctctggatggagggtggagggtggaggtggaagccacttcctcgcaggcttcgcgggaatttgctctcctctcttacagtgtccagcattgcttctga

SEQ ID NO: 878 - DNA, 472 bp, Homo sapiens
  MAP TO AL080239.11; EXPRESSED IN BT474, SIGNAL = 0.73; EXPRESSED IN BONE MARROW, SIGNAL = 0.83; EXPRESSED IN FETAL LIVER, SIGNAL = 0.69; EXPRESSED IN LUNG, SIGNAL = 1.4; EXPRESSED IN HELA, SIGNAL = 0.71; EXPRESSED IN PLACENTA, SIGNAL = 1.5; EXPRESSED IN HEART, SIGNAL = 0.83; EXPRESSED IN BRAIN, SIGNAL = 1.4; EXPRESSED IN ADULT LIVER, SIGNAL = 0.67; EXPRESSED IN HBL100, SIGNAL = 1.5
cggagcacccttagctagactgaacctgaggaacaacaaattcatgtacctgcctgtcagtggggtccttgatcagttgcaatctcttacacagattgacttggagggcaacccatgggactgtacttgtgacttggtggcattaaagctgtgggtggagaagttgagcgacgggattgttgtgaaagaactgaaatgtgagacgcctgttcagtttgccaacattgaactgaagtccctcaaaaatgaaatcttatgtcccaaacttttaaataagccgtctgcaccattcacaagccctgcacctgccattacattcaccactcctttgggtcccattcgaagtcctcctggtgggccagtgcctctgtctattttaatcttaagtatcttagtggtcctcattttaacggtgtttgttgctttttgccttcttgtttttgtcctgcgacgcaacaagaaacccacagtg

SEQ ID NO: 879 - DNA, 494 bp, Homo sapiens
  MAP TO AL080239.11; EXPRESSED IN HELA, SIGNAL = 8.1; EXPRESSED IN ADULT LIVER, SIGNAL = 8.7; EXPRESSED IN BRAIN, SIGNAL = 5.8; EXPRESSED IN PLACENTA, SIGNAL = 7.8; EXPRESSED IN BT474, SIGNAL = 7.8; EXPRESSED IN LUNG, SIGNAL = 8.2; EXPRESSED IN HEART, SIGNAL =   4; EXPRESSED IN BONE MARROW, SIGNAL = 9.8; EXPRESSED IN HBL100, SIGNAL =  19; EXPRESSED IN FETAL LIVER, SIGNAL = 9.8
ggggacttggagaacttttgtgtctagctaaaggtttgtaaatgcaccaatcagcaccctgtcaaaacggaccaatcagctctctgtaaaatggaccaatcagcaggatgtgggtggggccagataagggaataaaagcaggctgccccagtcagcagtggcaacccactcaggtccccttccacgctgtggaagctttgttatttcgctcttcacaataaatcttgctgctgctcactctttgggtccaccctgcctttatgagctgtaacactcactgcgaaggtctgcagcttcactcctaaagccagggagaccacgaacccaccaggagggatgaacaactccggacgggaggaacgaacaattccagacgtgctgcctttaagagctgtaacactcgccaccaacgtctgcagcttcactcctgaagtcagcgagaccacgaacccaccagaaggaagaaactccagacgcatctgaacatctgaagg

SEQ ID NO: 880 - DNA, 446 bp, Homo sapiens
  MAP TO AL080239.11; EXPRESSED IN PLACENTA, SIGNAL = 1.9; EXPRESSED IN BT474, SIGNAL = 1.5; EXPRESSED IN BONE MARROW, SIGNAL = 1.7; EXPRESSED IN HBL100, SIGNAL = 1.4; EXPRESSED IN FETAL LIVER, SIGNAL = 1.8; EXPRESSED IN HEART, SIGNAL = 1.9; EXPRESSED IN LUNG, SIGNAL = 2.1; EXPRESSED IN HELA, SIGNAL = 1.7; EXPRESSED IN ADULT LIVER, SIGNAL = 1.9; EXPRESSED IN BRAIN, SIGNAL = 2.6
tcaagtatattgaacgaggagccttcaataagctccacaaactgaaagttctcattcttaatgacaatctgatttcattccttcctgataatattttccgattcgcatctttgacccatctggatatacgagggaacagaatccagaagctcccttatatcggggttctggaacacattggccgtgtcgttgaattgcaactggaagataacccttggaactgtagctgtgatttattgcccttaaaagcttggctggagaacatgccatataacatttacataggagaagctatctgtgaaactcccagtgacttatatggaaggcttttaaaagaaaccaacaaacaagagctatgtcccatgggcaccggcagtgattttgacgtgcgcatcctgcctccatctcagctggaaaatggctacaccactcccaatggtcacact

SEQ ID NO: 881 - DNA, 467 bp, Homo sapiens
  MAP TO AL079305.2; EXPRESSED IN BT474, SIGNAL = 9.9; EXPRESSED IN HELA, SIGNAL =   5; EXPRESSED IN ADULT LIVER, SIGNAL = 4.8; EXPRESSED IN BONE MARROW, SIGNAL = 9.3; EXPRESSED IN HBL100, SIGNAL = 5.7; EXPRESSED IN FETAL LIVER, SIGNAL = 9.1; EXPRESSED IN LUNG, SIGNAL = 9.9; EXPRESSED IN BRAIN, SIGNAL =   5; EXPRESSED IN PLACENTA, SIGNAL = 9.1; EXPRESSED IN HEART, SIGNAL =   4
ttaggcttcttgtgccaaacagccaagttgtgaatgaaaaggacaagttcttgaaggaaattaaaaatactgtcctgtgaacatacaaatgataagaaaaccaagcagccttattgctgatatggagaaactttcagagatacacatgaaagatcaaaccagctacaacattcccttaagccaaagcctaatccagagtgaggcccaattctcttcaattctataaaaacagagaggtgaggaagctgcagaagaaaagtttgaagctagcagagtttggttcctgaaggttaaggaaagaagccatcttcgtaacatgaaagtgcaaagtgaagcagcaagtaccgatgtagaaactgcagcaagttatccagaagatctagctaaaatcactgatgaaggtggctatgataaacaacagattttcagtgaagacaaaacagtattctattggaagaagatgtcaa

SEQ ID NO: 882 - DNA, 454 bp, Homo sapiens
  MAP TO AL079295.1; EXPRESSED IN FETAL LIVER, SIGNAL = 1.8; EXPRESSED IN LUNG, SIGNAL = 0.87; EXPRESSED IN HELA, SIGNAL = 2.3; EXPRESSED IN BRAIN, SIGNAL = 1.1; EXPRESSED IN HEART, SIGNAL = 2.3; EXPRESSED IN PLACENTA, SIGNAL = 0.74; EXPRESSED IN BT474, SIGNAL = 2.4; EXPRESSED IN BONE MARROW, SIGNAL = 0.7; EXPRESSED IN ADULT LIVER, SIGNAL = 1.9; EXPRESSED IN HBL100, SIGNAL = 2.2
aactgcattaacaattcctttggatacatctacgacgtatactggttgtttaactgccttccagcccaaggaaacaaggggtatagcaccaaaccaacacatatttgcaaaataattaaggaatctatcctctcttccaaagatgtccaacagctttacgataatggcttctggaaatgtgtctctcactgctttctctccaacagccttctttctcaaatatctagaagagcttttaatattcacattcagatgtgcaacatgaatgaattttccaacttcagcttccttggacacctgagcaattgcttggggaatcttcacaaaaacatcctcaaaatcaaagtttttggtttcccagtctcgtccaacaagatttatgaccacattgctgtgttccactactcgtcagatagaatctttatctctcgcgtcccattccagaaacagaagc

SEQ ID NO: 883 - DNA, 493 bp, Homo sapiens
  MAP TO AL079295.1; EXPRESSED IN BT474, SIGNAL = 6.1; EXPRESSED IN BONE MARROW, SIGNAL = 1.4; EXPRESSED IN HBL100, SIGNAL = 6.7; EXPRESSED IN FETAL LIVER, SIGNAL = 5.6; EXPRESSED IN HELA, SIGNAL = 3.5; EXPRESSED IN BRAIN, SIGNAL = 3.5; EXPRESSED IN PLACENTA, SIGNAL = 2.3; EXPRESSED IN ADULT LIVER, SIGNAL = 3.7; EXPRESSED IN HEART, SIGNAL =   8; EXPRESSED IN LUNG, SIGNAL = 2.4
ccaaaaccaagagttgctcgggaggcactaaatgttgacggtcttggccagcttcacatcctcaatttcagcagacagccagcagtaagtgtgatgaagccgcagcacctcaatggccttgagttccagtggtgttgcctgaataccaaggtcttctaagctgggcaggtgagacaaggtcatgtctgtgatgtgaatacgctccactttatcccttgttgtccaggactcaaatgggcttatttcaaagtctcttgctacccactgataggcaaaaggtggcaaggggtacgggaggaagtacccctttgctgtgagccacagcaaagatgtacttcaccaggtcaaagaggagatatcgatttggcccaacgaaagcaaaggttttcccattggcatcaggatccttaactgcattaacaattcctttggatacatctacgacgtatactggttgtttaactgccttccagcccaaggaaacaaggggtat

SEQ ID NO: 884 - DNA, 492 bp, Homo sapiens
  MAP TO AL078644.10; EXPRESSED IN HBL100, SIGNAL = 2.1; EXPRESSED IN FETAL LIVER, SIGNAL = 2.3; EXPRESSED IN LUNG, SIGNAL = 2.5; EXPRESSED IN HELA, SIGNAL = 2.9; EXPRESSED IN PLACENTA, SIGNAL = 2.8; EXPRESSED IN BT474, SIGNAL = 2.6; EXPRESSED IN BONE MARROW, SIGNAL = 3.1; EXPRESSED IN ADULT LIVER, SIGNAL = 2.7; EXPRESSED IN BRAIN, SIGNAL = 3.4; EXPRESSED IN HEART, SIGNAL = 2.7
ctccctgcaaacacagataagaatgtagagtgagggaaaaaaatgtttttaatataggagatgaacattttatgaatatttccatgtgaaagaacattaaaattgattactaggcataggttatgtgtttgactagattccttaatgacttcaagatgaatgaagcacagaaattaattagtggctgaaactcatgaaatccctggtggggaagatatagctgatcggatttttacatggagttgaagcaaatgatagaaattgagttcctgttaggaaggaccaagcatttaagaccttgcttaatgatatttctggagtgctagcagcctgtacgctctgggcaacactgccagattcctgagtaaaggtaccaacctcacaagctatcaactacaaatgacagaacccatgatgtatgtcaggacttcagtgcccagagggaccagtaggctgcatacccagttacagagggccaggactattaacagg

SEQ ID NO: 885 - DNA, 474 bp, Homo sapiens
  MAP TO AL078644.10; EXPRESSED IN ADULT LIVER, SIGNAL = 1.5; EXPRESSED IN BONE MARROW, SIGNAL = 1.2; EXPRESSED IN HELA, SIGNAL = 2.1; EXPRESSED IN BRAIN, SIGNAL = 1.5; EXPRESSED IN HEART, SIGNAL = 4.9; EXPRESSED IN PLACENTA, SIGNAL = 1.5; EXPRESSED IN BT474, SIGNAL = 0.93; EXPRESSED IN FETAL LIVER, SIGNAL = 1.5; EXPRESSED IN LUNG, SIGNAL = 1.5; EXPRESSED IN HBL100, SIGNAL = 1.3
gctcattcagagctcagtttttctgctttaaatgcaaatgcaactttctaaactcctaggtgggaacactgctgttttgatgatctgtgattagatgaactgatcaatctcaattggtaacatccccttgttatccttccccccctccccccgactctgggaatgatttaaacattctggaatagatgcattttgtgtgtgtgtgtttctagtcttataatgacagcttcactccaaatgtctccctagaggtatatactatcacatacaggaattcgtcttcatccttctcactttcatacacttcataaatcagcatggaaatactcaccaagctgtctctgctcaccactaggaagagggcttgattactatcgagctttaagggccttctaattatcttgacgagtttactcatgttgacctgatcaggtacaaaattacttggtttttccaggacaggaagctgctttt

SEQ ID NO: 886 - DNA, 453 bp, Homo sapiens
  MAP TO AL078644.10; EXPRESSED IN ADULT LIVER, SIGNAL = 1.8; EXPRESSED IN BT474, SIGNAL = 3.6; EXPRESSED IN BONE MARROW, SIGNAL = 4.3; EXPRESSED IN LUNG, SIGNAL = 3.6; EXPRESSED IN HELA, SIGNAL = 1.8; EXPRESSED IN PLACENTA, SIGNAL = 2.7; EXPRESSED IN HBL100, SIGNAL =   3; EXPRESSED IN FETAL LIVER, SIGNAL = 5.1; EXPRESSED IN BRAIN, SIGNAL = 1.9; EXPRESSED IN HEART, SIGNAL = 1.8
gcttgtaatagctgaaaaatcgcattatcagtacaaataaactgcttagtcttggcttgaatattagaaaaatttagccatgacataatttttttaaaaattagatacagacattgaactgaaggttagccatattcaatagtattgttatttccctatcttattggattgccgtgaaagatggcatattaaaccctctctttgaaagtttgcatgtcacaaaaatgcccatctacatgcttagccagttgaatgcttctgttcttacctgcagctatgagtttgccattcatctctgctgttcccagaccagatcgtgcgtactgcataggagacatgggcttttcgattagctcatcttgttgcatctcaaagcttaaactcttacttagttttggagtacttgttggtgagctctgtgggctgtttctcccatgaagaaaaatgacacag

SEQ ID NO: 887 - DNA, 394 bp, Homo sapiens
  MAP TO AL078598.4; EXPRESSED IN PLACENTA, SIGNAL = 1.9; EXPRESSED IN BT474, SIGNAL = 2.5; EXPRESSED IN HBL100, SIGNAL = 2.2; EXPRESSED IN HELA, SIGNAL = 2.7; EXPRESSED IN BRAIN, SIGNAL = 7.3; EXPRESSED IN HEART, SIGNAL = 2.6; EXPRESSED IN BONE MARROW, SIGNAL = 2.1; EXPRESSED IN FETAL LIVER, SIGNAL = 1.4; EXPRESSED IN LUNG, SIGNAL = 2.5; EXPRESSED IN ADULT LIVER, SIGNAL = 1.9
gaaagtgatttgtatcattcagggatcattgacatacctagctgaagaaatagatatgggcttaaagatgatctttccaataagagattatagtctttctcacttggaaaattggtttgttgatctggaggggaatggggggctatttcatggtttctgaaggccaagattccctctgagtggatttatcgtttgagccacctgtgtacttagactcccactcactttcttcaaggagaatcctgctgtctatggatttagccaggtttaaaatatatttatagtaggaactaccaaacattatctcaagctgagctataagaaagcccatcaaagttaacttccaaggcattctgatagttatgccttgattctggatcttgattttcccaca

SEQ ID NO: 888 - DNA, 461 bp, Homo sapiens
  MAP TO AL078584.17; EXPRESSED IN PLACENTA, SIGNAL = 1.3; EXPRESSED IN LUNG, SIGNAL = 1.3; EXPRESSED IN HEART, SIGNAL = 1.3; EXPRESSED IN BONE MARROW, SIGNAL = 0.8; EXPRESSED IN BRAIN, SIGNAL = 1.9; EXPRESSED IN BT474, SIGNAL = 1.2; EXPRESSED IN ADULT LIVER, SIGNAL = 1.4; EXPRESSED IN HELA, SIGNAL = 1.5; EXPRESSED IN FETAL LIVER, SIGNAL = 0.77; EXPRESSED IN HBL100, SIGNAL = 1.2
gacttgcatgctgcctacccaatggtaggtatcaactattaactaactgcctgtgaacctagatttaagatctagactgaaggtaggaaagttagggacagtcaaaaggcatgtcttgcaaggaaggtcagataagaacaattgtgaaacaaggctactattaatgatgatgatactagaacaaggttggccaatgaccataccgaaaaccaaccttatgtactgaaaaacaacagtgtcttttaattctttcttgtatttgcctcttcacttttgggtttaatgctattggcctttacctctacccctggaagtgatctcttccttctcaaacaaattgttttggatgttaaatgaagaaacaatgactccattctcttcaagcttgtctccttctgaccttggcttccaggagagctcttggaaggaaggcaagggcaggaaagtggggagagtacctg

SEQ ID NO: 889 - DNA, 462 bp, Homo sapiens
  MAP TO AL078584.17; EXPRESSED IN BONE MARROW, SIGNAL =   4; EXPRESSED IN HBL100, SIGNAL = 6.4; EXPRESSED IN PLACENTA, SIGNAL =   5; EXPRESSED IN FETAL LIVER, SIGNAL = 5.4; EXPRESSED IN HELA, SIGNAL =  11; EXPRESSED IN ADULT LIVER, SIGNAL =   8; EXPRESSED IN BRAIN, SIGNAL =  11; EXPRESSED IN HEART, SIGNAL = 4.5; EXPRESSED IN BT474, SIGNAL = 8.8; EXPRESSED IN LUNG, SIGNAL = 7.6
ttttagcttccagacttccaaactgaggggaagtaacatatatgctgtggaatgagcaaaatatttgaactcataaaacctagttcaacttactagttgtttggctttaggcaaattacctaacccctgagaagattcaattccctttttccagtgaaaatgatgataataaaggtgatggtagtagtggttgtagtggtggtaatggtgatgatgattatgatgatactgatgatgatggtggtggtggcggtagtggttggactggtggtagtgatgatagtggtggtagcgattatagagataataataattgtggtggtggtaaggtgatgatgataataatcatgatgatgatagtggtggtagtggtattggttatgatggtgatggtagtgatggttgtagtggtggttatggtgatgatgattatgatgataatgttgatgatggtggtggtga

SEQ ID NO: 890 - DNA, 460 bp, Homo sapiens
  MAP TO AL078475.2; EXPRESSED IN PLACENTA, SIGNAL = 2.7; EXPRESSED IN BRAIN, SIGNAL = 6.5; EXPRESSED IN BT474, SIGNAL = 3.6; EXPRESSED IN HBL100, SIGNAL = 2.2; EXPRESSED IN FETAL LIVER, SIGNAL = 2.9; EXPRESSED IN LUNG, SIGNAL = 2.8; EXPRESSED IN HELA, SIGNAL = 2.9; EXPRESSED IN ADULT LIVER, SIGNAL = 3.7; EXPRESSED IN BONE MARROW, SIGNAL = 1.7; EXPRESSED IN HEART, SIGNAL = 3.9
ccctatccatgtctgggatggaatcttttattgaaaaacagacaaagttactggaggtgcagccaacagaagccccagaaaaagatcctgaacaacttcccaaaggacatgtggacagttgcttgtcagatgcagctgtgccagcccaagatcccagcaacagcgattcaggaacagagacagagttagctgacacagccctgaatctgcttctcttgctactaacagaacagtggaaatggctgtgtattgaaaacatgcagaagtttcttcgtcttatctttggtaccctagttcaaaggtggctagaggtgcaggtagctaatttaacaagtccacagtgctgggtgcagtacctctggcttcttcaggagtccatctggcctggtggagttttgcctaagtttccacggcctgtaaggacccaggagcagaaactggctgctgagaaacaggcttt

SEQ ID NO: 891 - DNA, 461 bp, Homo sapiens
  MAP TO AL050339.4; EXPRESSED IN FETAL LIVER, SIGNAL = 1.1; EXPRESSED IN LUNG, SIGNAL = 1.6; EXPRESSED IN HELA, SIGNAL = 2.1; EXPRESSED IN HEART, SIGNAL = 1.2; EXPRESSED IN PLACENTA, SIGNAL = 1.3; EXPRESSED IN ADULT LIVER, SIGNAL = 1.8; EXPRESSED IN BRAIN, SIGNAL = 1.3; EXPRESSED IN BT474, SIGNAL = 1.5; EXPRESSED IN BONE MARROW, SIGNAL = 0.99; EXPRESSED IN HBL100, SIGNAL = 1.2
taaacatagcatcctcccccgtcctcatattcctattctgccaattccaaacacagaccacacttggtttattgatggcagttcttctaaacccaatcaattttcaccagctaaagctagatatgttgtcgtgtcccacaccgctactattgaagctgctgcacttccctccaccacttccgaataagctgaactgattgctttaactaccgcattctctcactaaaggaatgcacattgacatttatactgactccagatatgctttctatatcctccataaccatgctgccttctgggctgaaagaggcttccttaccacacaaggctcttccattatcaatgcctccctaacaaaggccctccttaaggttgctttcctgccagccaaggctggagtcattcattataaagggcaccagaaacctactgatcttattgcaaaaggaaatgcctatgcc

SEQ ID NO: 892 - DNA, 473 bp, Homo sapiens
  MAP TO AL050338.11; EXPRESSED IN BT474, SIGNAL = 2.6; EXPRESSED IN BONE MARROW, SIGNAL =   4; EXPRESSED IN HBL100, SIGNAL = 2.7; EXPRESSED IN ADULT LIVER, SIGNAL = 3.3; EXPRESSED IN HEART, SIGNAL = 2.6; EXPRESSED IN PLACENTA, SIGNAL = 3.2; EXPRESSED IN FETAL LIVER, SIGNAL = 2.7; EXPRESSED IN LUNG, SIGNAL = 3.3; EXPRESSED IN HELA, SIGNAL =   4; EXPRESSED IN BRAIN, SIGNAL = 3.6
gtctctctctttcccctgcctcgtgtacaaacacaactacgaacacatatacttctgttaagtcatttgtaccctaacctaatcccaaaaaggataagcagtgacatatttgtaaaatgcataaatatagcaactgttacaacaaaataatgaataaaaataaattctaaaaggaaaaaccagtgaatgaacatacacaggaaatcctacctgaggaacattgctgtgattgggccaagttctagttcatcatttcctaacagccgaagcagagacaacatgatggattacagagccatcattttctatgaacagaaagcacaccagttcatcaacaaagataaactttcctatccctgagttcgaagaagaatttgtcaaaatgatctttatgtaagggacagggagctccataatgtcccccatagcaattttacaagcaatatagatacgttccacatggctattcctca

SEQ ID NO: 893 - DNA, 453 bp, Homo sapiens
  MAP TO AL050309.4; EXPRESSED IN HEART, SIGNAL = 3.4; EXPRESSED IN PLACENTA, SIGNAL = 2.8; EXPRESSED IN BONE MARROW, SIGNAL = 3.6; EXPRESSED IN LUNG, SIGNAL = 4.1; EXPRESSED IN HELA, SIGNAL = 4.1; EXPRESSED IN ADULT LIVER, SIGNAL = 3.9; EXPRESSED IN BT474, SIGNAL = 3.3; EXPRESSED IN HBL100, SIGNAL =   3; EXPRESSED IN FETAL LIVER, SIGNAL = 3.2; EXPRESSED IN BRAIN, SIGNAL = 4.6
gtgtgagggagcaggtatggggaactagaagttttgataaatttccctgtccgtctaggaaacacctcaggctctcctttctttagctggctagaataaacatgaaccaaatagcaacctgcgatattttcaactccttccatcccaccttatgcgtgagggagactgcttgaagaagcagcctgtgctttcctctatatatccaagtaatcagatgaggagtgttaaattaagtgtggaacctaatgaaaagcagctgagaaatatgcagacacgattctgggcccacatatgctgttcttcccttcttctctttctcctcttcatcatcccgcttctcctcctcctgaaagccagctgacaaactaccagggtggagcccagtctgagggctggagggaagggaggaggaaaagcctcagtaagaggactccaccctctctgctcccagta

SEQ ID NO: 894 - DNA, 483 bp, Homo sapiens
  MAP TO AL050308.9; EXPRESSED IN PLACENTA, SIGNAL =  12; EXPRESSED IN FETAL LIVER, SIGNAL =  15; EXPRESSED IN HELA, SIGNAL =  14; EXPRESSED IN BRAIN, SIGNAL =  14; EXPRESSED IN HEART, SIGNAL =  17; EXPRESSED IN BT474, SIGNAL =  11; EXPRESSED IN BONE MARROW, SIGNAL =  14; EXPRESSED IN LUNG, SIGNAL =  18; EXPRESSED IN ADULT LIVER, SIGNAL =  41; EXPRESSED IN HBL100, SIGNAL = 8.2
gagtatctgcaatctgcccctggccctctaccaacctacgttcttgcctaatcaatctcaatctattccatagctctacacatgccccaagtgcagatctttctcttcagttttagacatatatgaaactgcctaatcaatatctctacttgaatgttcagtaggcatctgtattagtccgttcccatgctgctgataaagacatacgggaaactgagaagcaaaagaaatttaattggacttacagttccacatggctaggaggtctcagaatgatcgcaggaggcgaaaggcacttcttacatggcagcggcaagggaaaatgagggggatgcaaaagcagaaacccctgataaaattatcagatctcatgagacttattcactaacacgagaacagtatgggggaaactacccccataattcaaatgagctcccagtgggtccctcccacaatatgtgggaattatgggagtacaattca

SEQ ID NO: 895 - DNA, 475 bp, Homo sapiens
  MAP TO AL050308.9; EXPRESSED IN PLACENTA, SIGNAL = 8.4; EXPRESSED IN BT474, SIGNAL = 4.1; EXPRESSED IN BONE MARROW, SIGNAL = 2.7; EXPRESSED IN HBL100, SIGNAL = 2.9; EXPRESSED IN FETAL LIVER, SIGNAL = 3.7; EXPRESSED IN HELA, SIGNAL = 3.3; EXPRESSED IN ADULT LIVER, SIGNAL = 2.8; EXPRESSED IN LUNG, SIGNAL =   3; EXPRESSED IN HEART, SIGNAL = 2.8; EXPRESSED IN BRAIN, SIGNAL = 3.5
ccaattaggctaaaaacaggaggtaaagaaataccaaatcatctatcgcctgagagcactgggggagggacaatgattgggatataaaccccaggcattcaagccaggagtgggcaacccccttgggtcccctccggttgtatgggaactctgttttcactctattaaaccttgcaactgcacactcttctcgtccatgtttgttccggctttcgctcaccgttcaccaccgccgaaagccgtccgtccaccaacgccgaaggccgtccgtccaccaccgccgaaggccgtccgtccaccaccgccgaaggccgtccgtccaccaacgccgaaggccgtccgtccaccaccgccgaaggccgtccgtccaccaccgccgaaggccgtccgtccaccaccgctcaacaccctccgtccaccaccgctgaacgccgccctcgcagacccgccattgacttccactcctccagatcca

SEQ ID NO: 896 - DNA, 455 bp, Homo sapiens
  MAP TO AL049874.2; EXPRESSED IN PLACENTA, SIGNAL = 1.9; EXPRESSED IN HBL100, SIGNAL = 6.6; EXPRESSED IN HEART, SIGNAL = 0.98; EXPRESSED IN BONE MARROW, SIGNAL = 1.7; EXPRESSED IN ADULT LIVER, SIGNAL = 1.3; EXPRESSED IN BT474, SIGNAL = 2.6; EXPRESSED IN FETAL LIVER, SIGNAL = 1.3; EXPRESSED IN LUNG, SIGNAL = 1.6; EXPRESSED IN HELA, SIGNAL = 0.92; EXPRESSED IN BRAIN, SIGNAL = 0.96
ttccctgatctctgcattgggaaggaaaatgcaaaagtggaaagagttggagagaagaggagattaagcttgagatcgctgttggttttgatttttaaaaagatatttgtgaaagtccaccattcctttatgcgcaaacaactccagaaacaagctgcaaaaatgttcctgatttctatttacaagtgtccctagtcgctgcagtggttgctgctccaggaatcccttcgaggccccagtccctccccacttaggaccccaagtccaccagactggaggtgagggggccgagcagagagtcttggagctgatgctggtgggtctgcaggccgtgactgggctgcgaggctgttaagcccgggagagaatagtttgagctcctggcgtggcccatattgccctgcagcagaaggaccgagttctggtctggactttggggaggtgagaattcctct

SEQ ID NO: 897 - DNA, 481 bp, Homo sapiens
  MAP TO AL049859.7; EXPRESSED IN PLACENTA, SIGNAL = 2.2; EXPRESSED IN BONE MARROW, SIGNAL = 1.8; EXPRESSED IN ADULT LIVER, SIGNAL = 1.4; EXPRESSED IN BRAIN, SIGNAL = 3.6; EXPRESSED IN BT474, SIGNAL = 1.2; EXPRESSED IN HBL100, SIGNAL = 1.7; EXPRESSED IN FETAL LIVER, SIGNAL = 1.9; EXPRESSED IN LUNG, SIGNAL = 1.6; EXPRESSED IN HELA, SIGNAL = 1.8; EXPRESSED IN HEART, SIGNAL = 1.7
acggacacataggctaatggaataaggtagatatttcataaataaaccctgcatatatggtcaaaagattttcttcaaggtgcaaaacatcttttttgcaccttgcaacaccttgcaaaaaaggtgttttgcacctttgggaaaagtgtttttcacctttaagaatggggaaaggaggatcttttcaacaaatgatgctgggaaaaccatatccacatgcatgaagatgaatttggacttttactttatatcatatacaaaattaattcaaataaagacctcaatgtatgagctgaaaatgtaaaagccttagaagaaaacatatgcaaaaagctccatgacatcgaatacagcaacaatttcttagttatagcccccaaaagcacaggcaacaaaaggaaaatagataaattggatttcatcaaatttaaaacttttgtcatcaaaggaaactattaacagagtgaaaaggcaactcaca

SEQ ID NO: 898 - DNA, 475 bp, Homo sapiens
  MAP TO AL049844.6; EXPRESSED IN BONE MARROW, SIGNAL = 2.5; EXPRESSED IN HBL100, SIGNAL = 1.5; EXPRESSED IN FETAL LIVER, SIGNAL = 1.4; EXPRESSED IN HELA, SIGNAL = 1.1; EXPRESSED IN ADULT LIVER, SIGNAL = 0.84; EXPRESSED IN BRAIN, SIGNAL = 1.4; EXPRESSED IN PLACENTA, SIGNAL = 4.8; EXPRESSED IN LUNG, SIGNAL = 1.7; EXPRESSED IN HEART, SIGNAL = 1.3
tcatcagctcctgtgagtgggtcttcttggtatgccgggtgaggtgatccttgcgcccaaatctctgggcacagaactggcacaggaagtccttgcatcctgtgtggaccaccaggtggcgtcgcacatccttccgggtgtagaagcatctttcacagtggtcgcactggtgcttcttttccttggttccgctagggggcttctcttccgcatgggctttgaggtggtccagtagcacctcggtgctccctagctccagggcacagaccccacaggtgaggtccccactgctggccgcatggagggccaggtgcctcttatagcccagcatggtgttgtacttcttcccacactcctcacacccaaaggccattttgttggggtcgtgggtctggaggtggtttttcaggtggtctttccggttgaacgtcttctcacagtgagcacactggtgagatttctggggagaatgggt

SEQ ID NO: 899 - DNA, 475 bp, Homo sapiens
  MAP TO AL049844.6; EXPRESSED IN FETAL LIVER, SIGNAL = 1.7; EXPRESSED IN LUNG, SIGNAL = 2.1; EXPRESSED IN HEART, SIGNAL = 1.3; EXPRESSED IN HELA, SIGNAL = 3.4; EXPRESSED IN ADULT LIVER, SIGNAL = 1.6; EXPRESSED IN BRAIN, SIGNAL = 1.7; EXPRESSED IN PLACENTA, SIGNAL = 2.3; EXPRESSED IN BT474, SIGNAL = 2.4; EXPRESSED IN BONE MARROW, SIGNAL = 1.4; EXPRESSED IN HBL100, SIGNAL = 1.8
gtgcctttaggacctgcttgagtccaatcatgtatatacacttccatttgatgatggatgctgctgtgcatgacccactttatggctagatgggtcagaaagcactcagttcatgataggcaggtcaggttgcatggtgacttgatgacccacagtcaaacgttcagtttccaccaaagcccagtaacaggccaagagctgtctctcaaaagaagagtaattatctgtagaagatggcagagccttgctccaaaatcctagaggcctccactgtgattcacctttgggggcctgccaaaggctccaaacagcatcgccatctgccactgacacctcaagtaccattggatctgctgggtcatatggcccaattgacagagcagcttgcacagcagcctggacctgttgtagagccttctcctgttctggaccccactcaaaactggcagcttcaggtcacttgataaatgggccg

SEQ ID NO: 900 - DNA, 463 bp, Homo sapiens
  MAP TO AL049839.2; EXPRESSED IN HEART, SIGNAL = 7.4; EXPRESSED IN BRAIN, SIGNAL =   5; EXPRESSED IN PLACENTA, SIGNAL = 9.1; EXPRESSED IN BT474, SIGNAL =  29; EXPRESSED IN BONE MARROW, SIGNAL =  64; EXPRESSED IN FETAL LIVER, SIGNAL =  32; EXPRESSED IN LUNG, SIGNAL =  13; EXPRESSED IN HELA, SIGNAL =  39; EXPRESSED IN ADULT LIVER, SIGNAL =  20; EXPRESSED IN HBL100, SIGNAL =  93
ccactccaattgctggtcacttcactcctggaaccttcactaaccagatccaggcagacttctgggagccaaggcttcttgtggttactgaccccagggctgaccaccagcctctcacggaggcatcttatgttaacctacctaccattgctctgtgtaacacagattctcctctgcgctatgtggacattgccattccatgcaacaaccagggagctcgctcagtgggtttgatgtggtggacgctggctcgggaagttctgcgcatgcgtggcaccatttctcgtgaacacctatgggaggtcatgcctgatctctacttctacagagatcctgaagagattgaaaaagaagagcaggctgctactgaaaaggcagtgaccaaggaggaatttcagggtgaatggactgctccagctcctgagttcactgctactaagcctgaggttgcagactggtctga

SEQ ID NO: 901 - DNA, 471 bp, Homo sapiens
  MAP TO AL049839.2; EXPRESSED IN HBL100, SIGNAL = 1.4; EXPRESSED IN PLACENTA, SIGNAL = 1.5; EXPRESSED IN HEART, SIGNAL =   2; EXPRESSED IN BRAIN, SIGNAL = 1.4; EXPRESSED IN ADULT LIVER, SIGNAL = 8.2e+02; EXPRESSED IN LUNG, SIGNAL = 4.3; EXPRESSED IN FETAL LIVER, SIGNAL = 2.9e+02; EXPRESSED IN BONE MARROW, SIGNAL = 0.8; EXPRESSED IN BT474, SIGNAL = 0.97
aggtctttcttttgtggcccttttcccaatccaagcctgctgggctctccctcacccccaataacttttactcttgccaagctacttctctaaaccaaagcagggtccctcctatgagggactctgggcacttccactgctgcggaagcagggtcgagcagggcgacccttgcactcacaccttctccaactgcttgctccaccttcagccaaatgggagatgccctttgacccccaagatactcatcagtcaaggttctacttgagcaagaaaaagtgggtaatggtgcccatgatgagtttgcatcacctgactataccttacttccgggacgaggagctgtcctgcaccgtggtggagctgaagtacacaggcaatgccagcgcactcttcatcctccctgatcaagacaagatggaggaagtggaagccatgctgctcccagagaccctgaagcggtggagagactc

SEQ ID NO: 902 - DNA, 446 bp, Homo sapiens
  MAP TO AL049839.2; EXPRESSED IN LUNG, SIGNAL = 1.4; EXPRESSED IN ADULT LIVER, SIGNAL = 3.3; EXPRESSED IN BT474, SIGNAL = 0.63; EXPRESSED IN FETAL LIVER, SIGNAL = 9.6; EXPRESSED IN HELA, SIGNAL = 0.59; EXPRESSED IN HEART, SIGNAL = 0.86
gcacttcctagctatgtgatctccaaaaaatacttgactctctgagcttcctttctctcttctataaaattgaagaattacaccttgctcaaagatgccatgagaattcaatgacagacacatgcgaagtcaccccccagcacagtgcctggggcagagtagctgctccattgttccatttcctacttgctccatggctcagttgaacagatacttagaggttgatgcccataggcagaagctttgccatttgctatgatgacttcacctgcccctagtggcctggtgatgcctggtgtctcccctgcagatggtgcacaaagctgtggtggaggtggacgagtcgggaaccagagcagcggcagccacggggacaatattcactttcaggtcggcccgcctgaactctcagaggctagtgttcaacaggccctttctgatgttca

SEQ ID NO: 903 - DNA, 404 bp, Homo sapiens
  MAP TO AL049839.2; EXPRESSED IN HELA, SIGNAL =  33; EXPRESSED IN BRAIN, SIGNAL = 8.5; EXPRESSED IN HEART, SIGNAL = 3.3; EXPRESSED IN BONE MARROW, SIGNAL =  25; EXPRESSED IN LUNG, SIGNAL = 8.4; EXPRESSED IN PLACENTA, SIGNAL = 9.7; EXPRESSED IN BT474, SIGNAL =  24; EXPRESSED IN ADULT LIVER, SIGNAL =   8; EXPRESSED IN FETAL LIVER, SIGNAL =  28; EXPRESSED IN HBL100, SIGNAL = 1.1e+02
ggcattgcccattaattttgaaaagatagcctttccgcgctacctacagaggggtccatacagcgtcgttctggattcccgtcgtaacttaaagggaaactttcacaatgtctggagcgcttgatgtcctgcaaatgaaggaggaggatgtccttaagttccttgtagcaggaacccacttaggtggcaccaatcttgacttccagatggaacagtacatctataaaaggaaaagtgatggcatctatatcataaatctgaagaggacctgggagaagcttctgctggcagctcgtgctattattgctattgaaaaccctgctgatgtcagtgttatatcctccaggaatactggccagagggctgtgctgaagtttgctgctgccactgaagccactccaatt

SEQ ID NO: 904 - DNA, 444 bp, Homo sapiens
  MAP TO AL049839.2; EXPRESSED IN FETAL LIVER, SIGNAL = 2.7e+02; EXPRESSED IN HELA, SIGNAL = 0.76; EXPRESSED IN ADULT LIVER, SIGNAL = 7.3e+02; EXPRESSED IN PLACENTA, SIGNAL = 1.4; EXPRESSED IN BONE MARROW, SIGNAL = 0.71; EXPRESSED IN BT474, SIGNAL =   1; EXPRESSED IN HEART, SIGNAL = 1.5; EXPRESSED IN BRAIN, SIGNAL = 1.2; EXPRESSED IN LUNG, SIGNAL = 3.4; EXPRESSED IN HBL100, SIGNAL = 1.5
ccatctggccctctgagacttaaaggagctttgcttttcagagttgagaatggagagaatgttacctctcctggctctggggctcttggcggctgggttctgccctgctgtcctctgccaccctaacagcccacttgacgaggagaatctgacccaggagaaccaagaccgagggacacacgtggacctcggattagcctccgccaacgtggacttcgctttcagcctgtacaagcagttagtcctgaaggcccctgataagaatgtcatcttctccccactgagcatctccaccgccttggccttcctgtctctgggggcccataataccaccctgacagagattctcaaaggcctcaagttcaacctcacggagacttctgaggcagaaattcaccagagcttccagcacctcctgcgcaccctcaatcagtccagcgatga

SEQ ID NO: 905 - DNA, 461 bp, Homo sapiens
  MAP TO AL049839.2; EXPRESSED IN BT474, SIGNAL = 0.75; EXPRESSED IN FETAL LIVER, SIGNAL =  17; EXPRESSED IN PLACENTA, SIGNAL = 0.69; EXPRESSED IN ADULT LIVER, SIGNAL = 6.7; EXPRESSED IN HEART, SIGNAL = 0.99
actgccaccctgtgtaaaccctcatgcccagtcttgcgggtgccatcccttctctttgaagctgaatggaccaaacatacccattgagtgttgggtggggacatctctggaaagtcagcacctggaccagctccacccctctctgaggacaccttctttccctttcagaacaaagaacagccaccatgcagctcttcctcctcttgtgcctggtgcttctcagccctcagggggcctcccttcaccgccaccacccccgggagatgaagaagagagtcgaggacctccatgtaggtgccacggtggcccccagcagcagaagggactttacctttgacctctacagggccttggcttccgctgcccccagccagagcatcttcttctcccctgtgagcatctccatgagcctggccatgctctccctgggggctgggtccagcacaaagatgcagatcctg

SEQ ID NO: 906 - DNA, 466 bp, Homo sapiens
  MAP TO AL049839.2; EXPRESSED IN ADULT LIVER, SIGNAL = 8.7; EXPRESSED IN PLACENTA, SIGNAL = 1.6; EXPRESSED IN BONE MARROW, SIGNAL = 2.4; EXPRESSED IN HBL100, SIGNAL = 1.4; EXPRESSED IN FETAL LIVER, SIGNAL =  13; EXPRESSED IN LUNG, SIGNAL = 2.3; EXPRESSED IN HELA, SIGNAL = 1.9; EXPRESSED IN BRAIN, SIGNAL = 1.8; EXPRESSED IN BT474, SIGNAL = 1.7; EXPRESSED IN HEART, SIGNAL = 2.1
cttctcagtagggccaggtgttcttctgggggaatttcctgggcattctcttccctcccataggcctgagagtgcagaggatgcatcttatcgactacctgctcctcctgctggttggactactggccctttctcatggccagctgcacgttgagcatgatggtgagagttgcagtaacagctcccaccagcagattctggagacaggtgagggctcccccagcctcaagatagcccctgccaatgctgactttgccttccgcttctactacctgatcgcttcggagaccccggggaagaacatctttttctccccgctgagcatctcggcggcctacgccatgctttccctgggggcctgctcacacagccgcagccagatccttgagggcctgggcttcaacctcaccgagctgtctgagtccgatgtccataggggcttccagcacctcctgcacactctcaa

SEQ ID NO: 907 - DNA, 471 bp, Homo sapiens
  MAP TO AL049834.2; EXPRESSED IN BT474, SIGNAL = 0.69; EXPRESSED IN HBL100, SIGNAL = 0.79; EXPRESSED IN HELA, SIGNAL = 0.75; EXPRESSED IN ADULT LIVER, SIGNAL =   1; EXPRESSED IN BRAIN, SIGNAL = 0.7; EXPRESSED IN PLACENTA, SIGNAL = 1.3; EXPRESSED IN FETAL LIVER, SIGNAL = 0.82; EXPRESSED IN LUNG, SIGNAL = 1.4; EXPRESSED IN HEART, SIGNAL = 1.6
caatctccaaaatgtgtgcaagtactgcaaaccggacagaccggggcagggcaaggcccttgaaaccaagtcctccttgagcacctttcccaggttagaaacccctcttcagcctgtgcttcgcacgtttccttcagcgtgccgccattcagactgcgccacttacgtcccagtgccacgctgcgtggatcaagtgtcaacgggaaagtatgagttaggcaagcgctttttttttaagctgtaaacgcttcacatgactggccccgtaagaaattgtgggagcttagatgagcctggagcttttcaggaactggatgaggactctgtacacaaatgtgtactggcagagagtctgcaccagcatcattctctgttgcctcagcatgtccagcactctcgggatgtccagcacctaggttgagagaaacggtaatgaagataatgtgttcccctggggagacagaaaggatg

SEQ ID NO: 908 - DNA, 461 bp, Homo sapiens
  MAP TO AL049829.2; EXPRESSED IN HELA, SIGNAL =   1; EXPRESSED IN BT474, SIGNAL = 0.74; EXPRESSED IN LUNG, SIGNAL = 1.2; EXPRESSED IN ADULT LIVER, SIGNAL = 0.92; EXPRESSED IN HEART, SIGNAL = 3.4; EXPRESSED IN PLACENTA, SIGNAL = 0.85; EXPRESSED IN FETAL LIVER, SIGNAL = 0.88; EXPRESSED IN BRAIN, SIGNAL = 1.2; EXPRESSED IN BONE MARROW, SIGNAL = 1.2
gaaactgaggcacagggaagagggatacaagtgcaagaagggggcatcatttaatgctgtgtctgtgccctctttatctacaagacccctcttaggcgaacactgaggttcttcttcctcagcatcctctctggcagggggaacatggccctgggtggcacctgttgcaccagctcaggtcaatttgagagggatcagattctgggctcctcaaaggagcatgtcctggcatccccactggccttggcttttctccagccctctcagctccccctgcaagtggctccacctctgcatcttctttcccagacctccttcccttctgccccggcgccatgccctactcaccttcccattctcggtttcagcaatgaccttgcctccctcccgggacaaaatcttggctttgacaaactcttccttgtcatcgggcacgaagcactcagtgcgaatgtcaaagg

SEQ ID NO: 909 - DNA, 452 bp, Homo sapiens
  MAP TO AL049829.2; EXPRESSED IN PLACENTA, SIGNAL = 0.71; EXPRESSED IN BT474, SIGNAL = 4.6; EXPRESSED IN BONE MARROW, SIGNAL = 0.64; EXPRESSED IN LUNG, SIGNAL = 0.96; EXPRESSED IN ADULT LIVER, SIGNAL = 0.71; EXPRESSED IN BRAIN, SIGNAL = 1.1; EXPRESSED IN HEART, SIGNAL = 1.1e+02
ggcatggtacagggatgcatgtgccaccctcactgacctccagttactccccatcttgaggaaacatgagacagctatatcaacactcataacacaaagtggagaacggcaggtgctacagaagcccagctggactgtggtgaggtgagccaggaggtggcttgactcatgggctcccctgtgcctgcctatggagtcatgtgctttgaagcagcaggaccctggccctttgtgtcttcagaagtcccctggcccagtgcaggggctgcctgcttaccagtatcggcagttgcgtaggaggagaagagagtggccatgagcttgagggaggacttctggtacagggccacaacagtctcgttgagaggatccttgtttttttccagccagcccaggatgttgtagtccacagtgccggcgtagtggatcagggagaagtgggcttcctgctt

SEQ ID NO: 910 - DNA, 381 bp, Homo sapiens
  MAP TO AL049829.2; EXPRESSED IN HEART, SIGNAL = 1.7e+02; EXPRESSED IN LUNG, SIGNAL = 1.4; EXPRESSED IN BONE MARROW, SIGNAL = 0.63
gaaagaaacctggggaaagactagttagaagagttttcaggaagtagaagtagattcttcatttgctggaaaaactcatagactcaagtcaaactgactgcagagcgtgagaagaacgttaaatctaccaacagcatctcaaggaggaggtgagaggagccctgtgagggcggggcagtggggccagagaagaaacttccacatctactcctggtgtctggcgtccgccgcacctggtaggtgagctccttgatgcgccgctcgctcttcctcatgcccttcaccgactctgcgttgcgcttctgctcggcctccagctcaccctccagctcccgcacccgcgcttccagcttctgcagctgcttcttgcctcccttgagg

SEQ ID NO: 911 - DNA, 475 bp, Homo sapiens
  MAP TO AL049829.2; EXPRESSED IN PLACENTA, SIGNAL = 2.5; EXPRESSED IN BT474, SIGNAL = 2.2; EXPRESSED IN LUNG, SIGNAL = 3.1; EXPRESSED IN HELA, SIGNAL = 3.3; EXPRESSED IN FETAL LIVER, SIGNAL = 2.3; EXPRESSED IN ADULT LIVER, SIGNAL = 2.7; EXPRESSED IN BRAIN, SIGNAL = 3.8; EXPRESSED IN BONE MARROW, SIGNAL = 3.6; EXPRESSED IN HBL100, SIGNAL = 2.3; EXPRESSED IN HEART, SIGNAL =  74
aataagaggtgtgagggggcagctggcaagagggagaagtgtgtggggacaaatccctggggctttcagaggcctaagggagatgcccttggagggagaggcagggccccagggatcctgtggtcccacgttagaggcacttgtggtttagggggatggaactggggatctctgcagaagttccagtcagtggggggctgttttgagcaggagagtggattctcaggttatgtaagctatgggaccctcagaactgcctacatatagggcaagcagtgcccactctgaagggcacccatatcagggggcatgctaatgtggaagtgactagtgaagcccaggggagggacccaccttggcaccaatgtcacggctcttggctcgaagcttgttgacctgggactcagcgatgtccgcccgctcctctgcctcatccagctcatgctgcaccttgcggaacttggacaggttggtg

SEQ ID NO: 912 - DNA, 439 bp, Homo sapiens
  MAP TO AL049829.2; EXPRESSED IN ADULT LIVER, SIGNAL = 1.5; EXPRESSED IN PLACENTA, SIGNAL = 1.1; EXPRESSED IN BT474, SIGNAL = 2.1; EXPRESSED IN BONE MARROW, SIGNAL = 1.4; EXPRESSED IN HBL100, SIGNAL = 1.5; EXPRESSED IN LUNG, SIGNAL = 0.9; EXPRESSED IN HELA, SIGNAL =   1; EXPRESSED IN BRAIN, SIGNAL = 2.3; EXPRESSED IN FETAL LIVER, SIGNAL = 0.94; EXPRESSED IN HEART, SIGNAL = 1.1
ttacatctgagtcatggcgtgggaggtggggaggaccagggatgggtggtggtcaggcaagccttggcaaaggatgctagttctgagcagaatttttcgccaaggaaaggatggaattcactggaggcagagtgggcagatgaaccagtctctcagggtgggggtgcacctggggggatcagaggggcttgcagggagaagagctttggccagagaggagctgggtatggggtagtgctcgcagtggatggaactggaactcttcctctcctcttctctccactctttcctctcctgatatccctttctccttctttctctcctgcttcccttctctcccacaggcggagttcacagctctatacggggacggggccctggaggaggcgcggcgtctgcgggaggggaactgggcatcagtgaggacagtgctgacggg

SEQ ID NO: 913 - DNA, 489 bp, Homo sapiens
  MAP TO AL049828.2; EXPRESSED IN BONE MARROW, SIGNAL = 1.7; EXPRESSED IN HELA, SIGNAL = 1.2; EXPRESSED IN ADULT LIVER, SIGNAL = 2.1; EXPRESSED IN HEART, SIGNAL = 1.8; EXPRESSED IN LUNG, SIGNAL = 1.8; EXPRESSED IN PLACENTA, SIGNAL = 3.4; EXPRESSED IN BT474, SIGNAL = 3.9; EXPRESSED IN HBL100, SIGNAL = 1.8; EXPRESSED IN FETAL LIVER, SIGNAL = 2.3; EXPRESSED IN BRAIN, SIGNAL = 2.1
tgggttgctagacccagaagaaagaaaacaatcactgcagtttagctcataggaagccacatccataggaaaaggggaagagtactacatcaaggaaacacgatgtgtgacaaaagaatctaaacaacagccttcagccctagaccttccctctgacagaggctacccaaatgggaaggaaccagaaaaccaaccctggtaatatgacaaaacaaggcttgtcaacatcccccaaaaatcacacgagttcaccaacaatggatccaaaccaagaagaaattcttgattacctgaaaaaagaattcaggaggttagttattaagctaatcagggaggcaccagaggaaggcaaagcccaatgcaaggaagtccaaaaactgatacaaaaagtgcaaggagaaattatcgacgaaatagataccataaataagaaacaaccaaaacttcaggaaacaatggacacacttacaaaaatgcaaaatgctcagg

SEQ ID NO: 914 - DNA, 450 bp, Homo sapiens
  MAP TO AL049828.2; EXPRESSED IN BT474, SIGNAL = 2.2; EXPRESSED IN BONE MARROW, SIGNAL = 3.5; EXPRESSED IN LUNG, SIGNAL =   3; EXPRESSED IN HBL100, SIGNAL = 3.2; EXPRESSED IN FETAL LIVER, SIGNAL = 2.2; EXPRESSED IN HELA, SIGNAL = 3.1; EXPRESSED IN ADULT LIVER, SIGNAL = 3.1; EXPRESSED IN HEART, SIGNAL = 2.4; EXPRESSED IN PLACENTA, SIGNAL = 2.2; EXPRESSED IN BRAIN, SIGNAL = 3.5
tccatagttttgccttttcccaaatgtcatataattgcaatcacacagtatgcagccttttcacattggcttctttcacttagtaaaatgcagttaagtttctccattttctgtgcatagtttgatagctcatttctttttgcactgaataatatttaatttcctggatgtaccaaagtttatttacccactaacctatggaggggcatcttggttgcttccaagtttgggcaactatgaataaagcttctataaacatacctctacaggtttctgtgtagacataagttgtccactcctttacgtagataccaaggaaaatgattgttggatagtatggcatgagaatgtttagtcttgtaagaaccataaactgtccttcaaagtagctgtaccactttgcattctcatcagcagtgaatgagagttcctgttgcttcacatccttgc

SEQ ID NO: 915 - DNA, 472 bp, Homo sapiens
  MAP TO AL049814.6; EXPRESSED IN BONE MARROW, SIGNAL = 1.8; EXPRESSED IN LUNG, SIGNAL = 2.2; EXPRESSED IN HELA, SIGNAL = 2.6; EXPRESSED IN ADULT LIVER, SIGNAL =   2; EXPRESSED IN BRAIN, SIGNAL = 1.8; EXPRESSED IN HEART, SIGNAL = 1.7; EXPRESSED IN PLACENTA, SIGNAL = 1.6; EXPRESSED IN BT474, SIGNAL = 1.8; EXPRESSED IN FETAL LIVER, SIGNAL = 1.5; EXPRESSED IN HBL100, SIGNAL = 1.7
tccttccaccattatcccacatccttaatatccattctcataactcttctccaaatttctgcttatataaattagacaactcaagcagttcttttggagtgtaatgcacctccttgtgggtcacactttgaacctcacctctaggggccccctgggactagagcgtagttataggtctagaagcaaacagggttgttgggggtgagtcatgaagtgaatcaacattgtcttgcctggcgactgtctcaagggaggccatccactgatgcctcaggcagtgcatggttaatctcctcagaaaaggtggaaaggctgatggcagcctgggtgggggagaggatgttgccaccactgggggtagagggtagagaagctatttcctctggcaaataaggctcatcacagtttacaagctcagtgtctccatcttcatcagggtcctcccacatgcccccatttcaagttgcaggat

SEQ ID NO: 916 - DNA, 475 bp, Homo sapiens
  MAP TO AL049814.6; EXPRESSED IN HBL100, SIGNAL = 1.7; EXPRESSED IN FETAL LIVER, SIGNAL = 2.5; EXPRESSED IN BRAIN, SIGNAL = 2.6; EXPRESSED IN HEART, SIGNAL = 1.8; EXPRESSED IN PLACENTA, SIGNAL = 2.2; EXPRESSED IN BT474, SIGNAL = 2.3; EXPRESSED IN BONE MARROW, SIGNAL = 1.5; EXPRESSED IN ADULT LIVER, SIGNAL = 2.3; EXPRESSED IN HELA, SIGNAL = 3.1; EXPRESSED IN LUNG, SIGNAL = 2.6
aaggaatatcttgagaggccccacaccactggacccctagaaattttactaaactagaaggtccctgaattttagtcaaatttatttcccatcctttggcacacaaacgtctcaccaataagtccagtgtgtttgctacttcttgctcactggatccaatcagcataatgtcatcaacgtaatggaccagtgtgatatcttgtggaagggaaaagcaatcaagatttctctgaacaagattatgaaacaaagctagagaggagatatacacctgaggtaggagagtgagggtatattgctggccttgccagtggaaggcgaattgcttctagtgggctttatgaacagaatggagagaaaggcatttgccaaatcaatggctgcataccaggtaccaggagatgtgttaattttttcaagcaatgaaaccacatctggtacagcagctgtaactggaatcatcacttggttaagc

SEQ ID NO: 917 - DNA, 498 bp, Homo sapiens
  MAP TO AL049814.6; EXPRESSED IN PLACENTA, SIGNAL =   6; EXPRESSED IN BT474, SIGNAL = 4.8; EXPRESSED IN BONE MARROW, SIGNAL =   6; EXPRESSED IN HBL100, SIGNAL =   4; EXPRESSED IN LUNG, SIGNAL = 5.5; EXPRESSED IN ADULT LIVER, SIGNAL = 4.6; EXPRESSED IN BRAIN, SIGNAL = 5.2; EXPRESSED IN FETAL LIVER, SIGNAL = 5.2; EXPRESSED IN HELA, SIGNAL = 6.5; EXPRESSED IN HEART, SIGNAL = 4.4
tataaaaggggcagaggggaaacgtgcaaatatgttgatattcatctaacaaatatttttaataaattaaattgagtctatccctggctatggattcctgaagaataatcacagtttatcagttaaataatctccagcctaacccgtatcctcaccttctctcatctccaccaaagaaaataatgagatttgacttgctgagatggatatgtatctcaccccagctataacctgagcctctttgaccagtgagtttatgggaaggtcttttcccttccaggggatcagagaccacctgctctaagaagagcagggagaaagttggacacacgcacagaaagtggggcatagggctgggtagggaaactattgcagggtaatgacgtttctcgtccctcctcgggtccacctggctggcctgggtgtggcaagaatacttccgactcattcaaagaagcctcacactagagtgagcaaccttcccagtttgtccaggac

SEQ ID NO: 918 - DNA, 456 bp, Homo sapiens
  MAP TO AL049798.7; EXPRESSED IN BRAIN, SIGNAL = 4.2; EXPRESSED IN HBL100, SIGNAL = 3.4; EXPRESSED IN FETAL LIVER, SIGNAL = 3.4; EXPRESSED IN ADULT LIVER, SIGNAL = 3.5; EXPRESSED IN HEART, SIGNAL = 3.4; EXPRESSED IN PLACENTA, SIGNAL = 3.6; EXPRESSED IN BT474, SIGNAL =   3; EXPRESSED IN BONE MARROW, SIGNAL = 4.2; EXPRESSED IN LUNG, SIGNAL = 3.4; EXPRESSED IN HELA, SIGNAL = 4.6
ctagctgtgtgaccttgggcaagtcacctattattttggggacctttgaacctatctataaaatggcagtaactatgccagtctagggtatctgcgagtagcaaatgggaaagcctgtttgagcatagagtgcaagagcctgcaatgcatgttctctccctctctcttcgcctcactaaaccactcactggacagggacctgacagaggatataaccaagctcagatcccagaggcttgaattctaagtgtccccaacatttactcataggtgtccttgggcaattcatttgcctcactgggctccagcctgagaattgggttcaggagacccaaggtttttcttggcttcttgaggagcctcctcacttccataggtttgctcaggcagtctctgctgctggcataagtcttcttcatcttctacctgtcctaatgccttctgtttctccagctc

SEQ ID NO: 919 - DNA, 461 bp, Homo sapiens
  MAP TO AL049759.10; EXPRESSED IN BT474, SIGNAL = 0.95; EXPRESSED IN FETAL LIVER, SIGNAL = 0.71; EXPRESSED IN HEART, SIGNAL = 0.85; EXPRESSED IN PLACENTA, SIGNAL = 0.61; EXPRESSED IN HBL100, SIGNAL = 0.87; EXPRESSED IN LUNG, SIGNAL = 0.79; EXPRESSED IN HELA, SIGNAL = 0.75; EXPRESSED IN BRAIN, SIGNAL = 1.8
accagaatttgccctctgtgcagttcttcattctccttgtccagttttcagcagagagaggttcacttccagctatagttgtaactctctgagggagaattttcatcctgcaaattaaacacaccctcccagaaaacaaacaaacaaaatcaaacacctggctggtccaggtgggagatgtattttcagtgacaacaggagagggttaggaagaggagataggattgctgctttccagtggggacttagatgtgatttttcatttcttccccctaccccctgccccgatggcctatagccagagctgctggatctgtacacggtgaacctgcaccgcatcgagaaggatgtgcagaggtgcgaccgcaactactggtacttcacgcccgccaacttggagaagctgcgtaacatcatgtgcaggtggctggggacagcgaggggatctaggggatggggat

SEQ ID NO: 920 - DNA, 451 bp, Homo sapiens
  MAP TO AL049759.10; EXPRESSED IN HEART, SIGNAL = 1.3; EXPRESSED IN FETAL LIVER, SIGNAL = 1.1; EXPRESSED IN HELA, SIGNAL = 0.61; EXPRESSED IN ADULT LIVER, SIGNAL = 1.8; EXPRESSED IN BRAIN, SIGNAL = 0.79; EXPRESSED IN LUNG, SIGNAL = 0.75; EXPRESSED IN PLACENTA, SIGNAL = 0.65
ttttgtcacaagaattaggaaaggtaagtcttaacaattatccgacacccagcagatgcctaataaggagtacttcttatatagtcactttttcaataaacattgattatgcacctatacaagtgtgagctccctgtctctggggtaagacagaaggtaagaagattgagagggctctccaaggttccagtgtctgacagaagctctgggacatgctgggtgctggagtgcatgggcagggcagggtctgctgactgccatgtccctgcagcggctgtggaggcctgcgttctgcacgggcttcggcggcgggcggctggcttcctacgcagcaataagattgcagccctctttatgaaagtgggcaagaacttcccgccggctgaggatctgagccgcaaggtgcaagacctggagcagctgatcgagagcgcgtgagtgcaaagcatgg

SEQ ID NO: 921 - DNA, 500 bp, Homo sapiens
  MAP TO AL049759.10; EXPRESSED IN BONE MARROW, SIGNAL = 0.83; EXPRESSED IN ADULT LIVER, SIGNAL = 0.96; EXPRESSED IN BRAIN, SIGNAL = 2.3; EXPRESSED IN PLACENTA, SIGNAL =   1; EXPRESSED IN BT474, SIGNAL = 0.94; EXPRESSED IN HBL100, SIGNAL = 0.75; EXPRESSED IN FETAL LIVER, SIGNAL = 1.1; EXPRESSED IN LUNG, SIGNAL = 1.2; EXPRESSED IN HELA, SIGNAL = 1.3; EXPRESSED IN HEART, SIGNAL = 1.3
cgatcacctgttgttggatgtttaggttgctgatgtaagtaatgctgcagtcgacatgccggtccatctgtttttgtgcaccttgtcctcaggtgtttgagtctgtggatgaggtggagcaggtggaggctgaaggcagattggaggagaaacagcccaagatccccaatgggaacctagtgaacggcacttgttccccagactcgggtcatccttcctcccataacttctcctcgggcctctcagagcactcagagcccagtctgagcacagaagacagtgtcttggacgcccagcggaacacccccacggtgctgcgacctagggatggcagcgtggatgacaggcagagcagcgaggccaccacatctcaggatgaggctccccgggaggagctggccgtgcaggacagcctggagagtgacctcctggccaacgagagcatggacgagttcatgtccatcacgggcagcctggacatggccctgcctgaaaaggac

SEQ ID NO: 922 - DNA, 452 bp, Homo sapiens
  MAP TO AL049744.7; EXPRESSED IN ADULT LIVER, SIGNAL = 5.5; EXPRESSED IN HEART, SIGNAL = 0.86; EXPRESSED IN FETAL LIVER, SIGNAL = 2.6
catttttacaaatcatccagactcagttattcctttatagaaacataaacctaaagtagactaagaccgacaacacctgtgtgtctgggaatacttccagcacatcgttcaagaaacagtggagattaacttaagtgactgaatctcaggtattcagtactcaatacatgtccttcacaggcaaatatttgacttaattcattagattacaggcaatgggagcccaaacaaaattaataagaaaaaagttggtattcaaagttctaattcttatttcagcaattgtaagataagcattcacctttacatattgggaggtcaggagacaatccaaagtggtagcactgaacggaattaggtccaactattgtaaatcctggtttgcaggagaatttcaacacctctccaactttatactggtctttcttgcgatcaggaactaagtgtacatc

SEQ ID NO: 923 - DNA, 465 bp, Homo sapiens
  MAP TO AL049744.7; EXPRESSED IN HBL100, SIGNAL = 0.84; EXPRESSED IN FETAL LIVER, SIGNAL =  10; EXPRESSED IN BRAIN, SIGNAL = 1.1; EXPRESSED IN HEART, SIGNAL = 1.7; EXPRESSED IN BT474, SIGNAL = 0.77; EXPRESSED IN BONE MARROW, SIGNAL = 0.98; EXPRESSED IN LUNG, SIGNAL = 1.5; EXPRESSED IN ADULT LIVER, SIGNAL =  16; EXPRESSED IN HELA, SIGNAL = 5.5; EXPRESSED IN PLACENTA, SIGNAL = 1.2
ccatcctcttgttcaataatcatcttcattcatgtcttgttcatcacaaggattaaaatatgcatgaatggaaatgttatctgacatttacataatattccaaagattttggctgtattttgttcaaaaaactgaaagagtggtgattgattaatgtgcctaggtcctaatttattttgtcaggataaagtaatagacacagagaaagaacttctctcttgtttacacgaagcacaagagaatattaacctcatttgaaagaattatgtaaaacaaattatacactactgaccaacacagagtggtattgactgccatcttccatctttgcatgtaatttcttctccttcctgaattagataattttcttggcaaagaacagatactttttctccatcccgataattcagtgtggttgtcatattgtgagaattgggaatctgaggtggaggtgggcataattgt

SEQ ID NO: 924 - DNA, 448 bp, Homo sapiens
  MAP TO AL049694.9; EXPRESSED IN PLACENTA, SIGNAL = 2.1; EXPRESSED IN LUNG, SIGNAL = 1.5; EXPRESSED IN HELA, SIGNAL = 1.7; EXPRESSED IN BT474, SIGNAL = 3.7; EXPRESSED IN BONE MARROW, SIGNAL = 2.4; EXPRESSED IN HBL100, SIGNAL = 3.8; EXPRESSED IN FETAL LIVER, SIGNAL = 6.7; EXPRESSED IN ADULT LIVER, SIGNAL = 1.6; EXPRESSED IN BRAIN, SIGNAL = 1.6; EXPRESSED IN HEART, SIGNAL = 1.3
tgagttcctcaagtcttgtttgttagcaactataagtacagggactccttgattttctgatatcctagttattttgtgaagttcagttttggcttcttccatcctttcgacatcaacagagtccacaacaaatacaatgccatctgtgcatctggtatatgacttccacagtggccttaatttctcctgaccacctacatcccagaagtgaaaagtgactgttttagaatttcccaagcttaccttaattttctcagtgttaaatcctttggtaggtatggtatttacaaattcattgaactgcagcctgtataagacagttgtctttccagcacagtccaaacccagaataacaatgtggaaggactgaatgaaggcaggttggacaggatagaagtctggtctgatagcccattccccatttccaggtgcaaataaatgtcccaaa

SEQ ID NO: 925 - DNA, 462 bp, Homo sapiens
  MAP TO AL049589.15; EXPRESSED IN HBL100, SIGNAL = 7.9; EXPRESSED IN FETAL LIVER, SIGNAL = 8.9; EXPRESSED IN ADULT LIVER, SIGNAL = 8.5; EXPRESSED IN BRAIN, SIGNAL =  12; EXPRESSED IN PLACENTA, SIGNAL =  12; EXPRESSED IN BT474, SIGNAL = 8.8; EXPRESSED IN HEART, SIGNAL = 8.2; EXPRESSED IN HELA, SIGNAL =  12; EXPRESSED IN LUNG, SIGNAL =  13; EXPRESSED IN BONE MARROW, SIGNAL = 8.8
cagaaacccccaaatcaatgaaagaactccatccttaatattctgatactctagaaccactcctggtaacaaaatctatattactcagagttctatagaggtatagaactattagaatatatatatactaatatatatatactaatatatatactaatatatatactaatatatatactaatatatatatactaatatatatactagtaaatatatatatactaatatacatatatactaatatatatatatatatatatatatatatatatatatatatatatatgagtttattaagtagtattaactcacacgatcacaaggtcccacaataggccatctgcaagctgaggagcaaggaagccagtctgagtcccaaagctgaagaacttggagtctgatgttcgagggcaggaagcatccagcatgggagaaagatgtagtctgggaggctaagccagt

SEQ ID NO: 926 - DNA, 381 bp, Homo sapiens
  MAP TO AL049589.15; EXPRESSED IN HELA, SIGNAL = 2.4; EXPRESSED IN PLACENTA, SIGNAL = 1.4; EXPRESSED IN BT474, SIGNAL = 3.3; EXPRESSED IN FETAL LIVER, SIGNAL = 2.2; EXPRESSED IN LUNG, SIGNAL = 1.5; EXPRESSED IN BONE MARROW, SIGNAL = 1.6; EXPRESSED IN HBL100, SIGNAL = 6.1; EXPRESSED IN ADULT LIVER, SIGNAL = 1.4; EXPRESSED IN BRAIN, SIGNAL = 2.4; EXPRESSED IN HEART, SIGNAL = 1.9
ttgcttttcacaaagtcccctatcatattccaccttttaaaaaaagaaaagttgactaaaatttcttacctttttaattaaggacttcagcctatagtttggagctgttaagcagtatctatcaggtggcagtctaggtcctgcatatggcttaatcagtggcaaaggggtttgatttttctgccttgcgatatccagtaaaaacttaaaaaaaaaatccttattagaactacagttttaaaaattgtaagtaaaaataacttcaaatcaaagtttgctcacatctcttgggggaggagaggtaaaagattggtcagcacgacactggattgccagtctcacatcatctgcatcaacattaggtttcttagcatggctcga

SEQ ID NO: 927 - DNA, 467 bp, Homo sapiens
  MAP TO AL049589.15; EXPRESSED IN BONE MARROW, SIGNAL = 5.8; EXPRESSED IN ADULT LIVER, SIGNAL =   5; EXPRESSED IN BRAIN, SIGNAL =   8; EXPRESSED IN PLACENTA, SIGNAL = 2.9; EXPRESSED IN BT474, SIGNAL =  40; EXPRESSED IN HBL100, SIGNAL = 7.7; EXPRESSED IN LUNG, SIGNAL = 3.5; EXPRESSED IN HELA, SIGNAL =  17; EXPRESSED IN FETAL LIVER, SIGNAL = 6.3; EXPRESSED IN HEART, SIGNAL = 6.3
attattggtggtggaatggcttttaccttccttaaggtgctcaacaacatggaggtaggaaacaaatgccaagtggatgtgaaatagctctccatgataatagcaggttgtataaatgtaaaaagaaaacagtcttttgacatgagccctgaaaattcccatttttatttattttggcaagtctttcgtctttgcattgttcctttatattgtattgtgtctggttcctgtctgctttgtgaggcagtcttgttcttagtatagatgctgacctccatcattttggctcccctgtgtagattggcacttctctgtttgatgaagagggagccaagattgtcaaagacctaatgtccaaagctgagaagaatggtgtgaagattaccttgcctgttgactttgtcactgctgacaagtttgatgagaatgccaagactggccaagccactgtggcttctggcatacct

SEQ ID NO: 928 - DNA, 464 bp, Homo sapiens
  MAP TO AL049589.15; EXPRESSED IN BT474, SIGNAL =   2; EXPRESSED IN HBL100, SIGNAL =   2; EXPRESSED IN FETAL LIVER, SIGNAL = 2.6; EXPRESSED IN HELA, SIGNAL = 3.4; EXPRESSED IN BRAIN, SIGNAL = 3.7; EXPRESSED IN PLACENTA, SIGNAL = 2.3; EXPRESSED IN BONE MARROW, SIGNAL = 3.1; EXPRESSED IN LUNG, SIGNAL =   3; EXPRESSED IN ADULT LIVER, SIGNAL = 2.8; EXPRESSED IN HEART, SIGNAL = 3.1
tttaaatgctcgctctgtgggcaggtgtcatctaagtttgattcaggtttcctttctactctaacaggatggtactgagtccagtgcctcacaattgctgtgctctgcctcccccacctcccagagatgctctccacaccatgcttttgctaccagggtaggggaggggtggcgttatagatccaggactgtttttcctatctcttcagtacgtctttcagtaatacgaagttaaaacaaggtactaggagtgcttatctaatttttggttcttatgaaggtgttgttttctgtgtagatagttgttaattttgtgtttttgcagactgggggggatggcccgtggagctttctcttcccccatcttgctctgcctcgacttatcaagaaaaggaatgtatattttacagtcatggaggcaaagaagtccaagattgacaagctacatctggtgagggccttct

SEQ ID NO: 929 - DNA, 458 bp, Homo sapiens
  MAP TO AL049588.11; EXPRESSED IN FETAL LIVER, SIGNAL = 6.7; EXPRESSED IN BRAIN, SIGNAL = 2.2; EXPRESSED IN HEART, SIGNAL = 3.4; EXPRESSED IN BT474, SIGNAL = 4.4; EXPRESSED IN ADULT LIVER, SIGNAL =   7; EXPRESSED IN PLACENTA, SIGNAL =   2; EXPRESSED IN HELA, SIGNAL =  13; EXPRESSED IN LUNG, SIGNAL = 5.5; EXPRESSED IN HBL100, SIGNAL =  12; EXPRESSED IN BONE MARROW, SIGNAL = 7.2
ctgaagaatgcatctctgggtcctttaatagcagaattgatcaagcagaagaaaggattagtgagcttcaagataggtatttgaaaatccacagtcagaggagacaaaagaaaacaagaatagaaaacaatgaaacacacatacagaatctagaaaatagcctcaaaggggcaaatctaagagttattggcctcaaagaggtgatagagaaagagataggggtaggaagtttattgaaaaggataataatatataatttcctaaacctaaggaaatatattaatattcaagtacaagaaggtaatagaacaccaagcggaatgaacccaaggaagactatatcaagtcatttaatagtcaaactcccaaatataagagataaaaataggatactaaaagcagcaagggaaaagaaacaaagagcatacaatggaactccaatacagctggcagcagac

SEQ ID NO: 930 - DNA, 466 bp, Homo sapiens
  MAP TO AL049588.11; EXPRESSED IN BT474, SIGNAL = 7.9; EXPRESSED IN BONE MARROW, SIGNAL = 7.9; EXPRESSED IN BRAIN, SIGNAL =  10; EXPRESSED IN ADULT LIVER, SIGNAL = 9.1; EXPRESSED IN HELA, SIGNAL =  11; EXPRESSED IN LUNG, SIGNAL =  12; EXPRESSED IN HBL100, SIGNAL = 7.8; EXPRESSED IN PLACENTA, SIGNAL =  10; EXPRESSED IN HEART, SIGNAL = 8.9; EXPRESSED IN FETAL LIVER, SIGNAL = 9.9
gtaagatttgcttgctgccccttcaggttccaccaggattgtaagtttcctgaagcctcccagtcatgcttctcattaagccttcagaactgtgagtaaattaaaccttttttcttcataaattactcagtctcaggtagttctttatagcactgtgacagtggactaataaagaaaattagtaccaggaaagtagggcattgctataaagatacctgaacatgcagaagccactttggaactgggtaacaggcagaggctggaaaaatttggatggctcagaagaagataggaagatgagggaaagattggaacttcctggagacttgttgaatgattctgaccaaaatgcttgtagtgatatggacaatgaagtccaggctgaggtggtctcaaatggagatgaggaacttgttaagaactgcagtaaaggtcattcttgctatgcaaagagactggtggcatt

SEQ ID NO: 931 - DNA, 491 bp, Homo sapiens
  MAP TO AL049569.13; EXPRESSED IN PLACENTA, SIGNAL = 1.2; EXPRESSED IN HBL100, SIGNAL = 1.9; EXPRESSED IN FETAL LIVER, SIGNAL =  10; EXPRESSED IN LUNG, SIGNAL = 1.4; EXPRESSED IN HELA, SIGNAL = 2.2; EXPRESSED IN BRAIN, SIGNAL =   2; EXPRESSED IN BT474, SIGNAL = 1.5; EXPRESSED IN BONE MARROW, SIGNAL = 1.4; EXPRESSED IN ADULT LIVER, SIGNAL = 7.5; EXPRESSED IN HEART, SIGNAL = 4.1
tttgaacacctttgctgacgtggtgttttcaagggcagaaaggactgtgggattggcaggtttcccaagtaggtgagggagaggtttcctaaccatgcttaacattgtgaccatttttccttttgtaatctttgcatatattcatgacaaaggaaaagagtctggcttctgcctggcatagagtggacgagtagtcagtgtccaagaaatggggtaaataaagctgaggtgatgatggaatctgatccttttcttcttcttcttcttcttcttcctcttaaccacaggatttgagcaacttctatgcacagtacaaatccattgagccttatttgaagaagaaggatgaatctcaggaaggcaagcagcagtatctgcagtccatagaagagcgtgagaaactggtcattagtccctatttattgtttcaatctgaagaatttattgcaaagatgattgccaggagtgtggcttggcagggaacataagct

SEQ ID NO: 932 - DNA, 485 bp, Homo sapiens
  MAP TO AL049569.13; EXPRESSED IN LUNG, SIGNAL = 1.8; EXPRESSED IN BRAIN, SIGNAL = 2.7; EXPRESSED IN HEART, SIGNAL = 1.6; EXPRESSED IN PLACENTA, SIGNAL = 1.8; EXPRESSED IN HBL100, SIGNAL = 1.8; EXPRESSED IN FETAL LIVER, SIGNAL = 1.6; EXPRESSED IN BT474, SIGNAL = 1.5; EXPRESSED IN BONE MARROW, SIGNAL = 2.5; EXPRESSED IN HELA, SIGNAL = 2.1; EXPRESSED IN ADULT LIVER, SIGNAL = 1.8
tggtcagctgctcatccttaggagtaggctgtaggtgggagaaccagggggctacttgtagcacccctgatcccactggccaaagcaagagcaaggcagctgccaccactgtcctggctcagatgtcatggtcaactctggagaaaagagtgtgtgctgccctccccagacagaggggggcctgattttgcctgggagtgccctcctgtgatccagcctctccccagtcccatctccccagtcccagtccagcagttagcccaggcctggaggatcttggcaaaaggggaacactcagcctgggtatctaaagcttgaccatcccctgtcctttgaaccccacaggcttgggtgggatgagcagcaagcgaatcaccatcaacaagattctgtccaacgagagccttgtgcaggagaacctgtacttccaggtgagggcagggcaggggtgcagggccagagggcccctgggagggatgaggctc

SEQ ID NO: 933 - DNA, 499 bp, Homo sapiens
  MAP TO AL049554.2; EXPRESSED IN BT474, SIGNAL = 5.9; EXPRESSED IN FETAL LIVER, SIGNAL = 4.2; EXPRESSED IN LUNG, SIGNAL = 5.4; EXPRESSED IN HELA, SIGNAL = 3.8; EXPRESSED IN BRAIN, SIGNAL = 5.5; EXPRESSED IN HEART, SIGNAL = 4.6; EXPRESSED IN PLACENTA, SIGNAL = 7.9; EXPRESSED IN HBL100, SIGNAL = 5.2; EXPRESSED IN BONE MARROW, SIGNAL =   7; EXPRESSED IN ADULT LIVER, SIGNAL = 5.5
acagggaagtcattaagccctaaagttttactttgactccatgtctaatgtcctaattttgctgatgcaagaggtgggctctcatagctttgggcagttccatccttatgactttgcagggtacagcccctgtcgcagctactttcaatggctggtactgcagcttttccagatgcacagtgcaagctattggtggatctaccactctggagtctggagaatggtgagcctcttctcacagctccactaggcagtgccccagtggggactctttgtgtggggttcaacctcacatttccccctttactgccctagcagaggttctccatgagggctccactctggcagcaaactcctgcctggacatccaggcatttccatacatcatctgaaatctaggtggaggttcacaaatctcaatttttgacttctgtgcacctgcaggctcaacaccatgtggaagctgccaatgcttgggacttgcaccctctgaagcaac

SEQ ID NO: 934 - DNA, 481 bp, Homo sapiens
  MAP TO AL049548.6; EXPRESSED IN PLACENTA, SIGNAL = 1.6; EXPRESSED IN LUNG, SIGNAL = 2.1; EXPRESSED IN ADULT LIVER, SIGNAL = 1.2; EXPRESSED IN BONE MARROW, SIGNAL = 4.7; EXPRESSED IN HBL100, SIGNAL = 1.1; EXPRESSED IN FETAL LIVER, SIGNAL = 1.3; EXPRESSED IN HELA, SIGNAL = 0.85; EXPRESSED IN BRAIN, SIGNAL = 1.9; EXPRESSED IN BT474, SIGNAL = 1.2; EXPRESSED IN HEART, SIGNAL = 2.1
ttgttttgccagactcttcctagagtattgcacaaaatgctaaatattctccaaatttgcacacaaaacacgaaagccaaattatttatgttgtttaccattaaaaacatacaatatttataaataatgttcatctttgactaatatagcaaccgactaccatttcaactgttaatcttagctttaaaatacatttcgggcccacctttctgtacttctgttaagcgtgggtgttgatgtccctacttagctgtttagagagcacaatttatatccatctgttgaataaatgcttctagcaaaagacaaagcggatctcagcaaagaagagagatgtgcagcagcagatcgcgcaggcgcagcagggagaaggggggctgcctgaccgaggccacgaggagctgcggaagctggagagcacactggatggcctggagcgcagccgggagaggcaggaacgccgcatccaggtaggagccgg

SEQ ID NO: 935 - DNA, 456 bp, Homo sapiens
  MAP TO AL049538.8; EXPRESSED IN PLACENTA, SIGNAL = 0.93; EXPRESSED IN BONE MARROW, SIGNAL = 0.68; EXPRESSED IN HBL100, SIGNAL = 1.2; EXPRESSED IN HEART, SIGNAL =  36; EXPRESSED IN BT474, SIGNAL = 1.3; EXPRESSED IN FETAL LIVER, SIGNAL = 0.9; EXPRESSED IN LUNG, SIGNAL = 2.8; EXPRESSED IN HELA, SIGNAL = 1.4; EXPRESSED IN ADULT LIVER, SIGNAL = 0.91; EXPRESSED IN BRAIN, SIGNAL = 1.2
aacttgtatcttaagtgtttcttctgcacatatacatacctgtaagccaacctagaacctgactgggggtaggtagcaaacaatctcaggacacttgaaccatcagatgcaattctccattgccaaaagagaatcctactgtttcacaaacctcagctaccttgcgtggctaaagttgcccttggccgagttggcctgtggatggcttagtcactacactgaggggtccccgaggaggtgactgcttttcaagctcaagcatgtagaagcgggaaggcaaggcttccagctcccctttggatgcaccactgggaagtcccgcctgtcttctaggaggtggtgaggtcttcttccccgttctggaaaatgatgccataaggatcgttcttgatgcgtttgtagacaaagtggaagatgtggggctgtggtcggctgtgcagctccgccttgattttt

SEQ ID NO: 936 - DNA, 490 bp, Homo sapiens
  MAP TO AL049538.8; EXPRESSED IN FETAL LIVER, SIGNAL = 8.4; EXPRESSED IN LUNG, SIGNAL = 9.7; EXPRESSED IN PLACENTA, SIGNAL = 9.1; EXPRESSED IN BONE MARROW, SIGNAL = 8.7; EXPRESSED IN HBL100, SIGNAL =   7; EXPRESSED IN ADULT LIVER, SIGNAL = 6.2; EXPRESSED IN BRAIN, SIGNAL =  10; EXPRESSED IN HEART, SIGNAL =  13; EXPRESSED IN BT474, SIGNAL = 6.7; EXPRESSED IN HELA, SIGNAL = 8.4
aaacataggttgcactgcccggacagagttacaatagattttatattttaaaaaagagggtacttacctatttggtcttcagggatcagcgactcgatgggggggtccagctccgagctctgagacaaatagttcttgacctgggtcatgaactgccggatggtctgcagcatgtcggtgctggacacgtggcactccttgttctcctgcaggaagctcacgtagtcctgcactaagcacccgaagtaggtgcatttgtcccgggaaagctcggcgatcctgcggaccatccgcttctccggggtcatgaaggagctgaacaccccgctcaccttctgcagctgggacttgacgagcttgggcagcacgaaggagctgctccttttctttttggacttgatggggggcgccatggtctcttggtcactttccccctcgtagtcctccaggctgctgttggtgtccgcctcgtagccaaacagaggcatgc

SEQ ID NO: 937 - DNA, 476 bp, Homo sapiens
  MAP TO AL049538.8; EXPRESSED IN HEART, SIGNAL =  54; EXPRESSED IN PLACENTA, SIGNAL = 0.79; EXPRESSED IN BT474, SIGNAL = 0.79; EXPRESSED IN LUNG, SIGNAL = 1.5; EXPRESSED IN HELA, SIGNAL = 0.63; EXPRESSED IN BONE MARROW, SIGNAL = 0.72; EXPRESSED IN HBL100, SIGNAL = 0.78; EXPRESSED IN FETAL LIVER, SIGNAL = 0.6; EXPRESSED IN BRAIN, SIGNAL = 0.9
cttctcggagggaagatttgaactcagactccagagactgaatttgtaaccatactctgaactaaatctttaattaaatcggcctggtacaaaaatcttgttgccctcatctgcttacattttaatctgttgcatgtgactaatgtgccggatatcagagaatcacttgtagttctgtaagccacttggtgaaatcaagagaccaaagggaggagaaattgggaatcagaaagcctgacaggagagaggcctgtccccggcccggaagggaagcggcacgaagcctgggcttccagcggcctcacctgagttgttctccatgaccgtgtaaatgagcttgcagacccgcagcagcagcatgaccttcttttccggcgaatacatcttctgcatggtcatgaacttgactttgattttctccacatccacaaaatcaggggtcggggcgaagacccccagctcctgcggattcctct

SEQ ID NO: 938 - DNA, 480 bp, Homo sapiens
  MAP TO AL035659.21; EXPRESSED IN LUNG, SIGNAL = 2.3; EXPRESSED IN BRAIN, SIGNAL = 2.2; EXPRESSED IN HEART, SIGNAL = 1.9; EXPRESSED IN BONE MARROW, SIGNAL = 0.83; EXPRESSED IN PLACENTA, SIGNAL = 1.2; EXPRESSED IN BT474, SIGNAL =   2; EXPRESSED IN ADULT LIVER, SIGNAL = 9.1; EXPRESSED IN HELA, SIGNAL = 1.7; EXPRESSED IN FETAL LIVER, SIGNAL = 1.3; EXPRESSED IN HBL100, SIGNAL = 1.5
tatgtggtaagccttctgggaaggccaggcatggatgaggatgggatgccgtgtctaaaggaaaacagccggcctggttcaagtgcgagattcgaactggagaatagagtaggttcttgaaatgcatgggttggaatcggggctctgagaaagatgggccaggcctgtgaggctcactgcccacttcctgggattgagttactctcctgtgtggtatttcatcgcagattttgtttctgcagataaggaaaaggggaaggaaaagctggaggaggacgaggccgcagccgccagcaccatggctgtctcagcctccctcatgccacccatctgggacaagaccatcccatatgatggcgaatctttccacctggagtacatggacctggatgagttcctgctggagaatggcatccccgccagccccacccacctggcccacaacctgctgctgcctgtagcagagctagaagggaagga

SEQ ID NO: 939 - DNA, 494 bp, Homo sapiens
  MAP TO AL035659.21; EXPRESSED IN ADULT LIVER, SIGNAL = 2.3; EXPRESSED IN PLACENTA, SIGNAL = 1.7; EXPRESSED IN BT474, SIGNAL = 2.5; EXPRESSED IN BONE MARROW, SIGNAL = 1.7; EXPRESSED IN FETAL LIVER, SIGNAL = 1.6; EXPRESSED IN LUNG, SIGNAL = 1.5; EXPRESSED IN HELA, SIGNAL = 1.5; EXPRESSED IN HBL100, SIGNAL = 2.9; EXPRESSED IN BRAIN, SIGNAL = 2.7; EXPRESSED IN HEART, SIGNAL = 1.5
  unsure 116
aggagaagaaaaccgcagtctgttcaccctagtccacaaggtgatggctgaggtctgagttggaggagtagctctggacctccatgaagctgggaccgccgggctcacccaggccncgtgttttcttttcctgataggtcgacactacccctaaagcaagaagaatatgaggtgagtgtcagctgccaggctgagcaaaggtgaagggcggagatgtgcaggggagaggcgtgggccgggtgccagagctggggccagaggtcatgagccccctacacaccttgcccccaacaggcctttctgctcaagctggtgcagaatctgtttgctgagggcaatgatctgttccgggagaaggactataagcaggctctggtgcagtacatggaagggctgaacgtggccgactacgctgcctctgaccaggtggccctgccccgggagctgctgtgcaagctgcatgtcaatagggccgcctgctacttcaccatggt

SEQ ID NO: 940 - DNA, 468 bp, Homo sapiens
  MAP TO AL035604.15; EXPRESSED IN LUNG, SIGNAL =  17; EXPRESSED IN ADULT LIVER, SIGNAL =  47; EXPRESSED IN BRAIN, SIGNAL =  58; EXPRESSED IN PLACENTA, SIGNAL =  15; EXPRESSED IN BT474, SIGNAL = 2.2e+02; EXPRESSED IN BONE MARROW, SIGNAL =  30; EXPRESSED IN FETAL LIVER, SIGNAL =  70; EXPRESSED IN HELA, SIGNAL = 1e+02; EXPRESSED IN HEART, SIGNAL =  42; EXPRESSED IN HBL100, SIGNAL = 1.4e+02
agttgtcatggatgaccttggccaggggcgctaagcagttggtggtacaggaggcattgctgatgatcttaaggctgttgtcatacttctcataattcactttcatcatgaacatgatggcttcagtagagggggcaaagatcatgacccttttggctcccctctgcaaatgagccccaaccttctccatggcggtgaagatgctggtggactccacaacgtactcagtgccagcatcgccccatttgattttggtgggatcttactcctggaagatggtaatgggatttccattgatgacaagcttcccattctcagccttgatggtgccatggaacttgccatgggtggaatcatactggagcatgtaggccaggtagttgaggtcaatgaaggggtcattgatggcaacaatatccactttaccagagttaaaagcagccctagtgaccaggcacccagtatagc

SEQ ID NO: 941 - DNA, 480 bp, Homo sapiens
  MAP TO AL035604.15; EXPRESSED IN BONE MARROW, SIGNAL = 1.5; EXPRESSED IN FETAL LIVER, SIGNAL = 1.3; EXPRESSED IN LUNG, SIGNAL = 1.3; EXPRESSED IN ADULT LIVER, SIGNAL = 1.4; EXPRESSED IN PLACENTA, SIGNAL = 1.9; EXPRESSED IN HEART, SIGNAL =   1; EXPRESSED IN BRAIN, SIGNAL = 1.1; EXPRESSED IN HELA, SIGNAL = 0.92; EXPRESSED IN HBL100, SIGNAL = 2.1; EXPRESSED IN BT474, SIGNAL = 1.8
aaaaccaccactgtatattccttagagtttagatagtatgactgagtggagaaaattttaagagtgtggattcagcatcttcaacagaatttttggttctgttttcttaatttatcctatagagtagtttcaggtactgatatttgtggatacttggaccaaatggaccatatcaaatattatgccagagattctgatccctaaactaagtagaataggcacttgatttataattgtgtcttaacaacatcgtttctctcttatcttgtgttactctttgtcatttattcctcacaggaagaaagaagtacctaaggccccaccattagaacctgactctgtgtttctaatgcttcaggccaaggaggaaaacactgtatttaatgcgcttgcagtatttctattcttgcaaaatacttactgttccaagcaagtgagttttcaaataaaataagaaaagcattttcctatttttgctgc

SEQ ID NO: 942 - DNA, 484 bp, Homo sapiens
  MAP TO AL035604.15; EXPRESSED IN PLACENTA, SIGNAL =  29; EXPRESSED IN LUNG, SIGNAL =  32; EXPRESSED IN BT474, SIGNAL = 4e+02; EXPRESSED IN HBL100, SIGNAL = 2.6e+02; EXPRESSED IN FETAL LIVER, SIGNAL = 1.7e+02; EXPRESSED IN HELA, SIGNAL = 1.6e+02; EXPRESSED IN ADULT LIVER, SIGNAL = 1.1e+02; EXPRESSED IN BRAIN, SIGNAL = 1.8e+02; EXPRESSED IN BONE MARROW, SIGNAL =  59; EXPRESSED IN HEART, SIGNAL = 1.3e+02
gtggtcgttgagggtaatgccagccccagcatcaaaggtggaagactgtgtgtcactgttgaagtcggaggagacaatctggtgctcagtgtagcccaggatgcccttgataggatcctctgaagcctgcttcatcatcttcttgatgtcataatatttggcaggttttccagatggcaggtcgggtccacgaccaacaccttggcagtggggacatgggaggccatgccagtgagcttcttgttcagctcagggatgaccttgaccattgccttggcagtgctagtagatgcaggtatgatgttctggagagccctgtggccatcaggccgcagtttcctgcaagggccatccacagttttctgggtggtagtgatgacatggactgtaatcatgagtctttcaacaataccagagttgtcatggatgaccttggccaggggcgctaagcagttggtggtacaggaggcattgctgatgatct

SEQ ID NO: 943 - DNA, 419 bp, Homo sapiens
  MAP TO AL035494.8; EXPRESSED IN HEART, SIGNAL = 1.2; EXPRESSED IN FETAL LIVER, SIGNAL = 0.99; EXPRESSED IN BRAIN, SIGNAL = 1.6; EXPRESSED IN PLACENTA, SIGNAL = 1.3; EXPRESSED IN BONE MARROW, SIGNAL = 1.1; EXPRESSED IN HBL100, SIGNAL = 0.98; EXPRESSED IN LUNG, SIGNAL = 1.2; EXPRESSED IN ADULT LIVER, SIGNAL = 1.2; EXPRESSED IN BT474, SIGNAL = 0.93; EXPRESSED IN HELA, SIGNAL =   1
cgcactatttgtctttttgtgacagccttttttcacttagcataatgtcctcaaggttgatccatattatagtatatgacaggattttcttctttttttaatactgaattgtatttctatgtacattttctttacttattcattcactgatggacaattaacttgcttccacctcttgactactgtgaacaatgctgcaataaacgtggccatgtaatatctcttcaagactctgttttcaattcttttggatatatatccagaagtggaattgctggatcatatgataattctatttaaaattttttgaggaacctctatactgttttacatagtggctgcagcagttgaacaacatgagtttgaactgcacaggtctacttatacgtgaatttttttctatcacctcttccacccca

SEQ ID NO: 944 - DNA, 436 bp, Homo sapiens
  MAP TO AL035469.7; EXPRESSED IN BT474, SIGNAL = 1.3; EXPRESSED IN FETAL LIVER, SIGNAL = 1.6; EXPRESSED IN LUNG, SIGNAL = 1.8; EXPRESSED IN HELA, SIGNAL = 1.6; EXPRESSED IN ADULT LIVER, SIGNAL = 1.3; EXPRESSED IN BRAIN, SIGNAL =   2; EXPRESSED IN HEART, SIGNAL = 1.6; EXPRESSED IN HBL100, SIGNAL =   1; EXPRESSED IN PLACENTA, SIGNAL = 1.4; EXPRESSED IN BONE MARROW, SIGNAL = 1.5
ccacatcaaatggcacagtcgtaacacaccaggaaacatcttcctttttaatatttatccactatcctaattactctttaaagatagaagtgatgtttataaacatatgaagattttagatttttttggtgatttatttcaagctacgggatacaggagttattggacaagcacagtttattctggtttggcaggtgtattaggctgttcttgctctgctataaagaaatactggagatgaggtaatccataagaaaaagaggagtaagtgactcttggatctgcaagccctacaggaagtatagcaacatctgcttctggggagacttcaggaagtttccaatcatggtggaagacaaagagggagcaggcatgtcacatggcaagaacaggagcgagaaagagagagagagagagagagaggagagggagggaa

SEQ ID NO: 945 - DNA, 467 bp, Homo sapiens
  MAP TO AL035459.6; EXPRESSED IN PLACENTA, SIGNAL = 1.8; EXPRESSED IN BT474, SIGNAL = 1.5; EXPRESSED IN BONE MARROW, SIGNAL = 1.9; EXPRESSED IN HBL100, SIGNAL =   2; EXPRESSED IN ADULT LIVER, SIGNAL = 1.6; EXPRESSED IN HEART, SIGNAL = 1.9; EXPRESSED IN FETAL LIVER, SIGNAL = 8.6; EXPRESSED IN LUNG, SIGNAL = 1.8; EXPRESSED IN HELA, SIGNAL = 1.9; EXPRESSED IN BRAIN, SIGNAL = 2.2
cattaaaaggaccaggtggcccctgatacctatgaggagggtattacttttcctattttatagataagacaactgagactccagttaagtcagtgattctctaacatgcatatgaatcacctgcgaccttgttacaatgcagattctgattcaggggtctgggctggggcccttgatgctacctctctgacaagctcccaggtgatgctgatgctactggtccagggtccacacactgaagagtgaggcttcaaggctccccctcggggcatatactagcacatggggggccatcatttcctttctgtttcctcttcctcatctccatggctctctctcaatcctatcatctccaaggcctctccctcctcccccactcccagactgttccctgtccccaaacacctcgcctccagtccttcacttccatagcccccaactccagtatcttcagccccttccttctg

SEQ ID NO: 946 - DNA, 456 bp, Homo sapiens
  MAP TO AL035405.10; EXPRESSED IN LUNG, SIGNAL = 2.7; EXPRESSED IN BRAIN, SIGNAL = 3.4; EXPRESSED IN PLACENTA, SIGNAL =   4; EXPRESSED IN BT474, SIGNAL = 2.1; EXPRESSED IN FETAL LIVER, SIGNAL = 6.7; EXPRESSED IN HELA, SIGNAL = 2.7; EXPRESSED IN ADULT LIVER, SIGNAL =   3; EXPRESSED IN HEART, SIGNAL = 2.5; EXPRESSED IN BONE MARROW, SIGNAL = 2.2; EXPRESSED IN HBL100, SIGNAL = 1.9
acggtcactctgaggtggagcctgtgtatcctggatggaggcagggccggacactgtgacaggtcctctgggcccatctccagctgaacaggaaagtccatggcccacccaagacaggtgggctggtgtcttctctctcctgggcgctgtggagctgaaaccgcagagtccatcgggattttgcccaggagcaagggacatcctcagcctgcggccgctatgtacagtgagaacgacacctggggccatctggcttctcttccttcctgggtctctcacgttgggtctggtggagccaccagttccttacacgttggtgacctccaggctgttgtagccttccagacggcactgttccagcctgctctgggggtcatcgtctccgcaatcttcgttttgaagagagccatagtcatcatggaaatcgggatctttgctgctgaagccccttcctat

SEQ ID NO: 947 - DNA, 489 bp, Homo sapiens
  MAP TO AL034555.2; EXPRESSED IN BT474, SIGNAL = 0.86; EXPRESSED IN BONE MARROW, SIGNAL = 0.87; EXPRESSED IN HEART, SIGNAL = 0.87; EXPRESSED IN PLACENTA, SIGNAL = 0.62; EXPRESSED IN HBL100, SIGNAL = 0.72; EXPRESSED IN FETAL LIVER, SIGNAL = 3.1; EXPRESSED IN LUNG, SIGNAL =   1; EXPRESSED IN HELA, SIGNAL = 0.64; EXPRESSED IN ADULT LIVER, SIGNAL = 3.7
tcgaaaccgtgtttttagagcttttttgtttgaaaaagtaatgttttaatgacaataaaatttaagtcaaatctcaagctagatccttttgtggttcataagcatgatgattgggttttcatgctgtgtgaggtgtgcctccctcagaccttgttatgacattagtatattacctgtctgacatgaacaaaaaaatgagaaaatcaggctaaagatttagtaggttgcttatttagttataattaaattagaagaattaataacttggttttttttgggaatttagatacaagccttaaagatggccttttccatgaatttaagaaatttggaaaagtaacttcagtgcagatacatggaacttcagaagagaggtatggtctggtattctttcggcagcaagaggaccaagaaaaagccttgactgcatcaaaaggaaaacttttctttggcatgcagattgaagtaacagcatggataggtccaggt

SEQ ID NO: 948 - DNA, 475 bp, Homo sapiens
  MAP TO AL034555.2; EXPRESSED IN BONE MARROW, SIGNAL =  10; EXPRESSED IN FETAL LIVER, SIGNAL = 8.9; EXPRESSED IN ADULT LIVER, SIGNAL = 4.8; EXPRESSED IN PLACENTA, SIGNAL =  14; EXPRESSED IN HEART, SIGNAL = 7.2; EXPRESSED IN BRAIN, SIGNAL = 9.5; EXPRESSED IN HELA, SIGNAL = 7.1; EXPRESSED IN LUNG, SIGNAL = 9.3; EXPRESSED IN HBL100, SIGNAL = 7.7; EXPRESSED IN BT474, SIGNAL =  12
aaagcaagcgttcaaagacccctgttcaggcagctgcagtgagtatcgtggagaagcccgtcacaaggaagagtgagaggatagaccgggaaaaactcaagcggtccaattctcctcggggagaagcacagaagcttttggaattgaagatggaggcagagaagattacaaggactgcttctaaaaactctgctgcagaccttgaacatcccgaaccaagtttgcctctcagccgaacaaggcgccggaatgtaaggagcgtctatgcaaccatgggtgaccatgaaaaccgctctcctgtcaaagagcccgttgagcaaccaagagtgaccagaaagagattggagcgagagcttcaggaggctgcagcggttcccaccacccctcggaggggaaggcctccaaagacacgccggcgagccgatgaagaggaggagaacgaggccaaggaacctgcagaaacactcaagccacc

SEQ ID NO: 949 - DNA, 458 bp, Homo sapiens
  MAP TO AL034545.1; EXPRESSED IN BT474, SIGNAL = 2.4; EXPRESSED IN BONE MARROW, SIGNAL = 2.8; EXPRESSED IN HELA, SIGNAL = 2.4; EXPRESSED IN ADULT LIVER, SIGNAL = 1.8; EXPRESSED IN PLACENTA, SIGNAL = 2.7; EXPRESSED IN FETAL LIVER, SIGNAL =   2; EXPRESSED IN LUNG, SIGNAL = 2.2; EXPRESSED IN BRAIN, SIGNAL = 2.5; EXPRESSED IN HBL100, SIGNAL = 2.3; EXPRESSED IN HEART, SIGNAL = 2.3
ctgcagatggtgctcttttgcacgcgccaccttctggctggggtcaaactgactcagtctgttacagcatcactaggtagaataacactgctcccagaaaggagaaaaccagggtgtgaactcagatatcaccattgcctctaacaccctggctaagtagaaggttctgagtctgtctacttggccagttcaccattattataatcagcttttgagaaagccagcacactaaggctacctataactaagaaaatacacagagtctgtatcactctcctattatccccatcagagctcatgctggtacccactgctgggagatttgagaacaggtcacatcaccagatcccttgcatattccatagcaccagctgggtcgtggcagccctactcgtggctagatccagaagaacaataacaatcagacagaatgtcatcaaagaaacaatggacttaaa

SEQ ID NO: 950 - DNA, 455 bp, Homo sapiens
  MAP TO AL034449.1; EXPRESSED IN PLACENTA, SIGNAL = 1.4; EXPRESSED IN BT474, SIGNAL = 0.86; EXPRESSED IN BONE MARROW, SIGNAL = 0.98; EXPRESSED IN FETAL LIVER, SIGNAL = 0.85; EXPRESSED IN LUNG, SIGNAL = 1.5; EXPRESSED IN HELA, SIGNAL =   1; EXPRESSED IN HBL100, SIGNAL = 1.1; EXPRESSED IN ADULT LIVER, SIGNAL = 1.1; EXPRESSED IN BRAIN, SIGNAL = 1.5; EXPRESSED IN HEART, SIGNAL = 1.3
ataaggtgcttatgccgagctagccataacaaatatctaaaaattgaatagatttcatcttcagtcttgaactcctgacctcaggtgatccacccgcctcattgtaggaacagatgttagatcacaacaggtagaaaagtgcataagaactaaaggcaaagaatgtggctttcaagaaacttagtatgaaaagaaaagggctaaaaaaaatttttcctttttgatgtttatataaaaaccacactcagaaaataaaggactactagtccatctacaacaacaacaacaacaaaaaagatttcatcttcaggaccattcgtactccagagtgcttcacacaagaatacaggagtgaccctggggttgggcaatgcaacagtgctctgatggttatagagttattccacatatactataaaaacttcactcgtaaactcatctcttatcatttgaca

SEQ ID NO: 951 - DNA, 495 bp, Homo sapiens
  MAP TO AL034449.1; EXPRESSED IN BT474, SIGNAL =   2; EXPRESSED IN BONE MARROW, SIGNAL = 1.9; EXPRESSED IN FETAL LIVER, SIGNAL = 4.5; EXPRESSED IN LUNG, SIGNAL = 1.3; EXPRESSED IN ADULT LIVER, SIGNAL = 1.1; EXPRESSED IN PLACENTA, SIGNAL = 1.9; EXPRESSED IN HELA, SIGNAL = 1.5; EXPRESSED IN HEART, SIGNAL = 1.2; EXPRESSED IN BRAIN, SIGNAL = 1.1; EXPRESSED IN HBL100, SIGNAL = 2.8
gagcaacaaagttatttgcaagcactaaccaaatatctctggtttttggcttcccacccttcttttaagtgatctgtaaaaaaacaaccccgacatgggtttttgcaaggaaaagccacactgatctcaatttctaaaagtaactgattcttgtgttcttccatttcttcttctttttcctgaaaaagtaaagttacttcacaggccaaatctatttatcttgaggtgaggtggtggtgaaattgggtcgaataccatgttgcattctcagatcatgacaaatctggcagacgcatcttttctagttgagccagataagaactatgggcatctttataaggttcacatcattcctgttgggaagaccaacctcagaacctattacttgtttggtagtgtcagtatgttcaagctgaattacacatctgggcatatccctgggcaccagccttaaaatctgcttattttctataggatcctgcctttcaggggaag

SEQ ID NO: 952 - DNA, 466 bp, Homo sapiens
  MAP TO AL034449.1; EXPRESSED IN PLACENTA, SIGNAL = 2.4; EXPRESSED IN BONE MARROW, SIGNAL = 2.2; EXPRESSED IN LUNG, SIGNAL = 2.1; EXPRESSED IN ADULT LIVER, SIGNAL = 1.9; EXPRESSED IN BRAIN, SIGNAL = 2.7; EXPRESSED IN BT474, SIGNAL = 2.4; EXPRESSED IN HBL100, SIGNAL = 2.7; EXPRESSED IN FETAL LIVER, SIGNAL = 2.1; EXPRESSED IN HELA, SIGNAL = 2.7; EXPRESSED IN HEART, SIGNAL = 2.2
tccagtgtgtttgctgcttcttgttcactggatccaatcagcataatgtcatcaatgtaatggaccagtgtgatatctcgggaaagcaaaaagcgatcaagttctctctgaataaaattatgacacatagttggagaggtgatatacccctggggtaggacagtaatgatatattgctaaccttgcctgctgaaggcaaattgcttctgatgggccttatggacaggaaaggagaaaaaggtattttccaagtcaatgactgcatacgagcttccaggagatgtgttaatttgctcaagcaatgaaaccacatctggtacagcagctgcaattggagtcaccacttggataaacttatgataatccactgtcattctccaagactcatctgtcttctgcacaggctaaatgggatagttgaatggggatgtggtgggaatcaccacccctgcctctttcaagtcct

SEQ ID NO: 953 - DNA, 484 bp, Homo sapiens
  MAP TO AL034424.9; EXPRESSED IN HBL100, SIGNAL = 8.1; EXPRESSED IN BT474, SIGNAL =  11; EXPRESSED IN BONE MARROW, SIGNAL =  13; EXPRESSED IN FETAL LIVER, SIGNAL = 8.1; EXPRESSED IN HELA, SIGNAL =  12; EXPRESSED IN ADULT LIVER, SIGNAL =  10; EXPRESSED IN BRAIN, SIGNAL =  12; EXPRESSED IN PLACENTA, SIGNAL = 9.7; EXPRESSED IN LUNG, SIGNAL =  16; EXPRESSED IN HEART, SIGNAL =  11
ttcccaggtgattcttctgcacctttgagaacagctgcccatgatgggcctagtgctgtgtctagcatgcagcaggtgcttgctaaatagtagagaaataaataaataaataaataaataaataaataaataaatggtgggaaccgatgagtttcttggcctggacgagtaaatcaagaagagcaggtataggctccagaggtgtggtccctctgcctctccgctgtagggctggaaccattacctgttcttacctggccggctggactccaacaagcatcaggatcttgagggcgattcgccggtgcaggttccactcctcaatggcgctggccatgatcagcccactgaggaagaggaagttggtgtcgaggaagtactgggggcagaccttgttggagggcaagatgcccatgaaggggaagaggacgatgggcagcagcgccgtcactgagagcggcagggcctccgtgcaccagtacac

SEQ ID NO: 954 - DNA, 457 bp, Homo sapiens
  MAP TO AL034395.6; EXPRESSED IN PLACENTA, SIGNAL = 6.3; EXPRESSED IN FETAL LIVER, SIGNAL =  10; EXPRESSED IN LUNG, SIGNAL =  15; EXPRESSED IN BT474, SIGNAL =  13; EXPRESSED IN HEART, SIGNAL =  16; EXPRESSED IN BRAIN, SIGNAL =  11; EXPRESSED IN ADULT LIVER, SIGNAL =  67; EXPRESSED IN HELA, SIGNAL =  11; EXPRESSED IN HBL100, SIGNAL =  16; EXPRESSED IN BONE MARROW, SIGNAL =  13
agaacaggctgaccatccacacaaaatggcacccaagccttgcctttctgttaactcccaaatctcaagatgcactgaatagtcctgttttttcttgctttacatagtaaactttataggaataggaaaagcaatccagttgatgagcacattaattaagataatcaatacacatataattccaggtcatgtttccccaagtgtcatttgtcacgctctatggtcccacaactgcactctccaggcccagtatcaaatttctaactctcctaccttgccaccatcaagaaacggtgagcgtattcttgccaatttcaaatggcaggagtggggattaaaaaaaagagatgacattaatcccactgtgttccaggttgcacttgccaaattaaagcaaatacgccatgttcaatggtttaaatacaccatgtttaagtcaatcaaggaaaatgaacga

SEQ ID NO: 955 - DNA, 475 bp, Homo sapiens
  MAP TO AL033525.10; EXPRESSED IN PLACENTA, SIGNAL = 1.9; EXPRESSED IN BONE MARROW, SIGNAL = 1.6; EXPRESSED IN BT474, SIGNAL = 1.4; EXPRESSED IN ADULT LIVER, SIGNAL = 1.7; EXPRESSED IN HELA, SIGNAL = 1.7; EXPRESSED IN LUNG, SIGNAL = 1.7; EXPRESSED IN FETAL LIVER, SIGNAL = 1.4; EXPRESSED IN HBL100, SIGNAL = 1.5; EXPRESSED IN HEART, SIGNAL = 1.7; EXPRESSED IN BRAIN, SIGNAL = 2.1
aggattccaaacaatgtggcatcttctgtgaagttcttccattccttcaacaaatgtctttttgtgccaagtacagggttaggcagacagaggagcagggcagaggcccagaggtgagaaaatgcttgaccctgcaagttgctcagtaagaccagggtgcagagggcacaggaatcagggtcgctggtgaagagtccagggcctggactcacactgccatcatctgaagcctctccagcctcaatcagggatgttgggagaatgtaatgaaatgattcctgcagtacctctggcacttagtgtatgcttagtaatgccagctctcatcattaccaagatcatagtgattttcattatcattttaagcaggggtcagaacacacaggagttacacacgttaaggaggtagaatacacccttgaaggcattgacagtccattggaagagctgagccaggatgggaggggtgtaacta

SEQ ID NO: 956 - DNA, 453 bp, Homo sapiens
  MAP TO AL033525.10; EXPRESSED IN LUNG, SIGNAL = 0.98; EXPRESSED IN HELA, SIGNAL = 1.3; EXPRESSED IN PLACENTA, SIGNAL =   1; EXPRESSED IN BT474, SIGNAL = 1.5; EXPRESSED IN BONE MARROW, SIGNAL =   1; EXPRESSED IN HBL100, SIGNAL = 2.4; EXPRESSED IN FETAL LIVER, SIGNAL = 1.4; EXPRESSED IN ADULT LIVER, SIGNAL = 1.4; EXPRESSED IN BRAIN, SIGNAL = 1.2; EXPRESSED IN HEART, SIGNAL = 1.2
aatgccaaagtggcctacagggtagggaggttcttgtggagctgattgtccatcagaccttataggcacatgccaggggcccaagatagttttagggacccatgaaaaggtttttatttttatcttttttaatcagaattgaaatgaatataacagtaagtatgtaataatgagcccagcctggattatacagttgaccttagaacaacataagtttgaactgcacaggtccagttacatgtgagattttttttttacagtaaatatattggaaaatttcttggagttttttttcaacttgtagacaattaaaaaaaaactcacggacaaaccactacctttgagacagaaaaaccaatccctccccttcctgctcttcttcagccaattcaacatgaagacaatgaggataaagacctttatgatgattcacttccacttaataaagagtca

SEQ ID NO: 957 - DNA, 451 bp, Homo sapiens
  MAP TO AL033524.11; EXPRESSED IN HBL100, SIGNAL = 5.7; EXPRESSED IN HEART, SIGNAL = 4.9; EXPRESSED IN PLACENTA, SIGNAL = 4.4; EXPRESSED IN BT474, SIGNAL =  13; EXPRESSED IN BONE MARROW, SIGNAL = 3.9; EXPRESSED IN FETAL LIVER, SIGNAL = 5.4; EXPRESSED IN LUNG, SIGNAL = 4.2; EXPRESSED IN HELA, SIGNAL = 9.7; EXPRESSED IN ADULT LIVER, SIGNAL = 3.4; EXPRESSED IN BRAIN, SIGNAL = 5.9
atcaatccagctgcttcaggataatggggaacatggtaagaccagtgaattccatgaccatgagtccactgctgcacttcttaagccacaaagtgagtgccttggtcagaggcaatgctgtgtggaatatcatgatggtggataaggcatttcgtgagtccacggatggtagtcttggcagaagcattatgtgcaggataggcaagcccatatctggagtaagtgtctattccagtgaggacaaacctctgccctttccatgatggaagaggtccagcataatcaacctgccaccaggtggctggctgatcacaccgaagaatggtgccataccaagggctcagtgttggtctctgttgctcgcatattaggcactcagcaatggctgtagccaggtcagccttggtgagtggaagtccatgttgctgagcccatgtgtaacctccatccc

SEQ ID NO: 958 - DNA, 471 bp, Homo sapiens
  MAP TO AL033379.2; EXPRESSED IN BRAIN, SIGNAL = 0.77; EXPRESSED IN HEART, SIGNAL = 0.9; EXPRESSED IN PLACENTA, SIGNAL = 0.72; EXPRESSED IN HBL100, SIGNAL = 1.8; EXPRESSED IN FETAL LIVER, SIGNAL = 1.3; EXPRESSED IN LUNG, SIGNAL = 0.93; EXPRESSED IN HELA, SIGNAL =   2; EXPRESSED IN BT474, SIGNAL = 0.97; EXPRESSED IN BONE MARROW, SIGNAL = 1.1; EXPRESSED IN ADULT LIVER, SIGNAL = 1.2
tcctctaggtcttgatatgtctgctgaactaggtcttgatatgtctgctgaactgtgtctgggcccatttagtcccagggtgtctttcactgatctctgctgaattgggactgtcccatgtggccacttgagcatcactttggcactgttgtaggtaccatgatctcaggctaccaaggtgatacaacctcctcatccctatcaaaggcatcttgtattttcttccagcacatcccctgcctcttagagataattcccttggaattctcagttgcttcctctgcatcattctgaagtgtactagatccagtgaagttgtcatcaagcccaacgacttagctctcctccctctgtctttgttactcagccattcccacatcgtgatggacatgatagtgttaaatgcagatatctctgagattcaggaaggctttcttgaactgcacctttgcaaccctgaatcctccaaat

SEQ ID NO: 959 - DNA, 465 bp, Homo sapiens
  MAP TO AL033379.2; EXPRESSED IN FETAL LIVER, SIGNAL = 2.4; EXPRESSED IN BRAIN, SIGNAL = 3.2; EXPRESSED IN HEART, SIGNAL = 2.5; EXPRESSED IN BONE MARROW, SIGNAL =   2; EXPRESSED IN LUNG, SIGNAL = 3.4; EXPRESSED IN PLACENTA, SIGNAL = 1.8; EXPRESSED IN BT474, SIGNAL = 1.4; EXPRESSED IN ADULT LIVER, SIGNAL = 2.5; EXPRESSED IN HELA, SIGNAL =   3; EXPRESSED IN HBL100, SIGNAL = 1.9
gccgaagggtgttgagtatgcccataaatgagtacagtattaccaggaagggtatgaagaaagaaatgagagaaatcaaaatcacataagcctggtagcctggattggttgtgtacccaaacacacactggggagctcgggaaggtatctgcaggtcggggtttcctacggctaaaggaaaagctacacaaaaggaagttgcccaagaaactgcaatcagaaccttagctctatatgggtttagcttatcctgcctctggactataataaggaacctatctatgctaatgatgagcaggatggctactccttctatcacaaataaccagaaaaacatagcagataccctacagaagaatttcccaaaaatccatcgggtagtaagaatagttaccagggcaaagggcatgttcagcactgcaagcaacatgtctgcaaaagctaggctggcaaggaggatgttaa

SEQ ID NO: 960 - DNA, 474 bp, Homo sapiens
  MAP TO AL031984.13; EXPRESSED IN BONE MARROW, SIGNAL = 9.1; EXPRESSED IN ADULT LIVER, SIGNAL = 5.3; EXPRESSED IN BRAIN, SIGNAL = 7.6; EXPRESSED IN PLACENTA, SIGNAL = 8.2; EXPRESSED IN BT474, SIGNAL = 5.3; EXPRESSED IN HBL100, SIGNAL = 5.8; EXPRESSED IN FETAL LIVER, SIGNAL = 7.6; EXPRESSED IN LUNG, SIGNAL =   6; EXPRESSED IN HELA, SIGNAL =   5; EXPRESSED IN HEART, SIGNAL = 4.5
agcacacactctcacacaaccacacacaatctcacacttcacctcacacaatctcataaacaatctcatacatgatcactcatacaatctcagacacaatcttacaatcacacacaaccacacacatcctcatacaatctcatacagaatcacacaatctcacatagtctcacaatcacagtctcaaacacagtcactcacacaatctcagacacgatcacacgcaaaacgatttacacacgaacacaatctcacacacacaaaacaacatatgatctcacacacacccattcccaactcccctctcgcggtctttcttcctgaatctgattcctaaaatgtcttccagtggacacgaggaggagagctcccatccaaactgttcccaggcaaacgtgtccttgctcttgatccgtgtggaattccaagtccccctggcagagagcggcttctgggactctgggagggaagaat

SEQ ID NO: 961 - DNA, 467 bp, Homo sapiens
  MAP TO AL031965.7; EXPRESSED IN BONE MARROW, SIGNAL = 4.7; EXPRESSED IN LUNG, SIGNAL = 3.5; EXPRESSED IN HELA, SIGNAL = 9.6; EXPRESSED IN ADULT LIVER, SIGNAL = 3.6; EXPRESSED IN BRAIN, SIGNAL = 3.6; EXPRESSED IN HEART, SIGNAL =   2; EXPRESSED IN PLACENTA, SIGNAL = 3.3; EXPRESSED IN BT474, SIGNAL = 5.4; EXPRESSED IN HBL100, SIGNAL =  12; EXPRESSED IN FETAL LIVER, SIGNAL = 5.8
agctaaaaggggctggagtcaaggtacaggacctttccgggatctgctgtgggaccaaagttagcagtccagcctgcaaaatcacatataggcttcttttggcagcttccttggcaggcaggaaggctctcaggccactgctgagaagagatagaggtgagttacagggctgtttcagggcacaaagacataaccaaagtcagcaggcctgttaccctggtttccttggtggatgattttggtggcagaaccaacaccaaatgtagctgtagccaagtctgcagagagaccgggtcatttctgggtttagaaccaggaccacagtcagcaagcctaccatccaagcattgatctgcactctcaaaatagctctccttaattttagaatccaccatgtttttgcaaccttctacataaatcccaaaaagtccccagcaaggtacttttgtttggggatgactgcaaaa

SEQ ID NO: 962 - DNA, 472 bp, Homo sapiens
  MAP TO AL031885.3; EXPRESSED IN FETAL LIVER, SIGNAL = 4.4; EXPRESSED IN BT474, SIGNAL = 3.1; EXPRESSED IN BONE MARROW, SIGNAL =   2; EXPRESSED IN HBL100, SIGNAL = 5.6; EXPRESSED IN HELA, SIGNAL = 3.7; EXPRESSED IN ADULT LIVER, SIGNAL =   3; EXPRESSED IN BRAIN, SIGNAL = 3.9; EXPRESSED IN PLACENTA, SIGNAL = 1.2; EXPRESSED IN LUNG, SIGNAL = 1.5; EXPRESSED IN HEART, SIGNAL = 2.7
atatcgctgagagccacctgtcttggttagatagctctggattaggattctcactggaataccccaccattagtttacttgcattatccagggaccaaagtgactgtctaggagaacatttgtatgctacggtgaatgacaaatttgaagaatccaaagaatctgttgctgatgaagaagaggaagacagtgatgatgttgaacttattactgaatttatatttgtacctagtgataaatcagcactgggggcaatgttcactgcaatgtgtgaatgccaggccttgcatccagatcctgaggatgaggatgaggatgactacgatggagaagaatatgatgtggaagcacatgaacgaggaaaaggggacatccctaaatcttacacctatgaaggattatcccattaacagcagaaggccaagccacattggagagattagaagaaatgctttctcatctgtgagcagcc

SEQ ID NO: 963 - DNA, 467 bp, Homo sapiens
  MAP TO AL031779.5; EXPRESSED IN LUNG, SIGNAL = 2.1; EXPRESSED IN HEART, SIGNAL = 1.7; EXPRESSED IN BONE MARROW, SIGNAL = 2.1; EXPRESSED IN FETAL LIVER, SIGNAL = 1.7; EXPRESSED IN HELA, SIGNAL = 2.2; EXPRESSED IN ADULT LIVER, SIGNAL = 1.6; EXPRESSED IN BRAIN, SIGNAL = 2.7; EXPRESSED IN PLACENTA, SIGNAL = 1.7; EXPRESSED IN BT474, SIGNAL = 1.4; EXPRESSED IN HBL100, SIGNAL = 1.3
aagtgaatttctggggaggctggcaattgaatcttcctccttgcagaacaaccgtaccactggcagcatttgcaaaaatcccagtaattagattaatttactaaatgctactgcagattcaaggagtattttagacttgattttattttgctgggtatgctttgtttatttctttattactgccatggtttaattaatttttctcaattttacactggcctttcctccaaggagtctgagaggttccctctcagtgagagcttcttgttcatctttggtttttggcataggaatttttctttatatttttgctgtagggtttctcggtctgggcactattgacattttgggccatatatatctttgtcatggcggctgtcctgtgcattttggaatgcttggtggcattcttggattttaaccacctgataccagtaacatctgcaccttcagttgtgacgccaaaa

SEQ ID NO: 964 - DNA, 450 bp, Homo sapiens
  MAP TO AL031734.9; EXPRESSED IN HBL100, SIGNAL = 4.4; EXPRESSED IN FETAL LIVER, SIGNAL =  13; EXPRESSED IN LUNG, SIGNAL = 4.8; EXPRESSED IN ADULT LIVER, SIGNAL = 5.8; EXPRESSED IN BRAIN, SIGNAL = 1.8; EXPRESSED IN HEART, SIGNAL = 1.4; EXPRESSED IN PLACENTA, SIGNAL =   3; EXPRESSED IN BT474, SIGNAL = 3.5; EXPRESSED IN HELA, SIGNAL =  25; EXPRESSED IN BONE MARROW, SIGNAL = 1.3
ccacttccaatagcattaggcaccccagttttattgaatgcaacagttgtttatatgactattggaatctttgaagcgcagccgcattttaggatgatacttctccaaatacaaaagttgcttgcttttaaaagctccactccgcttttgtcctatgaattgtactgcatcttcatgtttcattccaccttcaactgatgctagggcaacaagtactggagctttcccaaggcctacaatgcaattaacagcaatataacaaccaggttcttcacaaaacttaatttttacaaaatgtaaccaatcagcaacaatctggttggatggtggtgcaccatcaccaaaaggccaattgagaacatggataccttctttctccacaagagtagtgtcataagttgcttcacatactcttactattgtggtagctccatacttcttaagctcctc

SEQ ID NO: 965 - DNA, 455 bp, Homo sapiens
  MAP TO AL031734.9; EXPRESSED IN HBL100, SIGNAL = 0.87; EXPRESSED IN PLACENTA, SIGNAL =  74; EXPRESSED IN BT474, SIGNAL = 0.84; EXPRESSED IN BONE MARROW, SIGNAL =   1; EXPRESSED IN FETAL LIVER, SIGNAL = 0.82; EXPRESSED IN LUNG, SIGNAL = 0.9; EXPRESSED IN HELA, SIGNAL = 0.89; EXPRESSED IN ADULT LIVER, SIGNAL = 0.8; EXPRESSED IN BRAIN, SIGNAL = 0.79; EXPRESSED IN HEART, SIGNAL =   1
atgatgacgcttatctcggcaatcaaagatccaaggagtctctaggtgaggccgggattcagaaaggctcagccatggctgccactactaccaccgccattttcacaaccctgaacgaacccaaaccagagacccaaaggaggggctgggccaagtccaggcagcgtcgccaagtgtggaagaggcgggcggaagatgggcagggagactccggtatctcttcacatttccaaccttggcccaagcattcccttaaacacagggtcaaaaagagtccaccggaggaaagcaaccaaaatggtggagagggctcctaccgagaagcagagacctttaactcccaagtaggactgcccatcttatacttctctgggaggcgggagcggctgctgctgcgtccagaagtgctggctgagattccccgggaggcgttcacagtggaagcctgggttaaa

SEQ ID NO: 966 - DNA, 453 bp, Homo sapiens
  MAP TO AL031734.9; EXPRESSED IN LUNG, SIGNAL = 0.97; EXPRESSED IN HELA, SIGNAL = 0.88; EXPRESSED IN BRAIN, SIGNAL = 0.94; EXPRESSED IN HEART, SIGNAL = 0.85; EXPRESSED IN PLACENTA, SIGNAL = 1.8; EXPRESSED IN ADULT LIVER, SIGNAL = 0.8; EXPRESSED IN FETAL LIVER, SIGNAL = 0.78; EXPRESSED IN HBL100, SIGNAL = 0.75; EXPRESSED IN BONE MARROW, SIGNAL = 0.89; EXPRESSED IN BT474, SIGNAL = 0.65
atccagctggggagaacagctcccactagaaaaggcaaagcaacctgactgtggtatttactggcaactggcctcagtgactgcttttgataacatccactgggccaaagttctggattgttttatagcaagactctgctctcacctcccagacacaggaaggtctgagacatttcacacccctgctccctccttaggggtccacagcagttgtcatctgggatgcgtcagacacttcaccacagcccacagtacacattccagggccacaagcacgtggttccctgagctctttgctcactctaacgtgtgaaatgtgtattgtgggctgaaatgtgtactgctggccattggttcccattccatgttgatactccttacatgcctctgcagaggaagctgccaacaacttggtagggatttttatggggtcgaggaagggactttgccttc

SEQ ID NO: 967 - DNA, 471 bp, Homo sapiens
  MAP TO AL031734.9; EXPRESSED IN BT474, SIGNAL = 1.6; EXPRESSED IN HELA, SIGNAL = 1.3; EXPRESSED IN PLACENTA, SIGNAL =  44; EXPRESSED IN FETAL LIVER, SIGNAL = 1.6; EXPRESSED IN LUNG, SIGNAL = 1.8; EXPRESSED IN ADULT LIVER, SIGNAL = 1.4; EXPRESSED IN BONE MARROW, SIGNAL = 1.9; EXPRESSED IN HBL100, SIGNAL = 1.1; EXPRESSED IN BRAIN, SIGNAL = 1.1; EXPRESSED IN HEART, SIGNAL = 4.6
agccaccatcttgattagccacagtcgctaccaaccaggcacatggacccatgtggcagccacttacgatggacggcacatggccctgtatgtggatggcactcaggtggctagcagtctagaccagtctggtcccctgaacagccccttcatggcatcttgccgctctttgctcctggggggagacagctctgaggatgggcactatttccgtggacacctgggcacactggttttctggtcgaccgccctgccacaaagccattttcagcacagttctcagcattcaagtggggaggaggaagcgactgacttggtcctgacagcgagctttgagcctgtgaacacagagtgggttccctttagagatgagaagtacccacgacttgaggttctccagggctttgagccagagcctgagattctgtcgcctttgcagcccccactctgtgggcaaacagtctgtgacaa

SEQ ID NO: 968 - DNA, 450 bp, Homo sapiens
  MAP TO AL031729.16; EXPRESSED IN FETAL LIVER, SIGNAL = 2.5; EXPRESSED IN HELA, SIGNAL =   3; EXPRESSED IN HEART, SIGNAL = 1.3; EXPRESSED IN BT474, SIGNAL = 1.5; EXPRESSED IN BONE MARROW, SIGNAL = 3.6; EXPRESSED IN BRAIN, SIGNAL = 1.7; EXPRESSED IN ADULT LIVER, SIGNAL = 1.8; EXPRESSED IN LUNG, SIGNAL = 3.1; EXPRESSED IN HBL100, SIGNAL = 1.6; EXPRESSED IN PLACENTA, SIGNAL =   2
acatgagccaatgggaagagaagcactgaggggggacatactgtgaggcagactgaacggtacagtaggtggcccagttccgcctttatcccttacagggaggaccccaatctaggcccaagagggaaagccacgtgcctgtatgagcgtatgagcatgtgcatgcgcgtgtgtgcacagggtggtgcacctggcaggggtccttgagtgaggcatgccccattctgtagcagggaacctggaatgggctgtgtgttctgcaagaaattggagccggtggccacggccaaggaggatgctggcctggaaggggacttcagaagctacggggcagcagaccactatgggcctgaccccactaaggcccggcctgcatcctcatttgcccacatccccaactacagcaacttctcctctcaggccatcaaccctggcttccttgatagtggc

SEQ ID NO: 969 - DNA, 474 bp, Homo sapiens
  MAP TO AL031729.16; EXPRESSED IN BT474, SIGNAL =  17; EXPRESSED IN HBL100, SIGNAL =  34; EXPRESSED IN HELA, SIGNAL = 8.5; EXPRESSED IN BRAIN, SIGNAL =  14; EXPRESSED IN PLACENTA, SIGNAL = 6.1; EXPRESSED IN BONE MARROW, SIGNAL = 7.2; EXPRESSED IN FETAL LIVER, SIGNAL =  25; EXPRESSED IN LUNG, SIGNAL =  12; EXPRESSED IN ADULT LIVER, SIGNAL =  12; EXPRESSED IN HEART, SIGNAL =  13
caactaaagagatgatgagccactgtaagattttttttttttttttacaaaagtttattcttaaatgtacaacagctccaagataacactttattccagctatacggggcaaaagatgttatggcagggaatagagaagtttaaatacggatgaaataaagggtcaccatctcctcaggcacaaggaacagcttgcttttcgccagatttcttaattccacctgtggccaagggccccttccccgcggccttcgcttttagctcctcgagtttcttctgctcctctttttgtttctgcttgaaagccttgtcttcctcgtccatctccttggcctgcttcttgggctgtttcggtggcttcttcttgccaccttcgtggccggacatggcacctgccgccccttccgcagaccctgccaccagaaacctaaacatgttatttttcaattcaaccagcaaatactgagagatgcc

SEQ ID NO: 970 - DNA, 483 bp, Homo sapiens
  MAP TO AL031655.7; EXPRESSED IN HBL100, SIGNAL = 0.96; EXPRESSED IN FETAL LIVER, SIGNAL = 1.9; EXPRESSED IN HELA, SIGNAL = 1.4; EXPRESSED IN ADULT LIVER, SIGNAL = 3.8; EXPRESSED IN HEART, SIGNAL = 1.6; EXPRESSED IN BONE MARROW, SIGNAL = 1.2; EXPRESSED IN BRAIN, SIGNAL = 1.7; EXPRESSED IN PLACENTA, SIGNAL = 1.7; EXPRESSED IN BT474, SIGNAL = 1.3; EXPRESSED IN LUNG, SIGNAL = 1.4
caagtgagctagggtggagggtgttagatgctgcaaaagcctaatttggataggcagacctaaaaattactaacaataatgcattgcaaaatcatggcattagaaaaggagacacataaacttccaaaactcaatacagaatattcgataataatgtatttttcttattccattttttgtattatatttatcttgttaaaatatttattttcaaatactacgttcttatcttctttataattgttgcattaacttttctatccaactttctggcaccactctctccaatccccctgggcctaccaccatgaagcagctctctctggcttaccacttccttgttgtaaatttttattgccttgtattccagatctgcaatttctctgatgtccattaaatcctgcttttctaccatgattttgatctttgtttactgttggttgtgacacatggagaaaacatacgccttaaaatgttcaccgt

SEQ ID NO: 971 - DNA, 471 bp, Homo sapiens
  MAP TO AL031654.6; EXPRESSED IN PLACENTA, SIGNAL = 1.3; EXPRESSED IN FETAL LIVER, SIGNAL = 2.6; EXPRESSED IN LUNG, SIGNAL =   2; EXPRESSED IN HEART, SIGNAL = 1.8; EXPRESSED IN BT474, SIGNAL =   2; EXPRESSED IN BONE MARROW, SIGNAL = 1.9; EXPRESSED IN HBL100, SIGNAL = 3.1; EXPRESSED IN HELA, SIGNAL = 2.9; EXPRESSED IN ADULT LIVER, SIGNAL = 1.4; EXPRESSED IN BRAIN, SIGNAL = 1.3
tgttggcataaaggcaaagctttttaagacagggagctcaagaaatattaactgaatctgagtggtcactgcattagtacactgttaaatcctttttagagttccctgattacattttgagaaagctcagggtctagactctataaattggaatttgcagagctgggctctgtttgccttaagaggcatgactagcttctcttcttggcacttcttattctgcatacctgccatgcttccttcaacccaatggcatttgcatatgctgtgagtgcaaaagtccatcattattatcatcaccatcattgcaatcattatcaatatcattacaattaacactatagttctcataatgaccaccatcaatatcatgatcatcaccataatcaccactacttctatcatcatcaccagtagcattgttgtaatcatcatcactactaccacagtaactattgctggcactcccac

SEQ ID NO: 972 - DNA, 415 bp, Homo sapiens
  MAP TO AL031654.6; EXPRESSED IN LUNG, SIGNAL = 1.4; EXPRESSED IN HEART, SIGNAL = 1.3; EXPRESSED IN PLACENTA, SIGNAL = 1.4; EXPRESSED IN BT474, SIGNAL = 1.2; EXPRESSED IN BONE MARROW, SIGNAL =   2; EXPRESSED IN HBL100, SIGNAL = 2.2; EXPRESSED IN FETAL LIVER, SIGNAL = 1.1; EXPRESSED IN HELA, SIGNAL = 1.9; EXPRESSED IN ADULT LIVER, SIGNAL = 1.2; EXPRESSED IN BRAIN, SIGNAL = 1.8
ggtcatctgagacttcagcaagttgtaatcttttttgttggtgggaagtcttgccttgatgttgatggctgctgactgatcaaggcgctggttgctgaaggttgggtggctgtggcaatttcttgacataagacaacaatgaagcttgctgcagtgattgactcttcttttcctgaaagatttctctgtagcatgtatcgctgtttgatagcattttacccacagtaaaacttcttttaaaattgtagtcaatcctctcaaaccctgctgcttgtttttcaactgagtttatgtaataaactaaatcctttgttgcaatttcaacaatgttcacaacatctccaccaggagtagattcccttgcaaaagaaaaaaaaaaagcaatttttttcttacctatacaagcaactccgca

SEQ ID NO: 973 - DNA, 438 bp, Homo sapiens
  MAP TO AL023804.1; EXPRESSED IN PLACENTA, SIGNAL =  13; EXPRESSED IN HBL100, SIGNAL =  52; EXPRESSED IN FETAL LIVER, SIGNAL =  36; EXPRESSED IN LUNG, SIGNAL =  18; EXPRESSED IN HELA, SIGNAL =  62; EXPRESSED IN BRAIN, SIGNAL =  36; EXPRESSED IN HEART, SIGNAL =  45; EXPRESSED IN BT474, SIGNAL =  83; EXPRESSED IN BONE MARROW, SIGNAL =  20; EXPRESSED IN ADULT LIVER, SIGNAL =  24
ttgcattactacccaccaggaataaagaataagaaaatgtagcttaaaaagtgtcatatactgctggacttccactctgggccaaaatggggtaacaaggactggatttacaccctccctaaccctgaaagttaaaaaaaaaaaaaaaaagatgaacaaaacaatggtttttagacacttgacatcaggagggtaacacatgcaatgagcccaactgactgcctggaaagtttccaggcctcagagaagggaggagacagagctaggagtccggcagagcaatgcagctagagttcacagcagagagctgcacggagatctgcagagggccccttccagtctccagaactgacaagcgcaagcatgtgaggaaactaatcactactgcagagagaagctgcctaagagaagtaagaaaagacaatcccagagctcacg

SEQ ID NO: 974 - DNA, 459 bp, Homo sapiens
  MAP TO AL023804.1; EXPRESSED IN HBL100, SIGNAL =  27; EXPRESSED IN FETAL LIVER, SIGNAL =  23; EXPRESSED IN BRAIN, SIGNAL =  24; EXPRESSED IN BT474, SIGNAL =  32; EXPRESSED IN BONE MARROW, SIGNAL =  17; EXPRESSED IN LUNG, SIGNAL = 7.8; EXPRESSED IN HELA, SIGNAL =  35; EXPRESSED IN ADULT LIVER, SIGNAL =  20; EXPRESSED IN PLACENTA, SIGNAL = 7.8; EXPRESSED IN HEART, SIGNAL =  37
tccaggaccattcagtttccttccagctcctctacgctgtgatcacccttcctcagcatgcctccttcaggatttcagaagccagcaagtgtgagtactaagacatgctctgccaacatggtaccaggtcacagccttgtactttggccagattttcgaagagaagctcttgtcaagggtgcctgtgctgtccacccagactcccaggtcagacctggatggacgctacacatacttcttcctgaaagggtgtcattcgtgtcagaagagcagtcgtaaccacttggcagaccatcatctgctctacttctataacatgttagatggcactgctgcccttacctatcctgtggggtgatgggaggaacacaagggacccaaacggagggcaagtcaatagctggcaaaagtgaggcagggatacatacgtgtttttccccttcaatcttcttgtccgcc

SEQ ID NO: 975 - DNA, 398 bp, Homo sapiens
  MAP TO AL023799.5; EXPRESSED IN PLACENTA, SIGNAL = 2.4; EXPRESSED IN BT474, SIGNAL = 1.1; EXPRESSED IN FETAL LIVER, SIGNAL =   1; EXPRESSED IN LUNG, SIGNAL =   1; EXPRESSED IN HELA, SIGNAL = 0.97; EXPRESSED IN ADULT LIVER, SIGNAL =   1; EXPRESSED IN BONE MARROW, SIGNAL = 1.2; EXPRESSED IN HBL100, SIGNAL = 1.1; EXPRESSED IN BRAIN, SIGNAL = 0.95; EXPRESSED IN HEART, SIGNAL = 1.4
aaaaacaaatttccctaacaaactcattttaatttcattagtctaattgttctcagagtttttgtcccagtaattttatgagttactatgctggaaaatagtacaaggaacatcttagaagttccctattgctagacccttttagttccttgatgagacaaacttgctttcaataggataactctgttttcaaaaaacaaatgacccaaatggaaattctgattggcagtttacatgtttaacttacctcatcatatgatttacaaaggctttgttacagttagtattgtacttgcaaaaactgcagtggatgtatatagaaaagtggcttgcaaaatcttttattttggaatgacattcaatgcacttgtgaattccccgacgacaccttatggaga

SEQ ID NO: 976 - DNA, 471 bp, Homo sapiens
  MAP TO AL022725.8; EXPRESSED IN HBL100, SIGNAL = 5.3; EXPRESSED IN BRAIN, SIGNAL = 4.9; EXPRESSED IN PLACENTA, SIGNAL =   4; EXPRESSED IN BT474, SIGNAL = 4.3; EXPRESSED IN BONE MARROW, SIGNAL = 4.8; EXPRESSED IN LUNG, SIGNAL = 5.5; EXPRESSED IN HELA, SIGNAL = 6.1; EXPRESSED IN ADULT LIVER, SIGNAL = 2.9; EXPRESSED IN FETAL LIVER, SIGNAL = 3.7; EXPRESSED IN HEART, SIGNAL = 4.6
aaagaggatctgagccatgcctgcaagacggcatcactcagattacataagaatctaagcgacaattccagtgaggagagccagacactggtgtgctcgcacaggtctcgagggttaacaataccttatctgctgactgaaagaactagcagcctacgaagatgagtcaggcccagctttgtcactgccctgctggaggaggccgtgtgtgcacagtgaactacacccccagggacacgtgtgcaaagtacacacacttcaaggggactcaccacgagcaggagctcacctctgcacagagaatcaggacaacaccttcacagaagcccatctgtgctgaatttcgggaaaacaaaattttacaaagtgggaggaggatcccaagaagcaagaaacaaggtgtgcgaaggcacgggagcacacgaggccagctaagaggtgcctgccatgctgttctgcacacgcaggtgt

SEQ ID NO: 977 - DNA, 453 bp, Homo sapiens
  MAP TO AL022725.8; EXPRESSED IN HELA, SIGNAL = 2.4; EXPRESSED IN BRAIN, SIGNAL =   2; EXPRESSED IN HEART, SIGNAL = 1.3; EXPRESSED IN PLACENTA, SIGNAL =   4; EXPRESSED IN ADULT LIVER, SIGNAL = 1.4; EXPRESSED IN LUNG, SIGNAL = 1.7; EXPRESSED IN FETAL LIVER, SIGNAL = 2.1; EXPRESSED IN HBL100, SIGNAL = 2.9; EXPRESSED IN BONE MARROW, SIGNAL = 2.3; EXPRESSED IN BT474, SIGNAL = 5.6
ctagtgggtgtatcctgggcctgctccccatcctggccctctcggcaccggggcccaataaagctccgaccggcttttccgctgccacttcgggtgccactgtgtcctcctgaccctgctcgacggggtccagtttctcagggctctcgctctgaaagccgtccactgcggtcctgctcttaacggggcttttaggcacgaggatcttgatacctgacttcgctaggtccatgttcttccggctggagagagatggagctgtgttcttcctgaacttctggctggcagcaaacagctggctgtttttggattcgtggtctttcccaatcacgagtgccttaggagaggtcttagaaaagttgctgttggtggatctggagatttgtttcctagcattgttgggagaggtcctgtttgttctggtcaatgtgctctccttctgcttctccgtgt

SEQ ID NO: 978 - DNA, 481 bp, Homo sapiens
  MAP TO AL022399.2; EXPRESSED IN BONE MARROW, SIGNAL = 6.5; EXPRESSED IN PLACENTA, SIGNAL = 7.5; EXPRESSED IN BRAIN, SIGNAL = 8.6; EXPRESSED IN ADULT LIVER, SIGNAL =   6; EXPRESSED IN HELA, SIGNAL = 8.4; EXPRESSED IN LUNG, SIGNAL = 9.5; EXPRESSED IN HBL100, SIGNAL =   5; EXPRESSED IN BT474, SIGNAL = 7.4; EXPRESSED IN HEART, SIGNAL = 6.1; EXPRESSED IN FETAL LIVER, SIGNAL = 6.3
ttgccttctgtctaggagcctgtaaaatcaaacaaattatttactcccaagatacagtgtggatagagacattgggtaaacatttccattccaaaagggagaaatcggccaaaagaaaggggctgcagaccccatgttagttcaaaacgcatcagggcagtcattaaatcttaaaagttccaaatcagtctcctctttgactccacgtcctatattcagggcacactgcttcaaggggtgggctcccaatgccttcggccactctgcccctgtggctttttagggggtcagcccccacatctgttcttccaggatggagttgagtgcttgtggcttttccaggtgtacagtgaaagctgctggtggatctgccactctggagtctggagaacagctgccctttttccacagctccactaggagtgtcccagtggggactctgtgtggggcctccatcctcacattttccctctgcactgct

SEQ ID NO: 979 - DNA, 474 bp, Homo sapiens
  MAP TO AL008629.9; EXPRESSED IN PLACENTA, SIGNAL = 9.1; EXPRESSED IN BT474, SIGNAL = 8.3; EXPRESSED IN BONE MARROW, SIGNAL =  11; EXPRESSED IN LUNG, SIGNAL = 9.5; EXPRESSED IN HELA, SIGNAL = 7.2; EXPRESSED IN ADULT LIVER, SIGNAL = 6.8; EXPRESSED IN BRAIN, SIGNAL = 8.2; EXPRESSED IN HBL100, SIGNAL = 8.3; EXPRESSED IN FETAL LIVER, SIGNAL = 8.4; EXPRESSED IN HEART, SIGNAL = 7.2
agaatgaccctgaggcagagcaagggagtgtagaatgatttcccagaatgtaggaataaaacaggacttgagtaagcattatgtgtctaaaaagttgtgagtttcagataacaccatagttttctattgatcatgggagcaacaaaataattatcaggcactggagaggaaaaaagaagcaacagtgacagttgccagacctagagggtttttcagacaggcaggcagccaattcagcaaaacttgaatgacaaatggcaaaggaccagatgcaatagttaacatgtcagtgatgccagataatacagagacagataatactgaagacaagattcccattgtacccctgacctttatgcccttgtaccttgtacactcctccgaacttagatataaccttttagaaaaggcaaagagcactaaaaattagttcagattattttccctacatggaatatcttgaatgaaggttgc

SEQ ID NO: 980 - DNA, 459 bp, Homo sapiens
  MAP TO AL008629.9; EXPRESSED IN HBL100, SIGNAL = 1.2; EXPRESSED IN FETAL LIVER, SIGNAL = 1.2; EXPRESSED IN BRAIN, SIGNAL = 1.3; EXPRESSED IN BT474, SIGNAL = 1.6; EXPRESSED IN BONE MARROW, SIGNAL = 1.6; EXPRESSED IN HELA, SIGNAL = 1.3; EXPRESSED IN ADULT LIVER, SIGNAL = 1.1; EXPRESSED IN PLACENTA, SIGNAL =   5; EXPRESSED IN LUNG, SIGNAL = 1.5; EXPRESSED IN HEART, SIGNAL = 1.4
catggctttctaattatgcctgaaagacccactcctttgttgcagagagattctagccaaagcaggggccattatacacctgaacataagagaaggaacacaagtttgttgtcctctgcttgaggaaggaattaatcctgaagtctgggcaacagaaggacaatatggacgagcgaagaatgcccatcccattcaagttaaactacaggattctgcctcctttccctaccaaaggcagtactcccttagacccgaggccgatcaaggactccaaaagattgttaaggacctaaaagcccaaggcctagtaaaaccatgcaatagcccctgcagtactccaattttaggagtacagaaacccaacggacagtggaggttagtgcaagatctcaggattatcgatgaggttgttgtccctgtatacccagctgtgcctaacgcttatactctgctttccca

SEQ ID NO: 981 - DNA, 413 bp, Homo sapiens
  MAP TO AL008629.9; EXPRESSED IN BT474, SIGNAL = 3.3; EXPRESSED IN BONE MARROW, SIGNAL = 6.4; EXPRESSED IN HBL100, SIGNAL = 3.8; EXPRESSED IN ADULT LIVER, SIGNAL = 3.5; EXPRESSED IN BRAIN, SIGNAL = 4.9; EXPRESSED IN HEART, SIGNAL = 4.5; EXPRESSED IN PLACENTA, SIGNAL = 4.1; EXPRESSED IN FETAL LIVER, SIGNAL = 3.5; EXPRESSED IN LUNG, SIGNAL = 4.9; EXPRESSED IN HELA, SIGNAL = 4.7
tgtcccctcatttattcctgatattagtgatttgagtcctatatctttttctttcttggtcattgcagctaacgttttgtcaaatttgttgatttttttttcaaaaacttttggtttcattgacctttatctatttttttctgtcctctattctatttatgtctgctctactcttcattctttttgtattatttagatttactttgctctttcctagtttcttagaaaagaggaagtttactcttttcacatggctttctaattatgcctgaaagacccactcctttgttgcagagagattctagccaaagcaggggccattatacacctgaacataagagaaggaacacaagtttgttgtcctctgcttgaggaaggaattaatcctgaagtctgggcaacagaaggacaat

SEQ ID NO: 982 - DNA, 463 bp, Homo sapiens
  MAP TO AJ010598.1; EXPRESSED IN FETAL LIVER, SIGNAL = 2.2; EXPRESSED IN PLACENTA, SIGNAL = 1.5; EXPRESSED IN BT474, SIGNAL = 1.5; EXPRESSED IN BONE MARROW, SIGNAL = 1.2; EXPRESSED IN HBL100, SIGNAL = 1.6; EXPRESSED IN LUNG, SIGNAL = 1.2; EXPRESSED IN HELA, SIGNAL =   1; EXPRESSED IN ADULT LIVER, SIGNAL = 1.1; EXPRESSED IN BRAIN, SIGNAL = 1.2; EXPRESSED IN HEART, SIGNAL = 1.5
caccatgcgtaagattttcttgttttttagaaataaatatgattaagctgttttaactctaaagctacaacttcatcttataataatttagttcttatgtattaaaaatctcatttggatgttagatcaatccacatatttctttaagattttttcttttgaattacaagccaatttaatactgtgggtttggcacgatctttgtcaagagtttcagcttgaaaggttaataagaaatactctatgctttgatacagcacaacagaacaacagggagccctatcttcagaactgccaagcacatcaccttcatcagttgctgccatttcatcgagatcagtaatacacaaaccatttactcagtcccggatacctccagatttgcccatgcatccggcaccaaggcacataacggaggaagaactttctgtgctggaaagttgtttacatcgctggaggacag

SEQ ID NO: 983 - DNA, 466 bp, Homo sapiens
  MAP TO AJ006995.1; EXPRESSED IN PLACENTA, SIGNAL = 2.3; EXPRESSED IN BONE MARROW, SIGNAL = 2.2; EXPRESSED IN FETAL LIVER, SIGNAL = 2.1; EXPRESSED IN LUNG, SIGNAL = 1.9; EXPRESSED IN ADULT LIVER, SIGNAL = 1.5; EXPRESSED IN BRAIN, SIGNAL = 2.3; EXPRESSED IN HBL100, SIGNAL =   2; EXPRESSED IN HEART, SIGNAL = 2.2; EXPRESSED IN BT474, SIGNAL = 2.4; EXPRESSED IN HELA, SIGNAL = 1.7
tggccaaggaaaactgagtcagacaaccaagtcagggtttcaggcacaatggtgttttgggatccttgggggtgttgcttttctggcctaaaacctctttccagtggtgccttttcctgagttttgctcggcccgctgggctcgttccacccactcggcctggcaggctgtgcttggctcaagctactagcctgtatcccatgcctcccaagggtgagttaggcatggagtggcgaggggtgtgtcaacaagcgtgaggtccagcctctacgcagtcagatccttcagctactgcaatgcaggcagcaccaggtgctggcatcggtgccagctctctgcaaggctgcagctggacaggtaccccacaagcagctggcactggggaatgtggtggcacccagaagctctgagatgccaggaaccgcaggacctcaaagagggactaacagccctagttcggagagct

SEQ ID NO: 984 - DNA, 481 bp, Homo sapiens
  MAP TO AF165142.1; EXPRESSED IN FETAL LIVER, SIGNAL = 1.1; EXPRESSED IN PLACENTA, SIGNAL = 1.1; EXPRESSED IN BONE MARROW, SIGNAL = 0.97; EXPRESSED IN HBL100, SIGNAL =   1; EXPRESSED IN LUNG, SIGNAL = 1.2; EXPRESSED IN HELA, SIGNAL = 2.5; EXPRESSED IN ADULT LIVER, SIGNAL = 0.95; EXPRESSED IN BRAIN, SIGNAL = 1.4; EXPRESSED IN BT474, SIGNAL = 2.2; EXPRESSED IN HEART, SIGNAL = 1.3
tgtgcagcaattgtcctgtgcacatttgaataatgtctctgcatccctctgtgatgtggtgcggaacggcaactttgtactttgcatttttattgtgatgaaaatattttatgacagcatttgcatcttaacaaaaaaaatcctgaaaacaaggcctttctaaaccacttatacaaaaggaaggtgactcagactggcctcctcttgggaaattctggtcagggtaggtctggtctccagggcagtaaggaaccccaggcaatctgtagaagttagtgactgttaccttgggagcctctcattaccccattcagctccctggccacccagctgcagcatcaggaccaagcctggggtgaaatcagcaattccattgaatttgccttttggtgtgtcaggcactttccagccagctttaatatggggagacagttataaaaatattggaggagttgaaatttcaaggaagggattgtgaggc

SEQ ID NO: 985 - DNA, 470 bp, Homo sapiens
  MAP TO AF157623.1; EXPRESSED IN HEART, SIGNAL = 2.8; EXPRESSED IN BONE MARROW, SIGNAL = 1.2; EXPRESSED IN ADULT LIVER, SIGNAL =  11; EXPRESSED IN BT474, SIGNAL = 1.2; EXPRESSED IN LUNG, SIGNAL = 2.8; EXPRESSED IN HELA, SIGNAL =   4; EXPRESSED IN BRAIN, SIGNAL = 8.8; EXPRESSED IN PLACENTA, SIGNAL =  33; EXPRESSED IN HBL100, SIGNAL = 1.8; EXPRESSED IN FETAL LIVER, SIGNAL = 3.9
aatgtttaaagaacctcgggctctgaagagattctctaagaatattttgtaagtggaagtttttgatgcatgcaaaaaattggcaggatgtttagtgtttaaatgctaagcccgatatataaaggagcgatggctaggtgtgtgtggctgttgcacaacccattaatcaatgcgttgaagcgttcattttaaggtgctacaggcttaagtgtgtactcctttggattttaggcttccgttttctaaacgagaggtgccggtggctagtgggtctgggtttattgtgtcggaagatggactgatcgtgacaaatgcccacgtggtgaccaacaagcaccgggtcaaagttgagctgaagaacggtgccacttacgaagccaaaatcaaggatgtggatgagaaagcagacatcgcactcatcaaaattgaccaccaggtaagggtgttctcgcctgcagaggtgagttctc

SEQ ID NO: 986 - DNA, 371 bp, Homo sapiens
  MAP TO AF157623.1; EXPRESSED IN ADULT LIVER, SIGNAL = 3.2; EXPRESSED IN PLACENTA, SIGNAL = 3.6; EXPRESSED IN BONE MARROW, SIGNAL = 4.4; EXPRESSED IN FETAL LIVER, SIGNAL = 2.8; EXPRESSED IN LUNG, SIGNAL = 3.8; EXPRESSED IN HELA, SIGNAL = 3.4; EXPRESSED IN BT474, SIGNAL = 3.3; EXPRESSED IN HBL100, SIGNAL = 2.3; EXPRESSED IN BRAIN, SIGNAL = 3.7; EXPRESSED IN HEART, SIGNAL = 2.9
atcatccacactgcagcaaggtgattctgccaaaacatatctccttaaaagccaactggagcttctcatcagcatcaatgtgaagccaaaaatccttaggaggacagagggagtccctcacaacctagactggtccccttccctccagctgcctcaactgtccacaggactctcttcccacctgcggccacactgtgcaacctggaatttccccacctgggcggactcatcacgtcatcaccaattggatgcatcttctgctctgtgcagctggtgaaatctttctcaacccttgagatgcagcccaatcttctcctaacatctggattcctctctgtcactgcattccctcctgtcatcctgcctttgtt

SEQ ID NO: 987 - DNA, 371 bp, Homo sapiens; identical to SEQ ID NO: 986
  MAP TO AF157623.1; EXPRESSED IN BRAIN, SIGNAL = 2.4; EXPRESSED IN HEART, SIGNAL = 2.3; EXPRESSED IN PLACENTA, SIGNAL = 3.6; EXPRESSED IN HBL100, SIGNAL = 2.3; EXPRESSED IN LUNG, SIGNAL = 2.8; EXPRESSED IN BT474, SIGNAL = 2.3; EXPRESSED IN BONE MARROW, SIGNAL = 3.2; EXPRESSED IN FETAL LIVER, SIGNAL = 9.1; EXPRESSED IN HELA, SIGNAL = 2.2; EXPRESSED IN ADULT LIVER, SIGNAL = 2.3

SEQ ID NO: 988 - DNA, 350 bp, Homo sapiens
  MAP TO AF146191.1; EXPRESSED IN HELA, SIGNAL = 2.4; EXPRESSED IN ADULT LIVER, SIGNAL = 1.1; EXPRESSED IN HEART, SIGNAL = 1.1; EXPRESSED IN PLACENTA, SIGNAL = 1.1; EXPRESSED IN BRAIN, SIGNAL = 1.7; EXPRESSED IN LUNG, SIGNAL = 1.2; EXPRESSED IN FETAL LIVER, SIGNAL = 1.7; EXPRESSED IN HBL100, SIGNAL = 3.1; EXPRESSED IN BONE MARROW, SIGNAL = 1.2; EXPRESSED IN BT474, SIGNAL = 1.6
ttctcagggaaggcagtagccacggccccagctcaggtccttgcagggagtttacatcagtagctcctcaccttgaggagacacgcgggccttcctcccgaagcccgtttaggaggcagatggagcgactcgactcggaggacaggagggtgttcaggggccctggcgccacagttcccacaggatgaccttggagcgttcctggatttcgagctgccctggctaaggagccgcaccccagtcctcgcccgcagctcacgggaaatgaagttgtctggcctgaagacctgcccgaagggccccgagcgcacagagtccatggtgcccggctccagatccacgagcacagc

SEQ ID NO: 989 - DNA, 469 bp, Homo sapiens
  MAP TO AF146191.1; EXPRESSED IN LUNG, SIGNAL = 8.9; EXPRESSED IN ADULT LIVER, SIGNAL =  14; EXPRESSED IN PLACENTA, SIGNAL = 5.8; EXPRESSED IN BT474, SIGNAL =  37; EXPRESSED IN FETAL LIVER, SIGNAL =  32; EXPRESSED IN HELA, SIGNAL =  38; EXPRESSED IN BRAIN, SIGNAL =  51; EXPRESSED IN HEART, SIGNAL = 7.5; EXPRESSED IN BONE MARROW, SIGNAL =  13; EXPRESSED IN HBL100, SIGNAL =  59
caccaagtcgttcatgttgctctcggcctcagtgaattccatctcatccatgccctcgcccgtgtaccagtggaggaaggccttgcgcctgaacgttgctgtaaactgctctgagacccgcttgagttcctggacggctgtgttgttcccagtgaaggtgactgacatttttagcccccagggtgggatgtcacagacggctgtttttacgttgttggggaaccagtcagcaaagtagctgctgttcttatcttgaatgttgaacatctgttcatccacctccctcatgggcatgcgaccctggaaaatggcagccgccgttaggtagcggccgtgacgggggtcacgggcagccatcatgttcttagcatcaaacatctgctgggtgagctcagccacagtcaaggcccggtactgctggctgccccggctggtcagtggggcaaagccgggcatgaagaaatgcagc

SEQ ID NO: 990 - DNA, 483 bp, Homo sapiens
  MAP TO AF146191.1; EXPRESSED IN BONE MARROW, SIGNAL =  11; EXPRESSED IN FETAL LIVER, SIGNAL =  15; EXPRESSED IN ADULT LIVER, SIGNAL = 6.5; EXPRESSED IN PLACENTA, SIGNAL = 9.1; EXPRESSED IN HEART, SIGNAL = 6.7; EXPRESSED IN BRAIN, SIGNAL =  25; EXPRESSED IN HELA, SIGNAL = 9.7; EXPRESSED IN LUNG, SIGNAL = 8.3; EXPRESSED IN HBL100, SIGNAL =  27; EXPRESSED IN BT474, SIGNAL =  23
gatgaacccagacagcttccgccttgcaggacaactgtgcacatctggcagcagtagccagagggcccatagaagttggaggtgaaaccagatgctgtgagaatactttattaggcaaaaccgcatactataaaaatgctttaaaatgcagcaggagatgtgaagacacaaatgaacgagcgcatagtgacacatggctgtcagaacacagtgaaggatccacactgcttcccccctttacctagaaaaggagagttctaggccacctcctcctcctcatactcctcctccctcggccgtggcatcctgatattgctgatattcagacaccaagtcgttcatgttgctctcggcctcagtgaattccatctcatccatgccctcgcccgtgtaccagtggaggaaggccttgcgcctgaacgttgctgtaaactgctctgagacccgcttgagttcctggacggctgtgttgttcccagtgaa

SEQ ID NO: 991 - DNA, 477 bp, Homo sapiens
  MAP TO AF130343.1; EXPRESSED IN HEART, SIGNAL = 1.3; EXPRESSED IN FETAL LIVER, SIGNAL = 1.9; EXPRESSED IN LUNG, SIGNAL = 2.6; EXPRESSED IN ADULT LIVER, SIGNAL = 1.5; EXPRESSED IN BRAIN, SIGNAL = 1.6; EXPRESSED IN PLACENTA, SIGNAL = 1.6; EXPRESSED IN BT474, SIGNAL = 2.5; EXPRESSED IN BONE MARROW, SIGNAL = 1.4; EXPRESSED IN HBL100, SIGNAL =   2; EXPRESSED IN HELA, SIGNAL = 3.2
gaccatttctccttccatgcaaagtgtacaaccaggtgcactgctcaaatttctgtccattgggaagatttctcttcactgctgtcctgcagggatgtcccagaaaggggctgtagtgctacagctgtccacttttgggtggcgcctgcatgtcgtgcagaaccatctgtgaaccaggccctagtcttctcttcctctgtcaactgatcatagggaacttcccatgaggccatcggtgcaggctgggggagagaaggagtggagaccatggggatttgagccacttcctcatgtaacttacttgtgccttcagcccaatcatgtatataccacctccatttgatgatggaatgctgctgtgcatgacccactttatggctacatgggtcagaaagcacgcagtttatgataggcagttcaggtcgcatggtgacttgatgacccatagtcaaatgttcaatttccaccaaaacccag

SEQ ID NO: 992 - DNA, 468 bp, Homo sapiens
  MAP TO AF130342.1; EXPRESSED IN BT474, SIGNAL =   1; EXPRESSED IN BONE MARROW, SIGNAL = 1.4; EXPRESSED IN HELA, SIGNAL =   1; EXPRESSED IN ADULT LIVER, SIGNAL = 1.3; EXPRESSED IN FETAL LIVER, SIGNAL = 2.3; EXPRESSED IN LUNG, SIGNAL = 1.2; EXPRESSED IN BRAIN, SIGNAL = 1.4; EXPRESSED IN HEART, SIGNAL = 1.5; EXPRESSED IN PLACENTA, SIGNAL = 2.4; EXPRESSED IN HBL100, SIGNAL = 1.1
ccatttctccatattttccaagaaaacttttatctccagacatacttccttccctcaagttcagccaaaaatagcagataaaatgactgcatcatgattcttaacagcccatcaaagaaaagttactgcatcacttcttaggcattggttttcaaaccagtaatacactaattctggtagactctatggaacaggaaattatattttcttaatgctgtttttgcttcaaaaatagttgccattcttatctgctgacataggaataaatgtgtagaaacaaagtcaagaaaacttatgtgcaatttccattaataggctctccatagcagggaagaaaggaccaaagccaagaacagccatcaatatatttttcagtgatgctgaatcaggaattggtaatatgagaggtttacttagcttaatttttaattgaggattatgatattgtggttcatttggagaaagctt

SEQ ID NO: 993 - DNA, 461 bp, Homo sapiens
  MAP TO AF130342.1; EXPRESSED IN BT474, SIGNAL = 4.6; EXPRESSED IN FETAL LIVER, SIGNAL = 5.7; EXPRESSED IN LUNG, SIGNAL = 4.9; EXPRESSED IN HELA, SIGNAL =  13; EXPRESSED IN ADULT LIVER, SIGNAL =   5; EXPRESSED IN HEART, SIGNAL =   2; EXPRESSED IN PLACENTA, SIGNAL =   4; EXPRESSED IN BRAIN, SIGNAL = 5.5; EXPRESSED IN BONE MARROW, SIGNAL = 2.6; EXPRESSED IN HBL100, SIGNAL = 5.9
actgtgagacaaaccccagccacatctccagcacacaagaacttccaaatgcctgaaccgcagcggccaggcgttcctctagaacctcctcctccaggagcttgctacaagtgccagaaatctgaccaccaaggcaaggaacgcctgcagcccaggattcctcttaagccgtatcccatctgtgcgggaccccactggaaatcggactgttcaactcacctggcagccactcccagagcccctggaactctggcccaaggctctctgactgactccttctcggcttagcggctgaagactgacactgcccgatcgcctcggaagccccgtagaccatcatggacgccgagcttcaggtaactctcacagtggaaggtaagtccgtccccttcttaatcaatacggagcctacccactccacattaccttcttttcaagggcctgtttcccttgcctccata

SEQ ID NO: 994 - DNA, 461 bp, Homo sapiens; identical to SEQ ID NO: 993
  MAP TO AF130342.1; EXPRESSED IN BT474, SIGNAL = 9.7; EXPRESSED IN BONE MARROW, SIGNAL = 5.3; EXPRESSED IN HBL100, SIGNAL =  12; EXPRESSED IN FETAL LIVER, SIGNAL = 7.7; EXPRESSED IN HELA, SIGNAL =  13; EXPRESSED IN ADULT LIVER, SIGNAL =   7; EXPRESSED IN BRAIN, SIGNAL = 8.6; EXPRESSED IN PLACENTA, SIGNAL =  30; EXPRESSED IN HEART, SIGNAL = 3.5; EXPRESSED IN LUNG, SIGNAL = 9.1

SEQ ID NO: 995 - DNA, 409 bp, Homo sapiens
  MAP TO AF130342.1; EXPRESSED IN HBL100, SIGNAL = 0.66; EXPRESSED IN PLACENTA, SIGNAL = 1.8; EXPRESSED IN BT474, SIGNAL = 0.63; EXPRESSED IN BONE MARROW, SIGNAL = 0.72; EXPRESSED IN LUNG, SIGNAL = 0.91; EXPRESSED IN HELA, SIGNAL = 0.76; EXPRESSED IN ADULT LIVER, SIGNAL = 0.79; EXPRESSED IN BRAIN, SIGNAL = 1.1; EXPRESSED IN FETAL LIVER, SIGNAL = 0.72; EXPRESSED IN HEART, SIGNAL =   1
aaaaagttacacctatttgctttattgaaattaatatataacaagaattattgcaataaactatttcataggccactgactcccccaatccaggtaggcagtgaggagtgcagatgcaagccagctctacagtgaaagatatttatgccatgttgatttgtaaatcctgttcttcagccctgctgctgtgacccagaaaaagactcctaagcaacctgattttcctcctattttctttttactggtgggcgggggtgaggaatgaaaacatacctccttccccttcaccattctgttttgatccaggaggttgggaacacattttccctgaggattcttcctgacccttctgtagaccctctgcatccttaatttgggtcatgacccaaggaagggagccagtgatcta

SEQ ID NO: 996 - DNA, 459 bp, Homo sapiens
  MAP TO AF124731.2; EXPRESSED IN ADULT LIVER, SIGNAL = 6.1; EXPRESSED IN HELA, SIGNAL = 6.2; EXPRESSED IN PLACENTA, SIGNAL = 6.2; EXPRESSED IN BT474, SIGNAL = 4.6; EXPRESSED IN BONE MARROW, SIGNAL = 5.6; EXPRESSED IN HBL100, SIGNAL = 5.4; EXPRESSED IN LUNG, SIGNAL = 6.3; EXPRESSED IN BRAIN, SIGNAL = 5.4; EXPRESSED IN HEART, SIGNAL = 3.8; EXPRESSED IN FETAL LIVER, SIGNAL = 5.1
ttgctcccgttcctaacaagttcttcagctccatctgaggtcacctcagcctgcttcttattgttcatatcactatcagcatttttgtcaaagccattcaacaaatctctaggaggtttcaaactttcctacattttcctgtcttcttctgagccctctaaactgttccaacctctgcctgttacccagttccaaagttgcttccacattttcaggtatcttttcagcaacaccccactcctggtaccaacttactgtattagtccattttcacactgctgataaaggcatacctgagactaggaagaaaaaaaggtttaattggacttacagttccacatggctggggaagcctcaaaatcatggtgggaggcaaaagccacttcttacctggtggtggcaagagaaaaatgaggaagatgcaaaagtggagactcctgataaaaccatcagctctca

SEQ ID NO: 997 - DNA, 906 bp, Homo sapiens
  MAP TO AF111170.3; EXPRESSED IN LUNG, SIGNAL = 1.7; EXPRESSED IN ADULT LIVER, SIGNAL = 1.1; EXPRESSED IN BRAIN, SIGNAL = 1.2; EXPRESSED IN HEART, SIGNAL = 0.84; EXPRESSED IN PLACENTA, SIGNAL = 0.96; EXPRESSED IN BT474, SIGNAL = 2.1; EXPRESSED IN BONE MARROW, SIGNAL = 1.3; EXPRESSED IN HBL100, SIGNAL = 1.1; EXPRESSED IN FETAL LIVER, SIGNAL = 1.6; EXPRESSED IN HELA, SIGNAL = 2.2
taggttgttgctcctgagggtgccacggggctgccaggctgtcccccgcccccagctgggcgactacgcggacagtggtgtggcctctctctcctgagatgctaggttgttgctcctgagggtgccacggggctgccaggctgtcccccgcccccagctgggcgactacgcggacagtggtgtggcctctctctcctgagatgctaggttgttgctcctgagggtgccacggggctgccaggctgtcccccgcccccagctgggcgactacgcggacagtggtgtggcctctctctcctgagatgctaggttgttgctcctgagggtgccacggggctgccaggctgtcccccgcccccagctgggcgactacgcggacagtggtgtggcctctctctcctgagatgctaggttgttgctcctgagggtgccacggggctgccaggctgtcccccgcccccagctgggcgactacgcggacagtggtgtggcctctctctcctgagatgctaggttgttgctcctgagggtgccacggggctgccaggctgtcccccgcccccagctgggcgactacgcggacagtggtgtggcctctctctcctgagatgctaggttgttgctcctgagggtgccacggggctgccaggctgtcccccgcccccagctgggcgactacgcggacagtggtgtggcctctctctcctgagatgctaggttgttgctcctgagggtgccacggggctgccaggctgtcccccgcccccagctgggcgactacgcggacagtggtgtggcctctctctcctgagatgctaggttgttgctcctgagggtgccacggggctgccaggctgtcccccgcccccagctgggcgactacgcggacagtggtgtggcctctct

SEQ ID NO: 998 - DNA, 906 bp, Homo sapiens; identical to SEQ ID NO: 997
  MAP TO AF111170.3; EXPRESSED IN BONE MARROW, SIGNAL = 1.8; EXPRESSED IN ADULT LIVER, SIGNAL = 1.3; EXPRESSED IN PLACENTA, SIGNAL = 4.7; EXPRESSED IN HEART, SIGNAL = 1.4; EXPRESSED IN BRAIN, SIGNAL = 1.8; EXPRESSED IN HELA, SIGNAL = 2.1; EXPRESSED IN LUNG, SIGNAL = 4.1; EXPRESSED IN FETAL LIVER, SIGNAL = 2.9; EXPRESSED IN HBL100, SIGNAL = 1.9; EXPRESSED IN BT474, SIGNAL = 3.9

SEQ ID NO: 999 - DNA, 906 bp, Homo sapiens; identical to SEQ ID NO: 997
  MAP TO AF111170.3; EXPRESSED IN LUNG, SIGNAL = 2.8; EXPRESSED IN PLACENTA, SIGNAL = 1.3; EXPRESSED IN HBL100, SIGNAL = 1.7; EXPRESSED IN FETAL LIVER, SIGNAL = 2.8; EXPRESSED IN BRAIN, SIGNAL = 2.3; EXPRESSED IN BT474, SIGNAL = 3.2; EXPRESSED IN BONE MARROW, SIGNAL = 1.7; EXPRESSED IN HELA, SIGNAL = 1.7; EXPRESSED IN ADULT LIVER, SIGNAL = 1.3; EXPRESSED IN HEART, SIGNAL = 1.8

SEQ ID NO: 1000 - DNA, 483 bp, Homo sapiens
  MAP TO AF111170.3; EXPRESSED IN FETAL LIVER, SIGNAL = 2.7; EXPRESSED IN LUNG, SIGNAL = 2.2; EXPRESSED IN ADULT LIVER, SIGNAL =   2; EXPRESSED IN BRAIN, SIGNAL = 3.8; EXPRESSED IN HEART, SIGNAL = 2.2; EXPRESSED IN PLACENTA, SIGNAL = 1.2; EXPRESSED IN BT474, SIGNAL = 4.9; EXPRESSED IN BONE MARROW, SIGNAL = 1.6; EXPRESSED IN HELA, SIGNAL = 2.6; EXPRESSED IN HBL100, SIGNAL =   6
gtcttgttcaacctggaccgggtgttcaaaccagaccgggaaggtgttactggatccgtctgacatgaacttggtcaagttctgagccagaaccaccccgagccgcttgagctcaatcttcacgctgtactcagccttcccagagctggagccatacaggcccagccctgcaataaatacccttctgtccactgcaaactggatgctgtcgcagcgcccgcggtaccgccactggttgctgcggtaggcagaagactggaatcggtggcacctctgcggggcgaggcccttcctcttggtcaggggaaagtccaggcggggcttgttggtggccgtgtaccacaggaagatgctgtgggtctcctccagagtcaggatgtctgactgggcagcgccgttggcaaactcctctagggtcatggttggaattcggaccagatagagggctcgccccagaacatgcctcttgtttcgtggggtgat

SEQ ID NO: 1001 - DNA, 458 bp, Homo sapiens
  MAP TO AC009315.1; EXPRESSED IN BT474, SIGNAL =   2; EXPRESSED IN BONE MARROW, SIGNAL =   2; EXPRESSED IN FETAL LIVER, SIGNAL = 1.6; EXPRESSED IN LUNG, SIGNAL = 1.5; EXPRESSED IN HELA, SIGNAL = 1.3; EXPRESSED IN ADULT LIVER, SIGNAL = 1.8; EXPRESSED IN PLACENTA, SIGNAL = 2.4; EXPRESSED IN HEART, SIGNAL = 1.7; EXPRESSED IN BRAIN, SIGNAL = 1.8; EXPRESSED IN HBL100, SIGNAL = 1.8
tgggaccttgtgatcatgtgagttaacacttaataaattctgcatatatatatatatatatgtgtgtgtgtgtgataaatttgcataagaaccatgagacatcacttttactgtgatacacaatttactgaaaagagtaattattttaaagacatttatttacatttttagaaggggatttgagaaacataaaaacatgacagagcactccataggtcactttacacactaaaatatatatagtgaaacccttcactataaatatctctattacccaccccctcaacccttttgcagtatccaaaatctctttcgtgatttctttgactggctctgtcataaatcgtttgaagtcatacacaacatctcgacacagatttttccagcagaaattcattgtttcaggcttgatgaatatcacggcttgttttttttaaacaatggtggcatcttcaatc

SEQ ID NO: 1002 - DNA, 489 bp, Homo sapiens
  MAP TO AC009309.1; EXPRESSED IN BT474, SIGNAL = 2.5; EXPRESSED IN BONE MARROW, SIGNAL = 4.3; EXPRESSED IN HELA, SIGNAL = 2.3; EXPRESSED IN ADULT LIVER, SIGNAL = 2.5; EXPRESSED IN BRAIN, SIGNAL = 3.2; EXPRESSED IN PLACENTA, SIGNAL = 4.6; EXPRESSED IN FETAL LIVER, SIGNAL = 3.2; EXPRESSED IN LUNG, SIGNAL = 2.9; EXPRESSED IN HEART, SIGNAL = 2.4; EXPRESSED IN HBL100, SIGNAL = 2.5
gctggtctgtatatgcttgcctctgttatattaaaaaataataataatatatatagagagaaaatactagtttcacatatgccctacttttttccatgaaggattctaggcgggtcacagtagagggacttgcacaacgagggtcacacatggagtagagggtgggtgactcccacaggaggcatcacccgcagcccggcattggtggccttgccctctgcaggtgatcatcagggaaggggagctgctctgcggagtgctggacaaggcgcactatgggagctccgcctacggcctggtccactgctgctatgagatctatggaggcgagaccagcggcaaggttctaacctgcctggcccgcctcttcaccgcctacctgcagctctacagaggcttcaccttgggtaagtgccgggctcgctgccctggggcagtgacccgtcagcgcagccgcctggccatctcccaggcccaggacagagagag

SEQ ID NO: 1003 - DNA, 466 bp, Homo sapiens
  MAP TO AC009309.1; EXPRESSED IN HEART, SIGNAL = 2.3; EXPRESSED IN FETAL LIVER, SIGNAL = 1.7; EXPRESSED IN LUNG, SIGNAL = 2.5; EXPRESSED IN BRAIN, SIGNAL = 3.1; EXPRESSED IN PLACENTA, SIGNAL = 2.1; EXPRESSED IN BONE MARROW, SIGNAL = 2.4; EXPRESSED IN HBL100, SIGNAL = 2.6; EXPRESSED IN ADULT LIVER, SIGNAL = 2.1; EXPRESSED IN BT474, SIGNAL = 2.4; EXPRESSED IN HELA, SIGNAL = 3.3
tagagccaggatcagggttgtaaagggccaggaccagaagggcctaggacgtatttctcagagatttccagggttttgctccagatgaaaaattccccttgcatttagttaactagaacgtgagacaaaagccacaccttggtcaagctgaggtgagcacttggaaagagccgtggtgatactgacgtttgcactgatcacccacctgtccactctgttcccaggtgtgccggcatgtgaagaatggggacattctgctactgaaccgacagcccacactgcacagaccctccatccaggcccaccgtgcccgcatcctgcctgaagagaaagtgctgcggctccactatgccaactgcaaggcctataatgccgactttgatggagacgagatgaatgcccatttcccccagagtgagctgggccgggccgaggcctacgtcctggcctgcactgatcagcagta

SEQ ID NO: 1004 - DNA, 488 bp, Homo sapiens
  MAP TO AC009309.1; EXPRESSED IN BT474, SIGNAL = 1.8; EXPRESSED IN LUNG, SIGNAL = 1.7; EXPRESSED IN HELA, SIGNAL = 2.8; EXPRESSED IN ADULT LIVER, SIGNAL = 1.7; EXPRESSED IN BRAIN, SIGNAL = 1.6; EXPRESSED IN PLACENTA, SIGNAL = 1.4; EXPRESSED IN BONE MARROW, SIGNAL = 1.2; EXPRESSED IN HBL100, SIGNAL = 2.3; EXPRESSED IN FETAL LIVER, SIGNAL = 1.9; EXPRESSED IN HEART, SIGNAL = 1.7
gggttctcggtgtctctgacactcacctatagcctgtcagttttgaaatcagaaaaagggaccctgcagttgcattaaactatattagaaacaaaaagcttctaacagtcaaatctataggctttcctgacttgcatgacaaatgaaatagtcattaaattactacattctgactttttgaaaggaaatagaagggatagaaagctatgaacattttgaatgggcagatggatgaaaggtctccattttacaaactatgcttcatggtgaccacttacttttgttcctggttgattgcaaaatcactcattactctctgggtgaggccctcacaaataggtaagctgaaggcacttgccagctctactacttcaatggcctgggaagggctgttagacacttttgcactgtccataagctcattcagcaactcacttctgtaaaagaaaggcaaagtgtgaactttctccagccccttcagtaaaaca

SEQ ID NO: 1005 - DNA, 465 bp, Homo sapiens
  MAP TO AC009309.1; EXPRESSED IN BT474, SIGNAL = 5.6; EXPRESSED IN BONE MARROW, SIGNAL = 2.2; EXPRESSED IN HBL100, SIGNAL = 6.5; EXPRESSED IN HELA, SIGNAL = 3.7; EXPRESSED IN ADULT LIVER, SIGNAL =   3; EXPRESSED IN BRAIN, SIGNAL = 2.5; EXPRESSED IN PLACENTA, SIGNAL = 3.4; EXPRESSED IN HEART, SIGNAL = 5.1; EXPRESSED IN LUNG, SIGNAL = 2.4; EXPRESSED IN FETAL LIVER, SIGNAL = 5.5
gggttcctggaaaacaactgattatctgaaggcctacctgaattttgccaggggttgaaaataccttattggacactagccaatttctgattgaactggggaatctaaatctcttttcatgttagctaagttttactttcgtttactgctcttaaattataatcagttgatgcagattaccttgtaatgaggtataatttcagtgacatcattaatattttaacatgctcttttgcttagctgacaagctctctactgatgatctgaactccctcattgctcatgcacatcgtcgtattgatcagctgaacagagagctggcagaacagaaggccaccgaaaagcagcacatcacgttagccttggagaaacaaaagctggaagaaaagcgggcatttgactctgcagtagcaaaagcattagaacatcacagaagtgaaatacaggctgaacaggacagaaagg

SEQ ID NO: 1006 - DNA, 369 bp, Homo sapiens
  MAP TO AC009309.1; EXPRESSED IN HELA, SIGNAL = 1.8; EXPRESSED IN ADULT LIVER, SIGNAL = 0.83; EXPRESSED IN PLACENTA, SIGNAL = 1.4; EXPRESSED IN BONE MARROW, SIGNAL = 1.2; EXPRESSED IN HBL100, SIGNAL = 2.1; EXPRESSED IN LUNG, SIGNAL = 0.99; EXPRESSED IN BRAIN, SIGNAL = 0.73; EXPRESSED IN HEART, SIGNAL = 1.1; EXPRESSED IN BT474, SIGNAL = 1.2; EXPRESSED IN FETAL LIVER, SIGNAL = 1.4
gagatgatttaaagtatatgggagggtatacataggttatatgcaaacactgtaacattttatatctgagacttgagcatccatgggatttttgtatccacaggaggtcctgaacctctccttcaagaataccaaaagacaactgtattttcaacatgaaaacaacttgcttttaaagtatttcattggataaactgaaatattgtttaaaactcttaccgatttctttggcaatggaacattataagctgcaggaccaagaaccatctcgaagagtttgtctgagtaaggtatggttttctctacactttcccggaaatgggaatcccatttggcatataggatagtgccaccaatacctccaccaac

SEQ ID NO: 1007 - DNA, 474 bp, Homo sapiens
  MAP TO AC009309.1; EXPRESSED IN PLACENTA, SIGNAL = 1.3; EXPRESSED IN BONE MARROW, SIGNAL = 1.2; EXPRESSED IN HBL100, SIGNAL = 4.8; EXPRESSED IN BRAIN, SIGNAL = 2.5; EXPRESSED IN BT474, SIGNAL = 3.6; EXPRESSED IN FETAL LIVER, SIGNAL = 3.7; EXPRESSED IN LUNG, SIGNAL = 1.7; EXPRESSED IN HELA, SIGNAL = 4.1; EXPRESSED IN ADULT LIVER, SIGNAL = 2.4; EXPRESSED IN HEART, SIGNAL = 2.7
cagatggagagaaaaatgtttggctttgcctttttttctttgtaggccatgcagttgctgaagaggaagccagaaaagcccaccaactctggctttcagtggaggcattaaagtacagcatgaagacctcatctgcagaaacacctactatcccgctgggtagtgcagttgaggccatcaaagccaactgttctgataatgaattcacccaagctttaaccgcagctatccctccagagtccctgacccgtggggtgtacagtgaagagacccttagagcccgtttctatgctgttcaaaaactggcccgaagggtagcaatgattgatgaaaccagaaatagcttgtaccagtacttcctctcctacctacagtccctgctcctattcccacctcagcaactgaagccgcccccagagctctgccctgaggatataaacacatttaaattactgtcatatgcttcctattgca

SEQ ID NO: 1008 - DNA, 492 bp, Homo sapiens
  MAP TO AC009305.1; EXPRESSED IN BT474, SIGNAL = 2.5; EXPRESSED IN HELA, SIGNAL = 0.66; EXPRESSED IN PLACENTA, SIGNAL = 0.77; EXPRESSED IN HEART, SIGNAL = 1.3
gctgcctgatctaaagtggcctgtccctccgtcctcatatcctgttttattgttactatggcatttgtccatgtctgggcttttcttgtttgttcatctgtcctccactgagagcagattcttgtccatcatattcaaccccagaacccagcatagcgcctaccccattcaactttgctgcacaaatgaataaacaagtgaatgaacagaaagaacactaaccctgtagttcccaacctctaggggcccttgaatgtcataacaggtcactgcaagctattttcaatatattccaaagcctaacaggcttcatttgtttgcttatccttgataaagtcccacaggagaaacaaaatgtcacatttctttgcctttgactggaatgatatcaactcagcattaccggtccccatgctaatcagaaactgtaattagaaaatatattttgattattaaaagtggaaaaacaaaagcatcataacatcagagcca

SEQ ID NO: 1009 - DNA, 454 bp, Homo sapiens
  MAP TO AC009304.1; EXPRESSED IN FETAL LIVER, SIGNAL = 2.7; EXPRESSED IN LUNG, SIGNAL =   2; EXPRESSED IN BRAIN, SIGNAL = 1.4; EXPRESSED IN HEART, SIGNAL = 1.9; EXPRESSED IN BONE MARROW, SIGNAL = 1.6; EXPRESSED IN PLACENTA, SIGNAL = 1.4; EXPRESSED IN BT474, SIGNAL = 4.4; EXPRESSED IN ADULT LIVER, SIGNAL = 3.1; EXPRESSED IN HELA, SIGNAL = 4.9; EXPRESSED IN HBL100, SIGNAL = 4.4
tgcatttgcagctgattttgaatgataagacccaaaacctctggaggcggcaggtgcacgggaatgaactaaatgttaaagtgtgcctattacaggaggagctacagctgctgcaggaataggactcctgtgtcagggaagtagtccaggccatgggtaagaagaaagtgttggtcaaggtgcatctcaaggacaagtttgtcatagatgtggacaaaaatatcagcatcagtgatgtgacacccagttccttggtggttctaagaaatgacagctacactttgcacaagatcctacccaacaaggtggactcattggtgtcactgatgatggtgaagaaagtaccagattcagcttatgaaatgattggtagactggataggcagatcaagaagatcaaagaagtgatcgacctgcctgctaagcatcccgagctcttcaaagcactgggcat

SEQ ID NO: 1010 - DNA, 449 bp, Homo sapiens
  MAP TO AC009304.1; EXPRESSED IN BT474, SIGNAL = 1.6; EXPRESSED IN HBL100, SIGNAL = 1.5; EXPRESSED IN LUNG, SIGNAL = 1.6; EXPRESSED IN HELA, SIGNAL = 1.4; EXPRESSED IN BRAIN, SIGNAL = 1.3; EXPRESSED IN PLACENTA, SIGNAL = 2.1; EXPRESSED IN FETAL LIVER, SIGNAL = 1.4; EXPRESSED IN HEART, SIGNAL = 1.6; EXPRESSED IN BONE MARROW, SIGNAL = 1.8; EXPRESSED IN ADULT LIVER, SIGNAL = 1.2
agaagagtccaaacatctggcatctcatctgtctctaatgtagtccctggttacctttatttctctttggatatagtgattgagaggatcagttcttctgggtgatttttgctggtgtctttattttgtttgtggttattgggaactctcataactaagaaagttgcatttagatgacctgtttgcagttgtagaataatgatttggtatgtaaatctcataatagggccttcatcttctgtcatgcctaacagatctgacttggtggttggagtaatttttctaccaacaaaaaacccaaaaatctcacctgtatttttcctgccaattggtgtattcaccagtctcaggtttaggatcagtccctttttgtttgtggttggtttctaggaggaaacaatgtacaaatactgagttaaaagtagggttgggccactggagatacaaag

SEQ ID NO: 1011 - DNA, 464 bp, Homo sapiens
  MAP TO AC009299.1; EXPRESSED IN PLACENTA, SIGNAL = 0.99; EXPRESSED IN LUNG, SIGNAL = 0.84; EXPRESSED IN BRAIN, SIGNAL = 1.4; EXPRESSED IN BT474, SIGNAL = 1.7; EXPRESSED IN HBL100, SIGNAL = 2.6; EXPRESSED IN FETAL LIVER, SIGNAL = 1.4; EXPRESSED IN HELA, SIGNAL = 3.3; EXPRESSED IN ADULT LIVER, SIGNAL = 1.6; EXPRESSED IN BONE MARROW, SIGNAL = 0.76; EXPRESSED IN HEART, SIGNAL = 1.6
ggctttgagtatggtttaactttcctaattttatgaaattcaaaaaatttaaagataaatattcaggaaaattacacaataagtgattaaagaagaaatctctaaataaattgctaataataccaagacacagttatcaacttgtacagtttttttgttttttaagtaaacagacagcagctttctgtgtaattaagaatcctgctttgaacaaaattgatttttatttaatgtatctgtaaacagaatgtggcagtagatggcaataaagatagaatctactctacctttccttttacactctgaatgggatccacaaccactgccacagctctctccgacaaggcttcaaagctctgctgagtgttgatatccacaccagaaagccaacaaccaaagccagggtgactgtgataccaaccaacaaccatctccggcctgaaacaaagagggcattcagatgc

SEQ ID NO: 1012 - DNA, 483 bp, Homo sapiens
  MAP TO AC009299.1; EXPRESSED IN BRAIN, SIGNAL = 1.9; EXPRESSED IN HELA, SIGNAL = 0.95; EXPRESSED IN ADULT LIVER, SIGNAL = 1.8; EXPRESSED IN BT474, SIGNAL = 7.4; EXPRESSED IN BONE MARROW, SIGNAL = 0.76; EXPRESSED IN HBL100, SIGNAL = 0.8; EXPRESSED IN HEART, SIGNAL =   1; EXPRESSED IN PLACENTA, SIGNAL = 2.4; EXPRESSED IN FETAL LIVER, SIGNAL = 0.94; EXPRESSED IN LUNG, SIGNAL = 1.6
tctcccgtgtcctcctctgaggattcttcagagtcaccacgttcatcaataatataccacatgttcctactgccatcacccagcagctcacccccagctctcggggagtctcctgtgtctcccagctactctccaaacaaccccagatttcagctggagtcagccctccacacccaggaatcacctacaaactcacgagcctcacggtgctcctcccctatgtctttcaactcttcacccccaggcctcagggactctcctgtgtctcccagcttctctccagccttccccagatttctgccacagtcagccccaggcacacaggggaaccctggacactcacaggcctcacgagactatctccctatgacctgtatctatacagggatggctcccacgcatccctcagtgaccccaaacccatctccacttacactcagacactcccagggcctgacagctactccccgttattgtccttca

SEQ ID NO: 1013 - DNA, 464 bp, Homo sapiens
  MAP TO AC009299.1; EXPRESSED IN PLACENTA, SIGNAL = 0.97; EXPRESSED IN BT474, SIGNAL = 1.3; EXPRESSED IN BONE MARROW, SIGNAL = 1.2; EXPRESSED IN HBL100, SIGNAL = 1.1; EXPRESSED IN HELA, SIGNAL = 2.1; EXPRESSED IN FETAL LIVER, SIGNAL = 2.1; EXPRESSED IN HEART, SIGNAL = 0.97; EXPRESSED IN LUNG, SIGNAL = 1.4; EXPRESSED IN ADULT LIVER, SIGNAL = 1.7
gcatgtatggcaaaatgtgtgttcacacataataatatatttgttaatgcaaaacagttacctgctgtggtcctcggattgcttttcccggggaatcgagtgagggaaaaggtgcatcagatgggtccagaagtgggaagctatttacatataatgcattatggtctccaggtggcaaacacgcagctctatccagagttgtcctgatacaagtgtttacgagatttgagggctttgttttgtcagttgttttaaggttttgtatagctgaagctatggggtcaattccctgaatttcaaataaagtttcttctgttttaacaaagttccctgggttgtctctgaactccatattaaatttctcttggcacactgcctcagacgtggcaggactaaggatgccgggtctctctggagtgctatgtaagaaagttgagtcattgtccataggtggaaacttgaca

SEQ ID NO: 1014 - DNA, 385 bp, Homo sapiens
  MAP TO AC009298.1; EXPRESSED IN PLACENTA, SIGNAL = 1.7; EXPRESSED IN LUNG, SIGNAL =   1; EXPRESSED IN BONE MARROW, SIGNAL = 1.4; EXPRESSED IN HBL100, SIGNAL = 1.2; EXPRESSED IN FETAL LIVER, SIGNAL = 1.6; EXPRESSED IN HELA, SIGNAL = 0.71; EXPRESSED IN BRAIN, SIGNAL =   1; EXPRESSED IN BT474, SIGNAL = 1.9; EXPRESSED IN HEART, SIGNAL =   1
tgcagttcatagagtgcatttctattgtagaagttgaatatgggtttcctgaggagcaagttacttgaatatattagacccttcttggtgatgttatttgctgtaacttctcctagattattttacaaattattctacattggatgtaatgttttaaaagtcttatatggtattaaacttgtaacaataaaatccattggcttttagttgccattacccagggaggagcaatacagctggctaacaatggtaccgatggggtacagggcctgcaaacattaaccatgaccaatgcagcagccactcagccgggtactaccattctacagtatgcacagaccactgatggacagcagatcttagtgcccagcaaccaagttgttgt

SEQ ID NO: 1015 - DNA, 473 bp, Homo sapiens
  MAP TO AC009289.1; EXPRESSED IN BT474, SIGNAL = 3.5; EXPRESSED IN FETAL LIVER, SIGNAL = 3.8; EXPRESSED IN LUNG, SIGNAL = 4.3; EXPRESSED IN HELA, SIGNAL = 3.9; EXPRESSED IN ADULT LIVER, SIGNAL = 3.8; EXPRESSED IN BRAIN, SIGNAL = 4.2; EXPRESSED IN HBL100, SIGNAL = 3.1; EXPRESSED IN HEART, SIGNAL = 3.6; EXPRESSED IN PLACENTA, SIGNAL = 3.9; EXPRESSED IN BONE MARROW, SIGNAL = 4.7
tttggagatggagtctttacaggaataattaaacttaaatgaggttactagagtggaccctaatctgatatgattgttgtccttataagaagaggaaatttggctatagacacagagggaagatgatgtgaggagccaaggagaagatacaagtcaatgagagaggcctcagaagaaagcaaccctgccgatacctcaatcttggaatccagaactgttagaaagtaaatctcttttgcttaagccacccagtatctttttgttatgatagctctagcagaacaatacagaggggaaggggaaggttggggtgaagagaaggagaagaaaagaggaggataagaaagacagtaaggaagaggaggggaagagagagagtaagtacttccccttctctcagaggggagatgatgacaagggggaggtgagagttgtgttagtccatttttatgctgctgataaagacattcccg

SEQ ID NO: 1016 - DNA, 463 bp, Homo sapiens
  MAP TO AC009289.1; EXPRESSED IN FETAL LIVER, SIGNAL = 6.6; EXPRESSED IN ADULT LIVER, SIGNAL =  15; EXPRESSED IN BT474, SIGNAL = 1.7; EXPRESSED IN HEART, SIGNAL = 1.2
ggggcaagtcacatcaaaagttgttacaagaaacatatcgggttgcagatggtcatgtgcagtcgcccagagcatccccatccccctactgagttggttggtgggaaggtgggatgcttttcggatgggagtaatattgtttattgcatcctttgtttcagaataatcctcaggtctgcccctacaatctctatgctgagcagctctcaggatcggctttcacttgtccacggagcaccaataagagaaggtacaaggattagatgaattctgacctgcagactgtgggtactatgacagggactttgtgctgcctccttcccctgggccacagcctcccagagctgcccaagatcctgcttcttataggctatggtctgggtcatggtcagaagagaatgaacttcctgccagctagcaccaagtgactggtggaagaaggtgaaggaaagctgcacagagc

SEQ ID NO: 1017 - DNA, 470 bp, Homo sapiens
  MAP TO AC009269.1; EXPRESSED IN FETAL LIVER, SIGNAL =   3; EXPRESSED IN BRAIN, SIGNAL = 3.5; EXPRESSED IN HEART, SIGNAL = 4.4; EXPRESSED IN PLACENTA, SIGNAL = 3.3; EXPRESSED IN BONE MARROW, SIGNAL = 3.2; EXPRESSED IN BT474, SIGNAL = 2.4; EXPRESSED IN ADULT LIVER, SIGNAL = 3.4; EXPRESSED IN HELA, SIGNAL = 5.3; EXPRESSED IN LUNG, SIGNAL = 4.7; EXPRESSED IN HBL100, SIGNAL = 5.6
  unsure 187
  unsure 204
ttcagtctaccttcctccgccagtggggactttctggaaacgcctttgcgttgggccaaggggctgctccaaggacttgtgcacggggaggcatttggactcagaaagagattctggtggccagacgggctgagcttgttggtggccgcgtgccgtcggcccgccataggggatgtggggttgctcntcggggtcagaggagcntgttggcagaagactcatcacccatgtactgaagctcctcgactctcttgttcagggacttgttcaggtggatgctcgcagtgggctcctcgtcatgatttttgtctttggcaggtttctttttgggtggcttcataccaatcaggacagctttcatgttctctttgccctgagattctgtgatcatgaactcatgggctttgatggctgcttccacctcctcgaactccacgatggcgcactcctgggtccccacttggctgtag

SEQ ID NO: 1018 - DNA, 414 bp, Homo sapiens
  MAP TO AC009269.1; EXPRESSED IN PLACENTA, SIGNAL =  10; EXPRESSED IN FETAL LIVER, SIGNAL =  76; EXPRESSED IN LUNG, SIGNAL =  26; EXPRESSED IN HELA, SIGNAL =  49; EXPRESSED IN BT474, SIGNAL =  48; EXPRESSED IN BONE MARROW, SIGNAL =  18; EXPRESSED IN HBL100, SIGNAL =  85; EXPRESSED IN ADULT LIVER, SIGNAL =  26; EXPRESSED IN BRAIN, SIGNAL =  17; EXPRESSED IN HEART, SIGNAL =  30
  unsure 24
  unsure 44
  unsure 47
  unsure 54
  unsure 77
  unsure 190
  unsure 195
aattcagtgttttaggccaatgtnctgggtttatttttcccaancantataaantatgaaggagctttagcaatttnaacttctgggaatttatccaatgaaagggttaagaatttatgcaagctcttctggttctaggagctttgggagccatggcttacggtgcagacatggccaagtccaagaaccnacaancacacatgaccagttccaaaaacggcacagaaatggtatcaagaaacctcagtcacaaagatcggtgtctctaaagggggtggatcccaaattcctgaggaacatgccctttgccaagaagcacagcaagaagggcctaaagaagatgcaggccaacagtgccaaggccatgagtgcacgtgccaaggctatcaaggccctcgtaaagcccaaggaggt

SEQ ID NO: 1019 - DNA, 398 bp, Homo sapiens
  MAP TO AC009238.1; EXPRESSED IN LUNG, SIGNAL = 1.5; EXPRESSED IN FETAL LIVER, SIGNAL = 1.1; EXPRESSED IN ADULT LIVER, SIGNAL = 1.4; EXPRESSED IN BRAIN, SIGNAL = 2.1; EXPRESSED IN HEART, SIGNAL = 1.4; EXPRESSED IN PLACENTA, SIGNAL = 2.1; EXPRESSED IN BT474, SIGNAL = 0.89; EXPRESSED IN BONE MARROW, SIGNAL =   1; EXPRESSED IN HBL100, SIGNAL = 1.2; EXPRESSED IN HELA, SIGNAL = 1.7
ctggtccacactgagacgtgccctcgtgtaaacacacactgggttccaaacatttacttactagactatcaaatagttcattaaaaatgctttatatcaattgcaggttgaaatgataatcatttacactgggtttaataaaacatatggttaaaataatttaacctttttttctttctttactgtgcctactggcacattttaagtgacatctgtggcttgcatcatgtctctattggacaggactgatccggatggttctcagacctgccagccggcaggcttggggcagcatcctcctggcagggcacagccgccccagctgctctctgccactcaagtccagctggactcgcagctgcctcagaagggtggcctggtggaatgtgcagatcaga

SEQ ID NO: 1020 - DNA, 469 bp, Homo sapiens
  MAP TO AC009238.1; EXPRESSED IN PLACENTA, SIGNAL = 6.8; EXPRESSED IN LUNG, SIGNAL = 1.8; EXPRESSED IN HELA, SIGNAL = 1.4; EXPRESSED IN BT474, SIGNAL = 1.3; EXPRESSED IN HBL100, SIGNAL = 1.3; EXPRESSED IN FETAL LIVER, SIGNAL = 1.9; EXPRESSED IN BRAIN, SIGNAL = 3.3; EXPRESSED IN BONE MARROW, SIGNAL =  62; EXPRESSED IN ADULT LIVER, SIGNAL = 1.9; EXPRESSED IN HEART, SIGNAL = 1.4
ctggctctgtcttcctagccaactggaaaaccgcagtgtggtcccagctctctgtacccatgctctgtgggtcccactgggagctcagtggcctgtgtgaagcaggcactcaatgaatggggaagggtgtgaatgaatgaaaacacacctccaatagagacaggggcgatgtagcccaggctggggtcccaggctggcctttgagccctcagaaaggacagtgctcagaacagatctccccacccccacccttgaccacagcccaccctggcccctacctgagccctgtggggctgtgctggacaggatccacttgaccaggcagcatctcatcaaagcctggcggctgagcctcggcctctgccacttgataccctccttcttgctaagtggtgtgtgcccgaggtcccccaggaggctgccgtccgacgcctttgtcacttcctgcagtaggaacaggcagagcagc

SEQ ID NO: 1021 - DNA, 470 bp, Homo sapiens
  MAP TO AC009238.1; EXPRESSED IN ADULT LIVER, SIGNAL = 2.2; EXPRESSED IN BRAIN, SIGNAL = 1.6; EXPRESSED IN BT474, SIGNAL = 1.7; EXPRESSED IN HBL100, SIGNAL = 4.3; EXPRESSED IN FETAL LIVER, SIGNAL = 1.8; EXPRESSED IN HELA, SIGNAL = 1.7; EXPRESSED IN HEART, SIGNAL = 1.6; EXPRESSED IN PLACENTA, SIGNAL = 0.93; EXPRESSED IN BONE MARROW, SIGNAL = 1.8; EXPRESSED IN LUNG, SIGNAL = 0.95
gcagtgggattatgggtgacataattttttaatgtttatctctattttattatctacagtgaaggtgcattgcttttgtaaccaggaaaacacgtacattaactttttttttccaaggccagtgttactactgtgtgtacaatcctgtagagtttctgctgaatgcgctattgagcgagaggtggctccagtaggctcaatactgagctcagaatgcccttgtgatgggcccagtgactagggagggcagtggggagacactgacctggctctgtggtgggaggaccacctcatcatagggccccacgatggagctggcaaacttgctgaagatgatgggctccttgggcacgggcacgttctgttctttgcagtggtccacataattcatgcccacacacaccaccttatctggtcgtgtgactggagccaggaaggttacctccgaccgtggtaggactggcaactgg

SEQ ID NO: 1022 - DNA, 459 bp, Homo sapiens
  MAP TO AC009238.1; EXPRESSED IN HEART, SIGNAL =   1; EXPRESSED IN BONE MARROW, SIGNAL = 0.93; EXPRESSED IN LUNG, SIGNAL = 0.93; EXPRESSED IN HELA, SIGNAL = 1.6; EXPRESSED IN ADULT LIVER, SIGNAL =   2; EXPRESSED IN BRAIN, SIGNAL = 2.3; EXPRESSED IN PLACENTA, SIGNAL = 0.73; EXPRESSED IN BT474, SIGNAL = 1.6; EXPRESSED IN HBL100, SIGNAL = 3.3; EXPRESSED IN FETAL LIVER, SIGNAL = 1.6
cacccatcagctcagtgttctttgtaatttacttcacgcatgcagtttcacatcctctgcagttgtgttccctctagggggcttgggaaggaagcccatgggagaactcgtggctgaggataagagacttgccctgtatggagtcagcagtgaaagggcggccagggagggcaggtgccacatgtacctgaacccatgctcctccctgaagcgctgttcatctgtgcaatggtaggtataagggggcagggaccagggacctacctgctacactgtccttggtcaccaaggcagggcccagagggcagaaggtgtcgaaggtttttcccagcagccattgtttcccattacgtctcatttgccagtcacgagcactcacgtcatgagccacagtgaagccggccacgtgggccatagcatctgtggcctatgggggcaggggatttggccatacaggag

SEQ ID NO: 1023 - DNA, 458 bp, Homo sapiens
  MAP TO AC009229.1; EXPRESSED IN BT474, SIGNAL = 0.93; EXPRESSED IN BONE MARROW, SIGNAL = 0.71; EXPRESSED IN PLACENTA, SIGNAL = 1.5; EXPRESSED IN HEART, SIGNAL = 1.3; EXPRESSED IN BRAIN, SIGNAL = 0.82; EXPRESSED IN HELA, SIGNAL = 1.1; EXPRESSED IN LUNG, SIGNAL = 1.1; EXPRESSED IN FETAL LIVER, SIGNAL = 0.82; EXPRESSED IN HBL100, SIGNAL = 0.81; EXPRESSED IN ADULT LIVER, SIGNAL = 0.97
ttaccattgggagaaactgggtacaggacacacaagatttctctgtattatttcttacaagtgtttatgaatctataatagtttccaaataagaagttttttatgtatcacattcctttttatagcagactcttgacatttgagaataatatgtccaaaccttcaagaatcctcaaatactggaaagagggcatgtttgcataggctttctctcacatcacacttcctgtagcatcatgcatttcctgtacacatcctcataccacctcatcacatttcagcttttactggtgcttcctcctccctttatgttcgttttccacaacaccatcctcattcctccagagctactagacacagagaaaatcaagagcctggtgctgctgcagggagcaggtgccaggtcccgggctgctacaatccgtgcctcagtaaaatgccaaattaccaccaagcat

SEQ ID NO: 1024 - DNA, 409 bp, Homo sapiens
  MAP TO AC009228.2; EXPRESSED IN HELA, SIGNAL = 2.4; EXPRESSED IN BRAIN, SIGNAL = 2.3; EXPRESSED IN HEART, SIGNAL = 1.9; EXPRESSED IN BT474, SIGNAL =   3; EXPRESSED IN BONE MARROW, SIGNAL = 2.5; EXPRESSED IN HBL100, SIGNAL =   2; EXPRESSED IN LUNG, SIGNAL = 2.3; EXPRESSED IN ADULT LIVER, SIGNAL = 2.1; EXPRESSED IN PLACENTA, SIGNAL = 2.3; EXPRESSED IN FETAL LIVER, SIGNAL = 2.1
aaaaatgatggtcccagtgccaggaaaaaatcaggtctacataaaggcaacacaaaacaatcggaaaattctctgccgttttggtgtttcctttggaaactgatggggatgcccttctccattgctgggattccctgttgggctactgtgtgctgttgcctccagcctcagaaggagcctgacccgcaaggcccagaatggaattacctttaaaaattctttgaaatctgtgtcttcatctgtcttctgctgtaacagagctgctccattaagctggcagctgcagaacctgatgtaagcctgcatgtgggacagctcagcggccaggatgtccccaatcatctgcaccggcatcttctcgcccccggtcttcttccgcacccgcaaagccctgccaagaacacactct

SEQ ID NO: 1025 - DNA, 448 bp, Homo sapiens
  MAP TO AC009228.2; EXPRESSED IN BONE MARROW, SIGNAL = 1.6; EXPRESSED IN HELA, SIGNAL = 5.5; EXPRESSED IN HBL100, SIGNAL = 2.2; EXPRESSED IN LUNG, SIGNAL = 3.5; EXPRESSED IN ADULT LIVER, SIGNAL =   2; EXPRESSED IN BRAIN, SIGNAL = 2.5; EXPRESSED IN PLACENTA, SIGNAL = 2.7; EXPRESSED IN BT474, SIGNAL = 2.4; EXPRESSED IN HEART, SIGNAL = 1.7; EXPRESSED IN FETAL LIVER, SIGNAL = 2.6
ccaggaggaagccagaatctcagctggaatctggctgatggcctgtggcaggtggggagtgcccagctgcatggggcccttcccgtgggaagcagcaaaggaagcacgagcgatctggaaccaggtgaggagggtcccgtaaggccagctcagggtctgccaggaaggccttaagatagaggcaacacctcattaggcccctgatgctacccccagacgcgtgatactcaccgttttatacattttgaattgagcattggacttcgagctgaaaagtttctcagagccagaggaaacagcaaactgcttgaccatgtaggtaagaagcaggaagtcattgaagaggaatccgtgcagttccttgttgctcttggtcttgtataatttcccactgtgtaagagcttccggggccccaggcagttggtgagagagttgaaaataagttgc

SEQ ID NO: 1026 - DNA, 488 bp, Homo sapiens
  MAP TO AC009228.2; EXPRESSED IN BT474, SIGNAL = 0.99; EXPRESSED IN HELA, SIGNAL = 1.8; EXPRESSED IN PLACENTA, SIGNAL = 2.2; EXPRESSED IN BONE MARROW, SIGNAL = 0.76; EXPRESSED IN FETAL LIVER, SIGNAL = 0.84; EXPRESSED IN LUNG, SIGNAL = 3.8; EXPRESSED IN ADULT LIVER, SIGNAL = 1.1; EXPRESSED IN BRAIN, SIGNAL = 1.1; EXPRESSED IN HEART, SIGNAL = 0.96; EXPRESSED IN HBL100, SIGNAL = 1.1
tgctttggtatacagtaagggcatacttgaatgtttaggtcagattttatttatttaaatttcaacttttagattcgggggtacacatacaggtttgttacacgggtatattggggtacgaggttggggtgctgaggttggggtgcaattgaatctgtcaccctggtagtaagcagagtcccgaataggtcgtttttcaaccctcgccccctcctgcccttcccactcttgtagtcctcagggtctattgttcccatctttatgtgggacacattttaaaagcttaatacagactgcactctggtactcaaagagtctcatttctcttgtaggttacagtcccaccatttgttgatcctctgtttcaaagacagcaagaggtggatgaagagaggagaactggtcttcagtgtgagacaggtgctttgtgatcactgggcctcatttttttgagactgctaattgtccagtgatttctcactccttca

SEQ ID NO: 1027 - DNA, 454 bp, Homo sapiens
  MAP TO AC009228.2; EXPRESSED IN HEART, SIGNAL = 2.9; EXPRESSED IN BONE MARROW, SIGNAL = 3.6; EXPRESSED IN HBL100, SIGNAL = 2.2; EXPRESSED IN FETAL LIVER, SIGNAL = 2.9; EXPRESSED IN LUNG, SIGNAL = 2.9; EXPRESSED IN ADULT LIVER, SIGNAL = 1.7; EXPRESSED IN BRAIN, SIGNAL = 3.5; EXPRESSED IN PLACENTA, SIGNAL = 2.4; EXPRESSED IN BT474, SIGNAL = 2.8; EXPRESSED IN HELA, SIGNAL = 3.8
tttcaccatagccaccacagctaggaatgttctgggtcactgctgaagccagcacatctcagaatccagagcccccagtatactccctgggtatcgctgctgctggttttcagggcccaagggctccttagtcagcaggtgatgaatcctgccagggttgggtccttcccttcaaggcagcagattcccttttggcccagaatgtgtctagaaatgtcgtcccaaagctagggcctggaatggggaccgcaggaccctgcctgctattctatcctgctgtggctgagctggtatccgagatgcaggacaaagtcctctttattcttcactctcctccctttaagcagaaggaaggtgtcacctttggagttgctgcaagctgcactgcctggggttgggagagggatggtgcaagcactcccttagccatgccagctggtgtctccctaggtca

SEQ ID NO: 1028 - DNA, 370 bp, Homo sapiens
  MAP TO AC009228.2; EXPRESSED IN LUNG, SIGNAL = 1.3; EXPRESSED IN HELA, SIGNAL =   2; EXPRESSED IN BRAIN, SIGNAL = 1.9; EXPRESSED IN HEART, SIGNAL = 1.2; EXPRESSED IN PLACENTA, SIGNAL = 1.1; EXPRESSED IN BT474, SIGNAL = 1.2; EXPRESSED IN BONE MARROW, SIGNAL = 1.9; EXPRESSED IN HBL100, SIGNAL = 1.6; EXPRESSED IN FETAL LIVER, SIGNAL = 1.7; EXPRESSED IN ADULT LIVER, SIGNAL = 1.2
cttgttctcccgcttcactctgagtgacctcatctgggggaaagagctcattagagactttcaatctcaagcattatccggcaggcagagacagcatttggaggatgtgagagcttccgtcactatttgtgaattcacacatcaaaagtgatgccttgctttgactctgcgtggaggcagccctgagtctgatgcccaccatctctcatgagagacagcagataccccgagagctagccagcagcagcctcctcacctcgacgacgagctgaaggtcagccatgtaccgctcttcggtctgaatcagctcatgaatatagccctgtcttttcctctcaattggctgcattgtgtccagggtttgcagatc

SEQ ID NO: 1029 - DNA, 455 bp, Homo sapiens
  MAP TO AC009225.1; EXPRESSED IN PLACENTA, SIGNAL =   3; EXPRESSED IN HBL100, SIGNAL = 2.6; EXPRESSED IN FETAL LIVER, SIGNAL = 2.9; EXPRESSED IN LUNG, SIGNAL = 2.8; EXPRESSED IN ADULT LIVER, SIGNAL = 2.1; EXPRESSED IN BRAIN, SIGNAL = 2.2; EXPRESSED IN BONE MARROW, SIGNAL = 3.9; EXPRESSED IN HEART, SIGNAL = 2.1; EXPRESSED IN BT474, SIGNAL = 2.6; EXPRESSED IN HELA, SIGNAL = 2.1
tcagctacaacatggatgaacctcaaaacattatgctaagtaaaagaggtcagtcacaaaaggctgcatatcgtatgaaatgtccaggacgcgaatgcatggagacagaatgtagattagcggtcaccaggggcctaaggaagaagggaatggggagtgactgctaatgggtacagggtttcttggggatgatgaaaacgttctagaattagattgtggtgataactgcaaaattttgtgaatgtaattttaaaacactgaatggtaaactttagaaaagtgagttttatgataggtgatgacggtcgtggtggaggtggtagaagagaaggaggaggaggaggaaaaggagaaagaggaggaagaggaaaaatgaagaaaaggaagaagttaagaagcttgcccaagatcaaagagttacccatgctttcaaccattgtgccactctaatcatg

SEQ ID NO: 1030 - DNA, 477 bp, Homo sapiens
  MAP TO AC009224.1; EXPRESSED IN HBL100, SIGNAL = 9.1; EXPRESSED IN FETAL LIVER, SIGNAL =  13; EXPRESSED IN HELA, SIGNAL =  17; EXPRESSED IN BRAIN, SIGNAL = 6.2; EXPRESSED IN HEART, SIGNAL = 7.9; EXPRESSED IN BT474, SIGNAL =  14; EXPRESSED IN BONE MARROW, SIGNAL = 2.7; EXPRESSED IN ADULT LIVER, SIGNAL = 9.2; EXPRESSED IN LUNG, SIGNAL = 4.7; EXPRESSED IN PLACENTA, SIGNAL = 3.5
cacagatgtgctgctccttgatgtcattcccctgtctctgggtattgaaactctgcgaggtgtctttaccaaacttattaataggaataccactattccaaccaagaagagccaggtattctcaactgctgctgatgggcagacacaagtggaaattaaagtgtgtcagggtgagagagagatggctggagacaacaaactccttggacagtttactttgattggaattccaccagcccctcgtggagttcctcagatcaaagttacatttgacattgatgccaatgggatcatacatgtttcagctaaagataaaggcacaggacatgagcagcagattgtaatccagtcttctggtgggttaagcaaagatgatgttgaaaatatggttaaaaatgcagagaaatatgctaaggaagaccagcgaaggaaggaatgagttgaagcagttaatatggctgaaggcatcattcatga

SEQ ID NO: 1031 - DNA, 460 bp, Homo sapiens
  MAP TO AC009224.1; EXPRESSED IN LUNG, SIGNAL = 2.3; EXPRESSED IN HEART, SIGNAL = 2.2; EXPRESSED IN BONE MARROW, SIGNAL = 2.4; EXPRESSED IN FETAL LIVER, SIGNAL = 5.5; EXPRESSED IN HELA, SIGNAL = 9.7; EXPRESSED IN ADULT LIVER, SIGNAL = 7.9; EXPRESSED IN BRAIN, SIGNAL = 2.5; EXPRESSED IN PLACENTA, SIGNAL = 1.5; EXPRESSED IN BT474, SIGNAL =  10; EXPRESSED IN HBL100, SIGNAL =  10
ttgaggctcatgggaaactgtattctccaagtcagatcggagcgtttgtgtcgatgaagatgaaagagactgcagaaaattacttggggcacacagcaaaaaatgctgtgatcgcagtcccagcttatttcaatgacttgcagaggcaggccactaaagatgctggccagatatctggactgaatgtgcttcgggtgattaatgaacccacagctgctgctcttgcctatggtctagacaaatcaaaagacaaagtcattgctgtatatgatttaggtggtggaacttttgatatttctatcctggaatttcagaaaggagtattcgaggtgaaatccacaaatggggacactttcttaggtggggaagactttgaccaggccttgctacagcacattgtgaaggagttcaagagagagacgggggttgatttgaccaaagacaacgtggcatttcagag

SEQ ID NO: 1032 - DNA, 472 bp, Homo sapiens
  MAP TO AC008279.1; EXPRESSED IN PLACENTA, SIGNAL = 1.6; EXPRESSED IN BT474, SIGNAL = 2.5; EXPRESSED IN LUNG, SIGNAL = 1.4; EXPRESSED IN HELA, SIGNAL =   1; EXPRESSED IN ADULT LIVER, SIGNAL = 1.2; EXPRESSED IN BONE MARROW, SIGNAL = 1.3; EXPRESSED IN HBL100, SIGNAL = 1.3; EXPRESSED IN FETAL LIVER, SIGNAL = 1.4; EXPRESSED IN BRAIN, SIGNAL = 1.2; EXPRESSED IN HEART, SIGNAL = 1.5
gtatgaaagggggatcatcggcctgaacacacatcctcacatcctcactggggaacctcaagttccagatcaggggataaggatttgaccttacctggagctgagacaaatttagagagctgagtaaaatatgggaatagaagaagcagtgggaagagccctgtggacactcgcggtccccagggaagccatttctgactttgtctcccaggggtccttggggagggctaccagaggaactggaaaaagaccacaggaagaaggaaatttccagctgaacttcgtaacaatttcaaccaaagtttcctggacggaacctggagaagggggcgaatcaggggtgcagacaagcacagaagctgtggcaggtggggaagctcaaaacctgaaagccctgcttactttcacagccgggaggctggttgttggagcaagttctcagctctgcctacccactgcctggaaacaaact

SEQ ID NO: 1033 - DNA, 483 bp, Homo sapiens
  MAP TO AC008278.1; EXPRESSED IN PLACENTA, SIGNAL = 1.4; EXPRESSED IN HBL100, SIGNAL = 2.6; EXPRESSED IN FETAL LIVER, SIGNAL = 2.1; EXPRESSED IN LUNG, SIGNAL = 4.8; EXPRESSED IN HELA, SIGNAL = 2.9; EXPRESSED IN ADULT LIVER, SIGNAL =   2; EXPRESSED IN BRAIN, SIGNAL = 2.6; EXPRESSED IN HEART, SIGNAL = 2.8; EXPRESSED IN BT474, SIGNAL =   3; EXPRESSED IN BONE MARROW, SIGNAL =   1
aggcatgaatgcaggtaagctggtagatttgacattgtcagcatgaggaaggtcttttctgattgttttaatctctctctctctcttgttttttaaggaaaagatcttggtctggcatttgaaataccaccacatatgaaaaaccaagccctctttcctgcctgtgttttgaaggtaattaggaatctagttagaaaaaatttgctgtggttgtaagctgcttactcttcattattttgtatacgatggttttcaattagggtaggaattttaattttctgttttattcaatgctagaatgctgaactgaaatttaacttcggtgaagaggaatttaagtttccaccaaaagatggctttgttgctctttccaaggcaccggatggttacattgtcaaatcacagcactcaggtattatacctgcaagggtaaggatttctagaatagtgagaataattgatgagaactccagtaagtaaggc

SEQ ID NO: 1034 - DNA, 467 bp, Homo sapiens
  MAP TO AC008275.1; EXPRESSED IN BONE MARROW, SIGNAL = 0.77; EXPRESSED IN HBL100, SIGNAL = 0.8; EXPRESSED IN BRAIN, SIGNAL = 0.72; EXPRESSED IN HEART, SIGNAL = 0.88; EXPRESSED IN BT474, SIGNAL = 0.77; EXPRESSED IN HELA, SIGNAL = 0.66; EXPRESSED IN PLACENTA, SIGNAL =   1; EXPRESSED IN FETAL LIVER, SIGNAL = 0.79; EXPRESSED IN LUNG, SIGNAL = 1.6; EXPRESSED IN ADULT LIVER, SIGNAL = 0.81
ttctgcacatgtatcccagacattaaagtttaaaaaaaggggggatatgtccaaaaaagtttaaatatacatatatatatatatataaatgaaataaacaaataaatagaataatacattttgccatgctatttgctcaccctcacgtagtcacagcttggtttaatctttatatagatgagactgctctgtaagaaaaaaacaaagacagtgcattcatctgcatgctacctgaagataccctactctgtaatgaaatagctttcaataaactgtctcttctcagtgcactctgtgactcaccttgaattctttcctgtgcaagatccaagaaccctctctgggaatctggatcgagatccctttttccaataacatagggaagatactcattctataatataaagttttttaaaaggcaatgtataaacagtatagaaacagtgtcattctaaataaaaacgtgg

SEQ ID NO: 1035 - DNA, 449 bp, Homo sapiens
  MAP TO AC008269.1; EXPRESSED IN FETAL LIVER, SIGNAL = 3.2; EXPRESSED IN HELA, SIGNAL = 4.4; EXPRESSED IN HEART, SIGNAL = 3.8; EXPRESSED IN BT474, SIGNAL = 3.2; EXPRESSED IN BONE MARROW, SIGNAL = 2.4; EXPRESSED IN PLACENTA, SIGNAL = 2.6; EXPRESSED IN BRAIN, SIGNAL = 2.9; EXPRESSED IN ADULT LIVER, SIGNAL = 2.5; EXPRESSED IN LUNG, SIGNAL = 2.6; EXPRESSED IN HBL100, SIGNAL = 3.1
taccttgaggacttggcacccctctggaaacccggccctctttgcttccattcattctacttcccagcagcagaagttaatggactctaccaggttggggacctagtgttgctttgccttggcctctgcctcttccgccatcaccaagcaacccattttgctctaggtatttttccactgccttttaggtttgccaataagttctgctcacttcggactctaattcataacctcgctctcatggcttctgcagcctcatgatgtttctctgcacataagcctcgagtcctgctaccatctgctactgctgctgctgcaaaagacagtgtctgatgggagtggtttgttcactatcattaaccttgctaggcagagccctgtgccaggccacctcgctaactgcaggccagcctgcattctggccaccctggtgtctctcctggtccaac

SEQ ID NO: 1036 - DNA, 491 bp, Homo sapiens
  MAP TO AC008269.1; EXPRESSED IN BRAIN, SIGNAL = 1.6; EXPRESSED IN HBL100, SIGNAL = 1.9; EXPRESSED IN FETAL LIVER, SIGNAL = 1.6; EXPRESSED IN HELA, SIGNAL = 1.9; EXPRESSED IN ADULT LIVER, SIGNAL = 1.6; EXPRESSED IN HEART, SIGNAL = 1.6; EXPRESSED IN PLACENTA, SIGNAL = 1.4; EXPRESSED IN BT474, SIGNAL = 2.3; EXPRESSED IN BONE MARROW, SIGNAL = 0.78; EXPRESSED IN LUNG, SIGNAL = 1.3
gcacagtagtcaaatcacacaataagttctttatgtctgttttatacttcctattccagatactcagaatgttcctagaggggacagtgttcttcctagctgctttgaaatcatgttgtttcaaaataaaaacaaaaacataaagagacattcactcacatgaaggagctgtcttcagttttctggccagtatgcgtttcgcttcaccttccacccccagcgccacagcaataatgttgtgtgcaatgcgtggggcatatctcatgagtaaaactgtcttcaggtttacaaaggttctccctcccacgatgactctgacagactcatgagcatttttctctatcaggtacccatagagcctgcagagaggcaccctgcttcggaggcagtcctccagagtgaacacctccttgttggtgctgtcatccagcaccacaatgacgtgggcctggcggaaggcctcctccaccttcgtgcagatggagacactg

SEQ ID NO: 1037 - DNA, 465 bp, Homo sapiens
  MAP TO AC008268.1; EXPRESSED IN PLACENTA, SIGNAL = 1.6; EXPRESSED IN BT474, SIGNAL = 1.7; EXPRESSED IN LUNG, SIGNAL = 1.5; EXPRESSED IN HELA, SIGNAL = 1.1; EXPRESSED IN BRAIN, SIGNAL = 1.3; EXPRESSED IN HBL100, SIGNAL = 1.5; EXPRESSED IN FETAL LIVER, SIGNAL = 1.6; EXPRESSED IN ADULT LIVER, SIGNAL = 1.4; EXPRESSED IN BONE MARROW, SIGNAL = 1.9; EXPRESSED IN HEART, SIGNAL = 1.6
atgggctaaggaggcagtgtatgagaatatctgggggtcatggtgttgacacccctggaattggcacattactacacagctcacacgttttcacagtggtttaggggggaagctgcataaggcggggctgacagcaaggactttgacattagacacgcttcagttaagcctcgctcccacttcccaatctaggggactaggggatcctcagacagcccagatgttcctcagactactcagcacctttctagttaggcaggatcatgccaaattctaaagaagccagtacgcacctccatctgtgtcttcccctgccaggaagttggcagaggccactgttccagacagcagagcctcaatcagcctgaatccctgagcgacctgcatggagcagattccctcgccagcccccatgagtgggagtgagaggtaaactactgcgttaagttatgagatgtttagagc

SEQ ID NO: 1038 - DNA, 453 bp, Homo sapiens
  MAP TO AC008268.1; EXPRESSED IN BRAIN, SIGNAL =   2; EXPRESSED IN ADULT LIVER, SIGNAL = 1.8; EXPRESSED IN BT474, SIGNAL = 1.4; EXPRESSED IN BONE MARROW, SIGNAL = 1.6; EXPRESSED IN HBL100, SIGNAL = 1.2; EXPRESSED IN FETAL LIVER, SIGNAL = 1.5; EXPRESSED IN HELA, SIGNAL = 1.5; EXPRESSED IN HEART, SIGNAL = 1.5; EXPRESSED IN PLACENTA, SIGNAL = 1.6; EXPRESSED IN LUNG, SIGNAL = 1.9
aagcatcccactcccctcctcatcctctaagtccaccttaaaatgcccttcttcttactgtgccccgatcacaccccgtctctttagcccataggtgtacactctgacttctcccctcaggccccttccatcggttttctcattatttccctttaccgccattcctctcccttcacctcccagtcacctcttcccagcctcttctcccataaatatccatttaaccttacagatagatctttctgaaacatgctaaccaattaatttcacttccacagagtgcctactctgtgtcaggtgttgtgctagtggctggaggagacacaaacatgaacaagacctggtggtctctgctcttcagggactcacagtccagttgggagggggaagagggggtgccagaggtggtgggggtgccagacaaggattctggtcatttttactctgagggca

SEQ ID NO: 1039 - DNA, 481 bp, Homo sapiens
  MAP TO AC008268.1; EXPRESSED IN FETAL LIVER, SIGNAL = 1.4; EXPRESSED IN HEART, SIGNAL = 2.3; EXPRESSED IN PLACENTA, SIGNAL = 1.1; EXPRESSED IN BT474, SIGNAL = 1.6; EXPRESSED IN BONE MARROW, SIGNAL = 1.5; EXPRESSED IN HBL100, SIGNAL = 1.4; EXPRESSED IN LUNG, SIGNAL = 0.8; EXPRESSED IN HELA, SIGNAL = 1.1; EXPRESSED IN ADULT LIVER, SIGNAL = 1.1; EXPRESSED IN BRAIN, SIGNAL = 1.4
ttgtcccaagctcctctttccttatccatgacacaggaaaaatccctccctatcaaggtcttcagaggatgaaatgagatgatggtaatggccttgacaggtgctgccagatgattgtaaggacgattcctttgtgccccccacagccctaagtggggctcagccacaggacacaatattgtgcctcctatcgggagctggtgtccacctaggggcccaaggggctggaaggtctcacattctcacatggtctatgtcacacggtgcatccggaaccaggtcataggtgacggccactggtaccagcagagcatctgggacgatgcccacctggactgcctgcaccacaaaccccacccaagcctggcccagggctgacagccgtggccccagagccccaggaggttcctccaggaagatgagcaggggctgcccactaaccagcagctgctctatgacctggaataggaggggtcagagg

SEQ ID NO: 1040 - DNA, 456 bp, Homo sapiens
  MAP TO AC008268.1; EXPRESSED IN HBL100, SIGNAL = 3.2; EXPRESSED IN FETAL LIVER, SIGNAL = 1.7; EXPRESSED IN HELA, SIGNAL =   2; EXPRESSED IN BRAIN, SIGNAL = 3.6; EXPRESSED IN BT474, SIGNAL = 6.2; EXPRESSED IN BONE MARROW, SIGNAL = 2.7; EXPRESSED IN LUNG, SIGNAL = 1.7; EXPRESSED IN ADULT LIVER, SIGNAL = 0.89; EXPRESSED IN PLACENTA, SIGNAL = 0.81; EXPRESSED IN HEART, SIGNAL = 1.5
ggccagcaacaagttcattcatacctccctagggcaaagcttccaaagggagcagtaggctgccaacttttctgtttcacagccttcactgatgataactccaggtactggaaaatctgaggctactagagactgaagtgggccctgggcatactgcagcagccctatggaaaagtggccagactgttacctgggttcccattcctgtatcttctcactaggcaagtcttgcaggcctgggcctctacctaacccccctgccagagctgtcgagccagtagcaactcagccactccctggacagagcctccaggggcaactgaaagcctctctgccactgcttctgcagtggaactgtccttgctaccctcagactgatgaaggagctaacacccttatctacaccttcaacaagctttaattgaccaaagcccatctcccacgggttttacacac

SEQ ID NO: 1041 - DNA, 422 bp, Homo sapiens
  MAP TO AC008179.1; EXPRESSED IN HELA, SIGNAL = 2.7; EXPRESSED IN LUNG, SIGNAL = 3.4; EXPRESSED IN HEART, SIGNAL = 2.9; EXPRESSED IN PLACENTA, SIGNAL = 2.4; EXPRESSED IN BT474, SIGNAL = 3.6; EXPRESSED IN BONE MARROW, SIGNAL = 2.4; EXPRESSED IN FETAL LIVER, SIGNAL = 2.2; EXPRESSED IN ADULT LIVER, SIGNAL = 2.6; EXPRESSED IN BRAIN, SIGNAL = 4.2; EXPRESSED IN HBL100, SIGNAL = 1.8
ataattcatgggaggagggcaaatgtcaacattagccagagtttggaggacagtgatttcaactctcatggatgactttgagggattcaatattttggtggagaaagtcacttcagatgtcgtggaaataggaagaaaactagaattagaagtggagcctgaagatgtgactgaattgctgtaatctcatgatcaaacttgacataatgaagagctgctttcttagggacaagcaaataaagtgttttcttgagatggaatctactcctggtgaagatgctatgaacgttgtggaaatgataaaagatatcaaatattacataaacttcattgataaagcagcagcagcaggaatggatagtatggacttcaattttaaataaagttctactgaatgtaaaaggctaccaaacagcatcaca

SEQ ID NO: 1042 - DNA, 484 bp, Homo sapiens
  MAP TO AC008174.1; EXPRESSED IN HEART, SIGNAL = 1.6; EXPRESSED IN FETAL LIVER, SIGNAL = 0.67; EXPRESSED IN HELA, SIGNAL = 0.82; EXPRESSED IN ADULT LIVER, SIGNAL = 0.82; EXPRESSED IN BRAIN, SIGNAL = 1.9; EXPRESSED IN PLACENTA, SIGNAL = 0.89; EXPRESSED IN HBL100, SIGNAL = 1.3; EXPRESSED IN LUNG, SIGNAL =   1
tggcctgaaaaccttaatttgagcatctgagaactcctttaacagtgaattgatgagtttcatagcagtgtcatagagtttggcttgattttgcttatcactaacattttgacatctatcttgtatttgtgtttctggtatagaagaaaagatcaattgtttaaccatctcagtaataacatcttctaaaaacttagcgggaaaaattccaggtttactttctcgttggttttgaggatcatctggtttactgggttcacttttaatctcctctcttactttctctttttctctctcttcctcttctttttctttggcagagatatttttgttagttgaggaggatactttttttgttgtaacagactgtgccgaatccctgctaatctcttgaattacatttaatacattatcacctggggggctttggtcataactgagtttcgaataatatgctggttctggagaagaagatagttctaaa

SEQ ID NO: 1043 - DNA, 476 bp, Homo sapiens
  MAP TO AC008174.1; EXPRESSED IN BT474, SIGNAL = 1.2; EXPRESSED IN HELA, SIGNAL = 0.87; EXPRESSED IN BRAIN, SIGNAL = 0.86; EXPRESSED IN PLACENTA, SIGNAL = 1.2; EXPRESSED IN BONE MARROW, SIGNAL = 1.9; EXPRESSED IN HBL100, SIGNAL =   1; EXPRESSED IN FETAL LIVER, SIGNAL = 1.5; EXPRESSED IN LUNG, SIGNAL = 1.5; EXPRESSED IN ADULT LIVER, SIGNAL = 1.7; EXPRESSED IN HEART, SIGNAL = 1.4
tttttcttaactggtttccattttctcttttctttgggattctaattaatctagtttttcccctattacctgctttcccacagttgagtttcatagctgtacctggtaataatttcccttatcctgtaaatatcaccaggcttgagattgaattcattttagcattcttttctgactaatcaaggtacattcttgggccagatttgtgaagatgtctcccctttctagtcactaacagtcatgcttatcacttaccttacactggggcttttcctcccaagatgaagaggctgtttcaggcatcgtctttggtgtggccatgtcaagctcagcaacagctcttttaacatgtgtctccttggattctattacctgatttgagattgcttcagtactttcaatatttgcactggctgtggtctgacaacatttacttagtgacaaaaattttttcaggctgctcgtgcttagtgttg

SEQ ID NO: 1044 - DNA, 476 bp, Homo sapiens
  MAP TO AC008169.1; EXPRESSED IN HBL100, SIGNAL = 0.73; EXPRESSED IN BRAIN, SIGNAL = 1.2; EXPRESSED IN HEART, SIGNAL = 1.9; EXPRESSED IN BT474, SIGNAL = 0.83; EXPRESSED IN PLACENTA, SIGNAL = 1.7; EXPRESSED IN ADULT LIVER, SIGNAL = 1.2; EXPRESSED IN HELA, SIGNAL = 0.95; EXPRESSED IN LUNG, SIGNAL = 1.1; EXPRESSED IN FETAL LIVER, SIGNAL =   1
ttcaaagattttgcattttatcttatgtaggaaataatcacacagaaaatttgtggaagggcaaaactatatggaatgtaatttgatcttatgaaatatattttaaaagcatatacaacttgggtatttagaaacacaggctttatgatttcttttgtcctaagtggcatgtctttagagtatatataatgcaacgaatttctgaggtcattttgacctttacttcttagggaataaagtattattcttctgtaaagaagttcatagtttaatggataaggtgtcagggaaaaaaaaatgagactaagcaagaataccctggttcttgggctctccgttataaataatgctctcattaaaattctgcttcggaagaaaggcaagtccattagtctgggagctaatttttactggctccttggatgtatgcatattaaaaattcagcttttataattgccagtcatcaaccacctag

SEQ ID NO: 1045 - DNA, 467 bp, Homo sapiens
  MAP TO AC008165.2; EXPRESSED IN HBL100, SIGNAL =  91; EXPRESSED IN HELA, SIGNAL =  38; EXPRESSED IN PLACENTA, SIGNAL =  16; EXPRESSED IN BT474, SIGNAL =  63; EXPRESSED IN BONE MARROW, SIGNAL =  54; EXPRESSED IN FETAL LIVER, SIGNAL =  39; EXPRESSED IN LUNG, SIGNAL =  21; EXPRESSED IN ADULT LIVER, SIGNAL =  19; EXPRESSED IN BRAIN, SIGNAL =  19; EXPRESSED IN HEART, SIGNAL =  14
ctaaagccgaagccaaagtgaaggctttaaaggccaagaaggcagtgttgaaaggtgtccgcagccacacgcaaaaaagaagatccgcatgtcactcaccttcaggcggcccaagacactgcgacttcggaggcagcccagatatcctcggaagagcacccccaggagaaacaagcttggccactatgctatcaagtttccgctgaccactgagtgggccggaagaagatagaagaaagcaacatgcttgtgttcttcgtggatgttaaagccaacaagcaccagatcagacaggctgtgaagaaggtctatgacagtgatgtggccaaggtcaccaccctgatttttcctgataaagagaacaaggcatatatgttcgactggctcctgattatgaagctttggatgttgcaacaaaattgggatcatctaaactgagtccagctggctaactctaaatacatgtg

SEQ ID NO: 1046 - DNA, 489 bp, Homo sapiens
  MAP TO AC008165.2; EXPRESSED IN PLACENTA, SIGNAL = 1.5; EXPRESSED IN BONE MARROW, SIGNAL = 1.9; EXPRESSED IN FETAL LIVER, SIGNAL =   2; EXPRESSED IN LUNG, SIGNAL = 0.97; EXPRESSED IN ADULT LIVER, SIGNAL =   1; EXPRESSED IN BRAIN, SIGNAL = 2.2; EXPRESSED IN HEART, SIGNAL = 1.7; EXPRESSED IN BT474, SIGNAL = 2.3; EXPRESSED IN HBL100, SIGNAL = 2.5; EXPRESSED IN HELA, SIGNAL = 1.7
tccagtgtgaactcttctatgaagtctaaagttgtaacttctattgaaggctttaccacatatattgcattcatatggtttctctccagtgtgagttctctcatgtcgtctaaggacagaagagtgattgaaggcttttccgcatagatggcattcatatggtttttctccagtgtgagttctctcatgtcgtctgaggtcagaagattcagtgaaggctttcccacatacatggcactcatatggtttctctccagtgtgaattctctcatgtcgtttaagcacagaagattcagtgaatgctttcccacatagatgacatccatgtggtttctctccattgtgacttcgctcatgttgtctaaggtgagaacaatgagagaaggcttttccacatagatgacattcatatggtttctctccattgtgagttctttcatgttgtctaaggtaagaacatttactgaaagccttcccacataggagaca

SEQ ID NO: 1047 - DNA, 475 bp, Homo sapiens
  MAP TO AC008164.2; EXPRESSED IN BT474, SIGNAL = 3.4; EXPRESSED IN BONE MARROW, SIGNAL = 1.9; EXPRESSED IN LUNG, SIGNAL = 2.7; EXPRESSED IN HELA, SIGNAL = 2.3; EXPRESSED IN ADULT LIVER, SIGNAL =   3; EXPRESSED IN BRAIN, SIGNAL = 2.2; EXPRESSED IN PLACENTA, SIGNAL = 4.4; EXPRESSED IN HBL100, SIGNAL = 3.2; EXPRESSED IN FETAL LIVER, SIGNAL = 1.9; EXPRESSED IN HEART, SIGNAL = 1.6
tccctttgcactcagcaagcaccactgcaagtcatggtttttttcctggtggactgacccaaaccttcattcctgaagggtctgggtcatttgtagtcctgcctggattgggctgttgtagtttcccactgaccttaatcaaagggcatggtaatactaagagatgccctaatagatctcctgtattccacacatactcttccttacctcctttgtggtgtagtagactgatttcatcttgatagttcaggttaatcaccccagccaacactgtaactcccttcttagcctgttgacttaaagattggaggagcccaaagtgtccaggtggcaatcttaacttccagtttaatggaattgttgttgtgtctcctggtggcagtgttcctccctctggaactaatacctctaggccagcagaatgcaatgtcacaggaacaggaaggaaaaattttgctagtggattgctaggggt

SEQ ID NO: 1048 - DNA, 475 bp, Homo sapiens; identical to SEQ ID NO: 1047
  MAP TO AC008164.2; EXPRESSED IN FETAL LIVER, SIGNAL = 2.3; EXPRESSED IN PLACENTA, SIGNAL = 2.9; EXPRESSED IN BT474, SIGNAL = 3.2; EXPRESSED IN BONE MARROW, SIGNAL = 2.4; EXPRESSED IN HBL100, SIGNAL = 2.7; EXPRESSED IN LUNG, SIGNAL = 2.6; EXPRESSED IN HELA, SIGNAL =   3; EXPRESSED IN ADULT LIVER, SIGNAL = 2.5; EXPRESSED IN BRAIN, SIGNAL = 2.9; EXPRESSED IN HEART, SIGNAL = 2.9

SEQ ID NO: 1049 - DNA, 478 bp, Homo sapiens
  MAP TO AC008159.1; EXPRESSED IN PLACENTA, SIGNAL = 1.5; EXPRESSED IN BONE MARROW, SIGNAL = 2.1; EXPRESSED IN HBL100, SIGNAL =   3; EXPRESSED IN LUNG, SIGNAL =   2; EXPRESSED IN HELA, SIGNAL = 2.8; EXPRESSED IN BT474, SIGNAL = 2.4; EXPRESSED IN FETAL LIVER, SIGNAL = 2.1; EXPRESSED IN BRAIN, SIGNAL = 1.9; EXPRESSED IN HEART, SIGNAL = 1.9; EXPRESSED IN ADULT LIVER, SIGNAL = 1.7
  unsure 100
ctgccacttttcagaccctctttagaggaaatgtggtttttaaaataatcacaaaatgagactagagtaatattaggaaacatatgcacttacagaaagngacatacatggattgaagaagttagcatctaaattcatgcagttcagtactttgagctcgtgggattccttactcagtggatgcactaggggaaagccagcttttggctgaagtcacgtctcactcaccgacatcagacatttcagggacagtggctgtgtaaacctccttggtgaatattggttcattgtcattgatgtcatggatcttgatgatgaattcagactcgggctccacgggtctccctgtccttctgtttatagcttgagctcgaaggatgtaaacgggtttttcttccctgtccagcctcttggtggcctgtatgtcgcctgtgttttcattaataatgaagagatctcctgctccatctcctgaaag

SEQ ID NO: 1050 - DNA, 470 bp, Homo sapiens
  MAP TO AC008159.1; EXPRESSED IN HBL100, SIGNAL = 4.3; EXPRESSED IN BRAIN, SIGNAL = 3.5; EXPRESSED IN PLACENTA, SIGNAL = 1.8; EXPRESSED IN BT474, SIGNAL = 2.5; EXPRESSED IN BONE MARROW, SIGNAL =   2; EXPRESSED IN FETAL LIVER, SIGNAL = 2.4; EXPRESSED IN LUNG, SIGNAL = 1.4; EXPRESSED IN HELA, SIGNAL = 2.9; EXPRESSED IN ADULT LIVER, SIGNAL = 1.1; EXPRESSED IN HEART, SIGNAL = 2.7
  unsure 57
  unsure 256
gggtgaggaaactgaggcagagaggtaagataacttgccccaggtcacacagtgaantgagtggcagagcaggatttagacccaggcattctgattctagagactatatactcttaacagctacagtctctcacagaggattctccagaatgccatgcagccaataagctgtttcaggacttagtgagatggaatttggaatgtgaaaatggttctggcttgttgtaaaataaatgaagtgactttataagttttntataaagttaaacatattgaattttttttttcctagcatgcaatgatgctacctgttctgacccatcatatccgctaccaccaatgcctaatgcatttggacaagttgataggatatactttccaagatcgttgtctgttgcaggtaagaattattctcctgtaaactcacataataacaagataggagtaattcatcttgcaggtcacaaatg

SEQ ID NO: 1051 - DNA, 472 bp, Homo sapiens
  MAP TO AC008109.1; EXPRESSED IN BONE MARROW, SIGNAL = 2.1; EXPRESSED IN ADULT LIVER, SIGNAL = 1.1; EXPRESSED IN BT474, SIGNAL = 2.5; EXPRESSED IN FETAL LIVER, SIGNAL = 1.9; EXPRESSED IN LUNG, SIGNAL = 1.7; EXPRESSED IN HELA, SIGNAL = 1.3; EXPRESSED IN BRAIN, SIGNAL = 1.9; EXPRESSED IN HEART, SIGNAL = 1.3; EXPRESSED IN PLACENTA, SIGNAL = 2.3; EXPRESSED IN HBL100, SIGNAL = 1.6
ttcaaaggattgtcagtggctactacgagcaactgtatgccaataaattggaaaaatctagaagaaattgacaaattcctatgtacatacaacctatcaagattgagtaaggaagaaatccaaaacccgaacacaccaatagcaagtaatgagtcttccagtaaagaaaagcccaggacctgatggcttcactgctgaatattacaaaccatctaaagaagaactaataccaatcctgctcaaactattctgaaaaatagaggagaagggaatgcttccaaactcattctatgaggccagtattaccctgataccaaagccagagaaagacacatcaaaaacagaaaactacaggcaggccaatatctctgatgaatattgatgcaaaaattctcaacaaaatgctggctaacaaatttgaacaatacattagaaaaagcatttattatgaccaagtgggatttatccctgg

SEQ ID NO: 1052 - DNA, 391 bp, Homo sapiens
  MAP TO AC008085.1; EXPRESSED IN PLACENTA, SIGNAL = 1.3; EXPRESSED IN BT474, SIGNAL = 5.9; EXPRESSED IN FETAL LIVER, SIGNAL = 5.9; EXPRESSED IN LUNG, SIGNAL = 1.4; EXPRESSED IN ADULT LIVER, SIGNAL = 4.5; EXPRESSED IN BRAIN, SIGNAL = 2.4; EXPRESSED IN BONE MARROW, SIGNAL = 5.9; EXPRESSED IN HBL100, SIGNAL = 9.8; EXPRESSED IN HELA, SIGNAL = 3.1; EXPRESSED IN HEART, SIGNAL = 5.4
tcactagcaagcatgaaagaggaggtctctctctctctctctctctctccacgggctgctcccagggtctggtcacaatatgccaccacagtgggggcaaatcaccttcctttccggcaggtggcgtttcctcctgcagctgcttaacctctcttttccagctttccctccgcagtttcttccactgttttctcttggcaaagtaatcaggatacattgccttctcagaaggatgccagtcatctaagcaccattctgggaccttgtagcactcgtgtgtcacataggaggtacccctaggagagtcagggaagatgcatggctgtggatgctgatggtaccagaattcttcctcagcctccttcagcagccggatggccttcatcatatc

SEQ ID NO: 1053 - DNA, 458 bp, Homo sapiens
  MAP TO AC008079.7; EXPRESSED IN HEART, SIGNAL = 2.5; EXPRESSED IN BT474, SIGNAL = 2.8; EXPRESSED IN BRAIN, SIGNAL = 3.6; EXPRESSED IN PLACENTA, SIGNAL = 2.7; EXPRESSED IN BONE MARROW, SIGNAL = 3.2; EXPRESSED IN HBL100, SIGNAL = 3.9; EXPRESSED IN FETAL LIVER, SIGNAL = 3.3; EXPRESSED IN LUNG, SIGNAL = 3.2; EXPRESSED IN HELA, SIGNAL = 7.5; EXPRESSED IN ADULT LIVER, SIGNAL = 2.6
ctccttccactgccaacttcagagggtctggccttcactttgtgaagcaaatcaacaggcctcctattctgtgactcaagagttattcatacaaagaactgcttctaagctcgcaggagtttcacgacagaccccgaggtacagtgcaagcccgcaagtccactttacagaggtcgcagagggataatgtcctaccttccaggtttggcttctgggcctcctcagagcctgagtgttcctgtttctgctgctgcctcgctgtgtgaatggcctgaagtacatccagtcgccgctcctcaccaaaggctgcagagcccaccactagctcctcagcctccgataagcagcccagaggcagcagcacccgctgcacgtgaaattctgccaaggctccatattctggaaggttttgattggctgggtcttggagccaggcacccaccacatccagcacagct

SEQ ID NO: 1054 - DNA, 481 bp, Homo sapiens
  MAP TO AC008079.7; EXPRESSED IN PLACENTA, SIGNAL =  14; EXPRESSED IN BT474, SIGNAL =  58; EXPRESSED IN BONE MARROW, SIGNAL =  28; EXPRESSED IN HBL100, SIGNAL = 1.3e+02; EXPRESSED IN FETAL LIVER, SIGNAL =  72; EXPRESSED IN LUNG, SIGNAL =  20; EXPRESSED IN HELA, SIGNAL =  69; EXPRESSED IN ADULT LIVER, SIGNAL =  13; EXPRESSED IN BRAIN, SIGNAL = 1.2e+02; EXPRESSED IN HEART, SIGNAL =  38
tccctagacagatgcttgctctggcctgcagggcttcctgattttccacagttttggtgggggcactggctccggcttcacttctctgctgatggaacgcctctccctggattatggcaagaaatccaagctggagtttgccatctacccagccccccaggtctctactgcagtggtggagccctacaactccatcctgaccacccacaccacactggaacattcagattgtgctttcatggtggacaacgaagccatctatgacatctgccgcaggaaccttgacattgagcgccctacctataccaacctcaaccgcctcatcagtcagattgtgtcctcaatcactgcttctctccgctttgacggggccctcaatgtggacctcactgagttccagaccaacctggtgccctacccccgcatccacttcccgctggtcacctacgcgcccatcatctctgccgagaaagcctatcac

SEQ ID NO: 1055 - DNA, 490 bp, Homo sapiens
  MAP TO AC008074.1; EXPRESSED IN PLACENTA, SIGNAL = 2.5; EXPRESSED IN HBL100, SIGNAL = 3.1; EXPRESSED IN BRAIN, SIGNAL = 1.7; EXPRESSED IN HEART, SIGNAL = 1.3; EXPRESSED IN ADULT LIVER, SIGNAL = 1.5; EXPRESSED IN BT474, SIGNAL = 4.7; EXPRESSED IN BONE MARROW, SIGNAL = 1.8; EXPRESSED IN FETAL LIVER, SIGNAL = 2.9; EXPRESSED IN LUNG, SIGNAL = 2.2; EXPRESSED IN HELA, SIGNAL = 1.4
tgagtgatgccacttttgaagagtcttcagagcactttccacattttagtgaaccaggtgatgactttggagaatttggggatataaatgctgtttcttgccaagaggagacaatattaacaaagtcagacctaaaacagacttctgataatttatcagaagaatgtcaattggcaagaaaatctagtggaacaggcactgaacctgttgcaaaacttaaaaatgggcaagaaggtgagattggacattttgattctgtgccaaatattcaggatgactgcaatggttttcaagactctgatgattttgcagacttcagttcagctggtcctagccaagttgtagattggaatgcttttgaggatgaacaaaaagatagttgttcttgggctgcttttggagaccagcaggctactgaatctcatcatcgaaaggaagcctggcagtcacataggacagatgaaaatattgatactccaggaacccccaa

SEQ ID NO: 1056 - DNA, 498 bp, Homo sapiens
  MAP TO AC008074.1; EXPRESSED IN PLACENTA, SIGNAL = 0.92; EXPRESSED IN HBL100, SIGNAL =   1; EXPRESSED IN LUNG, SIGNAL = 0.99; EXPRESSED IN BRAIN, SIGNAL = 1.2; EXPRESSED IN BT474, SIGNAL = 2.4; EXPRESSED IN BONE MARROW, SIGNAL = 0.82; EXPRESSED IN FETAL LIVER, SIGNAL = 1.1; EXPRESSED IN HELA, SIGNAL = 0.78; EXPRESSED IN ADULT LIVER, SIGNAL = 0.9; EXPRESSED IN HEART, SIGNAL = 0.93
aaaaaggagacaaaatagagcattgtaaatttgcattgttttaaagtagctttgagagaattttgaaagatcttgttctatgtaatctgtcccctccaaaaattctttttttcttttttacaggtgtaaattaattatttgaaagcaactgaacaatggagccagacatcattcgaatgtactcttcatccccaccaccattagacaatggagcagaggatgatgatgatgatgaatttggggaatttggtgggttttcagaagttagcccttctggtgtagggtttgttgatttcgatacaccagattatactcgtcccaaggaagagtttgtaccttcaaaccattttatgccaattcatgaattctcagaaaatgtagatagccttacaagctttaagtccattaaaaatggtaatgataaggacatcactgctgaactttctgctcctgtgaaaggacagtctgatgttttactttctaccaccagcaaagaaa

SEQ ID NO: 1057 - DNA, 469 bp, Homo sapiens
  MAP TO AC008044.3; EXPRESSED IN BT474, SIGNAL = 7.7; EXPRESSED IN HELA, SIGNAL =   3; EXPRESSED IN ADULT LIVER, SIGNAL = 1.8; EXPRESSED IN BRAIN, SIGNAL = 2.4; EXPRESSED IN BONE MARROW, SIGNAL = 2.2; EXPRESSED IN HBL100, SIGNAL =  11; EXPRESSED IN FETAL LIVER, SIGNAL = 6.3; EXPRESSED IN LUNG, SIGNAL = 3.1; EXPRESSED IN PLACENTA, SIGNAL = 2.9; EXPRESSED IN HEART, SIGNAL = 2.3
actttggagagacctgtgcctattccttcctcctcttcttgccttcatgctcgtgttccttggggcggctgctatctgagggtcttttagagccaccatgctgtttggcttcttccaaaaacttgtccaaaccaaaaggatcttcctcaaactgaactggtccttctcggcctctctgtctacggtctgaaccagaaaactccttgtcgggaacaaatctaaggaaaaggagaaaaaactatgaactactttgctttcaccagtgtaaacactgaaattgagttgtatggcttggcacctgttggtctttattctggcttctaggtcatcaccatacatgtccttgtccagatttttactgggcctataaatactctgggccatatctttaccacctctccaggcttgatcataaacattataaatttcatcttctccacctgcaaatccactgtccataccctgtgga

SEQ ID NO: 1058 - DNA, 463 bp, Homo sapiens
  MAP TO AC008044.3; EXPRESSED IN PLACENTA, SIGNAL = 2.8; EXPRESSED IN BONE MARROW, SIGNAL = 3.9; EXPRESSED IN HBL100, SIGNAL = 4.3; EXPRESSED IN LUNG, SIGNAL = 3.1; EXPRESSED IN ADULT LIVER, SIGNAL = 2.6; EXPRESSED IN BRAIN, SIGNAL = 3.5; EXPRESSED IN HEART, SIGNAL = 3.3; EXPRESSED IN BT474, SIGNAL = 4.4; EXPRESSED IN HELA, SIGNAL = 3.3; EXPRESSED IN FETAL LIVER, SIGNAL = 4.2
tttacttctgcgtgggttccaaggcaacagtgtgatcaacaatgagttcttccctgtctctgtttttggcttgtctgggtgctgaagtccacggcaatacacaataacatgatcatttacggtaagcaggtgcctgagtaaaaaggatgggatctccaagtctcagctgtcagggtttatcctggcccgttttacttcgctattctggtcatccagatggcagaaaccttctgtactgatgtctcttttttcatcctcgatgggttctagagggaaattctggtctgtggccaggacctgtcggacagtcatgttaacacgagcggtcttcaagtagctggcacacacctgccagtcctccatagaacaaggctctaccattgaatctctcgggaggacagcagggagaggtgcctctaggcagtgaggcaggccttccccttctggatttggaaggacacga

SEQ ID NO: 1059 - DNA, 469 bp, Homo sapiens
  MAP TO AC008039.1; EXPRESSED IN PLACENTA, SIGNAL = 2.9; EXPRESSED IN HBL100, SIGNAL = 1.9; EXPRESSED IN LUNG, SIGNAL = 2.9; EXPRESSED IN HELA, SIGNAL = 2.4; EXPRESSED IN BT474, SIGNAL =   2; EXPRESSED IN BONE MARROW, SIGNAL = 2.6; EXPRESSED IN FETAL LIVER, SIGNAL = 2.6; EXPRESSED IN ADULT LIVER, SIGNAL = 2.2; EXPRESSED IN BRAIN, SIGNAL = 3.3; EXPRESSED IN HEART, SIGNAL = 2.4
cccagaaaaacaaacagagctagtaagagaattcagcaagtttactgaaagaagccaatataaaaaaattcatattatccctatacaccagtaacagccaattagaaaatataaaagaaaaaaatcatttataatgataatactctttaagatgcttaggaataaatctagcaaaagatatacaagacctttaaggagaaaaaattgcaaaaatattatcaaaggacataaaagaagatatgaataaatgggaatttttaaatgctcctgggtaatacccgtgggttggaagatgctatcataaaggtgtcagctcttctcaatttaatctataactttaatacaacacaaatgaaaatttctgtagaattttttgtggaacttggcaagctgattctaatattaatgtggaacaacaaaatgaaaagaagtgctaatataattgtgaagtgtgtgggaaggggacttt

SEQ ID NO: 1060 - DNA, 485 bp, Homo sapiens
  MAP TO AC008038.1; EXPRESSED IN HEART, SIGNAL = 1.6; EXPRESSED IN BONE MARROW, SIGNAL = 1.8; EXPRESSED IN ADULT LIVER, SIGNAL = 2.2; EXPRESSED IN BT474, SIGNAL = 6.6; EXPRESSED IN LUNG, SIGNAL = 2.8; EXPRESSED IN HELA, SIGNAL = 2.7; EXPRESSED IN BRAIN, SIGNAL = 2.4; EXPRESSED IN PLACENTA, SIGNAL = 2.5; EXPRESSED IN HBL100, SIGNAL = 6.7; EXPRESSED IN FETAL LIVER, SIGNAL = 6.8
gatcgactgggaaattcctggagaatactcaaaaactccttctcacatattgagaaaacacggctcaatattcaagcaaccaatacaagagatataatggtaattcacagtcagctttgggaagcaggtaacccaaggctctaagaggcacaatctaaaaccgaaaatggccaagttcatgtgttcagcacattctgaagttcagtcatacacaaataatgagacttatcacaatcattcttctctaaaaatactggtaaatatgacaaaacccaccaaaacctctctctgataccacaaaactcaccgtttctgatcttcggattctttcttggcttgctccaatgccagctcctcagctactcttcttttcaattcttcatcagaaactagaatcgataaagagcagaaggagataaaataggtgacttcttaaaaataaaagcaagaaaatactcaggaaagcccggctgagactagatttg

SEQ ID NO: 1061 - DNA, 496 bp, Homo sapiens
  MAP TO AC008009.4; EXPRESSED IN FETAL LIVER, SIGNAL = 1.5; EXPRESSED IN LUNG, SIGNAL =   1; EXPRESSED IN HELA, SIGNAL = 2.5; EXPRESSED IN ADULT LIVER, SIGNAL = 0.97; EXPRESSED IN BRAIN, SIGNAL = 0.96; EXPRESSED IN HBL100, SIGNAL = 2.4; EXPRESSED IN HEART, SIGNAL = 1.6; EXPRESSED IN BT474, SIGNAL = 2.2; EXPRESSED IN BONE MARROW, SIGNAL = 0.86
ctctgggcaggattaccttgaaatgtgaatgcaagaattagcatttaatacactattttctaatgtatattttaaaaacaaggcacaggaaatgttaggaagccaagatgtctgcttactttctgctttaatttttcatcaccacttaaagttttatcatatttaattatctttgttattttccaggtaaataatattgaaaacattttatttgaagacagtgcatttttattgggggagactgaagtttatttgtcattgatatagttcaatatagatcaaacattcataattgcagtactcttaaacgaatatttcttgcctctgacatgaatatagtgctcaaagatccagacagcaatccatacagcttacttgataatacagaatcagatcagactgcagacactgatgccagcgaatctcatcacagtactaaccgtcgtaggcggtctcgtagacgaaggactgatgaagatgctgttctgatggatgg

SEQ ID NO: 1062 - DNA, 489 bp, Homo sapiens
  MAP TO AC008009.4; EXPRESSED IN PLACENTA, SIGNAL = 1.4; EXPRESSED IN BT474, SIGNAL =   2; EXPRESSED IN BONE MARROW, SIGNAL = 1.5; EXPRESSED IN HBL100, SIGNAL = 6.9; EXPRESSED IN FETAL LIVER, SIGNAL = 1.5; EXPRESSED IN LUNG, SIGNAL = 1.4; EXPRESSED IN HELA, SIGNAL = 1.3; EXPRESSED IN ADULT LIVER, SIGNAL = 0.96; EXPRESSED IN BRAIN, SIGNAL = 1.4; EXPRESSED IN HEART, SIGNAL = 1.9
tggtttttgtaaatcttatttcaactgttagttttatttctaaaagcctacctgagaaatagttgatcagacatttccattagcattaatttctgtttgtgttctgtattggcaaacaccaaagctgctctccagaggtacacctcaagcatgtaaggaccgccaaggttcatgcttgtaagaacctataatctagtttaggcaaatcagattgatgtagctaagctgtgcttagtattttatgccacatgggggagggtccgttggttaagctgagcaaggtaattagaacttcatttaaacttcattatttttgttcagatgggatttttaaagtattttgatgtcttttagttttatgtcattgaatatgctgcttgtgacgctacttacaatgaaatagtcacatttgaacgacttcggcctgtcaatcaaaataaaactgtcaaaaaaaataccttctttaaatgcacagtggatgttcctgag

SEQ ID NO: 1063 - DNA, 494 bp, Homo sapiens
  MAP TO AC008008.2; EXPRESSED IN HELA, SIGNAL = 5.2; EXPRESSED IN ADULT LIVER, SIGNAL = 5.3; EXPRESSED IN BT474, SIGNAL = 5.3; EXPRESSED IN LUNG, SIGNAL = 5.7; EXPRESSED IN HEART, SIGNAL = 4.6; EXPRESSED IN PLACENTA, SIGNAL = 6.2; EXPRESSED IN BONE MARROW, SIGNAL = 6.7; EXPRESSED IN FETAL LIVER, SIGNAL = 4.8; EXPRESSED IN BRAIN, SIGNAL = 5.6; EXPRESSED IN HBL100, SIGNAL = 5.6
tggtgaccctttgtaagttgccactgggcaacacctttttttcccatcaacagggaagcaattcacaattcagtgtttcctcgtaaaacgaattagcaatgcttctccaatgagataaggaatatctaaaccagagtcccataacggagctttccatattttgatatatctctatgcctactttttgaacttttatggaaggataacacaacaaaatgaaggatccagcctgatgccttttcattaagcaagaccacccatgtaaccatctctctccatgcctcttttgttcaaggtgatgaggcttcgcaaactggctcagcagattgcaaactgcaaacagtgcattgagcggtcagcatcactcatctcccaagcggaacactctctgaaggagaatgatcatgcgcgtttcctacagactgctaagaatatcaccgagaggtgagtgcaggggcccctgggaatttctcggctgctgggctcttgtatct

SEQ ID NO: 1064 - DNA, 458 bp, Homo sapiens
  MAP TO AC007969.2; EXPRESSED IN HBL100, SIGNAL = 2.2; EXPRESSED IN ADULT LIVER, SIGNAL = 1.9; EXPRESSED IN BRAIN, SIGNAL = 2.6; EXPRESSED IN HEART, SIGNAL = 1.9; EXPRESSED IN BT474, SIGNAL = 2.1; EXPRESSED IN PLACENTA, SIGNAL = 2.5; EXPRESSED IN HELA, SIGNAL = 2.8; EXPRESSED IN LUNG, SIGNAL = 2.9; EXPRESSED IN FETAL LIVER, SIGNAL = 2.1; EXPRESSED IN BONE MARROW, SIGNAL = 2.5
atgagattccttgctgggagattggtgagattaaaaaaactataaaattcttgttgctataagaattttcaaatgttaacgttttaaaattatgggtgatacacacaaatgttttctatattgtctgtattcttctgtattttaaattgtttgcaaattgttaatacaaatgcacaaaaaagtaattcttaggaatgtgggcctatttgagaggtagaaaataaagaacttgatacaaatttgctaataaaaagtctgatcactcatttaccagggaattgtcttttagggcacaaatatggaaaactcctttctgtttcttcttattaggtgtgacgatgtagtgccaaggatggcctccaatctgaaaagcattctccagggatgacacctcaaagagcagtggtggcatgtctgtagagacaggaaaaggaattcattagctgcactgttctggg

SEQ ID NO: 1065 - DNA, 454 bp, Homo sapiens
  MAP TO AC007969.2; EXPRESSED IN HELA, SIGNAL = 1.1; EXPRESSED IN BRAIN, SIGNAL = 0.77; EXPRESSED IN HEART, SIGNAL = 1.2; EXPRESSED IN BONE MARROW, SIGNAL = 1.5; EXPRESSED IN HBL100, SIGNAL = 1.8; EXPRESSED IN LUNG, SIGNAL = 2.4; EXPRESSED IN FETAL LIVER, SIGNAL = 1.5
gagaaaaagccctaggaccgagcctgagaggcaccaaggttcattcacaagttgggagtgaagaaaatgccagcaaaggaactcctccaccgtcccctagagggagccactgagaggcaggggtaacatggggaagaggggagaagcaaaagccaagggaaaaaggtttcaaaaagggagtgtccagtgtgtcaaactgttcattttgtgttgtttaaaaaacaaaacaaaacacattctgtgtcctttcgtctttccctagccatcatcgtctacagactgccgtggacctggaaatgcagcaagctcctgatgaaatccatccatgcagggttaaatgcagttgctgccattcttgcaattatctctgtggtggccgtgtttgagaaccacaatgttaacaatatagccaatatgtacagtctgcacagctgggttggactgatagctgtca

SEQ ID NO: 1066 - DNA, 489 bp, Homo sapiens
  MAP TO AC007969.2; EXPRESSED IN PLACENTA, SIGNAL =   2; EXPRESSED IN BONE MARROW, SIGNAL = 1.9; EXPRESSED IN HELA, SIGNAL =  10; EXPRESSED IN HBL100, SIGNAL = 3.2; EXPRESSED IN ADULT LIVER, SIGNAL = 3.5; EXPRESSED IN BRAIN, SIGNAL = 2.3; EXPRESSED IN BT474, SIGNAL = 4.6; EXPRESSED IN HEART, SIGNAL = 3.6; EXPRESSED IN LUNG, SIGNAL = 2.9; EXPRESSED IN FETAL LIVER, SIGNAL = 4.9
ttcagcctaaagcagatgtccattgtcttcctcacatattgtgattgtggcttagaggtaggcacagcaccactccagcagcgaggggtttgcgttatttaagaacagcagctcttttttctcttctgtatgagctttctcatgttaaagccaattgttttccaaacaatactgaatacgactttcaaattcctttgggttatagttggaaaccaggatgggaataaagggatccagggcatcaaatccttcctttaccagcaactcctggagcagataggctttccggggcttaaagagagacccagtctggttcaaagtcaacacaatggcacctccatgccaatcatttttcatcattttcctcaggttgtgaacaagtgctaattcctctggggcaatcgggcatttatcttctcttttcagagcagtccttccccaaagagcattgattccatccacggccaccagcaggtgaaaaacacccaa

SEQ ID NO: 1067 - DNA, 475 bp, Homo sapiens
  MAP TO AC007964.2; EXPRESSED IN BONE MARROW, SIGNAL = 3.9; EXPRESSED IN FETAL LIVER, SIGNAL = 3.1; EXPRESSED IN ADULT LIVER, SIGNAL = 2.5; EXPRESSED IN BRAIN, SIGNAL = 3.7; EXPRESSED IN HEART, SIGNAL = 2.5; EXPRESSED IN PLACENTA, SIGNAL = 3.3; EXPRESSED IN BT474, SIGNAL = 2.6; EXPRESSED IN HBL100, SIGNAL = 2.5; EXPRESSED IN LUNG, SIGNAL = 3.1; EXPRESSED IN HELA, SIGNAL = 3.1
agcacatctttgctgatccctgaatgaagaggagtcttttatgagaagttctgggtatgagtttgaaaagaagtgcaatgttcttgaagtgggattgaatatggaatatagaacatgaatatggaatatgcatggaataccaagaccaaggatgtgacatgaatgaggagatgaagacacttgcctcaggagcaacattcaaacgaatgctaaaaaaaaactcaatgatgaagataaatattgtaatgtaatatattttacaacgcaaagcaaacttaatgcagaatattcatgataaagtattaaatattttccagaggcaggctattgtggcatacttttattatgtaaaggagcagcctgtctggtgtggtctgcagcctctgggctctgctgtcctccatgacacagctttgggagcgttggcgaaggtgcaggaacagattgtatagcacagggcttttatatgtaatgc

SEQ ID NO: 1068 - DNA, 463 bp, Homo sapiens
  MAP TO AC007964.2; EXPRESSED IN LUNG, SIGNAL = 2.4; EXPRESSED IN HEART, SIGNAL = 2.3; EXPRESSED IN PLACENTA, SIGNAL = 2.5; EXPRESSED IN BT474, SIGNAL = 1.8; EXPRESSED IN BONE MARROW, SIGNAL =   3; EXPRESSED IN HBL100, SIGNAL = 2.5; EXPRESSED IN FETAL LIVER, SIGNAL = 2.4; EXPRESSED IN HELA, SIGNAL = 2.4; EXPRESSED IN BRAIN, SIGNAL = 3.1; EXPRESSED IN ADULT LIVER, SIGNAL = 2.5
agatgtgctgtcctcaaggctatgttgttccattgatagagcactgactgagtagatttagcataacagccctagcttttctgggccccttaagggcactagcttttttgaattagtaaatgagcattggcttcaactgaaacttgccaactacattagcctctaacaagacaatcagcctgtcctttgatgctttgaagccaggaattgacttctcctctgaaagtgctatgaaagtcccagaaggcatcttctttcaatagaagactctattatctacatttaaaaatctcctgtttagtgtagccaccttcatcaatgatcttagctggatgtcctggaaaacttgctgcagcttctacaccagcacttgctgtttcacctttcacttttgtgttatagaggtagtttctctccttaaacctcatgaaccaacttctgctagcttgaaactcttcttctt

SEQ ID NO: 1069 - DNA, 464 bp, Homo sapiens
  MAP TO AC007949.1; EXPRESSED IN HBL100, SIGNAL = 1.5; EXPRESSED IN FETAL LIVER, SIGNAL = 1.5; EXPRESSED IN LUNG, SIGNAL = 1.6; EXPRESSED IN BRAIN, SIGNAL = 1.3; EXPRESSED IN HEART, SIGNAL = 1.3; EXPRESSED IN PLACENTA, SIGNAL = 1.6; EXPRESSED IN BT474, SIGNAL = 1.4; EXPRESSED IN BONE MARROW, SIGNAL = 1.5; EXPRESSED IN ADULT LIVER, SIGNAL = 1.5; EXPRESSED IN HELA, SIGNAL = 1.6
  unsure 424
tgcattagtttaatggaagggacaacattaatggttatagaaaatgtgcttttatataacttgaaaagttagaaattgatatacaacctcaaaacacttcattgactaggaatgtattttcccctgaggctcgagaactttaaagccacatgaaatatttcattgtcttgtgattcataatgctggcacatcttacatcacactcaattaaagaacagggcctgtttctatacatcatcttcccagagcaaaactaaggaacatgaaggcaagttacattgtcagaaataagatcttcactcctatattagacatttttgttcatttcttctatgatatctccatacctgactttgaagtttctgcttccaatataccatatgctcatgtgtttttcaatttctaccagtctgcaacagtttcnattttggttggaattaggcaggtggtacctgaagcccttc

SEQ ID NO: 1070 - DNA, 399 bp, Homo sapiens
  MAP TO AC007949.1; EXPRESSED IN BONE MARROW, SIGNAL = 4.7; EXPRESSED IN ADULT LIVER, SIGNAL = 3.1; EXPRESSED IN HEART, SIGNAL = 2.9; EXPRESSED IN LUNG, SIGNAL = 3.9; EXPRESSED IN PLACENTA, SIGNAL = 4.4; EXPRESSED IN BT474, SIGNAL = 3.9; EXPRESSED IN HBL100, SIGNAL = 3.3; EXPRESSED IN FETAL LIVER, SIGNAL = 4.3; EXPRESSED IN HELA, SIGNAL = 2.6; EXPRESSED IN BRAIN, SIGNAL = 3.3
ttgagaaagttgggaggaggcactaaaatgatacactaccgaattaagtgaaatcttctaaactctagcaagttgtagatgcaactcttggtgctggagctggtggtgtatttaggaacacagtttttaaattttttttctagccttgtaatttatataatgtatagacattaactatagaatacacatacaaacacatcctatatagatatgactcttttgtttagttgctcctttggtagaagacaagatgatttgattagttctagtgttccaagcaccacatcaacaccaacagttacctctgcagctgggcttcagaaaagcctgctttccagcacaagcactactacaaagattacaacgggttcttcctcagcaggcacacaaagcaggtaa

SEQ ID NO: 1071 - DNA, 467 bp, Homo sapiens
  MAP TO AC007944.1; EXPRESSED IN BONE MARROW, SIGNAL =   1; EXPRESSED IN HEART, SIGNAL = 0.97; EXPRESSED IN PLACENTA, SIGNAL = 0.98; EXPRESSED IN BT474, SIGNAL = 1.2; EXPRESSED IN HBL100, SIGNAL =   1; EXPRESSED IN LUNG, SIGNAL = 1.6; EXPRESSED IN HELA, SIGNAL = 0.86; EXPRESSED IN ADULT LIVER, SIGNAL = 1.4e+02; EXPRESSED IN BRAIN, SIGNAL = 1.6; EXPRESSED IN FETAL LIVER, SIGNAL = 1.3
  unsure 203
gtcactgcagatggacatgctcagcctgtccagccagacacccagcctcaaccgggaccccatctggaggagccgggaagagccctaccattatgggaacaagatggagcagaaccagacccagagccctctgcagctcctcagccagtgcaacatcagaacttcctacagtccaggagggcaaggggctggggcccagcccngaaatgtggggcaagcacttcagcaaccccaaaaggagctcgtcactggccatgacaggacatgctggcagcttcatcaaggaatgccgagaagactattacccggggaggctgagatctcaggagagctacagtgatatgtctagtcagagtttcagtgagacccgaggcagcatccaagtccccaaatatgaggaggaagaggaagaggaagggggcttgtccactcagcagtgtcggacccgtcatcccatcagttccctg

SEQ ID NO: 1072 - DNA, 482 bp, Homo sapiens
  MAP TO AC007944.1; EXPRESSED IN ADULT LIVER, SIGNAL = 0.86; EXPRESSED IN LUNG, SIGNAL = 1.7; EXPRESSED IN HELA, SIGNAL = 2.1; EXPRESSED IN HEART, SIGNAL = 0.94; EXPRESSED IN PLACENTA, SIGNAL = 1.1; EXPRESSED IN BT474, SIGNAL = 1.2; EXPRESSED IN BONE MARROW, SIGNAL = 0.95; EXPRESSED IN FETAL LIVER, SIGNAL = 1.3; EXPRESSED IN BRAIN, SIGNAL = 1.6; EXPRESSED IN HBL100, SIGNAL = 1.3
  unsure 20
  unsure 22
  unsure 25
tttctcccccataagccacncnccncaaaagcgctttaacatttaaaacagtgcaagtttctgactttacattcttagctcccatcttctcccattccctgatcccaatcatattaagaaatgatacagtttttgctcttctgtcttttcctgctgtgcaactgtcctctgccacctaatgtggaagatttggggaggccgtaggagctgtatttgtgcagcagctcatcgcttgtgacgtatcgcaggcgcgctggctgggggatgggttctcctaggaaatagccctcgttgtcagactctgaagaggaggagcaggtggaacaccaatcatactcggcgaagtagggtccccagcggtccccaaaggcattctgcaaagccaggtccgacacagtcctagggcactggccgtacaggtccctccgggaccacatgccccatgctctcctggaagctccgctggcgcataaattggtcat

SEQ ID NO: 1073 - DNA, 357 bp, Homo sapiens
  MAP TO AC007939.1; EXPRESSED IN HBL100, SIGNAL = 5.1; EXPRESSED IN BRAIN, SIGNAL = 5.5; EXPRESSED IN HEART, SIGNAL = 4.5; EXPRESSED IN BT474, SIGNAL = 4.7; EXPRESSED IN BONE MARROW, SIGNAL = 6.2; EXPRESSED IN PLACENTA, SIGNAL = 5.6; EXPRESSED IN ADULT LIVER, SIGNAL = 4.7; EXPRESSED IN HELA, SIGNAL = 6.4; EXPRESSED IN LUNG, SIGNAL = 7.7; EXPRESSED IN FETAL LIVER, SIGNAL = 5.6
  unsure 97
  unsure 188
cgtgtttgtggtgatgttggtgtaaacaaacctactgggctgccagtcatatagaagtatagcatatacaattgtgtacagtatgcagtacttgacnaataagcaactactggtttatgtacttactgtgctttttattattttagagtatattcctacatattaaaaaaaaagttgactgtaaaacnagcctcaggcaggtccttcaggaggtattccagaagaaggcattgttatcataggagatgacaactccatgtatgttattgcccctgaagactttccagtggaacaagatgtgaaggtggaagacagtaatactaatgatctgaccttctgtaggcctagactgatacg

SEQ ID NO: 1074 - DNA, 357 bp, Homo sapiens; identical to SEQ ID NO: 1073
  MAP TO AC007939.1; EXPRESSED IN PLACENTA, SIGNAL = 5.8; EXPRESSED IN LUNG, SIGNAL =  11; EXPRESSED IN HELA, SIGNAL =   3; EXPRESSED IN ADULT LIVER, SIGNAL = 2.6; EXPRESSED IN BT474, SIGNAL = 4.2; EXPRESSED IN BONE MARROW, SIGNAL = 4.8; EXPRESSED IN HBL100, SIGNAL = 3.9; EXPRESSED IN FETAL LIVER, SIGNAL = 3.8; EXPRESSED IN BRAIN, SIGNAL = 3.9; EXPRESSED IN HEART, SIGNAL = 3.4
  unsure 97
  unsure 188

SEQ ID NO: 1075 - DNA, 406 bp, Homo sapiens
  MAP TO AC007939.1; EXPRESSED IN HBL100, SIGNAL = 1.2; EXPRESSED IN BRAIN, SIGNAL = 1.6; EXPRESSED IN BT474, SIGNAL = 1.2; EXPRESSED IN BONE MARROW, SIGNAL =   1; EXPRESSED IN FETAL LIVER, SIGNAL = 1.3; EXPRESSED IN HELA, SIGNAL = 3.1; EXPRESSED IN ADULT LIVER, SIGNAL = 1.5; EXPRESSED IN HEART, SIGNAL = 1.2; EXPRESSED IN PLACENTA, SIGNAL = 2.1; EXPRESSED IN LUNG, SIGNAL = 1.3
  unsure 108
agggcgagttgccattaagcactagattctagtgatggtacaatgcagtctgaaaaaaaaaaaaaaaaagaacacaaggttctgagggaggttaactccccaaaaagnctctgctgattttacaggttttacctagtaccaattctgagtttaggcaagcaggtagctcctgactaaaaagaatgttgattgtctactcagacttgttataaggattaagcctattgatctgagttttggagatgagatgttattaactgttttattttattatgtagcttattcctgttacccactctcctatggatggcagatcatttggccaagtgaaaactcctcccatagagataacaaatgtacttctgcctagtggattcagccattacttgggatctgacgtcacttt

SEQ ID NO: 1076 - DNA, 436 bp, Homo sapiens
  MAP TO AC007939.1; EXPRESSED IN PLACENTA, SIGNAL = 1.4; EXPRESSED IN ADULT LIVER, SIGNAL = 2.4; EXPRESSED IN BRAIN, SIGNAL =   1; EXPRESSED IN HEART, SIGNAL = 0.88; EXPRESSED IN BT474, SIGNAL = 0.64; EXPRESSED IN FETAL LIVER, SIGNAL = 0.84; EXPRESSED IN LUNG, SIGNAL = 0.85; EXPRESSED IN HELA, SIGNAL = 0.79; EXPRESSED IN BONE MARROW, SIGNAL =   1
  unsure 29
tgtgaatttataaagaaagtggaaatgtnctcttttataagtttcttctataatagtgctatgtttatatggtaatagatgtgtttttttttaaagcaaccaaattctatgtcactttcttgcatatgtacccaacaaaaatgtatattcagccgattatttaaccaattcattttacattaaagtaattatttttatacttgtcaggtgagactttttaaatgtctttggtggctgtatgtgaaggaactcaccttttcctatattttcctgtcctattaaaataatagctgtatttactttgtctaaattcagaacagtggatttgattccagtcgaccaatttagaaatgtgtgtaatgtgaatctacagaacaatcatcttacctcattcagtggattaatctatctacctaatgtgaaggtaagtcattca

SEQ ID NO: 1077 - DNA, 448 bp, Homo sapiens
  MAP TO AC007939.1; EXPRESSED IN HBL100, SIGNAL =   2; EXPRESSED IN FETAL LIVER, SIGNAL = 2.2; EXPRESSED IN ADULT LIVER, SIGNAL = 2.3; EXPRESSED IN BRAIN, SIGNAL = 2.6; EXPRESSED IN HEART, SIGNAL = 2.3; EXPRESSED IN BT474, SIGNAL = 1.8; EXPRESSED IN LUNG, SIGNAL = 2.3; EXPRESSED IN PLACENTA, SIGNAL =   2; EXPRESSED IN HELA, SIGNAL = 2.5; EXPRESSED IN BONE MARROW, SIGNAL = 2.4
  unsure 269
tgtacctaacccaacctctcttcttacactgaacctatatatatcacttatttggtatcttcacttggtatattaaaaactgactgttagattttgaagggaaggtgagagttaaagaaagacacacagagggcagcttgacagcaaatgcagactttatgtctagcataaaacctacagaagtgggggaccagcttaatgccagagcccaccgctgcttacaggctgggcgtacttataggcatgggtgagaggggtctgggcagtantggcttgctgctcggcaggatattgataagatgctcccatgatgaggtggttctggcccttgttgtggtgggatgtcatcatagtattccttggaactttgcccagcaagatatgatagggatatttcttaggttgggcctttttccgccttgtggtcaggtggttaggcagcatgttt

SEQ ID NO: 1078 - DNA, 430 bp, Homo sapiens
  MAP TO AC007939.1; EXPRESSED IN BONE MARROW, SIGNAL =   2; EXPRESSED IN PLACENTA, SIGNAL = 2.1; EXPRESSED IN BT474, SIGNAL = 1.4; EXPRESSED IN BRAIN, SIGNAL = 1.8; EXPRESSED IN ADULT LIVER, SIGNAL = 1.7; EXPRESSED IN HELA, SIGNAL = 1.4; EXPRESSED IN LUNG, SIGNAL = 1.7; EXPRESSED IN FETAL LIVER, SIGNAL = 1.6; EXPRESSED IN HBL100, SIGNAL = 1.5; EXPRESSED IN HEART, SIGNAL = 1.9
ttgggagactgccctatttgaagtggttaaggtcggcacttggtcaagagaaactggctgactgaatttgcacccaacttgaaatcacatgtttggcatgtttttatgacatctggcctgtttattacctagatttccactttgttcatttaaattagacatttgtttaatagatcccattaaaacttaacatctgaattccgactttgcctagaccatgttttatttttattttgctctctgacacattgttttccacagttggaacgagaactggctgaactcaagggctcgggcaaagggcacagtgatggatccaataacagtaaagtaactgatcctgaaacactgaagagttgtgaaactgtcactgaagaaccaagtcttcaacagaagatattggccaaactaaatgccttgaatgaaaggg

SEQ ID NO: 1079 - DNA, 463 bp, Homo sapiens
  MAP TO AC007939.1; EXPRESSED IN HEART, SIGNAL = 2.1; EXPRESSED IN BT474, SIGNAL = 3.4; EXPRESSED IN BONE MARROW, SIGNAL = 3.4; EXPRESSED IN HELA, SIGNAL = 2.7; EXPRESSED IN PLACENTA, SIGNAL = 2.6; EXPRESSED IN HBL100, SIGNAL = 3.3; EXPRESSED IN FETAL LIVER, SIGNAL = 2.2; EXPRESSED IN LUNG, SIGNAL = 2.5; EXPRESSED IN ADULT LIVER, SIGNAL =   2; EXPRESSED IN BRAIN, SIGNAL = 3.8
  unsure 106
  unsure 139
  unsure 154
tgttgttatcctggaaataaatgtgaatacgcctcacactttatgcctcacaaaggaaatctttggaattttatattttgtattaagtttaaatatagaactctgntgtagccattgtcactccagctgtcatcattanttagtaactaagcantgcaaatcatctaaattgttatatagaacatactgtatttatataataccactaacaattgcctataatttgttttagctaattttttgttgttttctttcttacttttagaccacagcaatgaaaaaaataatgtattataatatgcgtataaaaactcttcagaggcatcttaaagaagaccttgaaaaactgaatgatcaaaaatgcaaattacaaaagttgccagaagaacgagtaaaattattcagctttgtgaagaaaactgtaagatttaataatgtaaaatcccagtggccataccttaag

SEQ ID NO: 1080 - DNA, 477 bp, Homo sapiens
  MAP TO AC007939.1; EXPRESSED IN ADULT LIVER, SIGNAL = 2.3; EXPRESSED IN BRAIN, SIGNAL = 2.2; EXPRESSED IN HEART, SIGNAL = 3.6; EXPRESSED IN BONE MARROW, SIGNAL = 2.6; EXPRESSED IN HBL100, SIGNAL = 5.8; EXPRESSED IN FETAL LIVER, SIGNAL = 2.9; EXPRESSED IN LUNG, SIGNAL =   2; EXPRESSED IN PLACENTA, SIGNAL = 1.9; EXPRESSED IN BT474, SIGNAL = 2.7; EXPRESSED IN HELA, SIGNAL = 2.5
  unsure 148
tttgtgatgagaatctatgggcatttacatgactagttgctgtatattatgtaataaatgattataaactcaagtactttttatttcttctttaggggttagaattgcaggaaacatcctgtcatactgcagaagctcgcagagttgnatgaagtttttgaagatgcttttgagcaagaatacacaagagtatgttcccttaatgaacactttggaaatgtcttgacaccctgtactgttttgcctgtgaaattgtattctgatgccaggaatgttctatcaggcataattgattctcatgaaaacttaaaagaatttaaaggtgacctcattaaagtacttgtgtggatacttgttcaatactgctccaaaaggcctggcatgaaagagaatgttcacaacactgaaaataaagggaaagcacctctaatgttgcctgctttgaacactttgccacctcccaaatccccagaagac

SEQ ID NO: 1081 - DNA, 483 bp, Homo sapiens
  MAP TO AC007935.1; EXPRESSED IN HBL100, SIGNAL = 1.8; EXPRESSED IN ADULT LIVER, SIGNAL = 1.8; EXPRESSED IN BRAIN, SIGNAL = 2.7; EXPRESSED IN BT474, SIGNAL = 2.3; EXPRESSED IN HEART, SIGNAL = 1.9; EXPRESSED IN FETAL LIVER, SIGNAL = 2.3; EXPRESSED IN PLACENTA, SIGNAL = 2.7; EXPRESSED IN HELA, SIGNAL = 2.3; EXPRESSED IN LUNG, SIGNAL = 3.1; EXPRESSED IN BONE MARROW, SIGNAL = 2.6
  unsure 66
ttccccctctgtctgttactgttaggttattcattttttatccaattgcatttcaacatggctgtnccactcttcatggaatctaagattaaaaattgacacttttccctgggtcttgggtcttcattctgaaggctcctgcgtcatgtaaaactttgataaaataaatttgctatgcttttctctcgtgaacctgtctttatcataggagtgttggccgtgacccttaggggagtgaggaaagggatcacccctttctcccccggtctcctcacagccagggtttgcagttgtcctttcttgattgtcactatcctcgtgaggttctccgtccctgctcttgtaggaacgctgctccttgccattgcctaccctgatgcctcacattcatatgccttggaaacaggcttggggatcacatacactgtgctcatgtctctgtctctctgtcaagtgactctgtctccaggacacgtcagagac

SEQ ID NO: 1082 - DNA, 476 bp, Homo sapiens
  MAP TO AC007935.1; EXPRESSED IN BONE MARROW, SIGNAL = 1.2; EXPRESSED IN HBL100, SIGNAL =   1; EXPRESSED IN BRAIN, SIGNAL = 1.3; EXPRESSED IN HEART, SIGNAL = 1.3; EXPRESSED IN BT474, SIGNAL = 1.3; EXPRESSED IN HELA, SIGNAL = 1.1; EXPRESSED IN PLACENTA, SIGNAL = 2.4; EXPRESSED IN FETAL LIVER, SIGNAL = 1.1; EXPRESSED IN LUNG, SIGNAL = 2.8; EXPRESSED IN ADULT LIVER, SIGNAL =   1
ccttaagtgttaagatgcctaaagcaatatattttatttacatcaagatgcactgtataaactatatttgatcaaagagatgacttcacgttctcaacttaaatcaaagaatgcttacttaagtatttttttaattgaatcagactttaatgccatcgtataatcttttggttaacagtgctcatcttgattattctaacaaagggaaacatggaaattaatacttacgttgtagagcttatgtcatctataaaaatacacattagaaaattcaacagaggtacctgggacatctgtgaaggtttctccaagtacagacacgtggaaattgagtcctaagtctttaagatgcattaataccttaaaaaagctttctggatctttatcatgctccctggaaataaacacacaaaatataacttgtgttaccttagggcatgtgttaggaaaagtggtttcacttcctacagtatcaa

SEQ ID NO: 1083 - DNA, 452 bp, Homo sapiens
  MAP TO AC007935.1; EXPRESSED IN BONE MARROW, SIGNAL = 1.9; EXPRESSED IN HBL100, SIGNAL = 2.3; EXPRESSED IN ADULT LIVER, SIGNAL = 2.8; EXPRESSED IN BRAIN, SIGNAL = 2.2; EXPRESSED IN PLACENTA, SIGNAL = 8.4; EXPRESSED IN BT474, SIGNAL = 1.3; EXPRESSED IN FETAL LIVER, SIGNAL = 2.4; EXPRESSED IN LUNG, SIGNAL = 2.7; EXPRESSED IN HELA, SIGNAL = 4.2; EXPRESSED IN HEART, SIGNAL = 1.9
  unsure 42
  unsure 52
  unsure 67
  unsure 81
  unsure 88
  unsure 95
  unsure 104
  unsure 112
  unsure 116
  unsure 131
  unsure 138
  unsure 142
  unsure 154
  unsure 155
  unsure 167
  unsure 171
  unsure 177
  unsure 185
  unsure 196
  unsure 203
  unsure 210
  unsure 217
  unsure 220
  unsure 228
  unsure 237
  unsure 243
  unsure 252
  unsure 261
  unsure 265
  unsure 274
  unsure 275
  unsure 289
  unsure 300
  unsure 301
  unsure 311
ttttatgaagcagacagttggcttttcatttagggggagggntggcgaggcngggcctttgcttttngtcagctttttttnggcaccnttaacantttggttcntgcttctngtgnccttgattataaaangcaaacnaacntccaagaagttnncgttaaaataangcangcagcntaattaancctgaacttcnagatgangacactngctgacnatnctcatatncattttacnactatnattaaatangatgaatantctnttttcttgnntttttaaaagatanttttttcagannggccaaaaanggcattgggatcttctgtcttacactggggctacttacccagcaaagatgactatttccaagtactgtgcatggctgatgttgtcatctcaacagctaagcatgaattctttggagtggcaatgtaagttctttctgtttg

SEQ ID NO: 1084 - DNA, 466 bp, Homo sapiens
  MAP TO AC007914.1; EXPRESSED IN HEART, SIGNAL =   4; EXPRESSED IN BT474, SIGNAL = 3.4; EXPRESSED IN BONE MARROW, SIGNAL = 6.2; EXPRESSED IN HBL100, SIGNAL = 4.3; EXPRESSED IN FETAL LIVER, SIGNAL = 4.4; EXPRESSED IN LUNG, SIGNAL = 5.2; EXPRESSED IN HELA, SIGNAL = 6.5; EXPRESSED IN BRAIN, SIGNAL = 6.1; EXPRESSED IN PLACENTA, SIGNAL =  13; EXPRESSED IN ADULT LIVER, SIGNAL = 4.7
  unsure 189
  unsure 200
caggaaaccatgaccagttggttcaagtaagtacaatactgaaaatgaatttcttgtctcatgctgcctcgaggagccaaatgtgagttacaagtcaagaatatcaaatggatgtggggttgtatagtagaagtgggagaagggctccctgggatgctcaaatcttatgctgtaaaaccctctgggagntatgaaatctncttccgatgcatcatcattttatgagcaaaagcaaaagagtcatacttaattttatctctaggcacctacctagacccaccaggggccccactgggacaggagcacttgttttgaagagatccagagggttgggctgcagggctgtaggttgtcctgtgggtgacgcctggcctgaaggttctgagacgggaggagcaaagatgtctgatgcaagcaagtcattggctgaagactgacaggacagggagggagggagaagccttag

SEQ ID NO: 1085 - DNA, 469 bp, Homo sapiens
  MAP TO AC007914.1; EXPRESSED IN BT474, SIGNAL = 1.1; EXPRESSED IN BONE MARROW, SIGNAL = 1.3; EXPRESSED IN HBL100, SIGNAL = 1.1; EXPRESSED IN LUNG, SIGNAL =   1; EXPRESSED IN HELA, SIGNAL = 1.6; EXPRESSED IN ADULT LIVER, SIGNAL =  12; EXPRESSED IN HEART, SIGNAL = 1.1; EXPRESSED IN PLACENTA, SIGNAL = 1.7; EXPRESSED IN FETAL LIVER, SIGNAL = 2.1; EXPRESSED IN BRAIN, SIGNAL = 1.2
  unsure 391
tcatacactggtgaaaacaagctttattttataattccagatatttaaagaatacctcaatcttaacatttgagtgccttgttgaaaataaatccccagaaacagcagcacatttccacagaaaactcataaagatgcaccctatgtattttcttatctcttttcgaagtttagattctagggctctgtatattgccatgtggattaacattgtcatgtactttgctgctaagaagaccttgagatgctaatcctacaggaaacttccagagacaagcagaaaagtaactgactcacctggtcgtgtactgtgctgtgaggatgcttatttctaaaatgcagattgcaactgcaaagctccggcaggctgacatgctgctcttgctgggtnggctgcgagtggggtggcagggcaggtctggtaaggcatttatttgcaaagggccagaggacagggaacaagcattgt

SEQ ID NO: 1086 - DNA, 377 bp, Homo sapiens
  MAP TO AC007914.1; EXPRESSED IN LUNG, SIGNAL = 0.89; EXPRESSED IN HELA, SIGNAL = 1.6; EXPRESSED IN ADULT LIVER, SIGNAL = 0.97; EXPRESSED IN BRAIN, SIGNAL =   2; EXPRESSED IN HEART, SIGNAL = 1.2; EXPRESSED IN PLACENTA, SIGNAL = 0.76; EXPRESSED IN BT474, SIGNAL = 0.99; EXPRESSED IN BONE MARROW, SIGNAL = 1.5; EXPRESSED IN HBL100, SIGNAL = 1.4; EXPRESSED IN FETAL LIVER, SIGNAL = 1.2
  unsure 102
  unsure 110
tgtagtatgaaaattaaaagaccacactattagatataataatagctataatagttaaggaatacacaatataaaaagatgttaattgtgacatcaaaaacnaaaatgtnggggaggaaaagtgtagaagttttaaaaatgtgattgaatttatgttgctaacagtttaaaatagcctattataactatagatattttatgtaagctgcatggtaactcatgaaaaccacaaagcaaacacctataatagacacagaaaacataaaagcaaagaattaaagcatatcagtacagaaaattatctaatcacaaaggaagatagcaagagagaaagaaatagccagaaagaacatacaaaacaaccagaaaacaatgaa

SEQ ID NO: 1087 - DNA, 482 bp, Homo sapiens
  MAP TO AC007914.1; EXPRESSED IN BT474, SIGNAL = 1.2; EXPRESSED IN HBL100, SIGNAL = 2.1; EXPRESSED IN FETAL LIVER, SIGNAL = 1.5; EXPRESSED IN LUNG, SIGNAL = 1.3; EXPRESSED IN HELA, SIGNAL = 0.85; EXPRESSED IN BRAIN, SIGNAL = 1.1; EXPRESSED IN PLACENTA, SIGNAL = 1.5; EXPRESSED IN BONE MARROW, SIGNAL = 1.3; EXPRESSED IN ADULT LIVER, SIGNAL =   1; EXPRESSED IN HEART, SIGNAL = 2.4
gctgtgtggctgttagaaaattacttactctctacaagactcagtttactcaactagaaaacagggggaataggaataactatttgcaggaattgttagaggaatttaatgagatagtgtatgtcagggcttagcaatgctaactgccagtattactctcctgcaatcactaggagtttctatgcatactttggaaactatttatttggggctgaaatacaggaatccaacatccatccagtgcccggcatgtgcctgtattatcacaggggctttataattgcaatcttactctccacaacaatcctgtgggatagctatcatcatcatcatcatcatcatcatcatcatcatcatcatcatcatcatcatcacgtcatcaccatcattggatgaggaaacaaacccaaagcttaagtgacttatggaaaacaagtagtaagcaaaacaagtcaacaagaagccagggatatagcctgttg

SEQ ID NO: 1088 - DNA, 456 bp, Homo sapiens
  MAP TO AC007914.1; EXPRESSED IN FETAL LIVER, SIGNAL =  10; EXPRESSED IN ADULT LIVER, SIGNAL =   6; EXPRESSED IN PLACENTA, SIGNAL = 5.6; EXPRESSED IN BT474, SIGNAL = 7.6; EXPRESSED IN BONE MARROW, SIGNAL = 9.8; EXPRESSED IN HBL100, SIGNAL =  12; EXPRESSED IN LUNG, SIGNAL = 7.9; EXPRESSED IN HELA, SIGNAL =  13; EXPRESSED IN BRAIN, SIGNAL =  13; EXPRESSED IN HEART, SIGNAL = 9.3
  unsure 150
  unsure 335
gggggatagtgtgatgttgcacatgtggctagaggaattataatggtttggaaaaaattcagaaattgagatgccatatccatagagatatagcaacacctaaatttgtagggggtacagattttacagtcaaaggttctcatcatagtnttaaaagatgaagacaaagatgcagacagctacataacaatgaagaatcagggaataacaaggaacaatcaaaggtttatcacaagatagcaagttattaaccggcaaattaaaagactggaaataaatgttgtaaattcagaggaagctaagctcacattggacaagggggctgcgatagctcntctgctgcttagccagtttttatccttggccaaattgcttgacctgagtttcaatgttgtcatctatcaaacagagatattagctaatgtaaggttgctatgaagactggcacaaggccta

SEQ ID NO: 1089 - DNA, 479 bp, Homo sapiens
  MAP TO AC007899.2; EXPRESSED IN PLACENTA, SIGNAL = 2.5; EXPRESSED IN BT474, SIGNAL =   2; EXPRESSED IN LUNG, SIGNAL = 1.5; EXPRESSED IN HELA, SIGNAL = 1.7; EXPRESSED IN HBL100, SIGNAL = 2.1; EXPRESSED IN FETAL LIVER, SIGNAL = 1.6; EXPRESSED IN ADULT LIVER, SIGNAL = 1.3; EXPRESSED IN BRAIN, SIGNAL = 1.8; EXPRESSED IN BONE MARROW, SIGNAL = 1.3; EXPRESSED IN HEART, SIGNAL = 1.7
aactggtaaggaaactggtgttgtttaaacctaggttaaaattttaggtagcacagtataactctgagtaattacaggaagtacaaacttctctgctagttcttcagtctacaaatcacgatgtaaataacagatatgcttcatgatcagtgaccagtcgtgttacttgtttcaaattcttccagtggttggtccctgtgcatctgttaatcagttcactcacagcagagcacgtagttacactgtctctttgtcctccacctgacattttatagaagtgaacaatcgaaagaactggccaacaaagatgaaagtccaacaaagcaacgaaaaatgataacactggaagtgaaatttgaatcaaacataaatggatttgtagaagaagtcactgatcatgggaatgttcttcctgctgtgcattcataggagcttagtgaaggcaaacttatcaacacaaataagaaaagtgattgcaa

SEQ ID NO: 1090 - DNA, 450 bp, Homo sapiens
  MAP TO AC007899.2; EXPRESSED IN BT474, SIGNAL =   6; EXPRESSED IN BONE MARROW, SIGNAL = 6.5; EXPRESSED IN HBL100, SIGNAL = 6.3; EXPRESSED IN FETAL LIVER, SIGNAL = 8.8; EXPRESSED IN HELA, SIGNAL = 7.2; EXPRESSED IN ADULT LIVER, SIGNAL = 6.7; EXPRESSED IN BRAIN, SIGNAL =  10; EXPRESSED IN HEART, SIGNAL = 7.4; EXPRESSED IN PLACENTA, SIGNAL = 8.5; EXPRESSED IN LUNG, SIGNAL = 8.8
ggctctccatgaaacaatggagtcaggaaagctgaacctgagattttgcagacagctgaggatgtaacagagggttgtgagagcaagtctgcagcaagaggaggagcaaggaagagattttcactttctccttaccttcggaatggagagataacagtgtctctcagagggaattgtgataattaatcgtgatgattaatagccttatccagtggcccatacatagtaaataacaatttccttccatcctattatggctatgagaatttatttttagttaccttgaactatttttgctgttctcaggatcataatcactgctctcaagagaatcatcactggtctcaggatcataatcaaatccatcccaacagccattgtagtgaacaatatttacatgatcaagttttgccaatgcttttacttcacgctccgccttcctagttaaaa

SEQ ID NO: 1091 - DNA, 468 bp, Homo sapiens
  MAP TO AC007899.2; EXPRESSED IN BONE MARROW, SIGNAL = 1.9; EXPRESSED IN LUNG, SIGNAL = 1.3; EXPRESSED IN HEART, SIGNAL = 1.3; EXPRESSED IN PLACENTA, SIGNAL = 1.1; EXPRESSED IN BT474, SIGNAL = 1.1; EXPRESSED IN HBL100, SIGNAL = 1.1; EXPRESSED IN FETAL LIVER, SIGNAL = 1.3; EXPRESSED IN HELA, SIGNAL = 1.4; EXPRESSED IN ADULT LIVER, SIGNAL = 2.7; EXPRESSED IN BRAIN, SIGNAL = 1.6
ttggatgaattcaagagaaaaagatatattttattcatatttaaataaaactataacagctaatactgtttttctgatttgaaaaattgtttataatattactataagatgagattaacaatctttgtaaaaatcagattatgttttgggcttaaaaaaaaccctagtgttttctactattagtgtactcaaatgatttgtgagtgatagtactcaaatgagaattgcatttaatttgtacatagttaaatcgtcttgttttgaagcacaaagtcaggatgtttctcatcagaattttctgtttgaatagggaaaagtggcattggtcatgaggcatcattaaaacggaaagcagaggaaaaattggaaagctacagaaaaaagattcacatgaaaaaccaagctgaagaaaaagctgcagaacagtttcggtaaaactatttttgagctggttttggttctatttcc

SEQ ID NO: 1092 - DNA, 374 bp, Homo sapiens
  MAP TO AC007899.2; EXPRESSED IN BRAIN, SIGNAL = 2.2; EXPRESSED IN ADULT LIVER, SIGNAL = 2.2; EXPRESSED IN HEART, SIGNAL = 1.9; EXPRESSED IN PLACENTA, SIGNAL = 1.7; EXPRESSED IN BT474, SIGNAL = 2.9; EXPRESSED IN HBL100, SIGNAL = 1.6; EXPRESSED IN FETAL LIVER, SIGNAL = 2.1; EXPRESSED IN HELA, SIGNAL = 2.1; EXPRESSED IN BONE MARROW, SIGNAL = 2.4; EXPRESSED IN LUNG, SIGNAL = 1.9
accaacataccacccaaatctttaaaaactctatttcactgtaattatgtgattttaatatcaaataagagtactcaataaaaatcactatgaaaacacacagaaagataaactaatcagtcttatggatatttattaagaatcataataaagaactaaatgactaaggtaatcaacacacataatgatactgattcttacctacggctttcatttgttttccaatagcttggcagatttctttggcagctgcaatctgggctttttcacctagcaaactgcccacagtagctcttaggataaaggaaacacatcgtctggagtacacagcctccacatgtgtttgtgttgcccgaggatgggaaaccagatca

SEQ ID NO: 1093 - DNA, 498 bp, Homo sapiens
  MAP TO AC007899.2; EXPRESSED IN PLACENTA, SIGNAL = 1.4; EXPRESSED IN HBL100, SIGNAL = 1.7; EXPRESSED IN FETAL LIVER, SIGNAL = 2.3; EXPRESSED IN HELA, SIGNAL = 5.1; EXPRESSED IN BRAIN, SIGNAL =   2; EXPRESSED IN HEART, SIGNAL = 2.5; EXPRESSED IN BT474, SIGNAL = 2.3; EXPRESSED IN BONE MARROW, SIGNAL = 1.1; EXPRESSED IN LUNG, SIGNAL = 1.6; EXPRESSED IN ADULT LIVER, SIGNAL = 1.5
gccgtttttacatattgattgttactggtttttatttcaccagtaaaagtgcttggggagagaaaatctttagagcatttgtttcttttccttccttagtcatttctttttgaaacatttatctttgacaataaatatgagaagaaaagcaacaaacaagcagtgggtttgtatagtgggtgggaaaccacaggccaaggcaggctagaagttcctgtgactcagcagcatgttctgtgggaccaccaagagtctacagtgtggtagtacactcatcttttcttcttctctcaaaggtctcaaacagcttagatgggaggctgaacgtgatgactggctacacaacagagatgcaaaaagtatcatcaagaaaaagaaacattttaaaaagaagaggattaaaaccactcaaaaaactaaaaaacaaaggaaatgagttattaatgtaaattatagattaaaattctacttacatctaatttttgctgttcaaccatg

SEQ ID NO: 1094 - DNA, 407 bp, Homo sapiens
  MAP TO AC007879.2; EXPRESSED IN LUNG, SIGNAL = 3.7; EXPRESSED IN PLACENTA, SIGNAL = 2.2; EXPRESSED IN BT474, SIGNAL =   5; EXPRESSED IN BONE MARROW, SIGNAL = 2.2; EXPRESSED IN HBL100, SIGNAL =   3; EXPRESSED IN FETAL LIVER, SIGNAL =   3; EXPRESSED IN HELA, SIGNAL = 1.5; EXPRESSED IN ADULT LIVER, SIGNAL = 1.8; EXPRESSED IN BRAIN, SIGNAL = 2.5; EXPRESSED IN HEART, SIGNAL = 2.4
ggaacgctacctacagacggagccccggaggatctcagagacctttggtgaggacttggactgtttcctccacgcttcccctcccccgtgcattgaggaaagcttccgtcgcttagaccccctgctgctccccgtggaagcggccatctgtgagaagagctcggcagtggacatcttgctctctcgggacaagttgctatctgagacctgcctcagcctccagccggccagctcttctctagacagctacacagccgtcaaccaggcccagctcaacgcagtgacctcattaacgcccccatcgtcccctgagctcagccgccatctggtcaaaacctcacaaactctctctgccgtggatggcacggtgacgttgaaactggtggccaagaaggctgctctcagct

SEQ ID NO: 1095 - DNA, 470 bp, Homo sapiens
  MAP TO AC007875.2; EXPRESSED IN PLACENTA, SIGNAL = 2.5; EXPRESSED IN FETAL LIVER, SIGNAL = 2.9; EXPRESSED IN HBL100, SIGNAL = 3.1; EXPRESSED IN HELA, SIGNAL = 3.8; EXPRESSED IN ADULT LIVER, SIGNAL = 2.2; EXPRESSED IN BT474, SIGNAL =   3; EXPRESSED IN BONE MARROW, SIGNAL = 3.9; EXPRESSED IN LUNG, SIGNAL = 2.7; EXPRESSED IN BRAIN, SIGNAL = 3.4; EXPRESSED IN HEART, SIGNAL =   2
tggaggagcaaataaagtggtttcttgagatggtatccacttttggtgaagattctatgaatatggttgaaatgacaaagaagaatttagaatactcagtaaacttagttataaaccagtggcagggtttgagaggactgattccaatttagaaaaaaaggcctattgtgggtaaaatgctatcaaacagcattgcatacttcagagaaatcttttgtgaaaggaagagtcaatgggtatgacaaacttcactgttattttaagaaatggtcacagccaccccaaccttcagcaaccaccaccctaatcagtcagcagccatcaacatcagcaagaccttcctccaggataaagattatgactcgctgaaggttcaggtaactattagtattttttagcagtaggtattttcaaattaaggtatgtacactgttttttagacataatgctattgcacacctcatggactg

SEQ ID NO: 1096 - DNA, 473 bp, Homo sapiens
  MAP TO AC007875.2; EXPRESSED IN HBL100, SIGNAL = 1.2; EXPRESSED IN FETAL LIVER, SIGNAL = 0.91; EXPRESSED IN ADULT LIVER, SIGNAL =   1; EXPRESSED IN BRAIN, SIGNAL = 1.1; EXPRESSED IN HEART, SIGNAL = 1.4; EXPRESSED IN BT474, SIGNAL = 0.99; EXPRESSED IN PLACENTA, SIGNAL = 1.5; EXPRESSED IN HELA, SIGNAL = 1.6; EXPRESSED IN LUNG, SIGNAL = 1.3; EXPRESSED IN BONE MARROW, SIGNAL =   1
tccccttaaaatgtctcaagcatatttatggttgcctgcttcctgtgggatggatgagggagaagactaaataatttctagagattatataaaaaggcaaaggtacattcatttgctcttcttccaggagaatcaggtctagacctagctactcaacatttattcacacatgttcacttaacatttagttctttagtgaagaaataataacctcaacagaactcctgttcccaaatgttttcacatcctgtttctcaccactctcttccatctcctgccttctcttctcctctccaactcccacatgattcccttgatctccccaggtcttccctccacagtaccatcctaaattctgactcatttgctcccttgccaattcctccagcaacacctttcctttccccatccccactgtcaaacttttctgtctttagaaccactcccttagtggcttattctctgctgttcca

SEQ ID NO: 1097 - DNA, 480 bp, Homo sapiens
  MAP TO AC007875.2; EXPRESSED IN PLACENTA, SIGNAL = 1.8; EXPRESSED IN BT474, SIGNAL = 1.5; EXPRESSED IN FETAL LIVER, SIGNAL = 1.6; EXPRESSED IN LUNG, SIGNAL = 1.5; EXPRESSED IN HELA, SIGNAL = 1.4; EXPRESSED IN ADULT LIVER, SIGNAL = 1.5; EXPRESSED IN BONE MARROW, SIGNAL = 1.6; EXPRESSED IN HBL100, SIGNAL = 2.7; EXPRESSED IN BRAIN, SIGNAL = 1.4; EXPRESSED IN HEART, SIGNAL = 1.8
agcggctgatctaacaggaggcagagctcagacagtaatgtgaatggtggggactggctgtaaatacagatgatacttggtggctcagggagttgggacccctggtgtagaacacaccccagagttattccaattaaggagatagaaactgaggttatttattaacaaatttccagtagtacttgtcgaagagttctcctgggtgaaatcttttacttgttcctcctcatcccccagtcactggggacctctggtcttccccaaagatgaaggtttctactgggttgggaagggttcaaagctgagagaaagcttcaagccagagttgttcatgcttactctcagcagccaaagggtcagcatgcccaggaatggtgattgctgaaaggacatgctgggttctaatagcatcttccacatctagtgaacacacttcagaaaaaactcttagaagacacatttataaccatactgaaatca

SEQ ID NO: 1098 - DNA, 487 bp, Homo sapiens
  MAP TO AC007869.1; EXPRESSED IN HBL100, SIGNAL = 3.1; EXPRESSED IN BRAIN, SIGNAL = 4.7; EXPRESSED IN PLACENTA, SIGNAL = 3.8; EXPRESSED IN BT474, SIGNAL = 3.4; EXPRESSED IN BONE MARROW, SIGNAL = 4.2; EXPRESSED IN FETAL LIVER, SIGNAL =   4; EXPRESSED IN LUNG, SIGNAL = 4.8; EXPRESSED IN HELA, SIGNAL = 3.9; EXPRESSED IN ADULT LIVER, SIGNAL = 3.6; EXPRESSED IN HEART, SIGNAL = 3.9
acatttgttggacccagctctcctgtcttcttaaaaataaagataaaaataaaaatgcgctcttaaaaacaaagatcacagcttgttgagaactcactagctgtaagaccaggaaagccaccctgtcaggcctccttgtcttgcacttggagataagatgggattcgcctgcagcgctgctgaagttgagccagaacacctgtaaagtgtcagcacaggtgaagagccaaagcgaagcctggaccccgggtctgaggactctccctccatcgcatgagcctgtgcctgaagcacacgcccagcatccccagcttctccatcaccggaatccctggctttccccagacgatctctaaagcccccttggtctgcgggatgaacgtggcttcccagtcaggcccagttccaaactcgatgtggttgcttgtgccctgtgtgaccttgggcaagtgagggaccctttctgtgcctctttccttgttggtga

SEQ ID NO: 1099 - DNA, 466 bp, Homo sapiens
  MAP TO AC007869.1; EXPRESSED IN ADULT LIVER, SIGNAL = 1.8; EXPRESSED IN BRAIN, SIGNAL = 1.8; EXPRESSED IN PLACENTA, SIGNAL = 1.5; EXPRESSED IN BONE MARROW, SIGNAL = 1.7; EXPRESSED IN HEART, SIGNAL = 1.4; EXPRESSED IN BT474, SIGNAL = 2.4; EXPRESSED IN HBL100, SIGNAL = 1.2; EXPRESSED IN FETAL LIVER, SIGNAL = 1.3; EXPRESSED IN LUNG, SIGNAL = 1.4; EXPRESSED IN HELA, SIGNAL = 1.5
tcacacttatcctggggagctctggtcaggagaactaagacaaaccaatgagggtcattttggccttttattttaaaactgatgctatttctacctttctctatgagtgaggcagttaactccctgtcactggaaggttcagtgatgctgccatcctgagagggtgggaccagatgcttctgagttctcttgatattgtcaggtgataatcactgaggctaatccttcctgtatccaagctcttaattccaggcagagggacagtgtctgggactgcaccctggacaggctgtgggtgtaatggagaccacatcaagcttgaggagagatttgggttcaagtcctaagctccacttcatgaccttgggcaagtcaccagatctctcagagcctcatcagcataaccaggtaaccattggccctatttcatagtcttgttaatggatgaaagatggttgtggatggg

SEQ ID NO: 1100 - DNA, 469 bp, Homo sapiens
  MAP TO AC007869.1; EXPRESSED IN FETAL LIVER, SIGNAL = 3.2; EXPRESSED IN LUNG, SIGNAL = 4.3; EXPRESSED IN HEART, SIGNAL = 2.6; EXPRESSED IN BONE MARROW, SIGNAL = 4.4; EXPRESSED IN PLACENTA, SIGNAL = 3.5; EXPRESSED IN BRAIN, SIGNAL = 3.5; EXPRESSED IN ADULT LIVER, SIGNAL = 2.9; EXPRESSED IN HELA, SIGNAL = 3.3; EXPRESSED IN HBL100, SIGNAL = 2.6; EXPRESSED IN BT474, SIGNAL = 2.8
tcactttgtgttaatgacttggctctatagaaatgtctctgatttgaagtgttctgcatcaggagactgtcacccaaagtatttcccccaaacaggagcagcagccacacccactgcctacgttgtgcctgaaatggccttgcttctcttcatccccttccttatcctcctcatccccaccacctaatcactggcctacatcctcctgcaatgctcctggggaaaatcagtttaagcagtgtgctaccaagagtggtcctaggaagcagagttatagaatgggatttttggaggcagattactcaccggccagatgacaaggaccccgttgctggcaataggtgggctattgctagtaatggtagaactaggggagtggttctcaaagcgtggtccccatgcccacagcagcatctcttaggaacttgttacaaatgaaaattcactgacctcaccccaaacctactga

SEQ ID NO: 1101 - DNA, 470 bp, Homo sapiens
  MAP TO AC007869.1; EXPRESSED IN HELA, SIGNAL = 2.1; EXPRESSED IN BT474, SIGNAL = 5.6; EXPRESSED IN FETAL LIVER, SIGNAL = 5.8; EXPRESSED IN LUNG, SIGNAL = 2.8; EXPRESSED IN PLACENTA, SIGNAL = 1.9; EXPRESSED IN BONE MARROW, SIGNAL = 1.9; EXPRESSED IN HBL100, SIGNAL = 3.8; EXPRESSED IN ADULT LIVER, SIGNAL = 1.6; EXPRESSED IN BRAIN, SIGNAL = 2.8; EXPRESSED IN HEART, SIGNAL =   2
ctgaatccatcctttcctccatcacttgtcctccccctacctggagaaagtccttttctttagaataaataggtacaagatcaggagcctgagggagcagaggggctgtgactgatgcctggaagggggcagatgctgcttcttgagcctctgagtcagcgtgggaattccccaaacccaccaaggtggaagctcactggtgtcctctgcaatgcataactgccaccttgtggggcttccataccacttctaataattgcaagatttcttgttgaaattttatgtcttttcccccagagttcaatcggcccttttctttatataatgctccatgcacttgaaggaaggcatactgagaatcagtgtaagtgtttacagtcttaccttcactgagttctaaggctggaattaaagcaatgagttcagatttctgggctgaagtgccctggggcaacgatctggcttcgaca

SEQ ID NO: 1102 - DNA, 496 bp, Homo sapiens
  MAP TO AC007869.1; EXPRESSED IN BONE MARROW, SIGNAL = 5.4; EXPRESSED IN ADULT LIVER, SIGNAL = 3.2; EXPRESSED IN BRAIN, SIGNAL = 4.4; EXPRESSED IN PLACENTA, SIGNAL = 3.8; EXPRESSED IN BT474, SIGNAL = 3.4; EXPRESSED IN HBL100, SIGNAL = 3.5; EXPRESSED IN FETAL LIVER, SIGNAL = 4.2; EXPRESSED IN LUNG, SIGNAL = 4.4; EXPRESSED IN HELA, SIGNAL = 3.6; EXPRESSED IN HEART, SIGNAL = 3.6
gagttgtgtgagaggggcagttgaacctctgggcacctgctttttcatcgtatatttatggggaacgatgtgatgttttgatctacatatacattgcagaaagtttcaagctaaccaatgtcacttcactaactcatttttgcaacaaaaatgttaaatctatgaaaaatcttgaaatatacagtatggtaactgttcatctatgtagtacagtagactaagagttgtccctcccacctaacagaaaatttgttcttcttgattaacatcttttcctcccgtccctgtccccttcccccaggatctggggaactgtaccccagccactggcagggagagacatccatggggcctccagagggcctgagagccacagagcaagtggaggaggaggcaggtccaagacagctcatctccaagttcatgttcagtcctcattaaattcatctccaagttcatgttcagtcctaattaaatggtcctggtggggcttctg

SEQ ID NO: 1103 - DNA, 406 bp, Homo sapiens
  MAP TO AC007869.1; EXPRESSED IN PLACENTA, SIGNAL = 3.8; EXPRESSED IN FETAL LIVER, SIGNAL = 4.2; EXPRESSED IN ADULT LIVER, SIGNAL = 4.2; EXPRESSED IN BRAIN, SIGNAL =   6; EXPRESSED IN BT474, SIGNAL = 5.2; EXPRESSED IN HEART, SIGNAL = 3.8; EXPRESSED IN HELA, SIGNAL = 4.3; EXPRESSED IN LUNG, SIGNAL = 5.1; EXPRESSED IN HBL100, SIGNAL = 4.3; EXPRESSED IN BONE MARROW, SIGNAL = 5.5
atggagtggaagtagtggggggcaagcttggcgctgaaggagttctgcggtgccaccgagcggccgccatagtcctgcgagcggtagcaggtgcaggagcacacagactgcaggtccgggacgtccgccttgtacctgggccggctgggccgcggctcctcagggatgtgaatgaccatgctgttgcggtttccggcgagggatgccctctcttcagcatcccgccgctcatcctcactgttcatggtcaagaacctgaggacgaccaggttgaggaaggccccgatgaccgtcagccccaccaggatatacataaagctaaaggccacgtagagcggcttcttctgcagggcacccttggtctgcagggccacgtagtccccgaacccaatggtagtcaacgtga

SEQ ID NO: 1104 - DNA, 480 bp, Homo sapiens
  MAP TO AC007859.1; EXPRESSED IN HBL100, SIGNAL = 3.4; EXPRESSED IN HELA, SIGNAL = 4.7; EXPRESSED IN ADULT LIVER, SIGNAL = 2.6; EXPRESSED IN BRAIN, SIGNAL = 2.8; EXPRESSED IN PLACENTA, SIGNAL = 2.8; EXPRESSED IN BT474, SIGNAL =   3; EXPRESSED IN BONE MARROW, SIGNAL = 3.1; EXPRESSED IN LUNG, SIGNAL = 3.6; EXPRESSED IN FETAL LIVER, SIGNAL = 3.8; EXPRESSED IN HEART, SIGNAL = 2.8
  unsure 426
  unsure 450
tcctgaaaaataaagtggggagatagaggcagagaaagaaaagaaaaagtaaaaaataaagaagaaaatcaaaccagtattttttagtaaattgggactagaattacatgatcagaataatacaatttaaaaacatatatatacatacgcatgcatattatatgtatttaaacatataaatatgtttaaattattttaataatttaatatatattaaatatatacgtatgtaaatttgctatctacactgcatattcccacagctcatatgttcaagactaaatcctccagtgattcaaagagacaccaaaggaatccaaactgccagtctgaacctgggaagttgaagatgaagaacactccaggatttaggggaagcataagagtggaatgtgaatcatttgcttgaggggcttgccttgtccncttctcgtaagactttgtgtcttngcttgtagttacttttcctggggagacagg

SEQ ID NO: 1105 - DNA, 374 bp, Homo sapiens
  MAP TO AC007859.1; EXPRESSED IN BT474, SIGNAL =  10; EXPRESSED IN HELA, SIGNAL = 9.3; EXPRESSED IN BRAIN, SIGNAL = 6.4; EXPRESSED IN PLACENTA, SIGNAL = 5.4; EXPRESSED IN HBL100, SIGNAL =  15; EXPRESSED IN FETAL LIVER, SIGNAL =  12; EXPRESSED IN LUNG, SIGNAL = 5.2; EXPRESSED IN ADULT LIVER, SIGNAL = 7.2; EXPRESSED IN BONE MARROW, SIGNAL = 9.8; EXPRESSED IN HEART, SIGNAL = 9.5
  unsure 47
  unsure 219
tttacaacaatgccaacagcatgctgggttacacagtagactcttcncagctttgccatggtaacacttgtgcagcattccttttcgaacagtgcccattctcttgatgtctacagtatcacctttcttgtagattggcacttatgcggccaaaggaacaacaccatgttttctaaaaggctggagaaaatagcacaggtgcctctcctcttacccttncatcttcatcattttgacaaattactcaaagatggagggtgcagttgaaagccagccatcattttttaaaacttctcaggacattgtaacatgcacttgggttgagaactgctactcgagctcctccaggaggcccttggaggtaggaaccagca

SEQ ID NO: 1106 - DNA, 477 bp, Homo sapiens
  MAP TO AC007785.1; EXPRESSED IN ADULT LIVER, SIGNAL = 4.2; EXPRESSED IN BRAIN, SIGNAL = 2.4; EXPRESSED IN HEART, SIGNAL = 2.6; EXPRESSED IN PLACENTA, SIGNAL = 3.7; EXPRESSED IN BT474, SIGNAL = 3.5; EXPRESSED IN BONE MARROW, SIGNAL = 5.2; EXPRESSED IN FETAL LIVER, SIGNAL = 4.6; EXPRESSED IN HELA, SIGNAL = 4.8; EXPRESSED IN HBL100, SIGNAL =   4; EXPRESSED IN LUNG, SIGNAL = 3.9
tctaatatcgggactggattggataataaaatgcatattgagaataagacagccttctggcccctctgggtctagggcagtaaagcatccaagggttgttgccaaatgggccatgaactgggctgggtttttatatttggtgaaaaagagcctaaatgctaactgatttgggaaaggtctgatagagaaaaaggagcattaaccttgactatgcctttagctccagccacctctttgagaggaaattgttgggcaggtggcggagggctagttgcggtacaaaactgtaagccagaccaggtgtgaggaggggaggtgatagaaggattatagggtgggggagtggaggccgaggaagaattgggacctggctcagcctggcgaggagcagcctggggaggaggggagaggtcagatgagtctgtagtaaaggaggattcaaaggactcagagcttggggtggagactgaaggaaca

SEQ ID NO: 1107 - DNA, 209 bp, Homo sapiens
  MAP TO AC007785.1; EXPRESSED IN PLACENTA, SIGNAL = 1.6; EXPRESSED IN BT474, SIGNAL = 1.6; EXPRESSED IN HBL100, SIGNAL = 1.6; EXPRESSED IN FETAL LIVER, SIGNAL = 1.6; EXPRESSED IN ADULT LIVER, SIGNAL = 1.8; EXPRESSED IN BONE MARROW, SIGNAL =   2; EXPRESSED IN LUNG, SIGNAL = 2.1; EXPRESSED IN HELA, SIGNAL = 2.9; EXPRESSED IN BRAIN, SIGNAL = 2.2; EXPRESSED IN HEART, SIGNAL = 1.8
ttcaagtgtggagtcaaggctcactttaaaatgcatcaaacatagctatgtatcaattcaccacagtccgtcaaaaggcctgtgacgcactctctctgggggtatttgagccgatatcccagtagtcaacactagatggcagtaggagactgctcagaaaatggagagcggcgcccaccttgcagtgcgcaggcgtcgtcagtagacat

SEQ ID NO: 1108 - DNA, 481 bp, Homo sapiens
  MAP TO AC007784.7; EXPRESSED IN HBL100, SIGNAL = 2.2; EXPRESSED IN ADULT LIVER, SIGNAL = 2.6; EXPRESSED IN HEART, SIGNAL = 2.2; EXPRESSED IN BONE MARROW, SIGNAL = 2.4; EXPRESSED IN LUNG, SIGNAL = 2.9; EXPRESSED IN HELA, SIGNAL = 3.4; EXPRESSED IN BRAIN, SIGNAL = 2.8; EXPRESSED IN PLACENTA, SIGNAL = 2.4; EXPRESSED IN BT474, SIGNAL = 2.2; EXPRESSED IN FETAL LIVER, SIGNAL = 2.4
tcattgaatttagggcccacccaaataattcaagatgatctcatcatgacatctttaagttaattacatctgcaaagaccctttatccaaataaggtcacatttatggttccaagggttaagacatggacctatcttttgaaggatcaccatgctacccagtgcagtgtgtatagagtgcacagtttaatgagtgttaattgtttaatcaaagttagctgtcactatgcacctgacactatgtgctaggaagacgaaattactaaagcatagccctggcccacaatgagcctactctacagcaagagagacagatgtgttaacaagacaggttacaataaaagcacgaagagggcacaggtgacgcacaagaaaagaaatgccaaattctgtgaaggtgggagtcaggaaagtgtgcacagaagaaacgccatgaattctcctataaagtggacaaggggtgggcaaggaagaggacattc

SEQ ID NO: 1109 - DNA, 445 bp, Homo sapiens
  MAP TO AC007784.7; EXPRESSED IN HBL100, SIGNAL = 2.9; EXPRESSED IN FETAL LIVER, SIGNAL = 3.2; EXPRESSED IN BRAIN, SIGNAL = 2.5; EXPRESSED IN HEART, SIGNAL = 2.6; EXPRESSED IN BT474, SIGNAL = 2.7; EXPRESSED IN BONE MARROW, SIGNAL = 2.9; EXPRESSED IN LUNG, SIGNAL = 3.4; EXPRESSED IN PLACENTA, SIGNAL = 2.8; EXPRESSED IN ADULT LIVER, SIGNAL = 2.6; EXPRESSED IN HELA, SIGNAL = 3.5
tccaatcaatgtctaggcccttaagcatgcactgttaacatacccatagcttctttttcttccctttaagtaacttcttcatcctctctagtcccatcaaagctattcatttaacagaaaaccatcagccaaggtctacaaagaattccgtggccaaatcctctgcattccatttgactcccctgtgctgacatggcaccactcatcaatcatagccattcagcactcttcagtgtagcttacatggttctcttctcttgcagccattaacttaggggccagaagacctacattctagtcctagccttgccacttagtatttctccatctttgacatatcatttaacttctcagagacttatggtgatgatggggatagtgacaatagctatcttcacttttcagagagagaatttgagatgcagtttcccatactgcacaatcg

SEQ ID NO: 1110 - DNA, 450 bp, Homo sapiens
  MAP TO AC007745.2; EXPRESSED IN HBL100, SIGNAL =  14; EXPRESSED IN FETAL LIVER, SIGNAL =  19; EXPRESSED IN BRAIN, SIGNAL =   7; EXPRESSED IN BT474, SIGNAL =  15; EXPRESSED IN BONE MARROW, SIGNAL =  10; EXPRESSED IN HELA, SIGNAL =  26; EXPRESSED IN ADULT LIVER, SIGNAL = 8.7; EXPRESSED IN HEART, SIGNAL =  13; EXPRESSED IN PLACENTA, SIGNAL = 6.3; EXPRESSED IN LUNG, SIGNAL =  11
ccagggttccttgttctgacttgcttggaggctacaaagatcatattaatgggtactcttctgaccttgacaggaggcagtgtgttatctaactgagactatcagtttttgcccttgaaaactgctccctgaattgatagagacaagacttaaaaaaattggaggcagattacattttatgcttgataataagcatgacttacatactgcatttgcttaaaacaaagtgagacagcaaggtgggaaggggttcccagagaaactccacccgacctgagcactgggaagaatgcaggctggagtggagccacagaagtttgtgcacttcgcaggggaaaggagccgggctcttcctcttcttgggtggaacccggcattcaatctgccaggtgagaagcactccagcaggaactctcactttgttacgagtccctgattccccttttcttc

SEQ ID NO: 1111 - DNA, 442 bp, Homo sapiens
  MAP TO AC007745.2; EXPRESSED IN PLACENTA, SIGNAL =   2; EXPRESSED IN BONE MARROW, SIGNAL = 2.9; EXPRESSED IN FETAL LIVER, SIGNAL =   2; EXPRESSED IN LUNG, SIGNAL = 2.3; EXPRESSED IN HELA, SIGNAL = 2.1; EXPRESSED IN BT474, SIGNAL = 2.2; EXPRESSED IN HBL100, SIGNAL = 2.7; EXPRESSED IN ADULT LIVER, SIGNAL = 2.3; EXPRESSED IN BRAIN, SIGNAL = 2.6; EXPRESSED IN HEART, SIGNAL = 2.2
caggtagcactgtccagcactttaagggtgatggaaagagttaaggcaagtcaggacattagaaccaatcaaaggaactgtatatcagagacatgttacttttctatttgagaactggtattgaaatctaagagggagttagaatcacaggtttgaatgtattagctcatacctgcagagaagttggtgtaggctatgactatgcagggcttaacaccatatactgtgtttgtggcttcaagatcagttatagttctaattcccacagaattttaggtagtggagatggcagacaagcacatttagcatctccttcataccgctccatcccacctttccatggaacctcaccttggggatccttggaactcactagcaaaaagcagtattagaaaaagatcagctgaaatatataaataccagtgtgctaacttttcaaaca

SEQ ID NO: 1112 - DNA, 495 bp, Homo sapiens
  MAP TO AC007744.1; EXPRESSED IN BONE MARROW, SIGNAL = 0.87; EXPRESSED IN PLACENTA, SIGNAL = 2.3; EXPRESSED IN HEART, SIGNAL = 3.3; EXPRESSED IN BRAIN, SIGNAL = 2.2; EXPRESSED IN HELA, SIGNAL = 1.6; EXPRESSED IN FETAL LIVER, SIGNAL = 1.8; EXPRESSED IN HBL100, SIGNAL = 1.9; EXPRESSED IN BT474, SIGNAL = 1.7; EXPRESSED IN ADULT LIVER, SIGNAL = 2.6; EXPRESSED IN LUNG, SIGNAL = 2.8
ccttcttacccataaggaggacatcatctcctttgagaagagatacctgaatgcaccagctaatgcagatccctcctttggaattccagcactatttgttactttcatagaattaggtgtgactataacttgcttactggttcaattacttatatacggcatttttcaatcctcaaaatttcgatgcggtagatgttaatatgattctcaatttgtagatgaggagaaaaggtggaggagcttaagaacttcgtcaataatacatagtaagtaacagaaatcaaatctgaatgctgatctttttcattatagagctgagaatctttgccgttgtgttgctgtcacagcttgccaactttggagcatttctttttgaaaaatttttgtgagtgcatagtaggcatatatatttatggggtatatgaaatgttttgatataggcatacaatgcataataatcacatcagggtaaatggggtatagatcaccgcaagc

SEQ ID NO: 1113 - DNA, 488 bp, Homo sapiens
  MAP TO AC007739.1; EXPRESSED IN BT474, SIGNAL =  24; EXPRESSED IN BONE MARROW, SIGNAL =  32; EXPRESSED IN HELA, SIGNAL =  17; EXPRESSED IN ADULT LIVER, SIGNAL =  13; EXPRESSED IN BRAIN, SIGNAL =  20; EXPRESSED IN HBL100, SIGNAL =  19; EXPRESSED IN FETAL LIVER, SIGNAL =  22; EXPRESSED IN LUNG, SIGNAL =  25; EXPRESSED IN PLACENTA, SIGNAL =  24; EXPRESSED IN HEART, SIGNAL =  16
cagctatttgggaggctgaggtgggaagattgttggagcccgggagttcaaggctgcagtgagccatgattgctctgctgcactgcatcctaggcaacagagtgagaccctgtctctctctaaaagcaataagcaaacctactgattcctgtgatccaccaccagattctgatttcatctatctatgggaggcctaggcattggtgtgtgttatgtttttgcattttttgtgtctgtttttgtttgtttgtttcctctgtacagatgatgttttttattctctaggagattttgatggttagccaggcttgagaaccactgagttatgactaagagaaaaatatcatggagaataccatggatagtgagctcgtttacagttgtaaaaaacagagtcagattattaaatttgagtaggtcttaaccttaatatatgactattaatgtgaaattacagattgtatgtagaagcaatttctcccctaaaa

SEQ ID NO: 1114 - DNA, 457 bp, Homo sapiens
  MAP TO AC007739.1; EXPRESSED IN FETAL LIVER, SIGNAL = 1.4; EXPRESSED IN PLACENTA, SIGNAL = 1.6; EXPRESSED IN BONE MARROW, SIGNAL = 1.4; EXPRESSED IN HBL100, SIGNAL = 1.3; EXPRESSED IN LUNG, SIGNAL = 1.4; EXPRESSED IN ADULT LIVER, SIGNAL = 1.1; EXPRESSED IN BRAIN, SIGNAL = 1.8; EXPRESSED IN HEART, SIGNAL = 1.2; EXPRESSED IN BT474, SIGNAL = 1.4; EXPRESSED IN HELA, SIGNAL = 1.3
aggcataagcaaatggcaagcaatttggctagaccttgagtctggaggacccagcttaaatgggaataaattgtaggtggctacaaaagaagagcgaattgtccttcttgtcactgaaatgaaaatacaaaatattacagagccaagcataaagcaggcagtcaatacattttttatctcttccttctcctctccctctatccagagataagtgaagacagcagagttggcccaagtaggatgaagaaagaaaaggggcttcataccattcctgtcttgtccatctcacccccagcccactcccacctgcagttctcaggaattggctcgggaactgcactatgaaccaagatgagatgagcaagaaaagtagctcccgttccttgcctttatcctcaaccccagacattaaaggatagctgagaggaaagaatttgcaggaggaggtggctacatt

SEQ ID NO: 1115 - DNA, 389 bp, Homo sapiens
  MAP TO AC007735.2; EXPRESSED IN BT474, SIGNAL = 1.4; EXPRESSED IN FETAL LIVER, SIGNAL = 1.5; EXPRESSED IN LUNG, SIGNAL = 1.3; EXPRESSED IN ADULT LIVER, SIGNAL = 1.3; EXPRESSED IN BRAIN, SIGNAL =   1; EXPRESSED IN HEART, SIGNAL = 1.3; EXPRESSED IN BONE MARROW, SIGNAL = 0.82; EXPRESSED IN HELA, SIGNAL = 2.9; EXPRESSED IN HBL100, SIGNAL = 1.6
ttgttgttacactgtgttttatttgtgttatatttattgttgtattgttattttttttcaaatgtttaggtctgtatttgcttgaattcacagatgtggaacccatggatttccatgattgactggatatttctctcagataccattacacagcagcaacactggttcctcgtgataatcaaggtttattgcccctcctatcacactgttgtggctttttctctcccatagctctgcaagcaggaggagtgttagagctctttgactcccaccaccagcagctcagcaagcaggagctttacagctcttttgcttctgcagttcagtgagttccgggttcttggcccacgtccaagaggaatagggtatgcggacactggagagtgagt

SEQ ID NO: 1116 - DNA, 485 bp, Homo sapiens
  MAP TO AC007685.1; EXPRESSED IN HBL100, SIGNAL = 1.7; EXPRESSED IN FETAL LIVER, SIGNAL = 1.3; EXPRESSED IN BRAIN, SIGNAL = 0.9; EXPRESSED IN PLACENTA, SIGNAL = 0.82; EXPRESSED IN BT474, SIGNAL = 2.4; EXPRESSED IN BONE MARROW, SIGNAL = 0.96; EXPRESSED IN LUNG, SIGNAL = 1.3; EXPRESSED IN HELA, SIGNAL = 1.1; EXPRESSED IN ADULT LIVER, SIGNAL = 0.86; EXPRESSED IN HEART, SIGNAL = 1.1
tgtacgtgcattcgaacacctatctgtacccatatattaacatccgtctttacccatgtgctgatatctgtgtgctccatgtcccgacatctgtccccagctattactgtctgtctgtacacacattttggtatctagctgcatctgtaccccaacacctagctgacggcgtaccccctgccctgccttggcggggccctgagcatgtgctgtctgtccccgcaggttctggacgtggcatgacgagcgcttcctctacatgctcatggagtacgtgccgggcggcgagctcttcagctacctgcgcaaccgggggcgcttctccagcaccacggggctcttctactctgcagagatcatctgtgccatcgagtacctgcactccaaagagatcgtctacagggacttgaagccagagaacatcctgctggatagggatggccacattaagctcacggactttgggttcgccaagaagctggtag

SEQ ID NO: 1117 - DNA, 466 bp, Homo sapiens
  MAP TO AC007685.1; EXPRESSED IN BONE MARROW, SIGNAL =  34; EXPRESSED IN FETAL LIVER, SIGNAL =  23; EXPRESSED IN HELA, SIGNAL =  18; EXPRESSED IN ADULT LIVER, SIGNAL =  12; EXPRESSED IN BRAIN, SIGNAL = 4.3; EXPRESSED IN HEART, SIGNAL = 5.7; EXPRESSED IN PLACENTA, SIGNAL = 9.3; EXPRESSED IN BT474, SIGNAL =  20; EXPRESSED IN HBL100, SIGNAL =  47; EXPRESSED IN LUNG, SIGNAL = 9.7
ttgttgttgttgtttgtttgtttgtttttagttcatgtcttttattaactcatacacagttacttgtcttctggtttgttgaagcagtaagtcagacaacatttgccgcaataatgtctgtcaaagtggcttaccagaaacactccagctccacattcgtcagaagggcactaattttgtcattctcatccaccttataacatttcaggacatccagcttcaccttctttctcttgtgcttattcttcttgggagtggggtaagacttcttccttttcttagcaacaccacaaagtctcagcaaaagatgaagagtaggctccttttgaatgttgcagtcagacaaagtacgtccatcttccagttgcttgccagcaaagatcagtctttgctgatcaggaggaattccttccttatcctggatcttggcctttacattttctatcgcatctgagggttcaacctc

SEQ ID NO: 1118 - DNA, 455 bp, Homo sapiens
  MAP TO AC007679.2; EXPRESSED IN BT474, SIGNAL = 1.9; EXPRESSED IN BONE MARROW, SIGNAL = 1.3; EXPRESSED IN HELA, SIGNAL = 0.74; EXPRESSED IN ADULT LIVER, SIGNAL = 0.94; EXPRESSED IN FETAL LIVER, SIGNAL = 1.4; EXPRESSED IN LUNG, SIGNAL = 1.2; EXPRESSED IN BRAIN, SIGNAL = 0.89; EXPRESSED IN HEART, SIGNAL = 0.78; EXPRESSED IN PLACENTA, SIGNAL = 1.6; EXPRESSED IN HBL100, SIGNAL = 0.98
gccttgcaggctgtaacttctctcgagtgcctgagtaccattggggtccttgcccagtcagatggtgtgccagtccaggagttgtcagatagaggaataggggtgttctccacaggtactggagcttcaggaatacaatccttgagccgagaggtgaacacagacctaggggagctattgaatgggcgtatagtacatgataatttttctagtctagagctggatgagaacctgctccgttctgctaccttgtcaaacccacctacacccctggcagggcagatccaggggcagttctctgccccagccaacgttggccttacttctgccactctgatcagccagagtgcacttggggagagagccttcccaggacagtttcatggacttcatgacggcagccatgcctcccagaggccacatcctgcccagctgctgagcaaggcagatgacct

SEQ ID NO: 1119 - DNA, 478 bp, Homo sapiens
  MAP TO AC007679.2; EXPRESSED IN BT474, SIGNAL = 1.6; EXPRESSED IN HBL100, SIGNAL = 2.2; EXPRESSED IN HELA, SIGNAL = 0.74; EXPRESSED IN ADULT LIVER, SIGNAL =   1; EXPRESSED IN PLACENTA, SIGNAL = 1.2; EXPRESSED IN BONE MARROW, SIGNAL = 2.3; EXPRESSED IN FETAL LIVER, SIGNAL = 1.2; EXPRESSED IN LUNG, SIGNAL =   1; EXPRESSED IN BRAIN, SIGNAL = 0.96; EXPRESSED IN HEART, SIGNAL = 0.86
tttcatgaggatccggtcagtcctgggtgggtccacagtgggagccctactggatggcaggaggggcagaggcctcttgtgagacaactgccgtgcttgtgctatagtgtgtgtggtgggtgccactccctgcattggtaggctggtgttctgaggttgaggtgacttgcagactgaaccctgcggtggcgctggaggttttaaagaagtagataaaggtgacaggtgggagtgctgctgcggaggctgctgctgtgaaggtgcaggagggggactaaagtgctcttgtcgaacttttaaaatctctgtctctctctggcgctgccgattctgggccaacttgctctgcaacttctttctcacagttgcccctttctttaggtcatcatcttcctcattgaaagcaaatgggtcttccaattcggtttccaggtagtggagagggacccttgccccaggtggagagagggacattcca

SEQ ID NO: 1120 - DNA, 465 bp, Homo sapiens
  MAP TO AC007679.2; EXPRESSED IN HEART, SIGNAL = 3.2; EXPRESSED IN BRAIN, SIGNAL = 1.5; EXPRESSED IN PLACENTA, SIGNAL = 4.6; EXPRESSED IN BT474, SIGNAL = 8.3; EXPRESSED IN BONE MARROW, SIGNAL =  13; EXPRESSED IN HBL100, SIGNAL =  34; EXPRESSED IN FETAL LIVER, SIGNAL =  10; EXPRESSED IN LUNG, SIGNAL = 5.8; EXPRESSED IN ADULT LIVER, SIGNAL = 6.3; EXPRESSED IN HELA, SIGNAL =  10
cgtataacagtgtcctttcattcctactcatttcatttatctactctgacagtgtctgctttttatttggagtgtttagaccatttgaatttaatgttattatttatattactgcatttatttatttaatttttaagatggaaacaaaacatctaaaactgtagcttctggaagaactgcttgttcttgcccgttttgtatctctctttgagcttgaccttggcctcccattgggacttgtgtttaagagcaggatctctgaagacatccttgtggatgacagttttgtgtaagaggatatccacagagtgcactgtaggcgtaagatgattgtagttataaaccttcacaaaagactcgatctttgacctcctggtaatcttctttttgcccatggcagctgtcactttgcagggatagcgatcaattccaaccacgagagcttggatgtaggggcagtctgag

SEQ ID NO: 1121 - DNA, 463 bp, Homo sapiens
  MAP TO AC007664.7; EXPRESSED IN BT474, SIGNAL =  16; EXPRESSED IN HELA, SIGNAL = 8.7; EXPRESSED IN PLACENTA, SIGNAL =   4; EXPRESSED IN BONE MARROW, SIGNAL = 8.1; EXPRESSED IN HBL100, SIGNAL =  37; EXPRESSED IN FETAL LIVER, SIGNAL =  16; EXPRESSED IN LUNG, SIGNAL =   4; EXPRESSED IN ADULT LIVER, SIGNAL =   3; EXPRESSED IN BRAIN, SIGNAL =  24; EXPRESSED IN HEART, SIGNAL =  10
atgatcaaggcataggtggccagggggaggtggatgtgggggtacggcaccaggttggtttggaattctgtcaagtacacattcagggccccatcaaatcacagggaggccgtgatggaggacacgatctgcccaatcagacgactgaggttggtgtacatgggacactcgatgtccaggttgcactgacatgtcgaccatgaaggcacagtcagaatgttccagggtcgtgtaggtggtcaggatggagttgcagggctccatcacagccatggagacatggggggctgggcaaatggcaaactccagcttggacttcttcccgtagtccaccgagagccgctccatgagcagagacatgaacccagagacggtgccgcccccaaagctgtggaagatggggaagccctgcagtcccatgcacagatcagcctgagagaaatcagacaatgtgagccaatgc

SEQ ID NO: 1122 - DNA, 452 bp, Homo sapiens
  MAP TO AC007664.7; EXPRESSED IN HBL100, SIGNAL = 2.7; EXPRESSED IN LUNG, SIGNAL = 2.2; EXPRESSED IN PLACENTA, SIGNAL = 2.3; EXPRESSED IN BT474, SIGNAL = 1.8; EXPRESSED IN BONE MARROW, SIGNAL = 2.8; EXPRESSED IN FETAL LIVER, SIGNAL = 2.7; EXPRESSED IN HELA, SIGNAL = 2.7; EXPRESSED IN ADULT LIVER, SIGNAL =   2; EXPRESSED IN BRAIN, SIGNAL = 3.6; EXPRESSED IN HEART, SIGNAL = 2.7
actgactgtccatgcaggctctggggtcccacctgctcctgtaggcagagccaagcagcatgacacacagaggtcttggttttatagagaaactttaattgcaaacaacctgaaagcagccatgctgggggtggcaggagagcccaccacaccctccccttagtattctttgccttcttcagcctccgcttccacagaatccatgcccacctcttcataatccttctccagagctgccaggtccttgcgagcctcagaggactccccctcctccatgccttcccccatgtaccattgcacaaaggcctgcttggcatacatgagatcaaacttatggtccaggcaggcccaggccttggtgatggctgtgatgttgcttagcatccacatggcccattgcaacttggtcaggtttcccccagggaccaccgtcaggggctggtagttaatgc

SEQ ID NO: 1123 - DNA, 467 bp, Homo sapiens
  MAP TO AC007664.7; EXPRESSED IN HBL100, SIGNAL =  82; EXPRESSED IN BT474, SIGNAL =  52; EXPRESSED IN BONE MARROW, SIGNAL =  21; EXPRESSED IN LUNG, SIGNAL =  11; EXPRESSED IN HELA, SIGNAL =  28; EXPRESSED IN ADULT LIVER, SIGNAL = 7.5; EXPRESSED IN BRAIN, SIGNAL =  44; EXPRESSED IN PLACENTA, SIGNAL =  20; EXPRESSED IN FETAL LIVER, SIGNAL =  37; EXPRESSED IN HEART, SIGNAL =  12
gatcttggccacggacagctgctcatggtaggccttcttggctgagatgaccagggcgtaggtggccagggggaggtggatgtgggggtatggcaccaagttggtttggaattctgtcaagtacacattcagggccccatcgaatcacagggaggccgtgatggaggacacgatctgcccagacgactgaggttggtgtacgtgggacactcgatgtccaggttgtgctgacatgtcataggtggctttgctgtcgactatgaaggcacagtcagaatgttccagggtcgtgtaggtggtcaggatggagttgtagggctccgtcatggccatggagacctggggggctgggcaaatggcaaactccagcttggacttcttcccgtagtccaccgagagccgcttcatgagcagagacacgaacccagagccagtgccgcccccaaagctgtggaagatgaggaagc

SEQ ID NO: 1124 - DNA, 455 bp, Homo sapiens
  MAP TO AC007664.7; EXPRESSED IN FETAL LIVER, SIGNAL = 6.3; EXPRESSED IN LUNG, SIGNAL = 3.4; EXPRESSED IN PLACENTA, SIGNAL = 4.5; EXPRESSED IN BT474, SIGNAL = 5.5; EXPRESSED IN BONE MARROW, SIGNAL = 5.2; EXPRESSED IN HBL100, SIGNAL = 4.8; EXPRESSED IN HELA, SIGNAL = 3.8; EXPRESSED IN ADULT LIVER, SIGNAL = 3.4; EXPRESSED IN BRAIN, SIGNAL = 5.5; EXPRESSED IN HEART, SIGNAL =   2
cggatgtggaggagtcattcctgagggcgagtgtctgccctggtgctatatctgctgccttttcacactgggtgtgacctgaagagacagcctgaggcctgtcctcactcactgtctttgaggaactgagggtcagctggcagtgggatgaggctggccccctcctccgctttagccccggcaagcctcccgtggagctgtaggagctggagatggcatttcggttggtgcaggagctcgtccaggaggtctgggatgtctggttatatctgatttctgacctctgggcatggaggtctgtctgcagaggcccgggcccgggcacaaagggagagaggcctctattgtcccgcaggggccgaaatgcagacggtgcatccccggtgacctcggggacccttctctgatcaccaggattctcttggactctagggtccttgtcctgctcaggcatc

SEQ ID NO: 1125 - DNA, 473 bp, Homo sapiens
  MAP TO AC007655.1; EXPRESSED IN ADULT LIVER, SIGNAL = 1.1; EXPRESSED IN HEART, SIGNAL = 0.9; EXPRESSED IN BONE MARROW, SIGNAL =  20; EXPRESSED IN FETAL LIVER, SIGNAL =   3; EXPRESSED IN LUNG, SIGNAL = 2.8; EXPRESSED IN HELA, SIGNAL = 0.7; EXPRESSED IN PLACENTA, SIGNAL = 1.1; EXPRESSED IN BT474, SIGNAL = 1.3
aagtggtagcctggaattctttctaaatcccctctgtgtgttatgtgtgcctatctcactgctgacttgcatcttatctcttaagaagacttaattatacagttcataactttaatcagcatatataaattgtgcctcgctcactttttcctggaagcagttggtcctcttccctttgctgctgctcctgagcagccaaaatgtcttcttccctctcagcgatcttccacccaccctgttctctgtacacacatacctgtcaccacaggaccatctcccagcagcgttttcttgtacttaattagactctcatcatctttgtccatttcctgcagctctttcagggacttctgtggtggaggcttataattgagcttgctgtccagctcatcatcatcatcctcctccacatgtggctctggggctttttcagtcattctgatctatttctgggagacagaatgacagcccgt

SEQ ID NO: 1126 - DNA, 482 bp, Homo sapiens
  MAP TO AC007655.1; EXPRESSED IN HBL100, SIGNAL = 3.7; EXPRESSED IN BRAIN, SIGNAL = 3.9; EXPRESSED IN PLACENTA, SIGNAL = 3.5; EXPRESSED IN BT474, SIGNAL = 3.1; EXPRESSED IN BONE MARROW, SIGNAL =   3; EXPRESSED IN FETAL LIVER, SIGNAL =   4; EXPRESSED IN LUNG, SIGNAL = 3.4; EXPRESSED IN HELA, SIGNAL = 2.9; EXPRESSED IN ADULT LIVER, SIGNAL = 3.3; EXPRESSED IN HEART, SIGNAL = 2.8
agtttgcattttcttaattgggatatcttgtcaagacgagaccacatgaaactctaaattctaattagattttagataattatgaaagacacttatatagacattttcccttaacaaaaaagaagtgttattcagaggagagaatatttgaagaaactcccagaagtgataacagaaatatgagacagtgatatgattgccagtttttaaacatgtgtaggattctcctcatgtgaggttggcaacgtaggaactgaagcaagagaagccatggagtaatacagatctcctattccacctactctcaggcagaaaagagaagaatgaccatgcctgtcagggccagaaggagcttcatgatttcataattctcccatccatccatccatccatccagccagccagccagccagccatccatcaagttatctatctagccaacaaatgtactgagcatctactgtttgtcaactctaggctgg

SEQ ID NO: 1127 - DNA, 394 bp, Homo sapiens
  MAP TO AC007655.1; EXPRESSED IN BONE MARROW, SIGNAL =  11; EXPRESSED IN HBL100, SIGNAL =  13; EXPRESSED IN FETAL LIVER, SIGNAL =  12; EXPRESSED IN LUNG, SIGNAL = 8.8; EXPRESSED IN ADULT LIVER, SIGNAL = 7.6; EXPRESSED IN PLACENTA, SIGNAL = 6.3; EXPRESSED IN BT474, SIGNAL = 8.3; EXPRESSED IN HELA, SIGNAL =  12; EXPRESSED IN BRAIN, SIGNAL = 9.6; EXPRESSED IN HEART, SIGNAL =   9
tggctaaggcctgagttacaggccaatcacagtcagtgggctgagccagctctgcatcagttgctagctgggcagagtgatttccccaagagtacttagggtgcccagattgaaataaggcaaaggggtacaaggaaaggcataagagaattagcaaagaggaggccatgcactggtttcagcagaagtatgatgggatcatccttcctggaaaataaatgtccatttctagccaaaaggccaataaaaaagattttatttaaatattttttttaaataaaaggagccacaagatttctttatactctgcttttggaaaagatgatgacactggtcaaaaaggagagagatgcaatagctataggatcagggatgcatttcttgctggaagctg

SEQ ID NO: 1128 - DNA, 461 bp, Homo sapiens
  MAP TO AC007655.1; EXPRESSED IN HELA, SIGNAL = 1.8; EXPRESSED IN ADULT LIVER, SIGNAL = 1.2; EXPRESSED IN BRAIN, SIGNAL = 1.1; EXPRESSED IN HEART, SIGNAL = 0.95; EXPRESSED IN BT474, SIGNAL = 2.7; EXPRESSED IN BONE MARROW, SIGNAL = 1.8; EXPRESSED IN HBL100, SIGNAL = 4.4; EXPRESSED IN FETAL LIVER, SIGNAL = 2.2; EXPRESSED IN PLACENTA, SIGNAL = 1.4; EXPRESSED IN LUNG, SIGNAL = 1.3
gaaaaactgtgaaaacaagagtgctctggagaaaaacaggtggctgtcagtagaactatgagttgcaaacaatggtttgggaatgaacaacctttacttgtcctttgagaatccttcacatcttaagagaatccaattaggaggaaacaagaaaacatgaacactaacaacacatagtattttttggaatgacttcattctaacctcatttaaactttattcacattatgtaagtgtttacctggaggtggaccaggaggaaggcctgtaggtggcccaggaggccgtaatggtggagcaggtggtggtccaagaggtggtggtcctggcatgggaggtgcttgtatctgagaaggaggaacagactgcggcggagcctgctgctgtgaagaagcagtggatgtgccatcagaatgggattcctctttatgctgcttttgtgattgcttttctgcttcaga

SEQ ID NO: 1129 - DNA, 451 bp, Homo sapiens
  MAP TO AC007655.1; EXPRESSED IN BONE MARROW, SIGNAL = 1.3; EXPRESSED IN HBL100, SIGNAL = 1.2; EXPRESSED IN ADULT LIVER, SIGNAL = 1.5; EXPRESSED IN PLACENTA, SIGNAL = 1.2; EXPRESSED IN HEART, SIGNAL =   1; EXPRESSED IN BRAIN, SIGNAL = 0.92; EXPRESSED IN HELA, SIGNAL = 0.79; EXPRESSED IN LUNG, SIGNAL = 0.71; EXPRESSED IN FETAL LIVER, SIGNAL = 2.2; EXPRESSED IN BT474, SIGNAL = 1.4
tgctttgctttgcagtgttggaacttatttgttggagaaatgtcttcagagtcagaaaaggataaagagagactgattcaagctgccaaaatgttcttctttcatgtacaagatcttgcttctgtcataaacacactgactgaattgtttagccgcagtatgaatactcaaatccttttgatggctgtgaaaaacaatagttacattaaggatttttttgagcaaatgctcaaaatttttaaggagatgcaatctgtagtggatgcaagacatgacaaaattcaaaaggagtctttatgttccaaggttgcaatggccatgtgctctgtggttcagaagagtaccaatgtagaggagttgcatcagtcagctaaagaagtattcaaaagtgcccatacgccagtcatcatctctgtgctaaacagcagtaacatccttgggagtctggaat

SEQ ID NO: 1130 - DNA, 460 bp, Homo sapiens
  MAP TO AC007639.5; EXPRESSED IN BRAIN, SIGNAL =  22; EXPRESSED IN HEART, SIGNAL =  15; EXPRESSED IN PLACENTA, SIGNAL =  12; EXPRESSED IN BT474, SIGNAL =  12; EXPRESSED IN BONE MARROW, SIGNAL =  18; EXPRESSED IN HBL100, SIGNAL =  12; EXPRESSED IN LUNG, SIGNAL =  14; EXPRESSED IN ADULT LIVER, SIGNAL =  15; EXPRESSED IN FETAL LIVER, SIGNAL =  11; EXPRESSED IN HELA, SIGNAL =  17
tggacgtatcatgcaccttggtgtttgcccctgtagtgattctcactaccttcgctaccattggagggatgctcacccacctccttgggtgccatttttcttttttaaaagatgaaggcatttcagatgatcccttcatttatgttctactttcattctttggtttcaaaagaagtcctgatcttatgtcaaaggcaacaatctcttctctcaatctctctctctctctcactctctctctctggctcactctgtcacccaggttggagtacagtggcatgatctcagctcactgcagcctcgacttcctgggctcaagaaatcctcctgtctctgccttccgagtagctgtgatcacagttgtatgccatcatgcccaggtaattttttttatttttatttttttgtagagacagggtctcaccatcttgcccaggctcgtcttgaactcctgggctca

SEQ ID NO: 1131 - DNA, 488 bp, Homo sapiens
  MAP TO AC007629.3; EXPRESSED IN BT474, SIGNAL = 1.6; EXPRESSED IN HELA, SIGNAL = 1.1; EXPRESSED IN ADULT LIVER, SIGNAL = 1.3; EXPRESSED IN BONE MARROW, SIGNAL = 1.7; EXPRESSED IN FETAL LIVER, SIGNAL = 1.6; EXPRESSED IN LUNG, SIGNAL = 1.6; EXPRESSED IN PLACENTA, SIGNAL = 1.6; EXPRESSED IN HBL100, SIGNAL = 3.1; EXPRESSED IN BRAIN, SIGNAL = 1.6; EXPRESSED IN HEART, SIGNAL = 1.4
ttcttgagacagggactcgctatgttacccaggctggtttcaaactcctaggccaaagcaatcctctttcctcagcctcccaaatagtggggacttaggcacacattactacatgcctcaggagtttttataatagaaattacacttcacctttaatcatttgtagcatctatgaatgcaaaaagaaacaaaaacagagaataactaattactaaatatagtattcagcattctaactcacttacctggactatttttgatgaatgatctgcatgatttaaagtggttctatcagcatctggatcagactccgtctgcctcagggaagcatgttttttcttagcaaggtctagatctctactatatgagtatccaagtttagaagtaggagataaacttgtttttttgataggagattctggatctgatctgcattctaaggatctggaattctctaatttttctttctccaagttactaccgatgtc

SEQ ID NO: 1132 - DNA, 438 bp, Homo sapiens
  MAP TO AC007629.3; EXPRESSED IN PLACENTA, SIGNAL = 3.9; EXPRESSED IN BONE MARROW, SIGNAL = 4.2; EXPRESSED IN HBL100, SIGNAL = 6.9; EXPRESSED IN LUNG, SIGNAL = 5.2; EXPRESSED IN ADULT LIVER, SIGNAL = 3.8; EXPRESSED IN BRAIN, SIGNAL = 3.5; EXPRESSED IN BT474, SIGNAL =   4; EXPRESSED IN FETAL LIVER, SIGNAL = 6.2; EXPRESSED IN HELA, SIGNAL = 5.2; EXPRESSED IN HEART, SIGNAL = 3.6
aagctgagaagggaaccagctattgaaaacctacagattatctcacataacataaaatacaatagtgaatcttagtaacaagagaacacaaactacaatttgctattccaatgttattgctaattttaacatccaacctaaaacaaaataacataaaattgatggaaggtggactaagctaaatggtttatgaggccataagatgtaataaaactacaaaattattattattattgatgagataataaaaatataaccataaagtttgccatgcagcaggacacaaaacatttataatttgaaattaccgggagtatcaaggtcattttctaagttagtaagttcatctccacctcctacaacaaagccttcagggatctcctcgttagtatctatctcaatattatcattttcatctgtaggaacatgtagcaataa

SEQ ID NO: 1133 - DNA, 487 bp, Homo sapiens
  MAP TO AC007625.2; EXPRESSED IN BT474, SIGNAL =  24; EXPRESSED IN BONE MARROW, SIGNAL =  27; EXPRESSED IN HELA, SIGNAL =  25; EXPRESSED IN ADULT LIVER, SIGNAL =  21; EXPRESSED IN BRAIN, SIGNAL =  29; EXPRESSED IN PLACENTA, SIGNAL =  34; EXPRESSED IN HBL100, SIGNAL =  24; EXPRESSED IN HEART, SIGNAL =  33; EXPRESSED IN LUNG, SIGNAL =  29; EXPRESSED IN FETAL LIVER, SIGNAL =  26
ctctttcccacatcccctggcaatgaaccattccacactgtctctattattctgaatatctcatatacatggcatcacatagttttcatgcttttgtgactggcttacttcactttgcagaatgtcttcaaggttcatacatgttgtagcatatgtcagaatttccttcatttttaagactgcttagcattccagtatagacacacacacacacacacacacacacacacacacacacccaccccatatatttagagcattcattccagtatacacacttggttgacttccatgttgtagcattgtgaataatgctgctatgaccatggaagtgtaaataccttttagagactctgcttttagttctttggagtatttattacgaagaattgctgaattagatggcagtttcatattttttattttttttttgaggagctgccgtactgttttctacagtggttataccattttacattcccaccaa

SEQ ID NO: 1134 - DNA, 458 bp, Homo sapiens
  MAP TO AC007564.9; EXPRESSED IN BT474, SIGNAL = 2.9; EXPRESSED IN LUNG, SIGNAL = 2.9; EXPRESSED IN HELA, SIGNAL = 1.6; EXPRESSED IN ADULT LIVER, SIGNAL = 1.7; EXPRESSED IN BRAIN, SIGNAL = 2.1; EXPRESSED IN PLACENTA, SIGNAL = 4.6; EXPRESSED IN BONE MARROW, SIGNAL = 4.5; EXPRESSED IN HBL100, SIGNAL = 3.3; EXPRESSED IN FETAL LIVER, SIGNAL = 3.4; EXPRESSED IN HEART, SIGNAL = 1.7
gggagctgaaaaattcctatcccttagtgatattgtagccattgtaacatcatagggcaacacattactcacatgtttgtggtgatgtggtgatgctggtgtaaacaaatctactgcactgccagttgtataaaagcacatgtaattctataccgtgcataacacttgataatgataatgaatatgttactagtttatatatttactatggtgtactttttattgttattttacagtgcactccttttactgaaaaagaaaagttaactgtaaaacagcctctggcaggcacttcaggaggtattccagaagaaagtgttattatcataggagataacagctcaatgcatgttattgcccctgaagatctttcaggagaacaagaggaggagttggaagacagtgatattgatgatcctgaccctgtgtaggcctagaataatgtatatgtttgtgcc

SEQ ID NO: 1135 - DNA, 456 bp, Homo sapiens
  MAP TO AC007564.9; EXPRESSED IN FETAL LIVER, SIGNAL = 2e+02; EXPRESSED IN PLACENTA, SIGNAL =  74; EXPRESSED IN BT474, SIGNAL = 2e+02; EXPRESSED IN BONE MARROW, SIGNAL =  68; EXPRESSED IN HBL100, SIGNAL = 2.1e+02; EXPRESSED IN LUNG, SIGNAL = 1.4e+02; EXPRESSED IN HELA, SIGNAL = 1.3e+02; EXPRESSED IN ADULT LIVER, SIGNAL =  63; EXPRESSED IN BRAIN, SIGNAL =  63; EXPRESSED IN HEART, SIGNAL =  47
tcaacattgtcgtcattggacacatagatttggtcaagtccaccaccactgatcatctgatcaacaaatatggtagcatcaacaaaagaaccatcgaaaaatctgctgagaaggaagctgctgagatggaaaagggctcctccccatgcctgggtcttggataaactgaaagctgacactgaacgtggtatcactattgatacctccccatggaaatttgatgtctcaggacacagagattttatcataaacatgaatccaggcacatctcaggctgactttcctgtcctgattgttgctgctgacattggtgaatttgaaggcatctccaagaatgggcagaccgatgatcatggtgctcttgcttatacactgggtatgaagcaaccaattgttggtgtttacaaaatgaattccactgagccaccctatggccagaagaggaaattgcaaaaa

SEQ ID NO: 1136 - DNA, 462 bp, Homo sapiens
  MAP TO AC007555.1; EXPRESSED IN BONE MARROW, SIGNAL = 2.2; EXPRESSED IN HBL100, SIGNAL = 1.8; EXPRESSED IN ADULT LIVER, SIGNAL = 1.2; EXPRESSED IN BT474, SIGNAL = 1.2; EXPRESSED IN LUNG, SIGNAL = 1.5; EXPRESSED IN HELA, SIGNAL =   2; EXPRESSED IN BRAIN, SIGNAL = 1.8; EXPRESSED IN PLACENTA, SIGNAL = 1.7; EXPRESSED IN FETAL LIVER, SIGNAL = 1.9; EXPRESSED IN HEART, SIGNAL = 1.6
cccatacaatatggaataatgggactactttagatttagtattactgaggaaacttgttgcctacaagttcattctgaaatttatgttcaatgattagaaatcacagtgtatgagttattagaaatcaaagtgtaatttgcttctctgttaccatgaagaactactgaattttgaacccctgaacactctcttctagctgctttcgaaatctattgaacaactgaagcaaccaggcagtcaccttgaggaagcagaggaagagcttcagggggaccaggcgatgcaggaagacagagcgccctctagtggcaacagcactaggagcgacagcagtgcttgtgtggatgacacactgggacaagttggggctgtgaaggtcaaggaggaaccagtggacagtgatgaagatgctcagatccaggaaatggaatctggggagcaggctgcttttatgcaacagg

SEQ ID NO: 1137 - DNA, 477 bp, Homo sapiens
  MAP TO AC007554.1; EXPRESSED IN HEART, SIGNAL = 0.89; EXPRESSED IN PLACENTA, SIGNAL = 1.5; EXPRESSED IN FETAL LIVER, SIGNAL = 0.86; EXPRESSED IN LUNG, SIGNAL = 1.1; EXPRESSED IN BONE MARROW, SIGNAL = 5.9
  unsure 143
  unsure 160
attttagggatcagcgcctcgactcctgccacctccggctccaacgatgatcatgtttggatgtatttattgaattgtcctttgctgatgaggaatttttaaagtatttcatagaataagtcctttggtatgcagatgctacnatggaaggaaagaaagnaaaaaaagaaaacacacaatattacttgctccataccctaaactgccgataccacagccgtaaaatgaaggtgtctagtagttgttatagcacggtagtccattctttctaaaggaccacttacggttcatgcaggtaattttaggtatagcccatcttccatttcctaagcaccggatagttggaaggtgacgttgaatgaaaccatctttgcagtggtatctaatcagggagttgatttcataacgaggtttcatctttccaaaggtcttggcattttctacaacagggggctggccgcaagcaactaaaggaaa

SEQ ID NO: 1138 - DNA, 473 bp, Homo sapiens
  MAP TO AC007554.1; EXPRESSED IN LUNG, SIGNAL = 1.3; EXPRESSED IN PLACENTA, SIGNAL = 0.96; EXPRESSED IN BONE MARROW, SIGNAL = 2.2; EXPRESSED IN FETAL LIVER, SIGNAL =   1; EXPRESSED IN HEART, SIGNAL = 1.5
  unsure 450
ccaagatttccaaaacaaaacctatggtcaagtttctggagaagcaatcaagatgtttcccaccattaaaacacctgaggctggaactgttattacaactgccgatgaaattgaattagaaggtgctacacagtggccacactctacttctgcttctgccacctatggggtcgaggcaggtgtggtgccttggctaagtccacagacttctgagaggcccacgctttcttcttctccagaaataaaccctgaaactcaagcagctttaatcagagggcaggattccacgatagcagcatcagaacagcaagtggcagcgagaattcttgattccaatgatcaggcaacagtaaaccctgtggaatttaatactgaggttgcaacaccaccattttcccttctggagacttctaatgaaacagatttcctgattggcattaatgaagagtncagtggaaggcacggcaatctat

SEQ ID NO: 1139 - DNA, 492 bp, Homo sapiens
  MAP TO AC007554.1; EXPRESSED IN PLACENTA, SIGNAL = 6.3; EXPRESSED IN HBL100, SIGNAL =  11; EXPRESSED IN FETAL LIVER, SIGNAL = 7.8; EXPRESSED IN LUNG, SIGNAL = 8.4; EXPRESSED IN BRAIN, SIGNAL = 6.6; EXPRESSED IN BT474, SIGNAL = 7.4; EXPRESSED IN BONE MARROW, SIGNAL = 5.6; EXPRESSED IN HELA, SIGNAL =  14; EXPRESSED IN ADULT LIVER, SIGNAL = 4.4; EXPRESSED IN HEART, SIGNAL = 6.1
  unsure 163
  unsure 232
aagcccaaagccacagaactcatagaattttcaacaatcaaagtcacagttccaagtgatattaccactgccttcagttcagtagacagacttcacacaacttcagcattcaagccatcttccgcgatcactaagaaaccacctctcatcgacagggaacctnggtgaagaaacaaccagtgacatggtaatcattggagaatcaacatctcatgttcctcccactaccctntgaagatattgtagccaaggaaacagaaaccgatattgatagagagtatttcacgacttcaagtcctcctgctacacagccaacaagaccacccactgtggaagacaaagaggcctttggacctcaggcgctttctacgccacagcccccagcaagcacaaaatttcaccctgacattaatgtttatattattgaggtcagagaaaataagacaggtaagtctttgctttctagactagcattgaaggcaatcctcattt

SEQ ID NO: 1140 - DNA, 478 bp, Homo sapiens
  MAP TO AC007539.8; EXPRESSED IN BRAIN, SIGNAL = 1.4; EXPRESSED IN HBL100, SIGNAL =   1; EXPRESSED IN HELA, SIGNAL = 2.8; EXPRESSED IN ADULT LIVER, SIGNAL = 1.5; EXPRESSED IN HEART, SIGNAL = 1.1; EXPRESSED IN BT474, SIGNAL = 0.9; EXPRESSED IN BONE MARROW, SIGNAL = 0.89; EXPRESSED IN FETAL LIVER, SIGNAL =   1; EXPRESSED IN PLACENTA, SIGNAL = 1.3; EXPRESSED IN LUNG, SIGNAL = 1.2
tgatggagtcctgctctgtgccaggcactgcggcagatgctccacatgtatgaacccgtttcatcctgacaaccactccagggtaggcagtgtttccgctccattttatgggtgaggacaccaaggtagagttatgctcactggttgcgatcactgggctggtaagttgcaaagccaggattgacacagaggcattctgctccagggccgccacctccccaggccgggcctctccaactcagcccctctctccttggctttttgcagaacctcgtgatgttcctgagcgtcctcgtggactggatgattccagacatccccacggacatcagcgaccagatcaagaaagagaagagcttattagtggatttcttcctgaaagaggagcatgagaagctcaagctgatggatgagccggctctgaggagcccaggaggtggggatcgaagcaggagccgggcagccagctcagcacctt

SEQ ID NO: 1141 - DNA, 478 bp, Homo sapiens
  MAP TO AC007539.8; EXPRESSED IN BT474, SIGNAL = 0.68; EXPRESSED IN FETAL LIVER, SIGNAL = 1.1; EXPRESSED IN HELA, SIGNAL = 2.5; EXPRESSED IN ADULT LIVER, SIGNAL = 0.83; EXPRESSED IN LUNG, SIGNAL = 0.64; EXPRESSED IN HEART, SIGNAL = 0.82; EXPRESSED IN PLACENTA, SIGNAL = 1.1
gctttcgaagaggacagtggtggtggtattcccctcagaagacatgtccttgagccaccctgcatgctttctcttcccctaactcttcccacactgtttgatttcaggtttgtgggcaggcctggaagctacgtctatgtattcgatggttaccgcatggaagaggcaagtacagccactggtgtttcatgcctggcaccccaacccagccccattcttatctccagcacagcatggcttcattcgcgcccctgcttctcagagctcccttttgttctaaccggtcctttccttatcttctccctgcagtgtgctccagggggctgtctcatggagctctgcattcagctcagcatcatcatgttggggaagcagttgatccagaacaacatctttgagattggagtcccgtatgtaatgaactcctctaacctctctccttgctgccaggggttagcccagaagtgccagcctttca

SEQ ID NO: 1142 - DNA, 493 bp, Homo sapiens; identical to SEQ ID NO: 697
  MAP TO AC007539.8; EXPRESSED IN PLACENTA, SIGNAL = 1.6; EXPRESSED IN LUNG, SIGNAL = 1.7; EXPRESSED IN BONE MARROW, SIGNAL = 1.9; EXPRESSED IN HBL100, SIGNAL = 2.4; EXPRESSED IN FETAL LIVER, SIGNAL = 2.6; EXPRESSED IN HELA, SIGNAL = 6.7; EXPRESSED IN ADULT LIVER, SIGNAL = 1.7; EXPRESSED IN BRAIN, SIGNAL = 1.4; EXPRESSED IN BT474, SIGNAL = 2.4; EXPRESSED IN HEART, SIGNAL = 1.7

SEQ ID NO: 1143 - DNA, 465 bp, Homo sapiens
  MAP TO AC007535.3; EXPRESSED IN ADULT LIVER, SIGNAL = 4.2; EXPRESSED IN BRAIN, SIGNAL = 4.6; EXPRESSED IN HEART, SIGNAL = 4.1; EXPRESSED IN BONE MARROW, SIGNAL = 4.6; EXPRESSED IN HBL100, SIGNAL = 3.3; EXPRESSED IN FETAL LIVER, SIGNAL = 3.7; EXPRESSED IN LUNG, SIGNAL = 4.7; EXPRESSED IN PLACENTA, SIGNAL = 3.7; EXPRESSED IN BT474, SIGNAL = 3.5; EXPRESSED IN HELA, SIGNAL = 3.9
caatggagaagagcaggtggggtctatttatcattctacatgtcagatgcaaaagtgatcttatctgtgactttggtgcaagttgcagtgtcacatgttggattgagcaaaatgcactctcaggatcaacattctctgcttaagtagtgaaacagtagtgttggtgcaggttaactgtttttgtgtgtgtgtgttttatacagtgaaacatttttaatgtgaaattcttgaaatgcacacaaaagtacagaaaatgctaacttggataccatgttttcacgcacagatttaatggatgaggttatattgcttctgatctctttaaaaggctctatttcattggtagggatattgtccctaagtgcaaccttggacaaaatgtttgggatgaggaacatggagtagagcctctttgctgaggctccttccagcccccgcactctagttcctgcttttggaatgtca

SEQ ID NO: 1144 - DNA, 492 bp, Homo sapiens
  MAP TO AC007529.5; EXPRESSED IN HELA, SIGNAL = 1.3; EXPRESSED IN PLACENTA, SIGNAL = 1.4; EXPRESSED IN BT474, SIGNAL = 1.4; EXPRESSED IN FETAL LIVER, SIGNAL = 1.5; EXPRESSED IN LUNG, SIGNAL = 1.5; EXPRESSED IN BONE MARROW, SIGNAL = 1.9; EXPRESSED IN HBL100, SIGNAL = 1.4; EXPRESSED IN ADULT LIVER, SIGNAL = 1.1; EXPRESSED IN BRAIN, SIGNAL = 1.3; EXPRESSED IN HEART, SIGNAL = 1.3
tgaagaataacaggagcacagtttagaaatataccaaaaacaaggaattaatttctggttaacctaattgtagataagttttaaataccatgtcttctcaggagaaaaattgaaagcaattctgtgatatttgacataagaggagttcagcatagaaaaatagaaaaacaaaatatacttaggaaaatataacatataaaatgcattcttttttttcttaaatcactaatagagtagggacccagagctttgagaatatattttgcatccttatgttacattaagagctcactttggagacctgaagaatcatgtggctaaccaggtgtatgaagaagtttccttaccattcttaaacaacataccatttaattttgcattagtattctcaagtgaatgctgaattcttttatcgctatgctcatatttaagaccattataataatagttttctgtgattttatttttctgattcaaaaattgaaaatgctc

SEQ ID NO: 1145 - DNA, 471 bp, Homo sapiens
  MAP TO AC007465.2; EXPRESSED IN BT474, SIGNAL = 6.2; EXPRESSED IN HBL100, SIGNAL = 6.1; EXPRESSED IN FETAL LIVER, SIGNAL = 4.9; EXPRESSED IN HELA, SIGNAL = 3.7; EXPRESSED IN BRAIN, SIGNAL = 5.6; EXPRESSED IN PLACENTA, SIGNAL = 7.6; EXPRESSED IN BONE MARROW, SIGNAL = 7.4; EXPRESSED IN LUNG, SIGNAL = 5.7; EXPRESSED IN ADULT LIVER, SIGNAL = 3.2; EXPRESSED IN HEART, SIGNAL = 5.5
ttgtgctgttcttacccgtgctgttctcgtgatagtgaatgagtctcacaagatctgatggttcttacctgtgcgggtcttacctgtgctgttctcatgatagtgaatgagtctcacaagatctgatggttttaaaaacaggagtttccctgcacaagctctctctttttgcctcctgtcatccatgtaagatgtgacttgctcctccttgccttctgccatgattgtgaggcctccccagccacgtagaactgtaagtccatcgaacctctttttttttttccccagtcttgtgtatgtctttatcagcagcatgaaaatggactctataaacctcagtgttatgtggctctgcaagatgatccaacatgttggaacagccacgtttaaaacatatatctcttgcctcttggtgccaaagctcttcctactacagctcatggcacttcagtgcaacacacaggtaccatg

SEQ ID NO: 1146 - DNA, 484 bp, Homo sapiens
  MAP TO AC007464.2; EXPRESSED IN FETAL LIVER, SIGNAL =  28; EXPRESSED IN HELA, SIGNAL =  18; EXPRESSED IN ADULT LIVER, SIGNAL =  16; EXPRESSED IN PLACENTA, SIGNAL =  23; EXPRESSED IN BT474, SIGNAL =  11; EXPRESSED IN BONE MARROW, SIGNAL =  11; EXPRESSED IN LUNG, SIGNAL =  25; EXPRESSED IN HBL100, SIGNAL =  10; EXPRESSED IN BRAIN, SIGNAL =  28; EXPRESSED IN HEART, SIGNAL =  19
agttggaggacgaatgaacgataccctagcaatacctcagtggagcttcaagttactatattgaacacacatcgctgagaatctgaactccaaagcagcaaggcaaacccaaattcagacttttgtttttcttcttcctataatctccttcatggtttgctgtatttctctgctgcctccctcctgcctcccgccagcttcagacacacacacacacacgcacacacacacacacacagaggattcaaaatattaaagacacagccaattaagacgtggtttttttttatatgaggaagcaaaaggaaaagcaagacgtcccccagcatctgttttctgccccttatccagaggaatatgcccatttgtactgtgacgccaagtgcagttcgtttcctgctttgaaacctaccagggagaaaacggccttcatgaccttcaacgagtgtcattcctggtaatttccctggaatttttgtgtcct

SEQ ID NO: 1147 - DNA, 478 bp, Homo sapiens
  MAP TO AC007464.2; EXPRESSED IN BONE MARROW, SIGNAL = 1.2; EXPRESSED IN LUNG, SIGNAL = 1.2; EXPRESSED IN HEART, SIGNAL = 1.3; EXPRESSED IN PLACENTA, SIGNAL = 1.5; EXPRESSED IN BT474, SIGNAL = 0.92; EXPRESSED IN HBL100, SIGNAL = 0.93; EXPRESSED IN FETAL LIVER, SIGNAL = 0.76; EXPRESSED IN HELA, SIGNAL = 1.2; EXPRESSED IN ADULT LIVER, SIGNAL = 0.95; EXPRESSED IN BRAIN, SIGNAL = 1.4
cctcagtgtgtgtagccagggagtgactccaatgttctttgcctccattttcttgtctgtaaaataggaatggtcaaatagatcgaatgagggcatatatatgagcatggttattacatgcctggcacatagaaagtgtttgtgttagtccgttcttgcattactataaagaactacctgagactaggtaatttgtaaagaaaaaaagtttaattggcttatggttccccaggctctagaagaggcctggctgtggaggcctcaggaaagttacaatcatggaagaaggcaaagggaaggcaggcatgtcctacccgctggagcaggaggaagagagaggaagagagaacgggggaggtgaggaagagagagcagggggaggtgaggaagagagagcagggggaggtgaggaagagagagcagggggaggtgaggaagagagagcagggggaggtgaggaagagagagcaggggaggt

SEQ ID NO: 1148 - DNA, 493 bp, Homo sapiens
  MAP TO AC007464.2; EXPRESSED IN ADULT LIVER, SIGNAL = 7.9; EXPRESSED IN BRAIN, SIGNAL = 8.3; EXPRESSED IN HEART, SIGNAL = 7.7; EXPRESSED IN PLACENTA, SIGNAL = 7.6; EXPRESSED IN BT474, SIGNAL = 6.8; EXPRESSED IN HBL100, SIGNAL =  11; EXPRESSED IN FETAL LIVER, SIGNAL =  10; EXPRESSED IN HELA, SIGNAL =  11; EXPRESSED IN BONE MARROW, SIGNAL = 7.9; EXPRESSED IN LUNG, SIGNAL = 9.2
ttctcttgccatgtggggctcagagtaatagtaaacatgttgtcacttttagccgaaaaacaaaaacatatgagagatgatggtgaagggatgacttcagaatgtgttatctgaggtttttattttattccccaactcccatacacacatgcatgggtgcacatgcatacacacacacacacacacacacacacacacagagagaaacacacacctgagctgcacgtgcaaagctgcggagaaaaatttgggtgattgggttggtgggtctttggaatccaggaaatgagggctgaggattctggaattctgtgggatccatgtgggcctttcctgagagtcggggagaaatgtgatcttgcttgacagggccagacgtagggtctctgttggacactgactttggctgcagattctccacaagtgatgctgaaagaaggctgggatgtctgtaggacatgcttagactagttgacctgagaggtgctctggt

SEQ ID NO: 1149 - DNA, 479 bp, Homo sapiens
  MAP TO AC007429.11; EXPRESSED IN BT474, SIGNAL = 7.6; EXPRESSED IN BONE MARROW, SIGNAL =  12; EXPRESSED IN FETAL LIVER, SIGNAL = 9.6; EXPRESSED IN LUNG, SIGNAL =  12; EXPRESSED IN HELA, SIGNAL =  11; EXPRESSED IN PLACENTA, SIGNAL = 9.2; EXPRESSED IN HBL100, SIGNAL =  10; EXPRESSED IN ADULT LIVER, SIGNAL = 9.6; EXPRESSED IN BRAIN, SIGNAL =  16; EXPRESSED IN HEART, SIGNAL =  10
tgttctctgttttaatgcttcatctatttcaaaaacaaaaacaaaacaaaactgttacctgcatatcatacacgtatatgcatatcatatataaatatatggttccacacacacacacacacacacacacacactgctactttgtgagtaaaagaaaacaaggtatcattaaaagttggaaacgtgtctttttttttttttttttttttttttgagacagggtctcactctgttgcccaggactatggctcactgcagcattcgcgtccccctcttccaggctcaagtgaccctcccacctcagtctcccaagtagctgggactgcaggtgcatgccaccatgcccagctaatttttctatgttttgtagagatgggatctcacaatgttcctcaggctggtgtggaactcctgggctcagcgattcttctgcctcagccacccaaagtgctggaattacaggagcgaggaaacatttt

SEQ ID NO: 1150 - DNA, 487 bp, Homo sapiens
  MAP TO AC007429.11; EXPRESSED IN ADULT LIVER, SIGNAL = 1.9; EXPRESSED IN PLACENTA, SIGNAL = 0.85; EXPRESSED IN HEART, SIGNAL = 1.4; EXPRESSED IN BT474, SIGNAL = 1.3; EXPRESSED IN BONE MARROW, SIGNAL = 1.5; EXPRESSED IN HBL100, SIGNAL = 4.1; EXPRESSED IN FETAL LIVER, SIGNAL = 1.7; EXPRESSED IN LUNG, SIGNAL = 1.4; EXPRESSED IN HELA, SIGNAL = 3.1
caggggttgatgtttttagtggtaatgaaagggttaagtttgtcataaggtcatttctgggagaagcaagtctaatagaaagcttttacttttttaaaataaaattttattttgggataattttagacttacagaaaagttgcaaagatagtacagagagttctgcctatatccatcactcagttttagttatccctaatgttatcatcttatattactgtgatacatttgtcaacactaagaaaccctcactggtaccttactattattgattgcactccagacgtaattcaaatttcaccagtacccaatccaggattccacattacatttagctgtcttgtttcccaagtctcctctggtgtgtgaaagcaatcttttcttgtttttgatggtcatgatgtttttgcagaggatattctgcataatgccttcaatttggatgtgtctaaggtttttctcatagatttggggaagaataaggtga

SEQ ID NO: 1151 - DNA, 481 bp, Homo sapiens
  MAP TO AC007405.2; EXPRESSED IN ADULT LIVER, SIGNAL =  10; EXPRESSED IN PLACENTA, SIGNAL =  12; EXPRESSED IN BT474, SIGNAL = 9.4; EXPRESSED IN BONE MARROW, SIGNAL =  14; EXPRESSED IN HBL100, SIGNAL =  14; EXPRESSED IN FETAL LIVER, SIGNAL =  18; EXPRESSED IN LUNG, SIGNAL =  18; EXPRESSED IN HELA, SIGNAL =  15; EXPRESSED IN BRAIN, SIGNAL =  18; EXPRESSED IN HEART, SIGNAL =  13
ttgacatacgattctctcttccctcatttttcttctgtgggaactttagttacacatgtattaggccccttgtcccacagcttgctgatattctgttcatttctttttttaatatttttttctctgtgtgtttcattttggatagtttctatgaaaatgtcttcaaattcactaatcatttcttctgcaatgtgcaatctgacattaatcccatcctgtgtgtttttcatattagacattttagttttcatctctaaaagtttgatatggatcttttttataacttccatgtcttcaattacatgctcaaccttttctctagcttcttgatgataattataataatggctgcattaatacccttgtccacgaattctatcatttgtatcaaatctaggttagtttcaaattactaatcttacaaacacccctccccctgtttttttgtttcttttataagagacagggtcttgctctgttg

SEQ ID NO: 1152 - DNA, 479 bp, Homo sapiens
  MAP TO AC007405.2; EXPRESSED IN BT474, SIGNAL = 3.5; EXPRESSED IN HELA, SIGNAL = 2.3; EXPRESSED IN PLACENTA, SIGNAL = 2.2; EXPRESSED IN HBL100, SIGNAL = 5.5; EXPRESSED IN FETAL LIVER, SIGNAL = 3.1; EXPRESSED IN LUNG, SIGNAL = 1.6; EXPRESSED IN ADULT LIVER, SIGNAL = 1.2; EXPRESSED IN BRAIN, SIGNAL = 6.8; EXPRESSED IN BONE MARROW, SIGNAL = 8.3; EXPRESSED IN HEART, SIGNAL = 2.3
tcattccatgtctgagcagcctgtcagaaaggctgtgaacccccaggaagcatgtgcaaaacttctgtgtatgtgcatttttctggagatgtggtatatccgattctcagtgcacatacatatcccagaatgaaatcaggcctatacagatagcatggttaatattaggggtctctgggctgaagaaatctagatatgagtcaggtgaaaaccattcattgctctccccaattcagatctgcttccggctaagaacggtgaggagcaaaccgtgcaattcctcctggaagtggtggacatactcctcaactatgtccgcaagacatttgatcgctccaccaaggtgctggactttcatcacccacaccagttgctggaaggcatggagggcttcaacttggagctctctgaccaccccgagtccctggagcagatcctggttgactgcagagacaccttgaagtatggggttcgcacag

SEQ ID NO: 1153 - DNA, 468 bp, Homo sapiens
  MAP TO AC007405.2; EXPRESSED IN LUNG, SIGNAL = 1.9; EXPRESSED IN HEART, SIGNAL = 1.6; EXPRESSED IN PLACENTA, SIGNAL = 1.8; EXPRESSED IN BT474, SIGNAL = 1.4; EXPRESSED IN BONE MARROW, SIGNAL = 1.9; EXPRESSED IN HBL100, SIGNAL = 1.4; EXPRESSED IN FETAL LIVER, SIGNAL = 1.7; EXPRESSED IN HELA, SIGNAL = 1.7; EXPRESSED IN BRAIN, SIGNAL = 2.4; EXPRESSED IN ADULT LIVER, SIGNAL = 1.7
atcagattccatgagcaccccctgtagccttatgacaaagccctcagttctgctaaaactggcctcttctcatggcccacgtgatgtctttaaaatgtatccacacattctttgacactcctcccttacaatgatgaaggctaatttctctccctttgaatgtgggctagacttagtgactcacttctaagaactaccctggggtggaactgaccatgtgtgacttccaaggtcaaatcataaaaggcactgccactccaccttgttccattgcacatcacttactctggggcagtccagcagccatgtcttgaggacagtcaagcagcctgtggagaggcccaagtcgagaggcaaggagaccctgcacatctaccagctgttcttcccagccatggtgtgagctgggaagtgggtcctccagccccatcatacctctcaatgactgcagccatggtcaacattgag

SEQ ID NO: 1154 - DNA, 492 bp, Homo sapiens
  MAP TO AC007404.2; EXPRESSED IN PLACENTA, SIGNAL = 1.1; EXPRESSED IN BT474, SIGNAL = 1.6; EXPRESSED IN HBL100, SIGNAL = 0.98; EXPRESSED IN FETAL LIVER, SIGNAL = 1.8; EXPRESSED IN HELA, SIGNAL = 0.8; EXPRESSED IN BRAIN, SIGNAL = 1.9; EXPRESSED IN BONE MARROW, SIGNAL = 1.1; EXPRESSED IN ADULT LIVER, SIGNAL = 1.1; EXPRESSED IN HEART, SIGNAL = 1.6; EXPRESSED IN LUNG, SIGNAL = 1.4
ggaaaatgaaaacatattcaccacatgataaaaaaaatcactccttaaaaatcaataagtggtgtgagcattatttcacttaacctacttggaagcactataataccaatatacaaataaaacagaacccataggtagcctggaatgatacagtggccatcactaattaggggctagttgacaacataaatacaaataaatgaaattacaaattaaaaaaaacttgtttttagcttaattgttggtgcagaatgtatggcgggggctggttgtctggcagccgctttagctttgctcgcttggcttgctcgaacggcagtttctagacgcactttcaactcaggagcagcccccattactgtcttgaaagcatgtggatacagaggtccaatatgcattaaattctggagtgcaaactcatgaagatctttggaagctgaacttgctgaggcaaaagaattttcatccagcaggtaagatatcaaagtggga

SEQ ID NO: 1155 - DNA, 372 bp, Homo sapiens
  MAP TO AC007404.2; EXPRESSED IN BONE MARROW, SIGNAL =  15; EXPRESSED IN HEART, SIGNAL =  11; EXPRESSED IN PLACENTA, SIGNAL = 7.9; EXPRESSED IN BT474, SIGNAL =  18; EXPRESSED IN HBL100, SIGNAL =  18; EXPRESSED IN LUNG, SIGNAL =  16; EXPRESSED IN HELA, SIGNAL =  18; EXPRESSED IN ADULT LIVER, SIGNAL =  11; EXPRESSED IN BRAIN, SIGNAL =  14; EXPRESSED IN FETAL LIVER, SIGNAL =  12
attagaagccctctccacgcagaaagtatctaacatattacaactttcccagattctagagttgaatcaactgctaaattaaaaattgagatcattacaaaaaacccacaaaatattatcacatgctgtataccatgtggaaaacataaactccagttgattattatttaaaagacatctttgcctacacatgaaacttgttagtaaagaaacccacttacttgtcaaagctatattgggccattctagcaataaaagttgcttctccaaccacctgagccattcttccaagagcttcccccgctgcacaacgtaagatggggtttgggttgtccagaggacccataaccagtgtcagggcagatttacgaa

SEQ ID NO: 1156 - DNA, 461 bp, Homo sapiens
  MAP TO AC007395.2; EXPRESSED IN PLACENTA, SIGNAL = 6.5; EXPRESSED IN ADULT LIVER, SIGNAL = 4.6; EXPRESSED IN HEART, SIGNAL = 3.6; EXPRESSED IN BONE MARROW, SIGNAL =  46; EXPRESSED IN BRAIN, SIGNAL = 2.7; EXPRESSED IN BT474, SIGNAL =  24; EXPRESSED IN HELA, SIGNAL = 8.4; EXPRESSED IN LUNG, SIGNAL = 8.4; EXPRESSED IN FETAL LIVER, SIGNAL =  16; EXPRESSED IN HBL100, SIGNAL =  71
gggaaaggtgttttcctcacatcactccagctttggagacattctattagtgacatatagcccttcccccagaaaaaacaacgaagtgttctgtgtgctaacaacataatagctttaaaaaacaaagtaaaacaaaattctgcatttttataaaacttgataaaaaatagtatttcaaactgtacagtcaccagaagtacacagttatcaaaaatgcacacacttcacttggcctctccatcaccttcagcttccctggcctggtctgttatggcatctcctttttctgcagggtaattcccctccttgccagcatcagcttttccctttttccctttaggtaccttctctcccttctttgcaggggcctttttaggcttgggctctggctttggaggagcaggtttagcagacaaccttgtggatcttctctgaggtgtgtccaccttggctttatctcc

SEQ ID NO: 1157 - DNA, 473 bp, Homo sapiens
  MAP TO AC007395.2; EXPRESSED IN BONE MARROW, SIGNAL = 1.9; EXPRESSED IN PLACENTA, SIGNAL = 1.7; EXPRESSED IN HBL100, SIGNAL = 1.8; EXPRESSED IN FETAL LIVER, SIGNAL = 1.5; EXPRESSED IN HELA, SIGNAL = 1.9; EXPRESSED IN ADULT LIVER, SIGNAL = 1.6; EXPRESSED IN BRAIN, SIGNAL = 1.8; EXPRESSED IN HEART, SIGNAL = 1.7; EXPRESSED IN BT474, SIGNAL = 1.4; EXPRESSED IN LUNG, SIGNAL =   2
gggatgatatggtgacctgctgtgggactgacttcctgtttcctctagataagagcccttggagagacaggcagccagaagcacctgtgctcccaggataagggtgagcactcaggatgactgtggagaaggaggcccctgatgcgcacttcactgtggacaaacagaacatctccctctggccccgagcaagccacatcgctgctgagaacctgctccgtgttctgtgtgcaaacctgccctttgctgctccttcaacacacattttcttcttcttccaacagagcctcctcccaagtccggtccatctctggtcccggggaaaacacccacagtccgtgctgcattaatctgcctgacgctggtcctggtcgcctccgtcctgctgcaggccgtcctttgtaagtcctcatgtttcatcgtctgggcttagcccctctctgtgccagccggctcccttcagatcgagacca

SEQ ID NO: 1158 - DNA, 472 bp, Homo sapiens
  MAP TO AC007394.2; EXPRESSED IN HELA, SIGNAL = 1.4; EXPRESSED IN ADULT LIVER, SIGNAL = 0.96; EXPRESSED IN BRAIN, SIGNAL = 1.1; EXPRESSED IN BT474, SIGNAL =   1; EXPRESSED IN BONE MARROW, SIGNAL = 0.9; EXPRESSED IN LUNG, SIGNAL = 1.1; EXPRESSED IN HEART, SIGNAL =   1; EXPRESSED IN PLACENTA, SIGNAL = 1.6; EXPRESSED IN HBL100, SIGNAL = 1.2; EXPRESSED IN FETAL LIVER, SIGNAL = 0.92
ggagccaccaaagaaggtccccatgggagctaggggacccttaccctcaggaacagtcagtctattacttggaaggtctaaatttaaaagatgttactgtacatacaggaataattgactctgattatactggagagattcaattagttattagttcctcgactccttgatctgcctccccaagaaaaagaattgctcagttgttgctgttaccttacataaaactaggaagcagcacagtgaaaagaacaggaggctttggtaatactaatccagcatgaagggccgtgcactgggttaatcaagtatctgacaaaagacctatttgcacagtaactattcagggaaaagattttgaaggagtagaagatactggagctgatgtctctattattgctgtaaatcaatggccctggcactggcctaagcaaaaggcatccattggtattgttggagtaggagctgccttcag

SEQ ID NO: 1159 - DNA, 488 bp, Homo sapiens
  MAP TO AC007389.2; EXPRESSED IN PLACENTA, SIGNAL =  48; EXPRESSED IN FETAL LIVER, SIGNAL =  34; EXPRESSED IN LUNG, SIGNAL =  11; EXPRESSED IN ADULT LIVER, SIGNAL =  40; EXPRESSED IN BONE MARROW, SIGNAL = 3.3; EXPRESSED IN HBL100, SIGNAL =  36; EXPRESSED IN BRAIN, SIGNAL = 3.7; EXPRESSED IN HEART, SIGNAL = 4.2; EXPRESSED IN BT474, SIGNAL = 1.9e+02; EXPRESSED IN HELA, SIGNAL =  34
tatccccaaatctcaggaccttgccaagctcatggcagacatctgggcccaatatgatgagctggctcggaagagccaagaggagctgggcaagtactggtctcagcagattgaggagagtatcacagtagtcaccatgcagtccaccgaggttggagctgctgagatgatgctcatggagctgcttggagatcaacctggactccatgagaaatctgaaggctagcttggagaatggcctgagggaggtggaggcccgctatgccctgcagatggagcagttcaacaggatcctgctgcacctggagtcagagctggcacagacctgggcagagggacagtgccaggcccaggagtacgaggccctgctgagcatcagggtcaagctggaggctgagatcgccacctaccaccacctgctggaagatgtgaggacttcaatcttagcgatgccctggacagcatcaactccacgcaaactatgcaaa

SEQ ID NO: 1160 - DNA, 465 bp, Homo sapiens
  MAP TO AC007389.2; EXPRESSED IN BONE MARROW, SIGNAL = 1.9; EXPRESSED IN HBL100, SIGNAL = 5.2; EXPRESSED IN ADULT LIVER, SIGNAL = 2.4; EXPRESSED IN BRAIN, SIGNAL = 3.6; EXPRESSED IN PLACENTA, SIGNAL = 0.89; EXPRESSED IN BT474, SIGNAL = 1.7; EXPRESSED IN FETAL LIVER, SIGNAL = 3.5; EXPRESSED IN LUNG, SIGNAL = 1.6; EXPRESSED IN HELA, SIGNAL = 3.1; EXPRESSED IN HEART, SIGNAL = 3.3
cttccatttcaacattctgtggaaaatgacaggatttcattcttttctatggttgaataatattccgttgtgtatatttgccacattttccttttccattcatccactgatggatacttggttgattttatatgctgcctattgtgagaagttctgcaataaaaatgagagtgcaggtatctctccaacatactgatttcatttcctttggatatatacccagtagtggaattgctggttcatacggtagttctagttttaattttttgaggaacttccatactgttttccacggtgggtgtactaatttttttgccagatttcttaactccacctgtatccagggccccttcagcctctgtttgtttctgcttgaaagccacatcttccttgtccatctccttggcctgttccttgtgctgtttcaggggctgcttcttgccacctttgtgtccagacatggca

SEQ ID NO: 1161 - DNA, 482 bp, Homo sapiens
  MAP TO AC007389.2; EXPRESSED IN LUNG, SIGNAL = 5.5; EXPRESSED IN HELA, SIGNAL =  35; EXPRESSED IN ADULT LIVER, SIGNAL =  14; EXPRESSED IN BRAIN, SIGNAL = 0.75; EXPRESSED IN HEART, SIGNAL =   1; EXPRESSED IN PLACENTA, SIGNAL = 8.6; EXPRESSED IN BT474, SIGNAL =  52; EXPRESSED IN BONE MARROW, SIGNAL = 1.2; EXPRESSED IN HBL100, SIGNAL =  15; EXPRESSED IN FETAL LIVER, SIGNAL = 8.6
gttcccagatctccatgtccccctccaccagcttctggggtggcatggggtctggggccctggccgtggggatggccagggttctggcaggatggaagacatccagaacaagaaggagaccatgcaaagcctgaatgactgcctggcctcctacctggacagagtgaggagactggataccaagaatcggaagctggagagcaaaatccgggagcacctggagaagaagggaccccaagtcagagactggagccattacttcaagaccgtggaggacctgagggctcagatcttcgcaaatactgtggacaatgcccgcatcgttctgcaagtcgacaatgcccatcttgctgatgactttagagtcaagtatgtgacagagctggccatgcgccagtctatggagagcgacatccatgggctccgcaaggtcattgatgacaccaatgtcactcggctgcagctggaaacagagatcgagg

SEQ ID NO: 1162 - DNA, 469 bp, Homo sapiens
  MAP TO AC007385.2; EXPRESSED IN FETAL LIVER, SIGNAL = 3.9; EXPRESSED IN LUNG, SIGNAL = 4.6; EXPRESSED IN HELA, SIGNAL = 4.9; EXPRESSED IN HEART, SIGNAL =   4; EXPRESSED IN BT474, SIGNAL = 4.3; EXPRESSED IN BONE MARROW, SIGNAL = 2.5; EXPRESSED IN PLACENTA, SIGNAL = 2.8; EXPRESSED IN BRAIN, SIGNAL = 3.9; EXPRESSED IN ADULT LIVER, SIGNAL = 3.4; EXPRESSED IN HBL100, SIGNAL = 3.6
gacgtcagagtcttggattgctttaggatggggttgtccaatcttttggcttccctgggccaccttggaagaattttcttgggccacacataaaatacactaacaccaatgacagctgatgagctaaaaaaaaaaaaaaaaaaaagctgcaaaaaatccctcaatgttttaagaaagtttatgaatttgttttgggtaacattcaaagccaacctgggctgtgggttggacaagcttgtttcaggatcggatctgatgaatcaacaagtgggtctgggcctactcaccctggaatagcaacattcagtagttgaatagcaacgttccaaacagcaagagggcaaggaacaagagcatcagtcacacgctgggccccccaagaaacagatgctgagatggagattctcaagccaatgtgtactgaggtgtgcacttgggtttcaataccttaaaaagggagggaaacagg

SEQ ID NO: 1163 - DNA, 365 bp, Homo sapiens
  MAP TO AC007319.2; EXPRESSED IN PLACENTA, SIGNAL = 0.89; EXPRESSED IN BONE MARROW, SIGNAL =   1; EXPRESSED IN ADULT LIVER, SIGNAL = 0.98; EXPRESSED IN HEART, SIGNAL = 1.1; EXPRESSED IN HELA, SIGNAL = 0.6; EXPRESSED IN BT474, SIGNAL =   1; EXPRESSED IN HBL100, SIGNAL = 0.8; EXPRESSED IN FETAL LIVER, SIGNAL = 0.97; EXPRESSED IN LUNG, SIGNAL = 3.4; EXPRESSED IN BRAIN, SIGNAL = 0.8
aaatggtagagaccaaaagaccctgtaaaagaaaaatagaatgatctgaatccaaatggaaagatacatgtatttgtaatcaaatagctgtacaagtagtcaggagtaaaccaaagctatatgtatatttaattccaaacttctcaagctgccttcttatcaagaatgccatacctggaagtgcataaggatgtgcatgatgtagtcatatacctcctctgcaatctttccttcaggtcgccatggaatcagcacaaattcaatgccaagcaatggcaccaagataagagtagctctcacagctttcatgtacagattggattccgcttggtgtgtaacttttaacttggtgatgagaacgcgta

SEQ ID NO: 1164 - DNA, 480 bp, Homo sapiens
  MAP TO AC007314.3; EXPRESSED IN BONE MARROW, SIGNAL =   9; EXPRESSED IN FETAL LIVER, SIGNAL =  17; EXPRESSED IN ADULT LIVER, SIGNAL = 8.2; EXPRESSED IN BRAIN, SIGNAL = 7.9; EXPRESSED IN PLACENTA, SIGNAL =  11; EXPRESSED IN BT474, SIGNAL =  13; EXPRESSED IN HBL100, SIGNAL =  15; EXPRESSED IN LUNG, SIGNAL =  16; EXPRESSED IN HELA, SIGNAL =  21; EXPRESSED IN HEART, SIGNAL = 7.5
tttgtaaaccactattttctctctacctaacttaacatctaaaatgcatgccaattctagataattgggaaaacttaacagaaggaaagcaatcatgagtatcttatctaaatatggatattatctatccaaaagtaactgacctcccgctaagttcccaaatgtatattcagtatctctttcccaataacccacataaaaaaggaaagggagaggaaaggatcattcggaacacctgcaaataaagaagcaagtaatttcaaccaaaaatacatacggagttcttattccacatcttgacaattcgagagtcagcagacaaaatcagatctaatgaatcctggaaatgaacggacttaatgggcagcccatactggtgatctttaactagcaatggcttatcagatcgaaggtcatataataaaacctgaaaaaaaattatttctgtttaaacaaactagacattttatcttcaaagga

SEQ ID NO: 1165 - DNA, 466 bp, Homo sapiens
  MAP TO AC007285.2; EXPRESSED IN BRAIN, SIGNAL = 2.1; EXPRESSED IN ADULT LIVER, SIGNAL = 1.6; EXPRESSED IN HEART, SIGNAL = 2.3; EXPRESSED IN PLACENTA, SIGNAL = 2.2; EXPRESSED IN BT474, SIGNAL = 1.7; EXPRESSED IN BONE MARROW, SIGNAL = 3.7; EXPRESSED IN HBL100, SIGNAL = 1.9; EXPRESSED IN FETAL LIVER, SIGNAL = 1.7; EXPRESSED IN HELA, SIGNAL = 2.2; EXPRESSED IN LUNG, SIGNAL = 2.3
tatccttaaggtggcccaagtacatgcttgtttcttctagccttaaagttatttgaattggcccttgaaacataattttagagaagccacaaattagaagggtagtcatatttctttactcttgctcttctcagctgtttgtatgtgtgaaagtatgtgtgtgtgcatgtgcacatgcataaaaataagagtgtgagagacagacttgatgcagattctcatgggttattcttttgcagttagctttaagggcagctccatcctatgaagattttgtggccgcgttaaccgtaaaggaaggtgaccaccagaaagaagctttcagtattgggatgcagagggacctcagcctttacctccctgccatggagaagcagctggccatactggacactttatatgaggtccacgggctggaatctgatgaggtggtatgatggctgctgggcagcacctcctaacttca

SEQ ID NO: 1166 - DNA, 416 bp, Homo sapiens
  MAP TO AC007285.2; EXPRESSED IN PLACENTA, SIGNAL = 2.1; EXPRESSED IN HBL100, SIGNAL = 1.2; EXPRESSED IN FETAL LIVER, SIGNAL = 1.5; EXPRESSED IN HELA, SIGNAL =   2; EXPRESSED IN BRAIN, SIGNAL = 1.5; EXPRESSED IN HEART, SIGNAL = 2.1; EXPRESSED IN BT474, SIGNAL = 1.6; EXPRESSED IN BONE MARROW, SIGNAL = 1.6; EXPRESSED IN LUNG, SIGNAL = 2.2; EXPRESSED IN ADULT LIVER, SIGNAL = 1.4
aacagccttttccagaccacatgtttccaacaagaccttcaaaggcctcgctcgctatataaaactggctttaaacaatttcctttcccaaagaaggaaataagatatttcggttttgtaaaagaggcaaaaccaggtacaggccacctttcctgctggagagctggcataagtgagtggattcttaattactattttacctgcggggcataattacttacgtggagtgaaataaggagccgtccttttctaagtagccttcatagtggaccaacatcaaatcccctcctttggtcttgcgatggcagatgaatggcttctggagaacttcaattttcacttctggttcagggatcaaagccccaatcaaagaagtgacgaacagagtcaagaccgcgttccacaagaaaagcctc

SEQ ID NO: 1167 - DNA, 385 bp, Homo sapiens
  MAP TO AC007285.2; EXPRESSED IN PLACENTA, SIGNAL = 2.2; EXPRESSED IN LUNG, SIGNAL = 2.1; EXPRESSED IN HELA, SIGNAL = 0.59; EXPRESSED IN BT474, SIGNAL = 4.3; EXPRESSED IN BONE MARROW, SIGNAL = 1.7; EXPRESSED IN HBL100, SIGNAL = 1.5; EXPRESSED IN FETAL LIVER, SIGNAL = 1.3; EXPRESSED IN ADULT LIVER, SIGNAL = 2.3; EXPRESSED IN BRAIN, SIGNAL = 3.1; EXPRESSED IN HEART, SIGNAL = 1.9
aacaatggccatagcagtgagcatagagctctcccatgaccttgttttcaaggctatgagcaaacctgcatggaaacaggaatcagcagaactgacatgatagctctgacttgtgagcaagcttccaagcaagaagttagggttgtgctagcggcaaagccagagaaaagagagtgtgactcgcgagactgcaatgcacggcttacctcaaccttgctctccggttcgtgatcagcagccgagaaatacacaacctcttgcacttcatctctgggccgggctgaatttttcccaaataccaccagaccatccttagcacgtggagggaaggcaacaaaacagtaacttggaggagctgcagccatcctgaaaagagaatgccagc

SEQ ID NO: 1168 - DNA, 462 bp, Homo sapiens
  MAP TO AC007275.3; EXPRESSED IN HBL100, SIGNAL = 3.8; EXPRESSED IN FETAL LIVER, SIGNAL =   5; EXPRESSED IN ADULT LIVER, SIGNAL = 4.3; EXPRESSED IN BRAIN, SIGNAL =   4; EXPRESSED IN HEART, SIGNAL = 3.6; EXPRESSED IN BT474, SIGNAL = 3.7; EXPRESSED IN LUNG, SIGNAL = 5.2; EXPRESSED IN PLACENTA, SIGNAL =  21; EXPRESSED IN HELA, SIGNAL = 5.2; EXPRESSED IN BONE MARROW, SIGNAL = 4.5
acacattcctagggcagcacctaggtgatatgattctcctcatctgcctgagccctgcctacttcggacactttgaaatatctctgagcccttgacctaagtgatgtgactgtctttttcaacctgggccttcaaaataggagaattttgacatattgctgagcccagcagtcaggacattgaccctcctgtttttctggaattataaccagaaagaaggaattctgacctattgtgtggcccaataccatgtaatttttttctcttcttcctagatcgtgcataaagagaaattatggcatattgcatattgctgggcccagcacccttatgatgtgactcttctgcccatgacagagccaccgaatatacatcgacatatctttggcccattatgtaagtgttttgtgtcttataacttggcttgatattttccacatgtgggatgttgttcaatgctga

SEQ ID NO: 1169 - DNA, 474 bp, Homo sapiens
  MAP TO AC007275.3; EXPRESSED IN HBL100, SIGNAL = 2.1; EXPRESSED IN HEART, SIGNAL =   2; EXPRESSED IN PLACENTA, SIGNAL = 2.5; EXPRESSED IN BT474, SIGNAL = 4.8; EXPRESSED IN FETAL LIVER, SIGNAL = 1.9; EXPRESSED IN LUNG, SIGNAL = 2.5; EXPRESSED IN HELA, SIGNAL = 2.3; EXPRESSED IN ADULT LIVER, SIGNAL = 1.5; EXPRESSED IN BRAIN, SIGNAL = 2.2; EXPRESSED IN BONE MARROW, SIGNAL = 2.5
tcaagcctttgtcattaattctgtactacctaaatgcaagtgtcactggcttctgggggctgcactcttgctgttgttatgatgcactcttggcagctgctacactgtatcagtggctactgcattctctttgtggtggctgcactcttggctcctgctgctgctgcagtcgttgttgttgttgttgctgctgctgctgctgcatgcttgccagtgatgctgagcatgcagtccttttgtggagctctcaggcaaaatacctgtgtcagcaaacttctttcatccattgctcagccagagtccatgagacagacgcagcaggtggtgtcctgtgtgaggaatgctgcaacaaatcatgatgaaaccctcaaaaatgaaggtgaaaagactgtgcagtgagtaagtcattgatacctgcttgggatttccaaatttgagggaattgttcaggctagggtttcatcatgggacatc

SEQ ID NO: 1170 - DNA, 481 bp, Homo sapiens
  MAP TO AC007275.3; EXPRESSED IN FETAL LIVER, SIGNAL = 0.85; EXPRESSED IN BRAIN, SIGNAL = 0.76; EXPRESSED IN PLACENTA, SIGNAL = 0.63; EXPRESSED IN BT474, SIGNAL = 1.4; EXPRESSED IN BONE MARROW, SIGNAL = 0.65; EXPRESSED IN LUNG, SIGNAL = 0.67; EXPRESSED IN HELA, SIGNAL = 2.1; EXPRESSED IN ADULT LIVER, SIGNAL = 0.82; EXPRESSED IN HEART, SIGNAL = 0.86
aggctgtgcaccagagaactggttgatttgttaggctttgtagatgagggatcttaaaacagctctggaggaggtgggctaattttgtcccacctaaatgggtggtataatgtagatgactgactaaagtttctccaagagcttggggtatgaagattctagagtcaggaagaatccaccaacctttctgatttttatttgctctaagatgtgaagccaatttttcttcttctgctgagtatgcagggttgtcaggcagatctggctgtggaaaagaaactgctggcagcaggtttatgggccaaactgaagaccgtgccacttcctgaggtgctgaatcagctttttggttaccgcaggcaatggccgtgttttctttgtgatgtcctttacaatggattacagccacctgctgagggaaccacatggcttcaagcagggctagaatttcctctttgttcttgataatttttccggctga

SEQ ID NO: 1171 - DNA, 451 bp, Homo sapiens
  MAP TO AC007254.2; EXPRESSED IN BT474, SIGNAL = 1.3; EXPRESSED IN BONE MARROW, SIGNAL = 1.4; EXPRESSED IN FETAL LIVER, SIGNAL = 1.1; EXPRESSED IN HELA, SIGNAL = 0.8; EXPRESSED IN ADULT LIVER, SIGNAL = 1.1; EXPRESSED IN BRAIN, SIGNAL = 1.6; EXPRESSED IN PLACENTA, SIGNAL = 1.9; EXPRESSED IN HBL100, SIGNAL = 1.1; EXPRESSED IN HEART, SIGNAL = 1.2; EXPRESSED IN LUNG, SIGNAL = 1.2
gtgtccctggttagctttgcctcttggcctgactgcagatctgagggtccattcagcagtactgaacttttttggtagtaaagaaacgtgttgcttattagagtatgtgaaaacaaaatatacttgccctttagtagcctcttggggaaactgacaccatagccactgggaaatactggcttagggtaaagtcactctgttttcttttccatttaagctgatgtgaaatgtagccatccaattaaatatgtatgcacactgtcacaatggcacctcttgacactggctatctgacttgaaatgtcaatgttgagaggagaaagctcatggtcagtgaaactgcaggaaacagaagcacatttggatatgtccacctcactagaattcctaccatagggaaaaatgaagataggctgaaaatttacttagtttttcagttttcaattgctgc

SEQ ID NO: 1172 - DNA, 381 bp, Homo sapiens
  MAP TO AC007254.2; EXPRESSED IN PLACENTA, SIGNAL = 1.5; EXPRESSED IN FETAL LIVER, SIGNAL = 1.2; EXPRESSED IN LUNG, SIGNAL = 1.3; EXPRESSED IN BT474, SIGNAL = 0.97; EXPRESSED IN HEART, SIGNAL = 4.8; EXPRESSED IN BRAIN, SIGNAL = 2.4; EXPRESSED IN ADULT LIVER, SIGNAL = 0.88; EXPRESSED IN HELA, SIGNAL = 5.6; EXPRESSED IN HBL100, SIGNAL = 1.2; EXPRESSED IN BONE MARROW, SIGNAL = 0.96
gccttttatgtggcagtaggcctccagggaggagaagaaaatgtacaagagccataggagcacaaagaggcaggatgtgaggagcttggcagtccggggcccacccagctcacctccgatttctggcctccgccgatacagcagcacccccacattgatgaaagcaaaaatggtgaagagagtgacagagaaagctagtgtgccaggggacactttgaactgttccccattggctgcgtggtagatggcagcgatggaccaggccacaccgattcccaggaagacattcaccgcgttgctgcccgtgacgttacctatggaggcgtctgcatactggtcctgggtggctgccactttgctggcaaatgtgtctgcagagga

SEQ ID NO: 1173 - DNA, 355 bp, Homo sapiens
  MAP TO AC007245.3; EXPRESSED IN BONE MARROW, SIGNAL = 2.9; EXPRESSED IN HBL100, SIGNAL = 1.9; EXPRESSED IN ADULT LIVER, SIGNAL = 2.3; EXPRESSED IN BRAIN, SIGNAL = 3.2; EXPRESSED IN PLACENTA, SIGNAL = 3.3; EXPRESSED IN BT474, SIGNAL = 1.7; EXPRESSED IN FETAL LIVER, SIGNAL = 2.2; EXPRESSED IN LUNG, SIGNAL = 2.7; EXPRESSED IN HELA, SIGNAL = 2.6; EXPRESSED IN HEART, SIGNAL = 2.2
cgtcctaggtcttcacatcctctcaccactcactcattgactcactcacccagagtagcttccagacctgcaagctccattcatggtaactcccctatacaggtgttacagtacttaaaattttatatcctatttttactgtaggttgtctctgtctagatatatttggatacacacatacttaccaatgtgttacagttgcctgcagcactcagtacagtaacatgctgcacagctttgtaacctagaaacaacaggctacacctatagcctctgtgtagtaggctgtgccatctgggtttgtgttctacaacgttgcattctacaatgttcacacaaggatgaaatcgcctaa

SEQ ID NO: 1174 - DNA, 433 bp, Homo sapiens
  MAP TO AC007239.2; EXPRESSED IN BONE MARROW, SIGNAL =   3; EXPRESSED IN HBL100, SIGNAL =   6; EXPRESSED IN ADULT LIVER, SIGNAL = 2.3; EXPRESSED IN BT474, SIGNAL = 3.6; EXPRESSED IN FETAL LIVER, SIGNAL = 2.9; EXPRESSED IN LUNG, SIGNAL = 2.2; EXPRESSED IN HELA, SIGNAL = 2.7; EXPRESSED IN BRAIN, SIGNAL = 1.8; EXPRESSED IN PLACENTA, SIGNAL =   3; EXPRESSED IN HEART, SIGNAL = 2.8
agagcaaattgaagcttgggcccctggcatatgaccatggggagaaagaatcatacaagctgttaagaaaaatgctgagctggcctacttgctgggaagaccaatggtgctattgctctctccatatgctgtgaacacattcgcatttcatatcattttctcttcagttctgagactgggcacagttcgcatttcaacctcaacttgactgtcattgaaataactcctttctttcaggagtttctctctgcacttcctggtttcatcaacagaggtcactgtggcactactactactaacagcctatccagccagcaaaacaataaagaaaaattcattcattcagtcaataaccatttactgaatgttatcagacactactgccaggcattggggataagaaagtgtataaaggaggcagtctaggcatcaa

SEQ ID NO: 1175 - DNA, 467 bp, Homo sapiens
  MAP TO AC007224.2; EXPRESSED IN BT474, SIGNAL = 3.1; EXPRESSED IN BONE MARROW, SIGNAL = 1.8; EXPRESSED IN HBL100, SIGNAL = 2.4; EXPRESSED IN FETAL LIVER, SIGNAL = 2.4; EXPRESSED IN HELA, SIGNAL = 1.8; EXPRESSED IN ADULT LIVER, SIGNAL = 6.8; EXPRESSED IN BRAIN, SIGNAL = 3.1; EXPRESSED IN PLACENTA, SIGNAL = 6.2; EXPRESSED IN LUNG, SIGNAL = 2.9; EXPRESSED IN HEART, SIGNAL = 1.5
ctctgtgttggtgcagggagtatttaatgttctgggtttttttggtccagcttagcagttttaggaaacactcagattcagctctggttggaactgctcagcttaagtgttttgattagttttttttgtgcacagctcaagaacatggggctggtttgctcttcagaaaacaagcacgatgtgtgtggacccagggtttggcagttagctggctatggagggcatgaatttctggcctcccacgggtgtttatttctccctcctctctcttctccggccagcatggctgcgccttcttggtggacgaggtccagaccggaggaggctgcacgggcaagttctgggcccatgagcactggggcctggatgacccagcagacgtgatgaccttcagcaagaagatgatgactgggggcttcttccacaaggaggagttcaggcctaatgctgtgagttggagccaacct

SEQ ID NO: 1176 - DNA, 484 bp, Homo sapiens
  MAP TO AC007224.2; EXPRESSED IN PLACENTA, SIGNAL = 2.9; EXPRESSED IN LUNG, SIGNAL = 3.4; EXPRESSED IN ADULT LIVER, SIGNAL = 2.3; EXPRESSED IN BONE MARROW, SIGNAL = 3.8; EXPRESSED IN HBL100, SIGNAL = 3.6; EXPRESSED IN FETAL LIVER, SIGNAL = 3.6; EXPRESSED IN HELA, SIGNAL =   3; EXPRESSED IN BRAIN, SIGNAL =   3; EXPRESSED IN BT474, SIGNAL = 3.3; EXPRESSED IN HEART, SIGNAL = 4.5
cgcctcctaaccagtagcacagcctgtgtttctgctgctctctagaacgcctcattccaacctctgacgcccatctgaccgtgctggcggttgccacactgtcctgtcttgtggttttctgtccatccccatttcacagtgggcatttctcttggtttctgtcccatccagagcacaccatggccacgcccctggaggatgttggcaagcaggtgggtaggtcttgtccgcttcctgtggccctgatgggtccctgcagagcctcacgctgcttgtcgctccttgtcctcttccctccaggtgtggcggggcgccctgctcctggcagactacatcctgttccgacaggacctcttccgaggatgtacagcgctggagctcggggccggcacggggctcgctagcatcatcgcagccaccatggcacggaccgtttattgtacaggtaatgaggtgacatctcaggctgcagggaagtagtcac

SEQ ID NO: 1177 - DNA, 484 bp, Homo sapiens; identical to SEQ ID NO: 1176
  MAP TO AC007224.2; EXPRESSED IN BT474, SIGNAL = 2.3; EXPRESSED IN BONE MARROW, SIGNAL = 3.1; EXPRESSED IN HELA, SIGNAL = 2.7; EXPRESSED IN ADULT LIVER, SIGNAL = 1.9; EXPRESSED IN PLACENTA, SIGNAL =   2; EXPRESSED IN FETAL LIVER, SIGNAL = 2.7; EXPRESSED IN LUNG, SIGNAL = 2.3; EXPRESSED IN HEART, SIGNAL =   3; EXPRESSED IN HBL100, SIGNAL = 2.8; EXPRESSED IN BRAIN, SIGNAL = 2.8

SEQ ID NO: 1178 - DNA, 466 bp, Homo sapiens
  MAP TO AC007219.1; EXPRESSED IN HELA, SIGNAL = 1.8; EXPRESSED IN ADULT LIVER, SIGNAL = 1.1; EXPRESSED IN BRAIN, SIGNAL = 1.4; EXPRESSED IN PLACENTA, SIGNAL = 1.3; EXPRESSED IN BT474, SIGNAL = 1.3; EXPRESSED IN HBL100, SIGNAL = 2.4; EXPRESSED IN LUNG, SIGNAL = 1.4; EXPRESSED IN HEART, SIGNAL = 1.2; EXPRESSED IN BONE MARROW, SIGNAL = 1.4; EXPRESSED IN FETAL LIVER, SIGNAL = 1.3
gggaagacagggaggaagagagggggaaagtaagaaaaacacaagacatgaaaacaaaatcccacacacgttttctctttgggtttcataggtcaaaattagcaaaatgagtggcaatttcctcattcctgatgaaacttgctttcacgtttctctgctacctttttcccagataaggttctcgggataagagagagcctattgggaaataaaagctttttctccttttctatcatgctgagcagagggtgtcgcaacagaaaagctttccagtaggagtgtggccaccgtgtatcccacatgagcttcctgagtacacggacaagctgttctgtttcccggaggactgtcctatctgtcccagggttagagagccaatatcacagtcagtatcgcagtcgacagacacaaccctgccaatgatgactgtctgttgaacaggggaagtgggaggataaaaagccac

SEQ ID NO: 1179 - DNA, 413 bp, Homo sapiens
  MAP TO AC007179.3; EXPRESSED IN HBL100, SIGNAL = 1.3; EXPRESSED IN LUNG, SIGNAL = 1.5; EXPRESSED IN BRAIN, SIGNAL = 1.9; EXPRESSED IN PLACENTA, SIGNAL =   2; EXPRESSED IN BT474, SIGNAL = 1.5; EXPRESSED IN BONE MARROW, SIGNAL = 1.8; EXPRESSED IN FETAL LIVER, SIGNAL =   1; EXPRESSED IN HELA, SIGNAL = 1.6; EXPRESSED IN ADULT LIVER, SIGNAL = 1.5; EXPRESSED IN HEART, SIGNAL = 1.5
tgagagaattcatcacccccaaactacaagaactgctcaaaggactgttaaaaggagccctaaatcttaaaagaagtcctggaaatacatcaaaacagaacctttttaaatcatgaatctcacaggaactataaaacaaaaatacaatttaaaaaaagcagaaaacaaaaaaccaaggtatacaggcaacaaacagcacaatgaatggaatggtacctcacatctcagtactattgttgaatataaatggcataaatgctccacttaaaagatacagaattgcagaatggataagaattcaccaaccaactatctgctgccttcaagagactcaccaaacacataaggactcacacaaatttaaggtaaatgggtggaaaaagacatttcatgcaaatggacaccaaaaccaa

SEQ ID NO: 1180 - DNA, 410 bp, Homo sapiens
  MAP TO AC007179.3; EXPRESSED IN BT474, SIGNAL = 1.1; EXPRESSED IN HELA, SIGNAL = 1.3; EXPRESSED IN HEART, SIGNAL = 1.2; EXPRESSED IN PLACENTA, SIGNAL = 1.4; EXPRESSED IN FETAL LIVER, SIGNAL = 0.85; EXPRESSED IN LUNG, SIGNAL =   1; EXPRESSED IN ADULT LIVER, SIGNAL = 1.2; EXPRESSED IN BRAIN, SIGNAL = 1.1; EXPRESSED IN BONE MARROW, SIGNAL = 0.88; EXPRESSED IN HBL100, SIGNAL = 1.2
tcttccatgaaactggtccctgattagagactgctgctatagactatggtagtgtcattggaatgatattcctttccctctcactcctgtatctataattccaacatcttctgaaaaaaggatgacttgtcacaatgtgctgtctccaaaattggacatgcaccttaccagctctctgactaatccattctgaagaccctcttcactgacttctgaaatcttcccatcttttaaggcctatttccaatgccacagccctagttaattctcttatgtcctaccctgctttagctccctccttaatgaggagggggagaaggagcaggaatatcgtggaaggcctcagggagccgacagccttaaatcaaatcctaatgtgcgccttgctggccaggtccttcagagcaagt

SEQ ID NO: 1181 - DNA, 464 bp, Homo sapiens
  MAP TO AC007179.3; EXPRESSED IN PLACENTA, SIGNAL = 0.91; EXPRESSED IN BT474, SIGNAL = 1.3; EXPRESSED IN LUNG, SIGNAL = 1.2; EXPRESSED IN FETAL LIVER, SIGNAL = 0.79; EXPRESSED IN ADULT LIVER, SIGNAL =   1; EXPRESSED IN BRAIN, SIGNAL = 1.2; EXPRESSED IN BONE MARROW, SIGNAL = 0.79; EXPRESSED IN HBL100, SIGNAL = 1.3; EXPRESSED IN HELA, SIGNAL = 1.7; EXPRESSED IN HEART, SIGNAL = 1.6
actctcccatctgcgttctgttagggagaatcctgaccctatgtgtgaaggagcaggtgggggtggtattgcttacacatgtgtcagggagctgagctggtcctcggcttacgaagatttccttctttcagggtcagacacaggccagcacagatttagccacgttggccctgatgtactccacatggctcacattctcaatccgtttaccctggctgtggctgagctgccaagtccccagctcattccttcctgttctccaagctgttcattcctgccgcagagagtccagcacattttcctatctgcacgctcctcagttggggagttttcttggattggtagttccacagaatgcaacagaagcaaaactttcaagggtctgattgttggcctagcagctccaccagttgctgacattggagtaagtgcccctttggccaaggtgaacttaaaggcaggca

SEQ ID NO: 1182 - DNA, 471 bp, Homo sapiens
  MAP TO AC007129.2; EXPRESSED IN HBL100, SIGNAL = 4.2; EXPRESSED IN LUNG, SIGNAL =   3; EXPRESSED IN BT474, SIGNAL = 5.3; EXPRESSED IN BONE MARROW, SIGNAL = 3.3; EXPRESSED IN FETAL LIVER, SIGNAL =   3; EXPRESSED IN HELA, SIGNAL = 3.2; EXPRESSED IN ADULT LIVER, SIGNAL = 3.6; EXPRESSED IN BRAIN, SIGNAL = 2.8; EXPRESSED IN PLACENTA, SIGNAL = 2.6; EXPRESSED IN HEART, SIGNAL =   3
ctttttggctctgagtgtgcttacgattttttgaaaaacatttcccttgagacatccttttcttatagtatttgtagttttttcagcatatataaatatataaattgaattattataacataaacttataaattacattctctaatgaatggattcaaggctcctggcagagatactagtttttatgcttgtaatcaatcacacttaaatatcatgcaatccaaatgctaacaaaattactctgtccccatttggcatttagaaaacatcaaaaacatgctgatgatgccaaatagggtttttaagaatggggcgaaaggtgaaggtgtcaagtgcagcgaggattcctgcagctctttccttgtgtgggggtatgtcagcgtcagtgcaggctgcggtgtctggctctgtccttctgacatctgcggtggctgtggtccacctggagaggtggttatgtaggactcaggg

SEQ ID NO: 1183 - DNA, 478 bp, Homo sapiens
  MAP TO AC007129.2; EXPRESSED IN PLACENTA, SIGNAL = 1.5; EXPRESSED IN FETAL LIVER, SIGNAL = 2.3; EXPRESSED IN LUNG, SIGNAL = 1.2; EXPRESSED IN HELA, SIGNAL = 2.6; EXPRESSED IN ADULT LIVER, SIGNAL = 2.2; EXPRESSED IN BT474, SIGNAL = 3.9; EXPRESSED IN HEART, SIGNAL = 4.1; EXPRESSED IN BRAIN, SIGNAL = 2.7; EXPRESSED IN HBL100, SIGNAL = 3.9; EXPRESSED IN BONE MARROW, SIGNAL =   2
aaatgtgggctccatgaaagcggttcatgctgtgatctgtacccccagatctcttcccaggcaggtctcatccaccaccagaaatggtccatgttttactactgtattgatgtttttccacaaatacctgtagaaatccatattagaacacagggcgtcagtcactttcctgagcctgcattccaggacatcttgcagcctctgaaatgcagcgtggcacacagcactcaggttcctgcaatcagcatgcccacatggtcataatacagacttagcaacctggaaggaagtctcagtgatctgtgacccagccctttctcctgatagaccgtggaactgcaggcagaagatgcacggcgtctcatctcagatacacagtggtggtgccgggatggtatgtgctctccattctccctggagggctcttggtccatcttgcttcagtgactagcatgagaggagtggtgatagcagcagg

SEQ ID NO: 1184 - DNA, 479 bp, Homo sapiens
  MAP TO AC007068.17; EXPRESSED IN BONE MARROW, SIGNAL =  24; EXPRESSED IN HBL100, SIGNAL =  94; EXPRESSED IN ADULT LIVER, SIGNAL = 8.6; EXPRESSED IN BRAIN, SIGNAL =  11; EXPRESSED IN PLACENTA, SIGNAL = 8.5; EXPRESSED IN BT474, SIGNAL =  38; EXPRESSED IN LUNG, SIGNAL =  10; EXPRESSED IN HELA, SIGNAL =  42; EXPRESSED IN FETAL LIVER, SIGNAL =  24; EXPRESSED IN HEART, SIGNAL = 9.6
tgatcttggtgttgatgatggttttgagtcttttccattctgatttgacttttgtgcatttttggctggagtatctcgtatagatttcttcactggcgctttttcttcagcttcctcgtcatcatcatcatcatcatcttcatcatcatcatcatcagcagcagcagcaagttttacttttttctgcccacctccaggggcagactgctttccagatatacttaagagtttcacatcctcctcttcttcatcttctgactctgcaccttccttcacagctactaagtgctgtccactaatatgcactggccctgaaccacacttcaaccttaagtccactggtggtgttatttcaaagcccccaagagaaaccgttggctgtacagacattttcaaagttgccagtgttactttaattggactgccttcgtcattcatggcctctgcttcaacaatgtgcagttcatcctttgcaccag

SEQ ID NO: 1185 - DNA, 471 bp, Homo sapiens
  MAP TO AC007068.17; EXPRESSED IN BRAIN, SIGNAL =   4; EXPRESSED IN HEART, SIGNAL = 4.9; EXPRESSED IN BT474, SIGNAL =  20; EXPRESSED IN HBL100, SIGNAL =  72; EXPRESSED IN FETAL LIVER, SIGNAL =  16; EXPRESSED IN LUNG, SIGNAL = 5.3; EXPRESSED IN PLACENTA, SIGNAL = 6.4; EXPRESSED IN BONE MARROW, SIGNAL =  21; EXPRESSED IN HELA, SIGNAL =  22; EXPRESSED IN ADULT LIVER, SIGNAL = 5.3
tctgcactataaaaaggacagccagatatcaactgttacagaaatgaaataagatggaaaatttttaacaaattgtttaaactattttcttaaagagacttcctccactgccagagatcttgaatagcctcttggtcagtcatccagaagaaattcttcacataattgatgaacttggtttccactttgggaagagaaccacgtttttctatacttgcttgcatttttgctttaatgtcttctacagaactagatccttttggtgttttaggagatttttcctgttttttgaaggattcttgtccttttgatcttggtgttgatgatggttttgagtcttttccattctgatttgacttttgtgcatttttggctggagtatctcgtatagatttcttcactggcgctttttcttcagcttcctcgtcatcatcatcatcatcatcttcatcatcatcatcatcagcagca

SEQ ID NO: 1186 - DNA, 452 bp, Homo sapiens
  MAP TO AC007068.17; EXPRESSED IN LUNG, SIGNAL = 2.8; EXPRESSED IN HELA, SIGNAL =  11; EXPRESSED IN BRAIN, SIGNAL = 6.5; EXPRESSED IN HEART, SIGNAL = 7.1; EXPRESSED IN BONE MARROW, SIGNAL =   4; EXPRESSED IN PLACENTA, SIGNAL = 2.8; EXPRESSED IN BT474, SIGNAL =  15; EXPRESSED IN ADULT LIVER, SIGNAL = 7.5; EXPRESSED IN FETAL LIVER, SIGNAL = 6.6; EXPRESSED IN HBL100, SIGNAL =  12
ccattgtcatggttcctcacacaatattgtatttgacattttacaacaaagaaagattgacaatcagttcatgcctatagaagttacttgcccagttgctcaggatctcacacacattccatgggcagttggaggtgagctgccgctggccacaccagaggctgcaagaccagacatggacaggtacaaagaagagctgtgccacttgcacaacccagaggagaattgatacatccttaacgttgattcaagcagtgatgagaaccacgggtcttctatggccagaagagctcagaagagacagtccagctctatggtagtgatcaactctgactctgatgatgaatgctactcctatgaggagaagaaagctaagatattctaaataagcagtgacgatgagagtctggagtgttgttatgtgcagcccaccatccaggaaccctccaata

SEQ ID NO: 1187 - DNA, 458 bp, Homo sapiens
  MAP TO AC007055.3; EXPRESSED IN ADULT LIVER, SIGNAL = 1.2; EXPRESSED IN BONE MARROW, SIGNAL = 1.4; EXPRESSED IN HBL100, SIGNAL = 1.7; EXPRESSED IN LUNG, SIGNAL = 1.1; EXPRESSED IN HELA, SIGNAL = 1.7; EXPRESSED IN PLACENTA, SIGNAL = 1.7; EXPRESSED IN BT474, SIGNAL = 1.9; EXPRESSED IN FETAL LIVER, SIGNAL = 1.3; EXPRESSED IN BRAIN, SIGNAL = 1.3; EXPRESSED IN HEART, SIGNAL = 1.8
ttccccaagtacaagccaaggcaagttcctggggccctgtctgttcattgaatcactggaccaggggaggagccatgagcagagagcccccagtctctgggggtcctgcctccctggatcccacataaacagaggagcagcacccacagcctcctactcttcctgctcccttctcattcttacccttttttggggaagtccaggaccccaagaatcctgggtctcactcatcccctaaaaaaaccttagccctggggcaacgatttccctattgtcccagccccacctgcggggagtaccaaaagtacaagaattacccaaccagtgagtgggtcaatcgggttctccctggggagtatgacactccccgacgagcaagggaagtacactcactccccaggacggctccgcagacgcagaccgaagcttatggtgggagggtgcattctaggaagagg

SEQ ID NO: 1188 - DNA, 467 bp, Homo sapiens
  MAP TO AC007055.3; EXPRESSED IN BT474, SIGNAL = 8.4; EXPRESSED IN HBL100, SIGNAL = 9.3; EXPRESSED IN BRAIN, SIGNAL = 7.1; EXPRESSED IN PLACENTA, SIGNAL = 5.4; EXPRESSED IN BONE MARROW, SIGNAL = 6.5; EXPRESSED IN FETAL LIVER, SIGNAL = 6.5; EXPRESSED IN LUNG, SIGNAL = 5.3; EXPRESSED IN HELA, SIGNAL = 8.4; EXPRESSED IN ADULT LIVER, SIGNAL =   6; EXPRESSED IN HEART, SIGNAL =  10
actcctttcccttcctgtccctccctatcattatcacctacaatactccccactaggaagcaagttccatgagaacagggaacttgtctaactggtttgtcacagtgcctggcacggatgaattcttaataactagttgttgaacaaataagtggaaatggacatagcatgcttatgtattaaattatgtgttttcatgtacacagacatataggtatacctgcagataatgtgatcagaggtctggggtagaaatggacagatggtgccagagaagagggcaccaaaggagaagggaaaggaataatgattgagcctcgactcagtgccaggcactattctagagttttttatacatttaatcttcacaacaacacattgggcactgtaaacaaaattccaaggattcaagccaccatggaccaaaggaatcagaatcttgaggatggggccagcattattgtcct

SEQ ID NO: 1189 - DNA, 447 bp, Homo sapiens
  MAP TO AC007055.3; EXPRESSED IN BONE MARROW, SIGNAL = 2.5; EXPRESSED IN HBL100, SIGNAL = 4.9; EXPRESSED IN FETAL LIVER, SIGNAL =   3; EXPRESSED IN LUNG, SIGNAL = 2.7; EXPRESSED IN ADULT LIVER, SIGNAL = 4.6; EXPRESSED IN BRAIN, SIGNAL = 3.4; EXPRESSED IN PLACENTA, SIGNAL = 3.6; EXPRESSED IN BT474, SIGNAL = 5.9; EXPRESSED IN HELA, SIGNAL = 5.8; EXPRESSED IN HEART, SIGNAL = 4.6
caaatgtaatgttcggacaaccatataatgacatgtatccactattacagtatcatacagaatatttttactgccctaaaaattctctctgttccacctattcaatcttttattccatgtagtcgaccttttaaaaggtgctccaaagactacaaggtaacaggtctccaaatcagaataaataaagaatacaaatgaaactagatattaagtgctgactgtattaaggagcattagagttggagaagattcttaatccagagaaacactcttgattactcacccttgctctcaaaacacacttcaaacatgtcataatcttcagtggtaaaggcaaatttccccttggttgcatcctctttggagtagagaatatggccagcagaatctgtgatctaaaataagaaaagtagtaagaataggcagcaaataacactcaggaagaga

SEQ ID NO: 1190 - DNA, 464 bp, Homo sapiens
  MAP TO AC007055.3; EXPRESSED IN HELA, SIGNAL = 1.6; EXPRESSED IN ADULT LIVER, SIGNAL = 1.3; EXPRESSED IN BRAIN, SIGNAL = 0.77; EXPRESSED IN HEART, SIGNAL = 0.9; EXPRESSED IN BT474, SIGNAL =   2; EXPRESSED IN BONE MARROW, SIGNAL = 1.1; EXPRESSED IN HBL100, SIGNAL = 1.6; EXPRESSED IN PLACENTA, SIGNAL = 3.2; EXPRESSED IN FETAL LIVER, SIGNAL = 1.2; EXPRESSED IN LUNG, SIGNAL = 2.7
tccctctctcattcattcattcaaaaaacatttataggtgacctaatatgtaccagccctgggcatacatcagtgaactaaacagacaaaatccctgctcttataagagcttccattccatcaccccatgttgccactcccttagtataggttcaactaataaaatgcttagacatcgtgggcccagtaaacaattaggcttacagcactgttccaaaatgcttagcgttcacttaccacccaagtgtacagttccttctccactgtgaccacagcaaagtgggtattccctgcacagacctgccgggcactacagccactcttgataacatccagtttctggggggtggattttccaccaccccaaacatagacttcactggttcgtgatgttactacagcaatgggtgcttcagtcacagtgcttgacctgccaacaacccccagaacaaaggaacatttaa

SEQ ID NO: 1191 - DNA, 460 bp, Homo sapiens
  MAP TO AC007055.3; EXPRESSED IN PLACENTA, SIGNAL = 1.3; EXPRESSED IN FETAL LIVER, SIGNAL = 0.85; EXPRESSED IN LUNG, SIGNAL = 1.1; EXPRESSED IN HEART, SIGNAL = 1.1; EXPRESSED IN BT474, SIGNAL = 1.7; EXPRESSED IN BONE MARROW, SIGNAL = 1.2; EXPRESSED IN HBL100, SIGNAL = 1.3; EXPRESSED IN HELA, SIGNAL = 1.3; EXPRESSED IN ADULT LIVER, SIGNAL = 1.1; EXPRESSED IN BRAIN, SIGNAL = 1.5
tggtagtgactccattactttcctctacttctgtatccagaggattttcaaccttcccatattgcctcttaaacttctctaaagatcctagctgtgaactcaagcttagcttcttacggacgattggtttggagaaaccaattaatttatctgttttcctactatcattggaaacgtgtctataccaggggaaagagggggatgtatcagataatatgcaatctgtttgtgattttttgctaccttcctgaaaagcagaaaacattgtataagttgctgtaggttcattctctagcccataacttatattcgttctgcaattttttttgttgggcaattgaccagattctttacttaaagtgctggctaaatctttgatgtctggagtttcaactgaatgacgtgttctatttccaaatgtttcttgggcacgtgtgggaccaggtctaacataattttt

SEQ ID NO: 1192 - DNA, 473 bp, Homo sapiens
  MAP TO AC007024.4; EXPRESSED IN PLACENTA, SIGNAL = 1.5; EXPRESSED IN BT474, SIGNAL = 1.4; EXPRESSED IN BONE MARROW, SIGNAL = 1.7; EXPRESSED IN HBL100, SIGNAL = 1.6; EXPRESSED IN LUNG, SIGNAL = 1.5; EXPRESSED IN ADULT LIVER, SIGNAL = 1.3; EXPRESSED IN BRAIN, SIGNAL = 1.8; EXPRESSED IN FETAL LIVER, SIGNAL = 1.4; EXPRESSED IN HELA, SIGNAL = 1.3; EXPRESSED IN HEART, SIGNAL = 1.4
aactccaaatgaccagcacctgacattgtttcccatgggtggcaaaacatttatttaacatcaaactatatgtttgtatcatattttttcaattcaaagagaccctagacgcaagtatgatgcacataaaatttactatgtttttcaaggtaaaaaagaagtagtacattaaatgtatacattaactataaaatcaaactcaatttctcaactgttttgtgaaggggcacaaatgatattggaaacaaggaagaggggaatacactcacatatttttctcatagttaccagtactgtgcttcttcagagtgggatggagaagaggaggtggaaagagtggggagagaaaaggtgttgagggcttctgctgggagatgcactatcatgaggaaacacactggaggccttggtgtgtcctggtggtaagtagggggtaagggaggaagcactctctttcttcatttgtttacttc

SEQ ID NO: 1193 - DNA, 462 bp, Homo sapiens
  MAP TO AC006999.2; EXPRESSED IN HBL100, SIGNAL = 1.8; EXPRESSED IN BRAIN, SIGNAL = 0.85; EXPRESSED IN BT474, SIGNAL = 2.9; EXPRESSED IN BONE MARROW, SIGNAL = 0.82; EXPRESSED IN FETAL LIVER, SIGNAL = 1.1; EXPRESSED IN LUNG, SIGNAL = 3.2; EXPRESSED IN HELA, SIGNAL = 1.5; EXPRESSED IN ADULT LIVER, SIGNAL = 1.5; EXPRESSED IN PLACENTA, SIGNAL =   6; EXPRESSED IN HEART, SIGNAL = 1.1
tcatgctgtaaaatgggttattgatacagttccatatgatgcctatatcatgaatctatttctctctgtctcttctcttttgctcttttaataatcttaacatgaaataacttacaaaaagatgcagtcctatgcattcctgtcatcttcctgtgtatgcttccataatgttcttctaaattatttttctaacagttttgtgctaaaatctgctacagagatgagcgagggatgctggccacccatggagaaaaatgagacctgtgttccaggctgtcagcagactcctggaggttttgcccatggctgtagttcaacctgtgttccacaaacatttgcaattgtctgcactgctttggagacatgggccaaatgggtttccctcctgaataaccagctttcatctatttatatactagacatccacagcatttcacttgcaaagggttctactgctaaaaa

SEQ ID NO: 1194 - DNA, 467 bp, Homo sapiens
  MAP TO AC006999.2; EXPRESSED IN HEART, SIGNAL = 1.4; EXPRESSED IN PLACENTA, SIGNAL = 5.3; EXPRESSED IN BT474, SIGNAL = 3.9; EXPRESSED IN FETAL LIVER, SIGNAL =   2; EXPRESSED IN LUNG, SIGNAL = 3.1; EXPRESSED IN HELA, SIGNAL = 1.8; EXPRESSED IN ADULT LIVER, SIGNAL = 2.1; EXPRESSED IN BRAIN, SIGNAL = 0.82; EXPRESSED IN BONE MARROW, SIGNAL = 3.4; EXPRESSED IN HBL100, SIGNAL = 3.2
gaatgggctgttttcattccttgctgagggccttggtccctctggctatgattaagcctagatatttggcctgctgtaggcaaagctgggcctttgacctaaacagcttgtacccttgattagctagaaagttcaagagatctagagtagcctgctggcatgaggcttgagaactggtagccaaaagtaaatcatccacatactgaaggaccagagtggctggatttgagaagtggcctagatcttgggccagtgcctgaccaaacaggtgaagcctatccctaaacccttggggcaagactgtccacgtaatttgggacatgtggtctgtgggatcctcaaaggcaaagagaaattgggagtcagagtgcaggggaataaagaagaagttattcttgaggtccagaaccatgaaccattctgattcctctggtatttgagagagcagggtataggtgttgggtgca

SEQ ID NO: 1195 - DNA, 498 bp, Homo sapiens
  MAP TO AC006989.3; EXPRESSED IN PLACENTA, SIGNAL = 3.5; EXPRESSED IN BT474, SIGNAL = 3.6; EXPRESSED IN FETAL LIVER, SIGNAL = 3.5; EXPRESSED IN LUNG, SIGNAL = 3.5; EXPRESSED IN ADULT LIVER, SIGNAL = 2.6; EXPRESSED IN BONE MARROW, SIGNAL = 3.8; EXPRESSED IN HBL100, SIGNAL = 3.2; EXPRESSED IN HELA, SIGNAL = 2.8; EXPRESSED IN BRAIN, SIGNAL = 4.6; EXPRESSED IN HEART, SIGNAL = 2.8
tctaccacactaccacccccattatgaaggaaaatatcttctaaatctgcaatcattagccaacttccctgtctctgataggaccaaaactactctaaaaggatgtgctatccagcttttaagttcctacctttcctacctcacctattacacaagcaatgagaagcccatacatggccctgtaaccatgtaaacatgttaactttccaagcccacttatgcatccaacacaacctgttaccaggcctgcccctaaggaacctaatatcccatcagtgtaattacagcctacaacttcaagccacaattgatactgtaatttattctcacccaaacagctccattcagagagtttgtctgcttctcagggcccccagaaatcatcacctcctccctgcttatgaagagtctgagttttgtaatggcaaacatactccctccaagaccattcacccctggacaccctgcaacagcgcccctaccgcaagtgaatgcctt

SEQ ID NO: 1196 - DNA, 467 bp, Homo sapiens
  MAP TO AC006989.3; EXPRESSED IN HBL100, SIGNAL = 2.4; EXPRESSED IN BRAIN, SIGNAL = 2.7; EXPRESSED IN PLACENTA, SIGNAL =   3; EXPRESSED IN BT474, SIGNAL = 2.3; EXPRESSED IN BONE MARROW, SIGNAL = 3.3; EXPRESSED IN LUNG, SIGNAL = 2.7; EXPRESSED IN HELA, SIGNAL = 2.5; EXPRESSED IN ADULT LIVER, SIGNAL = 1.7; EXPRESSED IN FETAL LIVER, SIGNAL =   2; EXPRESSED IN HEART, SIGNAL = 2.1
ccttgattcctggacctgtggattctgattttgggagaaagagtatcatatattggacactgattcagaagatacccagccttctgaagaactttggcccagccctgcaaagtattctcatctatttgacaatgtaattgtggcttcaaaagcccattccagaattatattaatccagctgcttcaggataatggggaacatggtaagacaagtgaattccatgagcatgagccgactgtcacatgtctatgccataaagtgaatgccttggtcagaggccatgctgtgtggaatgccgtgatagaagataaagcattcattgagtccatggatggtagtcttagcagaagcattgtgggccaacatatacctggggtgagtgtctatttcagtgaggacaaacttctgccctttctatgatggaagaagtccaataaaattaacctgccaccagagaactagctgg

SEQ ID NO: 1197 - DNA, 500 bp, Homo sapiens
  MAP TO AC006985.2; EXPRESSED IN BT474, SIGNAL = 2.5; EXPRESSED IN HBL100, SIGNAL = 1.7; EXPRESSED IN LUNG, SIGNAL = 1.7; EXPRESSED IN HELA, SIGNAL = 1.5; EXPRESSED IN ADULT LIVER, SIGNAL = 1.3; EXPRESSED IN PLACENTA, SIGNAL = 1.7; EXPRESSED IN BONE MARROW, SIGNAL = 1.5; EXPRESSED IN FETAL LIVER, SIGNAL = 1.4; EXPRESSED IN BRAIN, SIGNAL = 1.1; EXPRESSED IN HEART, SIGNAL = 1.1
ccaaggatgggatctggaccagggctgtgggctggggggacaggacatgaggagtgagctatccaaaggaagtttacacaattctaacatgacctagatatgatcaggtaggcattaatatccaggtaggcattaatagtattaatttggacttggatgtttccaggagaagggggaatgagggtgggaggaatgtggagaggggtgggcattcccagacaaggagccagcccacctgcccaatccaatcagctggacaggaactttgcccaccttgcctgctcttgccagccacgctgacatccacatcctggccatggagctggtgttctgccaggtttgtgaggctgatacagataggagtcaaagcttccacgtagtctgtctccatgatgtagcacagcagcctcacccaaaactcctggggtaggggtgggagagaaaggggctcagaattagcccaagccctgggcttctaaggagaacagtcaggctctgcc

SEQ ID NO: 1198 - DNA, 451 bp, Homo sapiens
  MAP TO AC006984.2; EXPRESSED IN BT474, SIGNAL =   1; EXPRESSED IN BRAIN, SIGNAL = 0.82; EXPRESSED IN PLACENTA, SIGNAL = 2.4; EXPRESSED IN HBL100, SIGNAL = 0.7; EXPRESSED IN FETAL LIVER, SIGNAL = 0.79; EXPRESSED IN LUNG, SIGNAL = 1.7; EXPRESSED IN HELA, SIGNAL = 0.77; EXPRESSED IN ADULT LIVER, SIGNAL = 0.68; EXPRESSED IN HEART, SIGNAL = 1.4
ttgaatagcaataagtccatagaaggagccaaataaataaatgaatctgagttttgccttcctcaatgaccttgggcaaactgtttaatcttgattacaacacaaatattttttatagctataataaactatagctgtgttgtgattggaatagatgaatgaatgaatgaatgaatgttttttcagaacctgttagtaccagcatattagcaaggttagcaaataatcctaagccctccaaatctaggactttctcactcccctatccccacaaaaagatggatttcttactcacctcacatgatagctgcaaataactgctggtctgctccatgtgttttctccatcatggaatccagcctgaaggtgaagctcctgtctcccacattgctgatctggtggcagagggaaaggagcaattgaataacaacgtgattatgctttaagctgc

SEQ ID NO: 1199 - DNA, 481 bp, Homo sapiens
  MAP TO AC006984.2; EXPRESSED IN BONE MARROW, SIGNAL = 4.7; EXPRESSED IN HBL100, SIGNAL = 2.9; EXPRESSED IN FETAL LIVER, SIGNAL =   3; EXPRESSED IN ADULT LIVER, SIGNAL = 1.9; EXPRESSED IN BRAIN, SIGNAL = 3.3; EXPRESSED IN PLACENTA, SIGNAL = 2.9; EXPRESSED IN BT474, SIGNAL = 2.3; EXPRESSED IN LUNG, SIGNAL =   4; EXPRESSED IN HELA, SIGNAL = 2.7; EXPRESSED IN HEART, SIGNAL = 2.6
tgtgaatgcaaaggaaaagttcttgaagtaaattaaaagtgctaccccagtgaacacaccaatgataataaaatgaaacaactgtattactgatatagaaaacattttagtggtctggataaaagatcgaaacagccacaatagtctcttaagccaaactcaaatccagagcaagaccctaactgtcttcaattctgtgaaggctgacggaggtgaggaagctgctgaagaaaagttggaagctagaggaggttggctcatgaggtttaagaagctatctctataacataaaagtctaagatgaagcagcaagtgctgatgcaaaagctgcagcaaatgatccagaagatctagctaagatcatcaaagaaagtgcctacagtgaagaacagattttcaatgcagaaaaacagccttctgttggaagaagatagcatctaacactttcatagctagaaagcagaagtcaatatctggcttt

SEQ ID NO: 1200 - DNA, 471 bp, Homo sapiens
  MAP TO AC006975.2; EXPRESSED IN FETAL LIVER, SIGNAL = 0.78; EXPRESSED IN LUNG, SIGNAL = 1.4; EXPRESSED IN HELA, SIGNAL = 0.95; EXPRESSED IN ADULT LIVER, SIGNAL = 0.8; EXPRESSED IN BRAIN, SIGNAL = 1.1; EXPRESSED IN HEART, SIGNAL = 0.85; EXPRESSED IN PLACENTA, SIGNAL = 1.5; EXPRESSED IN BT474, SIGNAL = 0.94; EXPRESSED IN BONE MARROW, SIGNAL = 0.78; EXPRESSED IN HBL100, SIGNAL = 0.81
ccaattccctagctgctcacagtgccaaagtaatttcaacaccaaaagcccactcagccctggagaataagaaacagcgcatgcactcatggttgtctgattaaagttcaagtgctgcatctcggaaagcttctgccctttagaaagcttgaagtccttaggccatgtatgcctttgattacctaccctccaaaaagcctgagactgcctcttctgcttcatcaaaggccagagaaaaagggtggggaattttggttttaccacatcacctcaaacactgggagaacttgagaaatgacctttgcatacccagaatattttagtaaaattcatgtacagcttggttattcagatattcacaaacatattaaaatatacaataaggctctgcctatgtaagtgatgtgccatttgcagtatgagtaacaaaaacataacttcaaaatggtagggttgtctgatactcccaca

SEQ ID NO: 1201 - DNA, 459 bp, Homo sapiens
  MAP TO AC006548.19; EXPRESSED IN PLACENTA, SIGNAL = 5.2; EXPRESSED IN BT474, SIGNAL = 5.8; EXPRESSED IN BONE MARROW, SIGNAL =  17; EXPRESSED IN ADULT LIVER, SIGNAL = 5.7; EXPRESSED IN HELA, SIGNAL = 4.5; EXPRESSED IN LUNG, SIGNAL =  12; EXPRESSED IN FETAL LIVER, SIGNAL = 4.6; EXPRESSED IN HEART, SIGNAL = 3.4; EXPRESSED IN BRAIN, SIGNAL = 4.3; EXPRESSED IN HBL100, SIGNAL =   4
cccaggaaaaatgaccagtgctctgattaagctcttgaaaataaactgctccctgctggctagtaacaaattggttcattttagaaagtctacttttcatgataaaaatcaaaacttgaaaaaatatgtaactctaaatcaaaatcttaaggaaaatcatgaaagttgctcaaaatgtgtttatataaccttgcacttctctgttattatttcaggatccagtggggacattgtgatgacccagactccactctccctgcctgtcactcctggagagccagcctccatctcctgcagatctagtgagagcctcttggatactgatgatgaatacacctatttgaattggtacctgcagaagccaggccagtctccacagctcctgatctatgaggtttccaaccgggcctctggagttccagacaggttcagtggcagtgggtcaggcactgatttcac

SEQ ID NO: 1202 - DNA, 485 bp, Homo sapiens
  MAP TO AC006548.19; EXPRESSED IN PLACENTA, SIGNAL = 4.4; EXPRESSED IN BT474, SIGNAL = 4.1; EXPRESSED IN BONE MARROW, SIGNAL = 2.9; EXPRESSED IN LUNG, SIGNAL = 3.7; EXPRESSED IN HELA, SIGNAL = 3.3; EXPRESSED IN BRAIN, SIGNAL = 3.4; EXPRESSED IN HBL100, SIGNAL = 3.6; EXPRESSED IN FETAL LIVER, SIGNAL = 3.5; EXPRESSED IN ADULT LIVER, SIGNAL = 1.7; EXPRESSED IN HEART, SIGNAL = 4.1
gccaggatttacaggtccaggaatcaaggggtggaagtgaaagtggaaccactcactgtcacccctagtgatccactagcaaaatgtttgctttctgttcccgcgacattacgtcctgctttactagacatcttagttccagagggaggaatgctgccaccaagagacaaaataatgattccattaaatgggaagttaagatggccagctgggcactttgggctcctcctacctttaagttaacaggataagaatggagttacagtgttggctgcggtgattgacccagactatcaagatgaagtcagtccactactccacaatggaagtgaggaagagtatgcgtggaatacaggagatccattagggcgtctcttgggattatcatgcactctgattaaggtcaatgggaaactacaacagcccaacccaggtaagacctaaatggtccagatccctccggggtcacaacctgctgaggtgct

SEQ ID NO: 1203 - DNA, 486 bp, Homo sapiens
  MAP TO AC006548.19; EXPRESSED IN FETAL LIVER, SIGNAL =   2; EXPRESSED IN BT474, SIGNAL = 1.8; EXPRESSED IN BONE MARROW, SIGNAL = 1.8; EXPRESSED IN HBL100, SIGNAL = 1.7; EXPRESSED IN HELA, SIGNAL = 1.7; EXPRESSED IN ADULT LIVER, SIGNAL = 1.7; EXPRESSED IN BRAIN, SIGNAL =   2; EXPRESSED IN HEART, SIGNAL = 1.9; EXPRESSED IN PLACENTA, SIGNAL =   2; EXPRESSED IN LUNG, SIGNAL = 3.3
gtctgcccaattcctcttcctgtgttttctccatatcatctcactacattgggctgtgaacttccccgcctgcctccctggggcagtcctggcctcctctcacccctgccccttcccttctttctctctcttaggagtgccagcttctcccagggttctgaggccccattcatcatgaggagaaacacagccatgcaaaatcttgcccagcacagtggatacagtgttgatggggtcagcggtcacatccatggcttccatagcctttccaagcccagccagcacaatgcagaattcagaggcagcacccacagaatcccctggagcctggcctcccatggccacaccagaggcagcctcacaggctctgaggcggataatgagggtgtgtaccccttcaaggcacccagaagcaccctgttccaggagtttgggggccacctggtgaacaatagtggtgttccggccaccccactctcagtgcac

SEQ ID NO: 1204 - DNA, 471 bp, Homo sapiens
  MAP TO AC006499.11; EXPRESSED IN BT474, SIGNAL = 2.1; EXPRESSED IN PLACENTA, SIGNAL = 2.4; EXPRESSED IN HBL100, SIGNAL = 1.6; EXPRESSED IN FETAL LIVER, SIGNAL =   2; EXPRESSED IN HELA, SIGNAL = 2.2; EXPRESSED IN ADULT LIVER, SIGNAL = 1.8; EXPRESSED IN BRAIN, SIGNAL = 2.5; EXPRESSED IN HEART, SIGNAL = 1.9; EXPRESSED IN BONE MARROW, SIGNAL = 2.2; EXPRESSED IN LUNG, SIGNAL = 2.6
catctacccagggttatgcctgccatcatccccctgaaacttcatgttgtgttcctcatgctgaagattgcctttaaacttcaggagagctggcacacccaaaggtttcaaaaccttgggtgaaagcagagataaacattttattgacaaataaaaaggtggagcgttcaaggtcattgtggcctaggaaaaacaggagacattgccaggaaacggagtcatcaagaggcctcacatgagcagaggaagatgccaagcacagctcaaggacttttgttgtggccactccagtgcttgcccagcagacaccgtggtgcccagagggcccatcatacacacttccactgtcagaggaagctgaagacttctggacccagtctcctgggggtgatggggtatcacctccaagtgcactcttatcaaatgactgtctcttcagctcagaaaggctgggctgtacgtcgagttcac

SEQ ID NO: 1205 - DNA, 479 bp, Homo sapiens
  MAP TO AC006499.11; EXPRESSED IN HBL100, SIGNAL = 2.1; EXPRESSED IN LUNG, SIGNAL = 1.8; EXPRESSED IN ADULT LIVER, SIGNAL = 2.4; EXPRESSED IN BRAIN, SIGNAL = 1.7; EXPRESSED IN HEART, SIGNAL = 1.4; EXPRESSED IN BT474, SIGNAL = 2.7; EXPRESSED IN PLACENTA, SIGNAL = 1.6; EXPRESSED IN HELA, SIGNAL = 1.8; EXPRESSED IN FETAL LIVER, SIGNAL = 2.1; EXPRESSED IN BONE MARROW, SIGNAL = 1.2
actggctgtagaagtggtggaatatttgcccaataagcttaattgttttttgtttcagcagttactgggggaatatggcaatggtgagcacagccatcacagctaccattaggttactcattgtaactggttgtcccaccttcagatttttttctgccatctgtgtcaactttttgatctgacctcagatgggtggctgtgccaccataagtgttgctcgccaggactggtgtcttccttattgtcagtctagacatggctgcagtccttgggttcctcccaaagtctcttcctcagcatctggctcataaggtttcaggtgtctcgatggtatccaaatcagctgctgattctggcctggagaaacacaggtataacctctaccccaagttattttacatatttcccaactttgtgttatcggacctctccaccaaaccagttctgcttctgtctttgccactggtttctgtagatgc

SEQ ID NO: 1206 - DNA, 473 bp, Homo sapiens
  MAP TO AC006474.3; EXPRESSED IN FETAL LIVER, SIGNAL = 2.1; EXPRESSED IN LUNG, SIGNAL = 1.8; EXPRESSED IN ADULT LIVER, SIGNAL = 0.98; EXPRESSED IN HEART, SIGNAL = 1.1; EXPRESSED IN BT474, SIGNAL = 3.2; EXPRESSED IN BONE MARROW, SIGNAL = 1.2; EXPRESSED IN PLACENTA, SIGNAL = 2.9; EXPRESSED IN BRAIN, SIGNAL = 1.5; EXPRESSED IN HELA, SIGNAL = 1.4; EXPRESSED IN HBL100, SIGNAL = 0.89
ggatggcctatttgctgttgtctcattcatttgaaggggcctagataccgatgataaaggtgtacagttttccactggtgcagcagaatttcttctggaaaaactatggcccacaggaggtggtcgaggggtaccaaccatttttgcatatggatccattggagatggtggtcgtgagttagaggacccaggtgaaaacacttgcggtgagggtggctgagaagtctgagcctgagaaagactatcctggatgggaatccgggatggggctggaggaggaggtggagcttgtggctttacaaacacatcatctgaagatgtagacgtaggggtactgggtggctgttttgtaaacagttctttatggaatgactgtgcaggagacatatttccattgccaggctgaggtgtcaagggactctgtatcccactacttggtgtatctgaaccagactgcaccagaagatgctgag

SEQ ID NO: 1207 - DNA, 457 bp, Homo sapiens
  MAP TO AC006474.3; EXPRESSED IN BT474, SIGNAL = 5.2; EXPRESSED IN BONE MARROW, SIGNAL = 1.6; EXPRESSED IN FETAL LIVER, SIGNAL = 2.5; EXPRESSED IN HELA, SIGNAL =   1; EXPRESSED IN PLACENTA, SIGNAL = 3.3; EXPRESSED IN HBL100, SIGNAL = 1.6; EXPRESSED IN LUNG, SIGNAL = 2.2; EXPRESSED IN ADULT LIVER, SIGNAL = 1.4; EXPRESSED IN BRAIN, SIGNAL = 1.8; EXPRESSED IN HEART, SIGNAL = 1.3
tccaggaagttgggagacaccagagaactgctggccttgggagtgcattggagagtttgaagatgcacagaagctcccctctgatccaggccttggctgatcagcaacatcatgggcagtttgacttgttccaaaagagtcagactgagatcttggagtcattggagactgatcatagggatcacgggcagcagatggggaaacacggctaaatgtgtctgaaagaccaggtccagggggcctaggtgtctgggaacatgtatcaggtggccttaccaacgggccaggtaaagctggtcctcggttttgtgctgcttgcaggaaaggatcctgatttggcatgaggactggtcttgtcattgaggacctagtaaaaccctctgaaatccttggccttggtgttgctggtggctgagagtaagggacagaaattccaggtcttggtgttccaggagga

SEQ ID NO: 1208 - DNA, 420 bp, Homo sapiens
  MAP TO AC006474.3; EXPRESSED IN PLACENTA, SIGNAL = 2.5; EXPRESSED IN ADULT LIVER, SIGNAL = 0.86; EXPRESSED IN BONE MARROW, SIGNAL = 1.7; EXPRESSED IN HBL100, SIGNAL = 1.1; EXPRESSED IN FETAL LIVER, SIGNAL =   2; EXPRESSED IN LUNG, SIGNAL = 1.2; EXPRESSED IN HELA, SIGNAL = 1.6; EXPRESSED IN BRAIN, SIGNAL = 1.5; EXPRESSED IN BT474, SIGNAL = 4.2; EXPRESSED IN HEART, SIGNAL = 0.95
tcagacgttgtttcagacggtacagatgttgacaaaggagcttctgaaaattcaccacctagtggatggttcagagtcctcatgaccatagaagatgaatggacagaatgaccttgctcttgttgagatggtggcacttgttccaaatctgggtgcacaggtagctgattaggtagaccctggggaggtcgtcgcatggggtctgtgtgtctagggcccggaaagtctggccggggaatgaagtttccatgtctcagattagaagatgcctctacaacgctgccaggtggagcactgaaaggcagccgttgccttccgtcaggagccctatgtctcagttcaatatatgcttggcccagtatgttgtgctgctgaactggcaagctctgtggtgaaaaatgctgaggaagtccaactgga

SEQ ID NO: 1209 - DNA, 410 bp, Homo sapiens
  MAP TO AC006459.2; EXPRESSED IN PLACENTA, SIGNAL = 0.95; EXPRESSED IN BT474, SIGNAL = 1.6; EXPRESSED IN LUNG, SIGNAL = 1.1; EXPRESSED IN HELA, SIGNAL = 2.7; EXPRESSED IN ADULT LIVER, SIGNAL = 0.86; EXPRESSED IN HEART, SIGNAL =   1; EXPRESSED IN BONE MARROW, SIGNAL = 1.1; EXPRESSED IN HBL100, SIGNAL = 2.6; EXPRESSED IN FETAL LIVER, SIGNAL = 1.3; EXPRESSED IN BRAIN, SIGNAL = 0.99
gacacagcctccttacctgggggctcacaggctacaggttaataaattttaggttattaaagttgtaggataaataatcacaaaatatcaagaactatccggtaatacaatactgaaaatacagccgaaagaactaaagtccaaaaaatgacttggttaaatgacataattaagcaacagttgaccaactgacaaaaaagaatctttctactgtaaattcccaggatcttgtctctgctagagtcatataaaacactctaggcttcaaatagtggtgtgaacctggccttcatgttgcaagagtaaaccaattggcatagttgttcatacaaagggtaatgtctaatagtacagccaccaagactaatttgatcttcttggcataaaaaacattgccacttgtttgctga

SEQ ID NO: 1210 - DNA, 477 bp, Homo sapiens
  MAP TO AC006459.2; EXPRESSED IN HEART, SIGNAL = 2.5; EXPRESSED IN ADULT LIVER, SIGNAL = 3.1; EXPRESSED IN BRAIN, SIGNAL =   2; EXPRESSED IN PLACENTA, SIGNAL = 4.5; EXPRESSED IN BT474, SIGNAL = 6.9; EXPRESSED IN BONE MARROW, SIGNAL = 5.6; EXPRESSED IN HBL100, SIGNAL =  17; EXPRESSED IN FETAL LIVER, SIGNAL = 6.3; EXPRESSED IN HELA, SIGNAL =  11; EXPRESSED IN LUNG, SIGNAL = 4.5
caatgctcactcaggaacaggttatttaatttccatgtatttgcatggttttgaaggttcctttcggagtttattttcagttttattccactgtggtctgtcagagtgcttgacataatttcaattttcttaaacgtattgatgctcattttatgacctatcatatggtctatcttggagatagtttcatgcactgttgaatagaatgtgtattctgcagttgttggatgaaatgttctgtatatatccgttaagtccatttgttccagggtatagtttaaatccattgtttctttgttgacttttggttttgatgacctgtctattgctgtcactggagtattgaagttccccactattactatgttgctgtctatctcatttcttaggtctattagtaattgttttataaatttgggagcttcagtgttagatgcgtatgtgtttaggattgtgatattttcctgtgggacaagg

SEQ ID NO: 1211 - DNA, 484 bp, Homo sapiens
  MAP TO AC006459.2; EXPRESSED IN LUNG, SIGNAL = 2.7; EXPRESSED IN ADULT LIVER, SIGNAL = 1.7; EXPRESSED IN BONE MARROW, SIGNAL = 2.8; EXPRESSED IN HELA, SIGNAL = 2.7; EXPRESSED IN BRAIN, SIGNAL = 2.4; EXPRESSED IN HEART, SIGNAL = 1.5; EXPRESSED IN PLACENTA, SIGNAL = 2.7; EXPRESSED IN BT474, SIGNAL = 2.8; EXPRESSED IN HBL100, SIGNAL = 2.9; EXPRESSED IN FETAL LIVER, SIGNAL = 2.3
cgctgaccaaagcactcactttacagcttaagaagtgtggcagtgggctcatgctcatggaattcactggtcttaccatgttccccatcatctggaagcaggtggattgatagaatggtggaatggccttttgaagtcacaattacaatgccaattaggtacaatactttgcagggctagggcaaagttctctaaaaggctgtgtatgctctgaatgagcatctaatatatcgtactgtttctcccataaccaggattcaggggtccaggaatcaaggggtggaagtagaagtggcaccactcaccatcatccctagtgatccattggcaaaacttttgcttcctgttcctgtgacattacattctgctgctccagaggtcttagtttcagaaggaggagtgctgccaccaggagacacaacaacaataaaattaaactggaagttaagtttgccacctggacactttgggctcctcctacctc

SEQ ID NO: 1212 - DNA, 459 bp, Homo sapiens
  MAP TO AC006455.2; EXPRESSED IN HBL100, SIGNAL =  12; EXPRESSED IN FETAL LIVER, SIGNAL =  12; EXPRESSED IN LUNG, SIGNAL = 9.2; EXPRESSED IN ADULT LIVER, SIGNAL = 4.6; EXPRESSED IN PLACENTA, SIGNAL =  18; EXPRESSED IN BT474, SIGNAL =  27; EXPRESSED IN BONE MARROW, SIGNAL =  22; EXPRESSED IN HELA, SIGNAL = 4.7; EXPRESSED IN BRAIN, SIGNAL = 3.8; EXPRESSED IN HEART, SIGNAL = 5.4
ggttcgaggataagctaaaggcttggccacattcttcacaggcatagggttttctctagtatgaattctcttatgtctagtaaggtttgaggaccagctaaaggctttgccacattcctcacacctgcagggtttctctccagtatgaattctcttgtggtcagtgagggttgaggatacgctaaaggctttgccacattcttcacatttgtagggtctccctccagtatgaattctcttgtggttagtaagtgctgaggagcgcctaaaggcttggccacattcttcacatgtgtagggtttctctccagtatgaattctcttatgtctagtaaggtttgcggaccagctaaaggctttgccacattcctcacatctatatggtttctctccagtatgaattattttatgtgtagtatggtttgaggagcagttaaaggatttgccacattctttgca

SEQ ID NO: 1213 - DNA, 479 bp, Homo sapiens
  MAP TO AC006455.2; EXPRESSED IN ADULT LIVER, SIGNAL = 4.5; EXPRESSED IN LUNG, SIGNAL = 7.4; EXPRESSED IN HELA, SIGNAL = 7.9; EXPRESSED IN HEART, SIGNAL = 5.2; EXPRESSED IN PLACENTA, SIGNAL = 4.3; EXPRESSED IN BT474, SIGNAL =   5; EXPRESSED IN BONE MARROW, SIGNAL = 6.7; EXPRESSED IN FETAL LIVER, SIGNAL = 5.8; EXPRESSED IN BRAIN, SIGNAL = 7.7; EXPRESSED IN HBL100, SIGNAL = 5.7
ccctggaataggattagagaaggtaagcaagaataaattcatctacatattccttttattaaagcctgtcctttgtttccacacaatctgtaagtgaaaactccatcaaaatggttcattcaaaaaagtgtctactattaacaaagcataacaatatacatttatgctgttgtgcatagagaacattatccaaattttctactgaggagccaggagaaatttaatgaaaatgaaacaatatgattattgactacagaaagaataccttttttggagaaaaaatatatacttacttagtcagctgccctttattcttgttgttatcaactccattgtaagtcacagctgccagttttctgcttccatagttctcgcagtggacattgttagtaacatctttcaagtcctgcatgtgtgttctgtcataaataaacagcaagagtttgcttctgttaatagctagggggcataaagctaaa

SEQ ID NO: 1214 - DNA, 460 bp, Homo sapiens
  MAP TO AC006455.2; EXPRESSED IN FETAL LIVER, SIGNAL =  31; EXPRESSED IN HEART, SIGNAL =  20; EXPRESSED IN PLACENTA, SIGNAL =  37; EXPRESSED IN BT474, SIGNAL =  73; EXPRESSED IN HBL100, SIGNAL =  17; EXPRESSED IN LUNG, SIGNAL =  22; EXPRESSED IN HELA, SIGNAL = 8.9; EXPRESSED IN ADULT LIVER, SIGNAL = 6.2; EXPRESSED IN BRAIN, SIGNAL =  32; EXPRESSED IN BONE MARROW, SIGNAL =  13
tataaggcctgagggtggactttgccacattattcacatttgtagggtttctctccagtgtgaattatcttatgtttagcaagacttgaatgccacttaaaagcttggtcacattcttcacatttgtagggtttctctccagtatgaattctcttatgttgcataagggttgaggagcaattaaaggctttgccacattcttcacatgtgtagggtctctctccagtgtgaattctcttgtggtcagtgagggttgaggataagctaaaggctttgccacattcttcacatttgtagggtctctctccagtatgaattctcttgtggtcagtgagggttgaggataagctaaagactttgccacactcttcacatttgtagggtctctctccagtatgaattctcttgtggatagtaagtgctgaggagcgcctaaagtcttggccacattcttcatatg

SEQ ID NO: 1215 - DNA, 400 bp, Homo sapiens
  MAP TO AC006454.3; EXPRESSED IN ADULT LIVER, SIGNAL =  12; EXPRESSED IN HEART, SIGNAL =  10; EXPRESSED IN PLACENTA, SIGNAL =  16; EXPRESSED IN BT474, SIGNAL = 8.3; EXPRESSED IN BONE MARROW, SIGNAL =  15; EXPRESSED IN FETAL LIVER, SIGNAL =  21; EXPRESSED IN LUNG, SIGNAL =  11; EXPRESSED IN HELA, SIGNAL =  12; EXPRESSED IN HBL100, SIGNAL =  12; EXPRESSED IN BRAIN, SIGNAL =  15
aagcaccaggcacacactcccgtcagccacagacaggtcccacccccagccccaggatatatgctcccaacctggcgcatgtccttgtagctgtggtgccggaaatccaggtcatcggtggccaccacctcattctgtgcgtagtagctgtagacagctgcaagggaggcggggttgtctttagctgggtgccggctggcccaccctagcaccccacctccactcagagcccctgccagccctccacactcacgggccacagagcaccccagcacctccaggcgcatgcacaggctgccattccaggtgagtgggtagatgcggatgaaacgagccaccaccggctctgggagctcactcagcacgggtgtgtccttgtccacgttcccatgaaaggtct

SEQ ID NO: 1216 - DNA, 479 bp, Homo sapiens
  MAP TO AC006454.3; EXPRESSED IN HEART, SIGNAL = 1.8; EXPRESSED IN BT474, SIGNAL = 1.6; EXPRESSED IN BONE MARROW, SIGNAL = 2.3; EXPRESSED IN HELA, SIGNAL = 1.8; EXPRESSED IN ADULT LIVER, SIGNAL = 1.8; EXPRESSED IN PLACENTA, SIGNAL = 2.9; EXPRESSED IN HBL100, SIGNAL = 1.5; EXPRESSED IN FETAL LIVER, SIGNAL = 1.7; EXPRESSED IN LUNG, SIGNAL =   2; EXPRESSED IN BRAIN, SIGNAL = 2.1
agggatatcgtcagggacagaagctactctgccctctgctgctcacccctccaacacgctgtgggctgcatttgttgagtggctggtaccagactctgctcttctgactttccagctggttttacctgtagtaaagtttgagaagatgggtcatcctgaccccggggtcagaagacagaaggaggcccatggcgtgtgggggagatgccccgtgaggccctcggtgtgcagatgcctggtgacagccccaccctgaggtccccagcctaccccctccccagcccgactgctcccatccccctccctgtgcaggtagagcagatcctggcagagttccagctgcaggaggaggacctgaagaaggtgatgagacggatgcagaaggagatggaccgcggcctgaggctggagacccatgaagaggccagtgtgaagatgctgcccacctacgtgcgctccaccccagaaggctcaggtac

SEQ ID NO: 1217 - DNA, 469 bp, Homo sapiens
  MAP TO AC006449.13; EXPRESSED IN BT474, SIGNAL = 9.8; EXPRESSED IN HELA, SIGNAL = 8.2; EXPRESSED IN ADULT LIVER, SIGNAL = 5.9; EXPRESSED IN BRAIN, SIGNAL = 7.6; EXPRESSED IN HEART, SIGNAL = 6.4; EXPRESSED IN PLACENTA, SIGNAL = 7.2; EXPRESSED IN BONE MARROW, SIGNAL = 8.9; EXPRESSED IN HBL100, SIGNAL = 8.2; EXPRESSED IN FETAL LIVER, SIGNAL = 6.4; EXPRESSED IN LUNG, SIGNAL = 8.6
ccatctactgtgagctcggcttacagcaagtccttacgtgttatctcatttgattctcaacaaaccttaagaaggcgttgggtattattactccctggtcctactgaagtaaccaagtctctcaaatttgatcacagttccacagctagtacatgcaaagccaaccttagaatccaggtgagtctggcattacaacccatgcccttaagcactcagccattatacaacactggatgatgcatctcaggacagctctgcaattccctacacacaagcgcacccccagctcctcacttacttgacggccccaacatcctccgcatagcgctgcatctcttcccgggctctctcttctcgcagctcccgctgaagctcctcaatcttcttccgctcagcctcatgcttctgctcggccttccacactttctccacattcctgagggtctgcgggtgccagctcttcttcaga

SEQ ID NO: 1218 - DNA, 469 bp, Homo sapiens
  MAP TO AC006449.13; EXPRESSED IN PLACENTA, SIGNAL = 3.8; EXPRESSED IN ADULT LIVER, SIGNAL = 4.3; EXPRESSED IN BRAIN, SIGNAL = 5.6; EXPRESSED IN HEART, SIGNAL = 3.4; EXPRESSED IN BT474, SIGNAL =  12; EXPRESSED IN BONE MARROW, SIGNAL = 5.2; EXPRESSED IN HBL100, SIGNAL = 4.2; EXPRESSED IN FETAL LIVER, SIGNAL = 4.2; EXPRESSED IN LUNG, SIGNAL = 4.8; EXPRESSED IN HELA, SIGNAL = 4.9
ccactcttcagtcagccaggacaagcagggaagtataggaaagcctggcagaggaggagccccaggttcaggtggtgaccctggatgggaatctggaggcagaaagaggtcaaaggcagcaatgaatgaggtggaggtccagatgcccctagaaggatctaaacaatgagctgagggggtaggatgagggcagggctgtgcagagcaggcgcaggctctgacttactttcatggcttttcatggcatagacgtcaacagaggggtcgaattccccaggaccaaagaaccgaggaaagctgaggaggttgccagggctgtccggaggtgtgccataggagcagagtaggttgccacccaccccatcattctcacactcctcgtcctctgcccgctcctccacctccatctcctcctgctctgcccggtccacgtcgtggatgcccaccagcaggctgtagtccatgatct

SEQ ID NO: 1219 - DNA, 478 bp, Homo sapiens
  MAP TO AC006448.4; EXPRESSED IN LUNG, SIGNAL =  13; EXPRESSED IN HELA, SIGNAL =  13; EXPRESSED IN ADULT LIVER, SIGNAL =  11; EXPRESSED IN HEART, SIGNAL = 3.5; EXPRESSED IN PLACENTA, SIGNAL = 7.3; EXPRESSED IN BONE MARROW, SIGNAL =  16; EXPRESSED IN FETAL LIVER, SIGNAL =  15; EXPRESSED IN BRAIN, SIGNAL = 6.9; EXPRESSED IN BT474, SIGNAL =  27; EXPRESSED IN HBL100, SIGNAL =  21
ctttgggtggaggcacagacagcaagtttatttgatgaatgctgacggcaaatatcatccaagagagaatatatgggaaaggcgctgtgataagagagcctagggagccttcaggatagatagaaaatctcaccaggggaagacaacatggctctgggagactgggaaggtcctcagccattcagcaccgtaaggacgagctctgccccatgggccagtcatcccgacaggatatgcctcacaaatgcttcatagtcgatacaaccattgctgccctcgttccctgccaccaacacctctacttcttcctctgttatcttctcacccagtgtgacaagaacgtgccagaattcaacacccatgatggtgccatttccttccttgtcaaacacctgaagtccttctacgtaatcttcataggtgccttggtccttgttcttggccaccatctgcagcatgggcagaaagtgctcaaagt

SEQ ID NO: 1220 - DNA, 480 bp, Homo sapiens
  MAP TO AC006365.3; EXPRESSED IN PLACENTA, SIGNAL = 8.8; EXPRESSED IN FETAL LIVER, SIGNAL =  11; EXPRESSED IN LUNG, SIGNAL =  11; EXPRESSED IN ADULT LIVER, SIGNAL = 8.8; EXPRESSED IN BRAIN, SIGNAL =  12; EXPRESSED IN BT474, SIGNAL = 9.3; EXPRESSED IN HEART, SIGNAL = 9.3; EXPRESSED IN HELA, SIGNAL =  11; EXPRESSED IN HBL100, SIGNAL = 9.5; EXPRESSED IN BONE MARROW, SIGNAL =  10
aaatataccataagctgaaaaccaacaaaaagcattggtctgtgtctaacacctatgagttatcagtatggtaatttatatcctttaaaaaggcttcctatgtaaatgtcttgctgctgttagcattttctgcatgtctacaagtctgtaaaagacctgaagatggatggtcctgtttctctagttggttatggaattagataaacatacaggcagaagcaagaaggaaagtttcctttgtaaaaagtatttaaaacttactttctccttcaaacttgaggaacctgagtcctttaatcagaaagacaccaacactgtagtagttttggtgaataaagaccacagagaaagacctggatcctctaagacttagaaaaaggtagaacaggaagagtgaagatgaatccgtttccataacctcgatccattcaaagccagcccaagggaaggggctggctgggggctgtgtgaggaggggag

SEQ ID NO: 1221 - DNA, 479 bp, Homo sapiens
  MAP TO AC006365.3; EXPRESSED IN FETAL LIVER, SIGNAL = 9.5; EXPRESSED IN HEART, SIGNAL = 8.4; EXPRESSED IN PLACENTA, SIGNAL = 5.8; EXPRESSED IN BT474, SIGNAL =  10; EXPRESSED IN BONE MARROW, SIGNAL =   6; EXPRESSED IN BRAIN, SIGNAL = 9.1; EXPRESSED IN ADULT LIVER, SIGNAL = 7.3; EXPRESSED IN HELA, SIGNAL =  19; EXPRESSED IN LUNG, SIGNAL = 9.5; EXPRESSED IN HBL100, SIGNAL = 7.3
tcttcaaagactttcctcaccttctaattaggaataaatagtaacttcccttagaagcaaaatttattcaaagacctgtgctaacattcctaaatatctgctagccgtaataaagaaatcaatgtactttatgttcttagctcccacaatttagcctaaatatttgccctggcatgcttatattggtccaagtaagcattaggtcatagcctgttcctcttccttatttgaaggtgtttttacctttctcagcattccacaagttacttcctccttgctttgttctcctctgcctttgccccttttaaaaagttctaagttgctagccaatcgggacaaatacagaatgtgaggtcctgtgccagccattggaaactggacacagcaatagagtggacgtgtcaggttataaatgaccttgtctcctttgttcggcgtactctcgtggcaaaactgctggtgagtgtaccctttctgca

SEQ ID NO: 1222 - DNA, 468 bp, Homo sapiens
  MAP TO AC006344.2; EXPRESSED IN LUNG, SIGNAL =  16; EXPRESSED IN HELA, SIGNAL =  12; EXPRESSED IN BRAIN, SIGNAL =  16; EXPRESSED IN HEART, SIGNAL =  13; EXPRESSED IN BONE MARROW, SIGNAL =  13; EXPRESSED IN PLACENTA, SIGNAL =  12; EXPRESSED IN BT474, SIGNAL =  10; EXPRESSED IN ADULT LIVER, SIGNAL =  13; EXPRESSED IN FETAL LIVER, SIGNAL =  11; EXPRESSED IN HBL100, SIGNAL =  12
cattcaaatttctagtgcaaaataatgaatcttcactaattgaaaaccaaaattagcctcttgtcagttttggtcagtttttgctgctacacatgaagcaagcttagtaaaaagtgagtatttcaagggattgtgaacttctgtctatatttcagtggagatgagaaacattagcgttggttctaggatgtaactcagaggagttttggatgacttaacgctttgagaatgtagcacgctgtctgccatgttgttttgtcttgcagtgccggtggtggtgtgcacattgagccccggtatagacagttcccccagctgaccagatcccaggtgttccagagcgagttcttcagcggactcatgtggttctggattctctggcgcttttggcatgactcagaagaggtgctggtaagtgcaggagaagagcacttgtcgttttttgggtgggggagggaggatgtatta

SEQ ID NO: 1223 - DNA, 472 bp, Homo sapiens
  MAP TO AC006344.2; EXPRESSED IN BT474, SIGNAL = 6.9; EXPRESSED IN BRAIN, SIGNAL =  10; EXPRESSED IN PLACENTA, SIGNAL = 7.1; EXPRESSED IN BONE MARROW, SIGNAL =  17; EXPRESSED IN HBL100, SIGNAL = 8.8; EXPRESSED IN FETAL LIVER, SIGNAL =  11; EXPRESSED IN LUNG, SIGNAL =  12; EXPRESSED IN HELA, SIGNAL = 7.5; EXPRESSED IN ADULT LIVER, SIGNAL = 6.9; EXPRESSED IN HEART, SIGNAL = 7.3
agaccggcccctttataatcttttaaaaatgctttttactttgaaaataatttttctcttgaaaactttaacttagctcatccttgtacaaattctgagttgacatctaaacaagaagggtctataggacatgcacctctttgcggctgtgatagagtgctgggagcttattgtcacctggcaactttctttctctgtaggttggtggtgctctaggggcgactcactcatgagcattgtgatctccttccagatatttgtggataactttgtccatgcagaccttcaccctggaaacatcctggttcagggtgccaacggcctgtcctcgagtcaggaggcgcagctgcagcaggcggacatctgtgacactctggtggtggccgtgccatcttccctctgcccgctgcgactggtgctgctggatgctggcattgtggcggagctgcaggcccctgacctgaggaatttc

SEQ ID NO: 1224 - DNA, 470 bp, Homo sapiens
  MAP TO AC006328.3; EXPRESSED IN HELA, SIGNAL = 2.1; EXPRESSED IN ADULT LIVER, SIGNAL = 1.4; EXPRESSED IN BRAIN, SIGNAL = 1.4; EXPRESSED IN HEART, SIGNAL = 1.2; EXPRESSED IN PLACENTA, SIGNAL = 1.4; EXPRESSED IN HBL100, SIGNAL = 2.8; EXPRESSED IN FETAL LIVER, SIGNAL = 1.6; EXPRESSED IN LUNG, SIGNAL = 2.3; EXPRESSED IN BT474, SIGNAL =   3; EXPRESSED IN BONE MARROW, SIGNAL = 1.3
catggtgagcctgactttccctgcccctactttgccaccttcctctgtagtccctctgaaacccccttatgttcttggtttccctgccttctgacttctgtggactttctctccttccgggagccagtggtcagacaccatttcacctgtgaccaacaggtgcactctgtgaggcccaaaaggaaggggctgtgctccatctccctgccctggttgttatgtgtatacccctacaagagtactcacctcttgccttcaggtggcatttttcaactccgctggagccagtgcccaggaggagcaaagcgtgtgctgccagcccctggctcacccagtggcctcatcccagaaaaagccagaggcagcggccccagccccagagactgggggtgaatctgtgtgtggggacacccactgggccctgcaggaggccatggagaagctgcaggtgagtagtcctggcatgggcc

SEQ ID NO: 1225 - DNA, 471 bp, Homo sapiens
  MAP TO AC006328.3; EXPRESSED IN PLACENTA, SIGNAL = 2.7; EXPRESSED IN BT474, SIGNAL = 9.6; EXPRESSED IN BONE MARROW, SIGNAL = 7.1; EXPRESSED IN HBL100, SIGNAL = 5.1; EXPRESSED IN LUNG, SIGNAL = 9.3; EXPRESSED IN FETAL LIVER, SIGNAL = 6.6; EXPRESSED IN HELA, SIGNAL =   9; EXPRESSED IN ADULT LIVER, SIGNAL = 4.8; EXPRESSED IN BRAIN, SIGNAL = 6.3; EXPRESSED IN HEART, SIGNAL = 3.6
tccatgaacctcagtgtccctatcagtaaagagggaggagtgcccattgtcagccacccacagtgctctctatctgaaagtgactttgaagattggctaccatccgggtgtgaggagtcattagcagtgaggccaagtttgggaagcctgagaggaggagctgtccaacaaagggaggttttttttttttttttttttttgagagtccagaggcccttattgtctgcttcctttctcagctgaacccctggccccagagcccccagcagggccctctgaggtggagcagctacaagatgagaccaaccacctaaggaaggagctggagagtgtgggaagacagctccaggctgaggtggaaaacaatcagatgttgagtctcctgaacaggagacaggaggagaggctgcaggaacaggagaggctgctggacaaggggtaggagctgctggaacaggagaggcttcagga

SEQ ID NO: 1226 - DNA, 487 bp, Homo sapiens
  MAP TO AC006328.3; EXPRESSED IN PLACENTA, SIGNAL = 4.9; EXPRESSED IN LUNG, SIGNAL = 5.5; EXPRESSED IN HBL100, SIGNAL = 4.9; EXPRESSED IN FETAL LIVER, SIGNAL = 6.9; EXPRESSED IN HELA, SIGNAL = 5.4; EXPRESSED IN BRAIN, SIGNAL = 9.1; EXPRESSED IN BT474, SIGNAL = 8.4; EXPRESSED IN BONE MARROW, SIGNAL = 6.2; EXPRESSED IN ADULT LIVER, SIGNAL = 4.5; EXPRESSED IN HEART, SIGNAL = 3.6
tgatcatgcagcatttccaggcccccttcttcttcctgtccactaggccacagccgccctccaggcccactatgtacacatcttcccctccaaggtttgttctgcccctgccctgactcccagccctgtgggggtcctgaccacacctcacctggctcagactcttgacgctgccctggctgccccaccactgcctctgcctgagagtcacatgaggctgagagtaggggcaggggcagcagtggtgccagttggggggtggtccagtgggaggagcctcagccttgtgggctgctccatgggactgatgactgcatgatcttctgggcacctcatggatcttcaactgcaggtgaaacagatgctggtggtggctgcagggccgctgggagctgctgcatgggtcccagaggctggactggggcaggtgccaactgaagctgctggggcagcaagggcaggatgttctgcacacaaaccttggaaa

SEQ ID NO: 1227 - DNA, 491 bp, Homo sapiens
  MAP TO AC006328.3; EXPRESSED IN HELA, SIGNAL = 1.6; EXPRESSED IN ADULT LIVER, SIGNAL =   1; EXPRESSED IN BRAIN, SIGNAL = 1.7; EXPRESSED IN BT474, SIGNAL = 1.1; EXPRESSED IN HBL100, SIGNAL = 2.5; EXPRESSED IN HEART, SIGNAL = 1.3; EXPRESSED IN PLACENTA, SIGNAL = 1.7; EXPRESSED IN BONE MARROW, SIGNAL = 0.98; EXPRESSED IN FETAL LIVER, SIGNAL = 1.3; EXPRESSED IN LUNG, SIGNAL = 1.7
taggacttgacgttccgggtcagcaatggactgcaggccagccccccgtccatgctgaaggtggtggccatccagccggccatacagatccactgcagcacagggctgcatctggcccaggactctgccatgcccatcttgcctaccaacctgtcggtggagaccagcaccgtggggcaggatgtgactgtgttgttctgtgtcaccagaggcctgcagttcagggaggtgcagaagcagggggctggtggggtggagggtgctgagtggtgggccacacagtcattccaccagcaggatgtggagcagggccacatgaggtacctgagcactaacccacagcactatgccgaggacaccgtgaagaacctggatctgcaggtgcaggtgagctgggaaatcctgagcaatctgtccttcctagtgaccatccagagagccactgtgtggatgctgcagctgcggccactgcacactcaacacccagcaga

SEQ ID NO: 1228 - DNA, 465 bp, Homo sapiens
  MAP TO AC006269.8; EXPRESSED IN PLACENTA, SIGNAL = 2.1; EXPRESSED IN BT474, SIGNAL =   2; EXPRESSED IN BONE MARROW, SIGNAL = 1.3; EXPRESSED IN LUNG, SIGNAL = 1.4; EXPRESSED IN ADULT LIVER, SIGNAL = 2.3; EXPRESSED IN BRAIN, SIGNAL =   2; EXPRESSED IN HBL100, SIGNAL = 2.2; EXPRESSED IN FETAL LIVER, SIGNAL = 1.7; EXPRESSED IN HELA, SIGNAL = 3.3; EXPRESSED IN HEART, SIGNAL = 1.2
tgggatcatttaagttaccctttgtgagcttgtaaagtggtttggttaggatagaaaagcctggtatctagactaggaaatatccaacaatgcctaagaaggaaaggagttgctgtttggtggtggggattggggtctgggagattaactgaacatggtctgcaggaagggcatgtgtatgttgatggaggattatactgagataggtaacgctaggggaagaaatttgtgccttggagggggatactcagtacccctttgagtagagatgttgaagaagcaggacagtgtcctgctgggaagattggtaagaggggctgcaaagaagaagatcatcaaaatattgaataagatgggaggcagacaggcgaaaagaaagcagatcatgagaaagggcctggccaaagtagtgtggcctgtccctgaagccttggggcagaacagtccaggtgagttgttgggatt

SEQ ID NO: 1229 - DNA, 467 bp, Homo sapiens
  MAP TO AC006269.8; EXPRESSED IN HBL100, SIGNAL = 1.8; EXPRESSED IN BRAIN, SIGNAL =   3; EXPRESSED IN BT474, SIGNAL = 1.3; EXPRESSED IN BONE MARROW, SIGNAL =   2; EXPRESSED IN FETAL LIVER, SIGNAL = 1.9; EXPRESSED IN HELA, SIGNAL = 3.8; EXPRESSED IN ADULT LIVER, SIGNAL =   2; EXPRESSED IN PLACENTA, SIGNAL = 1.9; EXPRESSED IN LUNG, SIGNAL = 1.9; EXPRESSED IN HEART, SIGNAL = 1.7
catgagccatctctctctctctctttctctctctgtgtaggcgaactgatgacagacagcttctgtgttttggtggctgtggtattaacagcaagcttaagttattaaaccgagcagctttaatcctcgaggtctcctggagcagtagggattaatgtatttttactccagagccaatgtagctattccgatgctctaagatctgctctctgcaatgcccaaactgaccccaattgcctttctctagacccacttctccaccgtgggagaagtgatggaattctacttggagatcgaccctgttaccttgaacctgatcatcctagttgcgagctacgtcatcttgctcctggtcttcctcatctcctgcgtgctatacgactgccgaggcaaggatcccagtaaggagtacgcgcccgaggccactctcgaggcccagccctccatccggttggtggtgatgcacc

SEQ ID NO: 1230 - DNA, 493 bp, Homo sapiens
  MAP TO AC006255.9; EXPRESSED IN ADULT LIVER, SIGNAL =   3; EXPRESSED IN HELA, SIGNAL = 2.2; EXPRESSED IN BRAIN, SIGNAL = 1.4; EXPRESSED IN PLACENTA, SIGNAL = 1.8; EXPRESSED IN BT474, SIGNAL = 1.3; EXPRESSED IN BONE MARROW, SIGNAL = 1.5; EXPRESSED IN HBL100, SIGNAL = 1.5; EXPRESSED IN LUNG, SIGNAL = 1.7; EXPRESSED IN HEART, SIGNAL = 1.3; EXPRESSED IN FETAL LIVER, SIGNAL = 2.3
ttcagcctcctcacagcttccaggtacctgagggggcataagccaggtgctgggggagccaccagatgcgcaggctggccccacaggcagggccagcaggctggagtcctgtgtcctggactttaccctgccacaccctgatagggactccagaaagtccctgcccctctctggtctgaatctccctatccatgcaatggtcatggcagtagttcctgtccaagaggtcacggtgttccttggccttgagtttctccaatcaccccctcaggtcctgcttcaatccactggaccagtggggacattgtggaggagtaggaatggaggacactcactggatgctgacgcacttcatgtcctgggcacccctggcatagatgtagccctcagaatccttgaaggcctcaaaggggtcgtgactccaatgttcctgggggcagggatgggaagaggggcccaaaccccaaatttagccattaatccactctggtca

SEQ ID NO: 1231 - DNA, 493 bp, Homo sapiens; identical to SEQ ID NO: 1230
  MAP TO AC006255.9; EXPRESSED IN PLACENTA, SIGNAL = 1.6; EXPRESSED IN BONE MARROW, SIGNAL = 1.5; EXPRESSED IN HBL100, SIGNAL = 1.5; EXPRESSED IN HELA, SIGNAL = 1.9; EXPRESSED IN ADULT LIVER, SIGNAL = 2.9; EXPRESSED IN HEART, SIGNAL = 1.5; EXPRESSED IN BT474, SIGNAL = 1.2; EXPRESSED IN FETAL LIVER, SIGNAL = 1.8; EXPRESSED IN LUNG, SIGNAL = 1.4; EXPRESSED IN BRAIN, SIGNAL = 1.7

SEQ ID NO: 1232 - DNA, 417 bp, Homo sapiens
  MAP TO AC006235.11; EXPRESSED IN HELA, SIGNAL = 5.5; EXPRESSED IN BRAIN, SIGNAL =   7; EXPRESSED IN HEART, SIGNAL = 7.1; EXPRESSED IN PLACENTA, SIGNAL = 7.7; EXPRESSED IN BONE MARROW, SIGNAL = 6.2; EXPRESSED IN BT474, SIGNAL = 5.6; EXPRESSED IN ADULT LIVER, SIGNAL =   5; EXPRESSED IN LUNG, SIGNAL = 7.3; EXPRESSED IN FETAL LIVER, SIGNAL = 6.5; EXPRESSED IN HBL100, SIGNAL = 6.2
  unsure 173
  unsure 206
  unsure 323
  unsure 336
attgtctcactgaccccgagaacagctcaggagagctccgtgtgcacagagacacctcagtccccgcatcaggagatgggaccacccctgagatgggaggatggctccagctcacaggcatggaagttgagcccagagacatctgggggtcccccagtgagtctgggtggcanttggagccctctcactgtctctcctttctgcantaatagtgatattgatgccctcctcatgggtgttctggagacagagaagtcacatgtacaaagcagtgcacacccagggcctggcacggagagggtactcagatacccccgagagcnctggctctgccangcgggaacacgaggacgcagcagcaaggccccagagctgggcagcgccagtgagaagcctggcccttcctcttcctgactc

SEQ ID NO: 1233 - DNA, 459 bp, Homo sapiens
  MAP TO AC006235.11; EXPRESSED IN BT474, SIGNAL =  11; EXPRESSED IN HBL100, SIGNAL =  14; EXPRESSED IN PLACENTA, SIGNAL =  10; EXPRESSED IN HEART, SIGNAL = 9.4; EXPRESSED IN BRAIN, SIGNAL =  14; EXPRESSED IN ADULT LIVER, SIGNAL = 9.9; EXPRESSED IN HELA, SIGNAL =  11; EXPRESSED IN LUNG, SIGNAL =  12; EXPRESSED IN FETAL LIVER, SIGNAL =  11; EXPRESSED IN BONE MARROW, SIGNAL =  11
  unsure 308
  unsure 316
tgcatttgatcttccccttcctatccaaaacgccgtatctgttgtcaggcagctctgtgtttctctccctgctccacatctggtggccgtgtgaccttggacaagtcacttaacctctctgaactgcaatgtgctcatttgtaaaataggaaaaatgaacagcactactctgaagagttgttgtgagggtagaaatgaggaacactcctaaagtgcttcacacagagcctgacaaggagttaagacatgatggtgattatagtgaggctggctgtgatggtggtggtggtgatggtgctgatagtggntcatggtnggtgatgatgatgatggtggtgatggtcctggtgatggtggtgatgtcgatgatggtggtggtggtgatgatgctgttgatggcggtggtgatagtgatgatggtgatggaggtgatggtaatggtggtgttggtgatgatga

SEQ ID NO: 1234 - DNA, 454 bp, Homo sapiens
  MAP TO AC006229.14; EXPRESSED IN BONE MARROW, SIGNAL = 1.4; EXPRESSED IN HBL100, SIGNAL = 1.3; EXPRESSED IN ADULT LIVER, SIGNAL = 1.4; EXPRESSED IN BRAIN, SIGNAL = 1.8; EXPRESSED IN PLACENTA, SIGNAL = 1.2; EXPRESSED IN BT474, SIGNAL = 1.2; EXPRESSED IN FETAL LIVER, SIGNAL = 1.4; EXPRESSED IN LUNG, SIGNAL = 1.3; EXPRESSED IN HELA, SIGNAL = 1.6; EXPRESSED IN HEART, SIGNAL = 1.4
aagcatatggataattgagagttccctatgtaaagacatgtgcaaagtagaatataatcttcattttacatgtaaagaaactgaggtgcagaaatgccatatgttgactaaggataggaaaatatttctttaatttccattagttggaattagtgtatcaaattagttgactaatagttggaaagaggtttgtgtctaagcttggatgtgggcaagtgagggttcaggaaaatcaggtctgtggaaagcttgacagaaattataaaaaggcataagaatagctaagcaaaattttaccttcttcgtaaagtccataggctcaggttgggtagagacagttgagacatgattctcacaggaactatttgggataagatgcatttcatcaatattggcaagactggcttgaatcctgtctgaagcctgatttcatagggtcttgccagggatgatt

SEQ ID NO: 1235 - DNA, 480 bp, Homo sapiens
  MAP TO AC006149.3; EXPRESSED IN PLACENTA, SIGNAL = 1.9; EXPRESSED IN BT474, SIGNAL = 1.6; EXPRESSED IN BRAIN, SIGNAL = 1.6; EXPRESSED IN HEART, SIGNAL = 1.7; EXPRESSED IN ADULT LIVER, SIGNAL = 1.3; EXPRESSED IN BONE MARROW, SIGNAL = 2.1; EXPRESSED IN HBL100, SIGNAL = 1.4; EXPRESSED IN FETAL LIVER, SIGNAL = 1.5; EXPRESSED IN LUNG, SIGNAL = 1.7; EXPRESSED IN HELA, SIGNAL = 1.4
aaatgctgtacactcaagctacactacatttataaaaatattatctttaattaataataaattaaccttaacttactgtaacttttctagtttatacacttttaattttcaactttttgaccgttttgtaataatataacttaaaacacaaacacattgtacagctgtacaaaaatattatcttttaaaatatatttatgctataagcctttttcctaaaattttctttaattacttttgttaaaaattaagacacaaacatatacattaacctacgtctacccagggtcaggatcattgataacactgtcttctacctctatgtcttgtcccactggaggatcttcagggacaacaacaggcatggagctgtcatctcttatgataataacgtctttttctggaatacctcctgaaggacctgactgaggctgttctacagttaactttttaaaaatataagtaggctaggcgcagagg

SEQ ID NO: 1236 - DNA, 466 bp, Homo sapiens
  MAP TO AC006029.2; EXPRESSED IN BONE MARROW, SIGNAL = 1.7; EXPRESSED IN HBL100, SIGNAL = 1.4; EXPRESSED IN FETAL LIVER, SIGNAL = 1.3; EXPRESSED IN PLACENTA, SIGNAL = 2.1; EXPRESSED IN BT474, SIGNAL = 2.7; EXPRESSED IN LUNG, SIGNAL = 1.1; EXPRESSED IN HELA, SIGNAL = 0.9; EXPRESSED IN ADULT LIVER, SIGNAL = 1.3; EXPRESSED IN BRAIN, SIGNAL = 1.2; EXPRESSED IN HEART, SIGNAL = 1.3
tgccaggagaaaagacaaggagtgtttcacttcttctctatcccttgccaagtgcttttccccaaatactaggttgcttctggttcctgcatggttgaagtgtgggtatcagtggctgcaagagaagcagcaaatgtttacttgacaggtgtcaatctgaaattggctctttaaagctgactttcttcttgtgaggggtttcatggcaaaatgaatgaaaaagttgaaagacaacaagaaactggaaaaaaaaaacccgtgttacttcatactataatatttggtgtaattaccataatatagttcacaatatatttaagaaactccttgttggtcacatagatgttgtttctaggattttctattacaaacatagtagcagtgaatgcaattgcatctataactttcttcattcaagtagactttacttttcagagcacttttaggttcctagcaaaattgagca

SEQ ID NO: 1237 - DNA, 389 bp, Homo sapiens
  MAP TO AC006028.2; EXPRESSED IN FETAL LIVER, SIGNAL =   6; EXPRESSED IN HELA, SIGNAL = 5.8; EXPRESSED IN HEART, SIGNAL = 5.2; EXPRESSED IN BT474, SIGNAL = 4.9; EXPRESSED IN LUNG, SIGNAL = 6.5; EXPRESSED IN ADULT LIVER, SIGNAL = 5.5; EXPRESSED IN BRAIN, SIGNAL =   8; EXPRESSED IN PLACENTA, SIGNAL = 4.7; EXPRESSED IN BONE MARROW, SIGNAL = 5.8; EXPRESSED IN HBL100, SIGNAL =  14
gcctctagaaccatatcaagctcaaagagttcaattctgacatagttcagctaggcttgtgacagggcaatgcttgtccattggagttggcattagattaagttagagttagctaggcgtggtggtgcacacctgtagtctcagctacccaggaggctgaagtgggggaaatctcttgagcccaggagtttgaggatgcagtgagctacgataagcgtgcctgtgaaaagccactgagctccagcctgggccacatagtgagactccatctcaacaacaataacaacaacaaaacaaaacaaaacaacacacagaaagaaagaaagaaaaagaacaaacaaaaacaaagcaacatggatgcttcactgggcagcagagctaatgggatc

SEQ ID NO: 1238 - DNA, 467 bp, Homo sapiens
  MAP TO AC006009.2; EXPRESSED IN BONE MARROW, SIGNAL = 2.8; EXPRESSED IN HBL100, SIGNAL = 2.1; EXPRESSED IN ADULT LIVER, SIGNAL = 1.3; EXPRESSED IN BRAIN, SIGNAL = 2.5; EXPRESSED IN PLACENTA, SIGNAL =   3; EXPRESSED IN BT474, SIGNAL = 2.4; EXPRESSED IN LUNG, SIGNAL = 2.6; EXPRESSED IN HELA, SIGNAL = 2.7; EXPRESSED IN FETAL LIVER, SIGNAL = 1.6; EXPRESSED IN HEART, SIGNAL = 1.6
ccttacatggaagcaagtattgggaatggagaataaatgtttcccccaaaacagagagagaagggtgaaaataatgagagagacagacaaacagagaaagagagagaacctaaatgattctctaaatggctaagtgccaggtataagatttacttttctcatttgtaaaacaagaatagcaatattagctcccttgctataatagatggggtcattacaaaaatctgctgcaatgatgtatgaaaggggcctttgtaactataaaacacaatgtagatgaaggcattagtggtggtggtggtggtggtggtggtggtggtggtggtggtggtggtggtaagcagaacagaaaatatttcaacttaacttgtttgaaggactctttggggtgtgaggatggtaataaacttttcagctttgtcccatttaaggaaaaaagctttccaagaatggggcaagaatgtaag

SEQ ID NO: 1239 - DNA, 469 bp, Homo sapiens
  MAP TO AC006008.2; EXPRESSED IN FETAL LIVER, SIGNAL = 1.8; EXPRESSED IN LUNG, SIGNAL = 1.9; EXPRESSED IN HELA, SIGNAL = 1.9; EXPRESSED IN BRAIN, SIGNAL = 2.1; EXPRESSED IN HEART, SIGNAL = 2.1; EXPRESSED IN BONE MARROW, SIGNAL = 2.3; EXPRESSED IN PLACENTA, SIGNAL = 1.9; EXPRESSED IN BT474, SIGNAL = 2.3; EXPRESSED IN ADULT LIVER, SIGNAL = 2.2; EXPRESSED IN HBL100, SIGNAL = 1.6
agttcagtgggaaggtgaggccaagaacactatgcggggagtgggaattaaaatgtattagtccttgttcttcaagaaacagacaccatgttgggaataaacatgaaaggacttgattagggaaaataacctgcgtgggaaaaaaaaacagagtgcctgggatgttagcagattaaaactttaagtctgctcccagtggaaggaaatatgcttgggtgacttctagggtatgaaaaagttcttcaggaagtccttgaaccagagctggctaccagcaaggtcccacacctgccagggcgaggcctgcgctagtatccctgccatactcccgttattggctaggagtaggaaggtgtgattgcacgcaaatgctgccgtggattccaaagcacagcagcagaggccttcattgttcctctctaggtacttggagttcttccagggcgttaccgtgaccaccctatgagat

SEQ ID NO: 1240 - DNA, 365 bp, Homo sapiens
  MAP TO AC005949.8; EXPRESSED IN HEART, SIGNAL = 1.5; EXPRESSED IN ADULT LIVER, SIGNAL = 1.4; EXPRESSED IN BT474, SIGNAL =   2; EXPRESSED IN BONE MARROW, SIGNAL = 2.2; EXPRESSED IN HBL100, SIGNAL = 1.6; EXPRESSED IN LUNG, SIGNAL = 1.8; EXPRESSED IN HELA, SIGNAL = 1.4; EXPRESSED IN PLACENTA, SIGNAL =   2; EXPRESSED IN FETAL LIVER, SIGNAL = 1.7; EXPRESSED IN BRAIN, SIGNAL = 2.1
tcctgttgtcttcctgcctcagagccacacctgtcctgggccattagaaatttctcctgcagatctcctgccattgcacttggtatttctgttattgttgttgttttcatgagaatttcaatggcaagatggaaaagggcaaatctctccattttagattatcacgtaatttatgagaggactatgagtttaatgttaatatgagttttttgggaaccaacagtgaaggtgtgaggtatctgataagggggctaggcaggtgaccagagagaacacaagctctgcaacttcaatctcatcatcttggccaatatatacaggctgttcctttccccagccagcatccaggaccagaggcattacct

SEQ ID NO: 1241 - DNA, 489 bp, Homo sapiens
  MAP TO AC005949.8; EXPRESSED IN BONE MARROW, SIGNAL = 1.2; EXPRESSED IN HBL100, SIGNAL = 0.88; EXPRESSED IN FETAL LIVER, SIGNAL =   1; EXPRESSED IN LUNG, SIGNAL = 1.4; EXPRESSED IN ADULT LIVER, SIGNAL = 1.1; EXPRESSED IN BRAIN, SIGNAL = 1.5; EXPRESSED IN PLACENTA, SIGNAL = 1.6; EXPRESSED IN BT474, SIGNAL = 1.2; EXPRESSED IN HELA, SIGNAL = 1.2; EXPRESSED IN HEART, SIGNAL = 1.4
tgagagaaactccatcccccatgggaggttcagagagtaactcccccaagttcctgtttcattactctgtctcaaagcaggcacttgagatcccagccagccctacagcaccccaaattataagaactggactgtatctgacattgccagactttcagcagtgggagggggagggctcctctgcattgtgcctttctcttcaaaaggattaacctggtgatgatcaacctttgcacaaggatggtggtgccaacactctggctctcagagttctccttaccctctactcttgaatttcacaggtcaagctcattggtcttctcttgtcttccttctatctccaattctaggatctgaaaaacaacctcacatctctgggggctctccatgatatccatcagaccccttagccagtggtggtggggacagttcctgaggaaatgaagatatggggtgactgggagtccaggagccaacctctggtgaaag

SEQ ID NO: 1242 - DNA, 490 bp, Homo sapiens
  MAP TO AC005769.9; EXPRESSED IN PLACENTA, SIGNAL = 6.6; EXPRESSED IN BT474, SIGNAL = 6.2; EXPRESSED IN LUNG, SIGNAL = 7.7; EXPRESSED IN BRAIN, SIGNAL =  10; EXPRESSED IN HBL100, SIGNAL = 7.2; EXPRESSED IN FETAL LIVER, SIGNAL = 8.2; EXPRESSED IN HELA, SIGNAL = 6.2; EXPRESSED IN ADULT LIVER, SIGNAL = 5.9; EXPRESSED IN BONE MARROW, SIGNAL = 8.3; EXPRESSED IN HEART, SIGNAL = 7.4
aacccactcaactggacagcagatgcatgacgaggattcagacacatcatggactccaaggtgagaaagtgaggtgaagccacatctcctgtgaagtgggactgggctctgcagaggcaaggtcgagactgctgaccttcctaggagcccctttatgcactgactcacctggcctgagtttcagcccaatggctgccagccctgtttccacatcctcactttttcagctccagtgccgcatccctgggctcctcagcttccctgattgtctcacttctcctgtgtcccttctctggttgacttagttccatttttccagagggcagctctgtttggctcagcccctggttggtgatgatggtcccttgtgtactcagcagagctgggcagggcaatgatggaagtgtcaattgttgttgttttgtgaagagccatcttctgtttctccagagccttgggatcacttggcaggggagggaggagagtgtta

SEQ ID NO: 1243 - DNA, 470 bp, Homo sapiens
  MAP TO AC005769.9; EXPRESSED IN BT474, SIGNAL = 1.5; EXPRESSED IN BONE MARROW, SIGNAL = 1.9; EXPRESSED IN HBL100, SIGNAL = 1.5; EXPRESSED IN FETAL LIVER, SIGNAL = 1.3; EXPRESSED IN HELA, SIGNAL = 1.9; EXPRESSED IN ADULT LIVER, SIGNAL = 1.5; EXPRESSED IN BRAIN, SIGNAL = 2.1; EXPRESSED IN PLACENTA, SIGNAL = 1.7; EXPRESSED IN LUNG, SIGNAL = 1.9; EXPRESSED IN HEART, SIGNAL =   2
aaccttattccttggaccccttggtttcccagaaacccctttggatggataattcctgactgccatttgagaaacactgaatgtgcatgacaaatggcacaaatggacgtttcatggctgctggacttgattacggaatgccctgcctggcccctgactcgctaagtgaccgtgggaagtttgcttcatccacctgctgtaaacgagggcctgaaaggccttcaacagtggttggatgaaagaaaggtcttcagtgaagctacagcattttgattcaataaaccagccttctgcctcagggccaccttcatcaaacaccctgtcaaagtgccccggtttaagacaagtagtcacagtggcctgcggggcaggggcgaggaagagagtggtcagatgctgaccattcataaccacagcctgcgaagggagaacagacatttcagtgctcactaatttcaaagttgcccatc

SEQ ID NO: 1244 - DNA, 448 bp, Homo sapiens
  MAP TO AC005694.3; EXPRESSED IN BRAIN, SIGNAL = 1.9; EXPRESSED IN HELA, SIGNAL = 3.8; EXPRESSED IN ADULT LIVER, SIGNAL = 3.1; EXPRESSED IN BT474, SIGNAL = 6.1; EXPRESSED IN BONE MARROW, SIGNAL = 4.9; EXPRESSED IN HBL100, SIGNAL = 5.8; EXPRESSED IN HEART, SIGNAL = 1.6; EXPRESSED IN PLACENTA, SIGNAL = 2.4; EXPRESSED IN FETAL LIVER, SIGNAL = 4.7; EXPRESSED IN LUNG, SIGNAL = 5.1
atgcatagccgtcataccagtaacttctgtgactgaactctccacctgtctgcatcagtaaaaaaaaaattgtaccctttgtcagaaaattattaacaggctgctctggcagccctcattagaacgccgtgaggccatctgttgtgatcagcctacacacctcacttccactcacagagtatcatgtctcccttgttgctcctttcaggtaaagaagcagattttagatgaaaagatctactgccctcctgaggcttctgtgctcctggcttcttacgccgtccaggccaaggtaggctcaaagaagaaaaatgtatttttcctgggcgttaatttgggtcatgggatcactcctatcttctctttctttgggttttctgtacttcagagagacttgccccagaaagtgagatgttatgggacttgtggacttgaagaaccactgtca

SEQ ID NO: 1245 - DNA, 460 bp, Homo sapiens
  MAP TO AC005694.3; EXPRESSED IN LUNG, SIGNAL = 1.7; EXPRESSED IN HELA, SIGNAL =   3; EXPRESSED IN ADULT LIVER, SIGNAL = 1.7; EXPRESSED IN BRAIN, SIGNAL = 2.3; EXPRESSED IN PLACENTA, SIGNAL = 1.4; EXPRESSED IN BT474, SIGNAL = 2.7; EXPRESSED IN BONE MARROW, SIGNAL =   2; EXPRESSED IN HBL100, SIGNAL = 2.7; EXPRESSED IN FETAL LIVER, SIGNAL = 2.3; EXPRESSED IN HEART, SIGNAL = 1.5
ggtaacttgcccttgggaaccagtagtatggcatcgggctgcaagattggcctgtccatcctcaatgctacctggccaatttaggggcccagtgcctctggatgctagactctggggtcgattatctccaccggaatgtaatggatgaacatgcatgtgatggtgtccaagccagaacagtgggtaaagccaatggctataagaggagccaatcagtacatctttcatctcgaggaaactgagaacccaggggctttgattaaagacattcaggagaatgggatgaaggttggccttgccataaaaccaggaacctcagttcagtatttggcaccatgggctaatcaactaggtatgaccttggttatgacagtggaaccagggtttggagggcataaattcatggaagatatgatgttaaaggttcactggttgaggatccagttcccatctttggcta

SEQ ID NO: 1246 - DNA, 495 bp, Homo sapiens
  MAP TO AC005694.3; EXPRESSED IN FETAL LIVER, SIGNAL = 9.8; EXPRESSED IN HELA, SIGNAL =  12; EXPRESSED IN HEART, SIGNAL = 9.4; EXPRESSED IN PLACENTA, SIGNAL = 9.1; EXPRESSED IN BT474, SIGNAL =  10; EXPRESSED IN BONE MARROW, SIGNAL =  10; EXPRESSED IN HBL100, SIGNAL =  12; EXPRESSED IN LUNG, SIGNAL =  11; EXPRESSED IN ADULT LIVER, SIGNAL = 8.6; EXPRESSED IN BRAIN, SIGNAL =  12
tggtgtatttacaaaccctgagctagacatagagggatgattggtgcatttacaaaccttgagctagatacagagtgccgatttgtgcattccccttagctagacataaagattctccaagtccccaccagactagctagataacagagtatggagtggtgcattcacaaaccctgagctggacacagagtgctgattggtgtgcttacaaaccttgagctagatacagagtgctgattggtgtatttacaatcccttggctagacataaaggttctccaagtccccaccagactcaggagcccagctggcttcacccagtggattctgcaccgtggccgcagatggggctgcctgccagtcccccgccatgcgcctgcactcctcagccgtcggacggtcgatgggactgggcgccctggagcagggagcggcgctcgtcggggaggctccggctgcgcaggagcccacggcggtggcagagaggttcaggcat

SEQ ID NO: 1247 - DNA, 481 bp, Homo sapiens
  MAP TO AC005674.9; EXPRESSED IN HBL100, SIGNAL = 1.8; EXPRESSED IN HELA, SIGNAL = 1.3; EXPRESSED IN HEART, SIGNAL = 1.4; EXPRESSED IN BRAIN, SIGNAL = 1.7; EXPRESSED IN ADULT LIVER, SIGNAL = 2.1; EXPRESSED IN LUNG, SIGNAL = 2.4; EXPRESSED IN FETAL LIVER, SIGNAL = 3.1; EXPRESSED IN BONE MARROW, SIGNAL = 2.3; EXPRESSED IN BT474, SIGNAL = 1.7; EXPRESSED IN PLACENTA, SIGNAL = 2.1
aagagacccacgttctcagcttttctcccagccagctgggtgatgttgagcaaatcatggcatctctctgggcctctgttttcccatttttaaacaagggctttggactccatagtttcaaaggcccctgccaagttccgcccccagctaaggtgtgtggctaggaggtgggacccgtccctgcagggcccagcattagacatgatggacactctaatccctgctgaaagtccatgtgtgcctctgtttgcagccttccaaacgttcttgggtaaagcagacatttcccaagaggtagaggaggtcctggctgagagccgcgtgcagaggagcatccgcctggtgtccgtgctggagctgctgagagctccctacgtccgctggcaggtggtcaccgtgattgtcaccatggcctgctaccagctctgtggcctcaatgcagtgagtcctggggcccggtgggcatccttgcatgactgga

SEQ ID NO: 1248 - DNA, 446 bp, Homo sapiens
  MAP TO AC005674.9; EXPRESSED IN PLACENTA, SIGNAL = 1.2; EXPRESSED IN BT474, SIGNAL = 1.1; EXPRESSED IN BONE MARROW, SIGNAL = 1.1; EXPRESSED IN FETAL LIVER, SIGNAL = 1.5; EXPRESSED IN LUNG, SIGNAL = 1.2; EXPRESSED IN ADULT LIVER, SIGNAL = 1.5; EXPRESSED IN BRAIN, SIGNAL = 1.5; EXPRESSED IN HBL100, SIGNAL = 1.3; EXPRESSED IN HELA, SIGNAL = 1.9; EXPRESSED IN HEART, SIGNAL = 1.3
cagatgtgcctggtgtgttcagacacaacagctcccaaaaatcccttaacccattcttcacaggctgggcatttcatgaaatggcagcagtgctcattttaatgttttatgagccacagagcttcctgcaggaaagagtggaatggaaactgttaagcccccagcgtgaggtcctgggacccatcaggtttgactgggtgcatctgcaggcgagacggtgctgggagcatatgttcaggggcacacgtcctaaaacaacatgcagcatctcctgggcttcctcaccaatgacttcttggacagcaatcttgttgagttcttccacatagcaggtgcagagagactgtgggatctgagtgttgacactgggcaggggtcaggagttctggtttggtcacaacacctctctgggctgtgtttctctacctgcaccatcagaagtagaa

SEQ ID NO: 1249 - DNA, 489 bp, Homo sapiens
  MAP TO AC005534.2; EXPRESSED IN BRAIN, SIGNAL =   8; EXPRESSED IN BT474, SIGNAL =  14; EXPRESSED IN HBL100, SIGNAL = 6.4; EXPRESSED IN LUNG, SIGNAL = 6.8; EXPRESSED IN HELA, SIGNAL = 5.9; EXPRESSED IN ADULT LIVER, SIGNAL = 5.7; EXPRESSED IN PLACENTA, SIGNAL = 8.9; EXPRESSED IN BONE MARROW, SIGNAL = 7.1; EXPRESSED IN FETAL LIVER, SIGNAL = 8.8; EXPRESSED IN HEART, SIGNAL = 4.7
tcagatgattaattgggaaaataagctaaaagagaatgtcagtgtcttgagttatatcaacaatgcattaaaatgccactcaaaagcaatcaagtgtgaaggctaggatcacccataatataacaagcattctgtagttcccccacccacttccttcctttgctccttccctccatgagcaccattagtgcctactatgtgtcagatgacaatattcaaattctcatgcagctcacactctagtgaaaaacagactccctgatatgatttggccctgtgtcctcacccaaatttcacgttgaattgtaatccccatgtgtcaggggagggacctggtgggagatgactggatcatgggagaggatttcctccatgctgtttttgtgatggtgagtgagttgtcacaggatctgatggagatgaggaacttactgggaactggagtaaaggtcactcttgctatgctttagcaaagagactggtggcatt

SEQ ID NO: 1250 - DNA, 467 bp, Homo sapiens
  MAP TO AC005534.2; EXPRESSED IN BT474, SIGNAL = 2.3; EXPRESSED IN FETAL LIVER, SIGNAL = 2.6; EXPRESSED IN PLACENTA, SIGNAL = 2.2; EXPRESSED IN BONE MARROW, SIGNAL =   3; EXPRESSED IN HBL100, SIGNAL = 2.4; EXPRESSED IN LUNG, SIGNAL = 2.4; EXPRESSED IN HELA, SIGNAL = 3.6; EXPRESSED IN ADULT LIVER, SIGNAL = 2.3; EXPRESSED IN BRAIN, SIGNAL = 3.4; EXPRESSED IN HEART, SIGNAL = 2.2
cttcgttctcacagcagcagcagcaactgggaacttgttagacattcagattctcgggccccactccagactcactgaatcagaaactctgggaaggagagccagaaatccatgctttaatgaactcaggtgactctgatgcagctaaaagctggagagccacgttccaggaataccctttccccaggtagttctcatcttgcaagacttggctcacacgcgctcccttgcaagacatcccagcacctgtaactccctgtccacacaggcaagtcgtcctaacacgtcagataggaaatcgtgatggtggctttgtgcctgtgtctctgctagaccttgaatttcctaagggaagggattttttttcctattcatctcttcatactctggagccaaaagtagtacctgaaacctattgggaacttcaaagtagtctttctcttcttagccagcgacaaaagaagaaa

SEQ ID NO: 1251 - DNA, 481 bp, Homo sapiens
  MAP TO AC005534.2; EXPRESSED IN BRAIN, SIGNAL = 2.6; EXPRESSED IN BT474, SIGNAL = 2.9; EXPRESSED IN HELA, SIGNAL = 1.9; EXPRESSED IN HEART, SIGNAL = 1.9; EXPRESSED IN PLACENTA, SIGNAL = 2.2; EXPRESSED IN BONE MARROW, SIGNAL =   2; EXPRESSED IN HBL100, SIGNAL = 1.8; EXPRESSED IN FETAL LIVER, SIGNAL = 1.9; EXPRESSED IN LUNG, SIGNAL = 2.5; EXPRESSED IN ADULT LIVER, SIGNAL = 2.1
acttcctcaactccagcagctgtgggttcctattgtcattcctgggacctgaccattttttgtgttggattgatttcttttttcccttcccattcaaacataggctcagttttaccttttctttcattaagatatgcaggtgacaggaagattaaaatttggagtgctatattagtttatgagtgatgtaaaactgcctaataggtcagttaccatgtgaaattttagggagaaaaatcttttccaagtaagttgttgagatgccagaaaggtctgagcttcgtgaaaagtattttctcaacatctgccctgtggaagtgctgctgtgtggccataggccacatgatgatcatttggtcaataacagaccacttgcctatgtgacagtggccacagcagatgatcatggagctgaaccgtttctgccagcagtggcgtggcggctgttgtaatgtcctggcgccacgcatcagcttttcta

SEQ ID NO: 1252 - DNA, 469 bp, Homo sapiens
  MAP TO AC005519.2; EXPRESSED IN PLACENTA, SIGNAL = 1.1; EXPRESSED IN LUNG, SIGNAL = 1.1; EXPRESSED IN HELA, SIGNAL = 0.98; EXPRESSED IN HEART, SIGNAL = 0.93; EXPRESSED IN BT474, SIGNAL = 0.99; EXPRESSED IN BONE MARROW, SIGNAL = 2.1; EXPRESSED IN HBL100, SIGNAL = 1.3; EXPRESSED IN FETAL LIVER, SIGNAL = 1.2; EXPRESSED IN BRAIN, SIGNAL = 1.3; EXPRESSED IN ADULT LIVER, SIGNAL =   1
tatttcccctctctcccaccgtaccttaccacgtgctcacccatcccacgtgctcaggcccctgcccttcctttggccctgtgttgcagtgtcacagatatcctggctctgagagctcataccagatgcccccacataggagcagagggcccattgggccactcagattggacaggggctacctgagagggaacaggagtcagggctgaggcatgtggggataggtggcaccccacaccctctcccttctctccctctctctctatttcagcacaggctggctcgggcctgtgagcatcttcgggtatttcatcctggggaccgtggtgaacaaaactttgatgggccccattgtgatgaagctggtgcatcaggagaagctggagggagattttaggtgtgtctccctcacttgaggtttctgggctggggcataatagttaaggaaggggatctggagtaaaactgc

SEQ ID NO: 1253 - DNA, 474 bp, Homo sapiens
  MAP TO AC005519.2; EXPRESSED IN ADULT LIVER, SIGNAL =  60; EXPRESSED IN HEART, SIGNAL =  46; EXPRESSED IN PLACENTA, SIGNAL =  30; EXPRESSED IN BT474, SIGNAL = 1.9e+02; EXPRESSED IN BONE MARROW, SIGNAL =  46; EXPRESSED IN HBL100, SIGNAL = 2.8e+02; EXPRESSED IN FETAL LIVER, SIGNAL = 1.6e+02; EXPRESSED IN LUNG, SIGNAL =  62; EXPRESSED IN HELA, SIGNAL =  97; EXPRESSED IN BRAIN, SIGNAL =  24
ctcaaggccatgaagatcaagtccctgaaggagatctatatcttctccctgcccattaaggaatctgagatcattgacctttccctgggggcctctctcaaggacgaggttttgaagattatgccggtccagaagcagacccgtgccggccagcgcaccaggttcaaggcgtttgttgccatcggggactacaatggccacgtcggtctgggtattaagtgctccaaggaggtggccactgccatctgcggggccatcatcctggccaagctctccattgtccccataagcagaggctgctgggagaacaagactggcaagccccacaccgtcccttgcaagatgacagaccgctgcggctctgtgccggtgcacctcatccctgcacccaggggcactggcattgtctcagcgcctgtgcccaagaagctgctcatgatggctggtatcaatgactgctacacctcagcccag

SEQ ID NO: 1254 - DNA, 497 bp, Homo sapiens
  MAP TO AC005399.14; EXPRESSED IN HBL100, SIGNAL = 2.8; EXPRESSED IN LUNG, SIGNAL = 4.4; EXPRESSED IN BRAIN, SIGNAL =   3; EXPRESSED IN HEART, SIGNAL = 2.8; EXPRESSED IN BT474, SIGNAL =   4; EXPRESSED IN BONE MARROW, SIGNAL = 3.6; EXPRESSED IN PLACENTA, SIGNAL = 3.2; EXPRESSED IN ADULT LIVER, SIGNAL = 2.9; EXPRESSED IN HELA, SIGNAL = 3.7; EXPRESSED IN FETAL LIVER, SIGNAL = 3.1
attttccctccccacaaaagctgttcttcttccaactttccccttcccagtgagtggcacctccatccacccagttgtttctgccagaaacctgatttccactctagaaaatgaggaggagttagcggatatcttccacatctcccaccccaaatctccaccaggcccccatgtttacccttcaacctgcccactccttccatctccacagttgcaacccaatgcaaggccccatcatccctcagctgctcacttcagcagcttctacttttgtcccctttccattaattttccactctgcagatctaaaaacacaaatttcagcatgcccctcatgttccttcctgctgaaaacctttcaaagtctacccactacacagtgagcaaaatgcaagctctttttcttggcctgctgggccagccttatctggcctggagaccatgtctccaccctctcccccagctcccgacctgctggccagccttcctgtggcctc

SEQ ID NO: 1255 - DNA, 447 bp, Homo sapiens
  MAP TO AC005399.14; EXPRESSED IN HEART, SIGNAL = 1.3; EXPRESSED IN BONE MARROW, SIGNAL =   2; EXPRESSED IN PLACENTA, SIGNAL = 1.3; EXPRESSED IN BT474, SIGNAL = 1.1; EXPRESSED IN LUNG, SIGNAL = 3.3; EXPRESSED IN HELA, SIGNAL = 0.67; EXPRESSED IN BRAIN, SIGNAL = 1.1; EXPRESSED IN HBL100, SIGNAL = 1.1; EXPRESSED IN FETAL LIVER, SIGNAL = 1.4
tagcaaagtctcagggctggatgcttttccaatcctgactgtctgcgagtcccccaggaagcaggggttttggttttcaacacccttttcctagtctacccataaggacagaggagcagaacagctgagtgaggctttctctgctccatctagaatagcaacagccacaagcacagtaatagccccaagatgagtccctctaccttcccagcaccccaagccacccctttccaaaccttaccttttggcatcatccttagaatattaaacacttgacttctctcaatgagatgcttggcctggaaaaagtgcatgctgggtgggaatatcagggtcctcatggcctccttcatctcagcgattttgagcgtcatgagcctctcattggccagctcctccttggtattcagcaccagccgcccccccagccgcatcatcttttctttc

SEQ ID NO: 1256 - DNA, 456 bp, Homo sapiens
  MAP TO AC005105.2; EXPRESSED IN HEART, SIGNAL = 1.1; EXPRESSED IN BT474, SIGNAL = 0.65; EXPRESSED IN BONE MARROW, SIGNAL = 1.1; EXPRESSED IN HELA, SIGNAL = 1.1; EXPRESSED IN ADULT LIVER, SIGNAL = 1.4; EXPRESSED IN PLACENTA, SIGNAL = 2.2; EXPRESSED IN FETAL LIVER, SIGNAL = 3.5; EXPRESSED IN LUNG, SIGNAL = 1.1; EXPRESSED IN BRAIN, SIGNAL = 1.6; EXPRESSED IN HBL100, SIGNAL = 0.98
tttgttctttggtttgcgtgtgtgtgcgtgtgtgtgtgtgtgtgtgtgagagagagagggagtcgtttatgtatggctgtctgtgggaggagaggcatgggccaaggtaggggggtgtgtgtgtgagtccccagcttttccctattggaatttggttgaggtgagacatttaagagaactgtctttcccttatacttagagaggaaatatgtcttcctcttaaacttacaggaagagttaggaagttaagaatttacctgtgcaatttctcctgcatgtttctctgtggaaacaggtcatacattgggacaaaagtgaggcaacaggtctcccctgatatgtcctcaatcttctggtagtattgaaggtcccagagctcatcaccagtaaatcgcacccctgtattaaggataagttacaaagatgttcatgaatcaacctgcagaggaatctgtg

SEQ ID NO: 1257 - DNA, 477 bp, Homo sapiens
  MAP TO AC005089.2; EXPRESSED IN LUNG, SIGNAL =   1; EXPRESSED IN ADULT LIVER, SIGNAL = 1.2; EXPRESSED IN BRAIN, SIGNAL = 0.73; EXPRESSED IN HEART, SIGNAL = 0.78; EXPRESSED IN PLACENTA, SIGNAL = 1.1; EXPRESSED IN BONE MARROW, SIGNAL = 1.8; EXPRESSED IN HBL100, SIGNAL = 2.2; EXPRESSED IN FETAL LIVER, SIGNAL = 1.3; EXPRESSED IN BT474, SIGNAL = 2.3; EXPRESSED IN HELA, SIGNAL = 1.3
tgcccaggtcgatctgtaactcctggcctcaaacaatctttataccttggcctcctgagttgatgagattacaagtgtaagaaaccatccctggcctatatatttttctttctaatttgtagccctgttgatatagatggaattttgatttttctggagagaacgtatattgcttgttctcatttgggtaattactttttaccccagtggtgagttatttgtttctttttaacctagatcatcagtaacgtgccagcagacagcttgattcgtacagagcgcccaccaaataaggagatagttcgatactttatacggcataatgcattacgagctggtactggtgaaaatgcaccttgggtcgtagaagatgaattggtgaagaaatactctctgcccagcaagttcagtgactttttacttgatccatacaaggtaaggtcactgttaatttttggacagcaggataaagcatca

SEQ ID NO: 1258 - DNA, 494 bp, Homo sapiens
  MAP TO AC005089.2; EXPRESSED IN HBL100, SIGNAL = 1.4; EXPRESSED IN FETAL LIVER, SIGNAL = 1.3; EXPRESSED IN LUNG, SIGNAL = 1.1; EXPRESSED IN ADULT LIVER, SIGNAL = 0.9; EXPRESSED IN BRAIN, SIGNAL = 0.8; EXPRESSED IN BT474, SIGNAL = 2.5; EXPRESSED IN HEART, SIGNAL =   1; EXPRESSED IN PLACENTA, SIGNAL =   1; EXPRESSED IN HELA, SIGNAL = 2.4; EXPRESSED IN BONE MARROW, SIGNAL = 0.72
gccctttggccttgtatattggcattttacatgaatcatgaacctagattgtgatcatttatttcatttttttaggctgtcatatttcaacctagaagtctgagaaaaaaagttgaaaacacttcattgtacttggatactttactgtttcaatcaccttttgttagttgaggaggcatgtatattggatgatatgttctaaacatcttcaggtttctgggtgtttattatctctgattttctctactacctcctttataggttgggaaggagaaaatgctcaaggtgaagattgtgaagattcatcctttggagaaagtggatgaagaggccactgagaagaaatctgatggtgcctgtgattctccatcaagtgacaaagagaactccagtcagattgctcaggaccatcagaagaaggagacagttgtgaaagaggatgaaggaaggagagagagtattagtatgtttgatattagctttccttagtgttt

SEQ ID NO: 1259 - DNA, 482 bp, Homo sapiens
  MAP TO AC005089.2; EXPRESSED IN BT474, SIGNAL = 2.5; EXPRESSED IN BONE MARROW, SIGNAL = 1.1; EXPRESSED IN HELA, SIGNAL = 1.2; EXPRESSED IN PLACENTA, SIGNAL = 1.9; EXPRESSED IN FETAL LIVER, SIGNAL =   3; EXPRESSED IN LUNG, SIGNAL = 1.7; EXPRESSED IN ADULT LIVER, SIGNAL = 0.8; EXPRESSED IN BRAIN, SIGNAL =   2; EXPRESSED IN HEART, SIGNAL = 1.9; EXPRESSED IN HBL100, SIGNAL = 2.8
cttccacaagctgcaatcagtggataataaagaagagtttaataagcatatcctgaccttcctaaagtgtaatgttgcataaacataaagattctggctgcctctggtgcttagaatctatgtcgtgtaggccgggcacaatgattattatactcagttgtatccttggctgcctaaagtgatgccaggcccttggctctgtccagagttcctcttgaggaaaatgaccacgctcagctgctgcctttgttctgtttggttttcagacgaaaacagcaaccagagttccgtgtctgacgtctatcagcttaaggtggacagcagcaccaactcaagccccagcccccagcagagtgagtccctgagcccagcacacacctccgacttccgcacggatgactcccagcccccaacgctgggccaggagatcctggagggtgagtcgtggttggccgaggatgagtttcctagaagggccttgc

SEQ ID NO: 1260 - DNA, 483 bp, Homo sapiens
  MAP TO AC005089.2; EXPRESSED IN PLACENTA, SIGNAL =   3; EXPRESSED IN BT474, SIGNAL = 5.4; EXPRESSED IN BONE MARROW, SIGNAL =   4; EXPRESSED IN HBL100, SIGNAL = 5.6; EXPRESSED IN FETAL LIVER, SIGNAL = 3.3; EXPRESSED IN LUNG, SIGNAL = 3.1; EXPRESSED IN HELA, SIGNAL =   4; EXPRESSED IN ADULT LIVER, SIGNAL = 2.7; EXPRESSED IN BRAIN, SIGNAL = 3.1; EXPRESSED IN HEART, SIGNAL = 3.7
tcataaacatctgcctcctgcagccctacacctcattgcatactacaaagaaaacaaagacagggaggacaagaggagcgccctgtcctgtgttatctccaaaacagctcgtcttctctctagtgaagatagagctcgtctcccagaagaattgcgaagtcttgttcaaaaacgctatgaacttctagagcacaaaaagaggtgggcttctatgtctgaagaacaacggaaagaatatttgaaaaagaaacgggaggagctgaaaaagaagttgaaggaaaaagccaaagaacgaagagagaaagaaatgcttgagagattagaaaaacagaagcggtatgaggaccaagagttaactggcaaaaaccttccagcattcagattggtggatacccctgaagggctgcccaacacgctgtttggggatgtggccatggtggtggaattcttgagctgttattctgggctacttttaccagatgc

SEQ ID NO: 1261 - DNA, 483 bp, Homo sapiens
  MAP TO AC005075.2; EXPRESSED IN HEART, SIGNAL =   1; EXPRESSED IN FETAL LIVER, SIGNAL = 1.4; EXPRESSED IN LUNG, SIGNAL = 1.7; EXPRESSED IN ADULT LIVER, SIGNAL = 2.2; EXPRESSED IN BRAIN, SIGNAL = 1.4; EXPRESSED IN PLACENTA, SIGNAL = 1.5; EXPRESSED IN BT474, SIGNAL = 1.6; EXPRESSED IN BONE MARROW, SIGNAL = 1.8; EXPRESSED IN HBL100, SIGNAL = 2.2; EXPRESSED IN HELA, SIGNAL = 1.7
agccttttctgcctttgagccctcatttgagcttattgaccaagcctttgactcatggtgccattctgctgtgatgatccccttaaagattatatctcagcctgcctgacaatggatactggcacaacaatgccatcactgtgttctgagcttcaatcccgccctggattctgcctgcctgtctctctgccagtgtggtgctgcctctcctgccacatcagctccaatcctccagctcactcaactctttttcctctggggtttccttctctagaatgccacagccatcattgcccagacggggaattacaagcccagtgtttctatcacctacatcacctgggcagtaatcacagaagtctgtggacatgttttctcccttaagaagcttgtattcactttgagagagacaaaatataacacacacaaaaccgagagcagtaaggaccttgcgttagttgtcaaaatggagtgatatgcaca

SEQ ID NO: 1262 - DNA, 357 bp, Homo sapiens
  MAP TO AC005075.2; EXPRESSED IN HBL100, SIGNAL = 1.7; EXPRESSED IN BRAIN, SIGNAL = 2.9; EXPRESSED IN HEART, SIGNAL = 1.9; EXPRESSED IN PLACENTA, SIGNAL = 2.3; EXPRESSED IN BT474, SIGNAL = 1.6; EXPRESSED IN BONE MARROW, SIGNAL = 2.6; EXPRESSED IN ADULT LIVER, SIGNAL = 2.2; EXPRESSED IN HELA, SIGNAL =   2; EXPRESSED IN LUNG, SIGNAL = 2.5; EXPRESSED IN FETAL LIVER, SIGNAL = 1.9
aagaagtgatgggcaacagctagagcatggcaatcctgagcatggggtcaggtgaggatgaggtgactctacctataaggaatcagaaggaggggccttccctctcagtggtgtgtgtggtgtgtctggaggtgatggatgggactgggaaatgggcattgagaagcaaatgggccctctggctgctgctgattttaaaatgatcttgttctgggatgagagtcgatggccatgcctaattatttttttgtcgttggcagtgggatgttctatgacgggaaccacacatatctcattgagccagaagaaaatgacactactcaagtaagtgctccttctgtttgttgtggcaaatgg

SEQ ID NO: 1263 - DNA, 403 bp, Homo sapiens
  MAP TO AC004985.2; EXPRESSED IN BT474, SIGNAL = 3.2; EXPRESSED IN PLACENTA, SIGNAL = 4.9; EXPRESSED IN HEART, SIGNAL = 2.5; EXPRESSED IN ADULT LIVER, SIGNAL =   2; EXPRESSED IN HELA, SIGNAL = 3.8; EXPRESSED IN FETAL LIVER, SIGNAL = 2.3; EXPRESSED IN HBL100, SIGNAL = 2.7; EXPRESSED IN BONE MARROW, SIGNAL = 2.3; EXPRESSED IN BRAIN, SIGNAL =   3; EXPRESSED IN LUNG, SIGNAL = 3.2
ctagtccccagggaagaaggaggtctgctttgggaaagggctgttaccatctttgtttaaactataaactaagtttctcccaaagttagttcagcctatgcccaggaatgaacaaggacaacttggaggttagaagcaagatggagtcagttaagttagatccctttcactgtctcagccatacttttgcaaaggtagtttcaatccctccctttgggttttataatacctcaatcttaaggtgtaggctatgaagatgggaaaaggctgttgatcactttggcttcttcctgctgaaaggggacatagtgggaatgagagtgaaccccaaggtgggaagagtggaactgctttgcaattgtctgagcatactcatgcaggcatggttgagcttccaaggctt

SEQ ID NO: 1264 - DNA, 456 bp, Homo sapiens
  MAP TO AC004985.2; EXPRESSED IN BONE MARROW, SIGNAL = 2.1; EXPRESSED IN LUNG, SIGNAL =   2; EXPRESSED IN HEART, SIGNAL = 1.9; EXPRESSED IN PLACENTA, SIGNAL = 1.4; EXPRESSED IN BT474, SIGNAL = 4.7; EXPRESSED IN HBL100, SIGNAL = 3.2; EXPRESSED IN FETAL LIVER, SIGNAL = 2.7; EXPRESSED IN HELA, SIGNAL = 1.5; EXPRESSED IN ADULT LIVER, SIGNAL = 3.4; EXPRESSED IN BRAIN, SIGNAL = 3.1
ctgcctaaaggccaggtgctatcagcagctgaacagcatctacagaaaccagctgcaaagacagaagcagaacaactggtttaatggagagatctgatgacaaaaagttgggaaataggtaaaataataacttggcatagaggttatgcttgtgtttctccaggactgaatcaacagccaatttggatactatcaagacagctgaaaccttatcatgagccagatgctgaggaagagattccaagaggatcccgaggaccccccagttgcagccatgtcaagactgatgctaaggaggaccccaactgtcacaagcaacacccattgaacacagccaccaaccagaggacagatcaagaaactgtcacagatggtggaagaaaacctgaggaaagtgggacaaccagtcacaatgagtaatttaatggtagctatgatagcagtgatcaccattgc

SEQ ID NO: 1265 - DNA, 448 bp, Homo sapiens
  MAP TO AC004985.2; EXPRESSED IN PLACENTA, SIGNAL = 0.8; EXPRESSED IN BONE MARROW, SIGNAL = 1.1; EXPRESSED IN FETAL LIVER, SIGNAL = 0.84; EXPRESSED IN BRAIN, SIGNAL = 1.3; EXPRESSED IN HBL100, SIGNAL = 1.1; EXPRESSED IN HELA, SIGNAL = 1.3; EXPRESSED IN ADULT LIVER, SIGNAL = 0.83; EXPRESSED IN BT474, SIGNAL = 1.7; EXPRESSED IN LUNG, SIGNAL = 2.3; EXPRESSED IN HEART, SIGNAL = 0.83
agggtccagtggcagtaggcctgtgcgcctgtccttccaaacccattctgcagagcagaaacctgaggtctggggatgtgaggagctggccagtgtccagggccccatccccagccaccccttgggaaaatgtcctctttccctgggatgctctgaggtcctcagagggaaaggttcgggatcccccgtgcctctccctgcagggcccagggcagctgatcccactcatcgaggagacaaccagcaccgagtgtcgccaggacgtggccacgaacctgctcaagctcttcctggggcaggggctggccaaggacttcctggacctgctcttccagctggagctgagtcgcaccagtgaggcctgggaaggagctgggcccagaacgctgggaggtgtttgggggtgggtgggctcctcctgtaggaggcagatggggtcagacaggag

SEQ ID NO: 1266 - DNA, 480 bp, Homo sapiens
  MAP TO AC004985.2; EXPRESSED IN HBL100, SIGNAL = 1.4; EXPRESSED IN LUNG, SIGNAL = 1.8; EXPRESSED IN ADULT LIVER, SIGNAL = 1.5; EXPRESSED IN BRAIN, SIGNAL = 2.1; EXPRESSED IN HEART, SIGNAL = 1.7; EXPRESSED IN BT474, SIGNAL = 2.8; EXPRESSED IN PLACENTA, SIGNAL = 1.6; EXPRESSED IN HELA, SIGNAL =   3; EXPRESSED IN FETAL LIVER, SIGNAL = 1.6; EXPRESSED IN BONE MARROW, SIGNAL = 1.1
aaaggtcgacgaggactgtgaggagtgtcagaaagcgaaagaccggatggagaggattaccaggaaaatcaaagactcggatgcctacagaagggacgagctgaggctgcagggggacccctggagaaaggcagcccaagtggagaaggagttctgccagctccagtgggccgtggacccccctgagaagcacagggctgagctgaggcggcggctgctagaacttcgaatgcagcagaacggccatgatccctcctcgggggtgcaggagttcatctcggggatcagcagcccctccttgagtgagaagcagtacttcctgaggtggatggagtggggcctggcacgggtggcccagccgcgactgagacagcctccggagacgcttctcaccctgagaccaaagcatgggggcaccacagacgtgggggagccgctctggcctgagcccctaggggtggaacacttcttgcgggagat

SEQ ID NO: 1267 - DNA, 479 bp, Homo sapiens
  MAP TO AC004909.2; EXPRESSED IN ADULT LIVER, SIGNAL = 7.9; EXPRESSED IN BRAIN, SIGNAL = 8.3; EXPRESSED IN HEART, SIGNAL = 5.3; EXPRESSED IN PLACENTA, SIGNAL = 6.9; EXPRESSED IN BONE MARROW, SIGNAL = 9.4; EXPRESSED IN HBL100, SIGNAL = 7.3; EXPRESSED IN BT474, SIGNAL = 5.9; EXPRESSED IN FETAL LIVER, SIGNAL =   7; EXPRESSED IN LUNG, SIGNAL = 8.2; EXPRESSED IN HELA, SIGNAL = 8.4
tggaaaataagaagagtagttatgccattgataataaactagatgatctactgatgcctcttcctgttccaagattgaagtatccagaatccaagcactgatatcccccattacatcagaaatgagtcaagtagcaagagctatttataataaatgtcatggccttttcctctattttaactgataacacattattttaagaattctcagtagattttagtaggagtgggtgtgacaacgtgcgtatgtatagaaaagaatatttttgttttaactctaaaagcaaagattatttttaggtcgcatccatacacgtacctgaagtaatggtattctgcttcctgaatgcctttctgaaaatgctgcctgcctttattgactcaaatgttgtcaagcgtgttacatacacatttttcctaaccaagggaagactcttgttcctaaataacttagtttttgggtggatcacttgcttccaa

SEQ ID NO: 1268 - DNA, 474 bp, Homo sapiens
  MAP TO AC004909.2; EXPRESSED IN FETAL LIVER, SIGNAL =  31; EXPRESSED IN LUNG, SIGNAL =  13; EXPRESSED IN ADULT LIVER, SIGNAL =  13; EXPRESSED IN BRAIN, SIGNAL =  10; EXPRESSED IN HEART, SIGNAL =  12; EXPRESSED IN BT474, SIGNAL =  39; EXPRESSED IN PLACENTA, SIGNAL = 7.9; EXPRESSED IN HELA, SIGNAL =  47; EXPRESSED IN HBL100, SIGNAL =  27; EXPRESSED IN BONE MARROW, SIGNAL = 8.4
aagagggctgatggtgacagggtgaaaaagggttacatgacctcaaagctaaaaagcccacgaaagggaagcttcattgcagctgaaatcctgtccttgtctgaggaactggcagatgttcccaatctgctacatattgcagaagggccatgcacaagaggaagtacttagccgctaaatccaaagttgaaaaaaaaaaaaaaaaatgaaggaaaggtgtgtggtgacaagcagggtggtgcccagatagttaaacttcgcaaaatccctagatattattctactggagatgtgcctcgaaagctgttgagccacagccaaaaacccttcagtcagcacttgagaaaactacgagccacagtcacccccggggccattctgatcattctcactgagtgctacagaggcaagagggtggttttcctgaagcaggtggctagtggcttgttagttgtgactggatctctggccctc

SEQ ID NO: 1269 - DNA, 462 bp, Homo sapiens
  MAP TO AC004885.2; EXPRESSED IN BONE MARROW, SIGNAL = 2.7; EXPRESSED IN HBL100, SIGNAL = 0.92; EXPRESSED IN FETAL LIVER, SIGNAL =   1; EXPRESSED IN PLACENTA, SIGNAL = 1.2; EXPRESSED IN BT474, SIGNAL = 0.84; EXPRESSED IN LUNG, SIGNAL = 1.4; EXPRESSED IN HELA, SIGNAL = 0.99; EXPRESSED IN ADULT LIVER, SIGNAL = 0.91; EXPRESSED IN BRAIN, SIGNAL = 1.3; EXPRESSED IN HEART, SIGNAL =   1
tcagtcctgacctctctcctgaactccagaagtgaatatcaaaaattgcccactggatgctgggcatggtggtatttacctatagttctggctacttaggtggctgaggtgggaggatcccttgaggccggccaggggtttgaggctgtagtgtactatgatcgcgcctctgaaaagccactgcactccagcatgggaagcagagcaagatccatctctaaaatatttttttttaattgcccactgaagattatcatttggcatccaacaggcatcgcaaacttaacctggccaaaacagagatcctgatttccatcttcctccaaaacttcctccagccagtcaccctcatcttagcgaatgccaaccaaatccttccagttgttcaggtcaaccactctggagtcatccttggtttctttctttctctcatacctaaaccaaacctgttgaccttatctc

SEQ ID NO: 1270 - DNA, 469 bp, Homo sapiens
  MAP TO AC004885.2; EXPRESSED IN PLACENTA, SIGNAL = 1.5; EXPRESSED IN BT474, SIGNAL = 0.98; EXPRESSED IN HBL100, SIGNAL = 0.71; EXPRESSED IN FETAL LIVER, SIGNAL = 1.4; EXPRESSED IN LUNG, SIGNAL = 1.1; EXPRESSED IN HELA, SIGNAL = 1.1; EXPRESSED IN ADULT LIVER, SIGNAL = 0.83; EXPRESSED IN HEART, SIGNAL = 1.1; EXPRESSED IN BRAIN, SIGNAL = 0.99
gggcagaaaggatacaatcagaacaaactggaaagagtaacactattcattagacattactaaatccaacaggaagaatttccttataccatgccacattgttcagatattttttgaacatgataaatcgctacactaaggaatataatatgaaatgagatggccatggcacacatttatggtgccgataaaaatctggaactagaacattggctacaattgcccagagatacaatccacctcagcaaatggtctatggaataaaagcacttggttttttcatagccacatgaggctccttaagcttgcaatttggcaagagagtaagcatttctataacattgctgtcaacagccacataacaacattcgaccactttcatatcactaagaagtgacaggaagataaactcaaaacttcaacttttttttagcagggcagggtagggccaaacacagcaccgacagag

SEQ ID NO: 1271 - DNA, 478 bp, Homo sapiens
  MAP TO AC004859.2; EXPRESSED IN LUNG, SIGNAL = 2.5; EXPRESSED IN PLACENTA, SIGNAL = 2.6; EXPRESSED IN BT474, SIGNAL = 5.1; EXPRESSED IN BONE MARROW, SIGNAL = 3.1; EXPRESSED IN HBL100, SIGNAL = 2.8; EXPRESSED IN FETAL LIVER, SIGNAL = 3.9; EXPRESSED IN HELA, SIGNAL = 2.6; EXPRESSED IN BRAIN, SIGNAL = 3.2; EXPRESSED IN ADULT LIVER, SIGNAL = 2.6; EXPRESSED IN HEART, SIGNAL = 1.9
ggttctctttccacacctgctgtgggattttcttctcctgtcttcacctagccttcacaaaatgccccaacctccctgtggacagctgctttccctgcttcccgtgctataccctgtcccccccacctctcccccaacccacttgccaggcctgttggtttctagcactttggagctgctgcatgaagcacgttgtttggctggttccctttggtgattcctgcttcctcataggttttggggaaccccatgggccctgcagggagtccctctggcagctccatgatgcctggtgtggcagggggcagctccgccttgacctccccacagtgcctgggacagcaggcgtttgctgaaggcggcgccaacaagggctacgtgcagcaaggcgtgtacagccgcgggggctaccctggggcccccggcttcaccaccgggtaagcaagttccctcacctggcaggtatgctaggagccat

SEQ ID NO: 1272 - DNA, 496 bp, Homo sapiens
  MAP TO AC004859.2; EXPRESSED IN PLACENTA, SIGNAL = 1.9; EXPRESSED IN BT474, SIGNAL = 4.6; EXPRESSED IN FETAL LIVER, SIGNAL = 2.3; EXPRESSED IN HELA, SIGNAL = 3.1; EXPRESSED IN ADULT LIVER, SIGNAL =   2; EXPRESSED IN BONE MARROW, SIGNAL = 3.3; EXPRESSED IN HBL100, SIGNAL = 2.3; EXPRESSED IN LUNG, SIGNAL =   2; EXPRESSED IN BRAIN, SIGNAL = 2.9; EXPRESSED IN HEART, SIGNAL = 9.3
gagccaagctgttttgaaggctagcctggtgttacttgatacccagagctggccatgtctgctgtgtatttgttacacgtaacgtgcttttcaaagtgtgcctggtctgagcaaatacagggcatcagaggctggtgaaggggaagcatctctaacccttgaaagctgcgtctcctggcagcagtccctggcacagccctgggcccaggagagctctcagccacatacctgagagaaccagcctagccatgggaactctcttgtaggaacccacttccagcgggtgatcccagaagatggccctgcagctcagaacccagaaaatgtcaaaaggcttctcttctgcaccggcaaagtgtattatgacctcacccgggagcgcaaagcacgcgacatggtggggcaggtggccatcacaaggattgagcaggtgagggcaggtggtgccatcagggtgtccccccagcgggggtcagggctctggtgccttcacaga

SEQ ID NO: 1273 - DNA, 494 bp, Homo sapiens
  MAP TO AC004859.2; EXPRESSED IN BRAIN, SIGNAL = 3.5; EXPRESSED IN HEART, SIGNAL = 4.2; EXPRESSED IN PLACENTA, SIGNAL =   3; EXPRESSED IN BT474, SIGNAL = 4.1; EXPRESSED IN BONE MARROW, SIGNAL = 4.1; EXPRESSED IN ADULT LIVER, SIGNAL = 3.4; EXPRESSED IN HELA, SIGNAL = 3.9; EXPRESSED IN LUNG, SIGNAL = 3.6; EXPRESSED IN FETAL LIVER, SIGNAL = 3.5; EXPRESSED IN HBL100, SIGNAL = 2.9
gagtagaactggggttgtcccttggcctgcccttggaaggctaggaggttctctgtgtacaagtgacccaggtccctgaaggaagcacttcatgaccctatgaagagggcttctgcctggcacccactccatcccatcctcagtcacacttgattggagtacatttcagaacaagcctcctgcttatcccctccttctggctgaatgggcagtcggcagtcttcattcagccaggcctggttagaaatccccttgactgtgtgtttctgtatggaatagatggcctactgccagcatattggggtggagttcatgttcatcaatgacctggagcagtgccagtggatccggcagaagtttgagacccctgggatcatgcagttcacaaatgaggagaaacggaccctgctggccaggcttgtgcggtccaccaggtatgggtctggccctgggccatggggcagacattcccagggaagcagtgaccctgtctg

SEQ ID NO: 1274 - DNA, 464 bp, Homo sapiens
  MAP TO AC004814.2; EXPRESSED IN FETAL LIVER, SIGNAL = 4.3; EXPRESSED IN HEART, SIGNAL = 3.3; EXPRESSED IN PLACENTA, SIGNAL =   4; EXPRESSED IN BT474, SIGNAL = 4.1; EXPRESSED IN BRAIN, SIGNAL = 3.8; EXPRESSED IN ADULT LIVER, SIGNAL = 2.9; EXPRESSED IN HELA, SIGNAL = 3.5; EXPRESSED IN LUNG, SIGNAL = 4.8; EXPRESSED IN HBL100, SIGNAL = 4.1; EXPRESSED IN BONE MARROW, SIGNAL = 5.1
tctcgcctcagcctctttagtagcttggaatagagatatgtgctaccacgccaggccatttgggacccaaagataccagacagtcaaaagggaaaggacaaaagtacctagtattattcaagaaagaaaacaattcgagagtcaggacaagtcaggcttcagaaataaactgtaataaacacctatctgaagcagtccatgttaggaaaacatcatgctttactgtttttccagccaggaaaaggagtttcctctcaaaaacacaagtgggggcagcacaagagatcctcacccttctgccttaccttcgttttccagtggccaggtttacagctaccatcttcccatcaatgctaaatggcggatcaaggttctgtaagatcttcaccacacgaagagcttcctatagaaccagacacacttgaacccagagacagaaaatgccagaacccaaagacagaaaa

SEQ ID NO: 1275 - DNA, 471 bp, Homo sapiens
  MAP TO AC004689.5; EXPRESSED IN BONE MARROW, SIGNAL =  19; EXPRESSED IN FETAL LIVER, SIGNAL =  14; EXPRESSED IN LUNG, SIGNAL =  16; EXPRESSED IN PLACENTA, SIGNAL =  14; EXPRESSED IN BT474, SIGNAL =  13; EXPRESSED IN HBL100, SIGNAL =  15; EXPRESSED IN HELA, SIGNAL =  12; EXPRESSED IN ADULT LIVER, SIGNAL =  12; EXPRESSED IN BRAIN, SIGNAL =  14; EXPRESSED IN HEART, SIGNAL =  11
ctgagaggggtgtggtgggctttggggtacaggccacaaggtacaaggcatggcctgactgcagctccgtcactctcatggctcaggtgcatggctgtcccacagtggaaggaccaggggctggcctgatctgcacttcatggcatcaagagcacaggccctggagtccaccaggcacagagaagcagcctgctcctgggtggagtacaagttcaaccctcgggagttgtggtttccccatgtggaagctggcagcatgccacgcacctgccagggctgccgcgagggttcgcacacactgtgtgtaatgctcctgtgtgagttccccggtgacccaggtcccactggggtggccggcgtgtaaccaggacaggaacatctccaaagccactccttgtttgctgcctggtggctcaagcagaacatctgtgcctgcagggggcccataagccttaatgccctgcagagagg

SEQ ID NO: 1276 - DNA, 461 bp, Homo sapiens
  MAP TO AC004689.5; EXPRESSED IN PLACENTA, SIGNAL = 2.5; EXPRESSED IN BRAIN, SIGNAL = 3.8; EXPRESSED IN BT474, SIGNAL = 2.7; EXPRESSED IN HBL100, SIGNAL = 2.4; EXPRESSED IN FETAL LIVER, SIGNAL = 3.4; EXPRESSED IN LUNG, SIGNAL = 3.5; EXPRESSED IN HELA, SIGNAL = 3.3; EXPRESSED IN ADULT LIVER, SIGNAL = 2.4; EXPRESSED IN BONE MARROW, SIGNAL = 3.4; EXPRESSED IN HEART, SIGNAL = 2.8
catctctgcattcctctgcccagtgcccagctcagggcctggtacccatggggctgggttagggatgaccggagtcattgtctatctccccatcctccagcacacagcatagctgggatgcgctgacacacaggaatgtttgttgagtgaagaaaagagtgaagcatgtacgaataagtcaatggacagacaggagtgtcccagggccttggctgtatggcctagtgaggaccggaaggagcatgaggcaggggagaggggagaagggagagtggagggggcagcgagcgccctccacggcccggctcacccggtgtccatcacttgcgggctgaagtgggacagcatcagcaccatgctgagggtctcaaactcctccaggtcccccccataggtcttcagccctgccagctccacctccagcctctactgctggttctgaaaggaacatgagaggtgca

SEQ ID NO: 1277 - DNA, 370 bp, Homo sapiens
  MAP TO AC004689.5; EXPRESSED IN PLACENTA, SIGNAL = 0.91; EXPRESSED IN HBL100, SIGNAL = 0.77; EXPRESSED IN LUNG, SIGNAL = 0.83; EXPRESSED IN BRAIN, SIGNAL =   3; EXPRESSED IN HEART, SIGNAL = 1.2; EXPRESSED IN BT474, SIGNAL = 1.6; EXPRESSED IN BONE MARROW, SIGNAL =   1; EXPRESSED IN FETAL LIVER, SIGNAL = 0.86; EXPRESSED IN HELA, SIGNAL = 0.77; EXPRESSED IN ADULT LIVER, SIGNAL = 0.9
aggcacctagaaggggtagccagcaggcagttcaccatgcaggtctgcagctcagggggacgcattttgagggtctcaggaacagagaggcagctcagacgcgagggtggacggttttgcctcgggagaggtgtcagaaacctccgggaaggcggagcattgagggcgcccttcactgccccttccttgaccgcactgcccccagacatcgtggacatcaagccggccaacatggaggaccttacggaggtgatcacagcatctgagttccatccgcaccactgcaacctcttcgtctacagcagcagcaagggctccctgcggctctgcgacatgcgggcagctgccctgtgtgacaagcattccaagc

SEQ ID NO: 1278 - DNA, 489 bp, Homo sapiens
  MAP TO AC004689.5; EXPRESSED IN PLACENTA, SIGNAL = 3.3; EXPRESSED IN LUNG, SIGNAL = 4.2; EXPRESSED IN ADULT LIVER, SIGNAL = 2.8; EXPRESSED IN BRAIN, SIGNAL =   2; EXPRESSED IN HEART, SIGNAL = 6.4; EXPRESSED IN BT474, SIGNAL = 2.5; EXPRESSED IN HELA, SIGNAL = 2.5; EXPRESSED IN FETAL LIVER, SIGNAL = 2.4; EXPRESSED IN HBL100, SIGNAL = 2.4; EXPRESSED IN BONE MARROW, SIGNAL =   2
tgaattggccctacctgaaggtccttggccagaccttcatcaccgtgcctgtcggccacctggtcgtcctcaacgtcagcgtcccgtgcctgctctatgtctacctgctctatctcttcttccgcatggcacagctgaggaatttcaagggcacctactgctaccttgtgccctacctggtgtgcttcatgtggtgtgagctctccgtggtcatcctgctggagtccaccggcctggggctgctccgcgcctccatcggctacttcctcttcctctttgccctccccatcctggtggccggcctggccctggtgggcgtgctgcagttcgcccggtggttcacgtctctggagctcaccaagatcgcagtcaccgtggcggtctgtagtgtgcccctgctgttgcgctggtggaccaaggccagcttctctgtggtggggatggtgaagtccctgacgcggagctccatggtcaagctcatcctggtgt

SEQ ID NO: 1279 - DNA, 469 bp, Homo sapiens
  MAP TO AC004689.5; EXPRESSED IN HELA, SIGNAL = 3.1; EXPRESSED IN ADULT LIVER, SIGNAL = 2.2; EXPRESSED IN BRAIN, SIGNAL = 3.8; EXPRESSED IN BT474, SIGNAL = 2.7; EXPRESSED IN BONE MARROW, SIGNAL = 3.5; EXPRESSED IN LUNG, SIGNAL = 3.1; EXPRESSED IN HEART, SIGNAL = 2.6; EXPRESSED IN PLACENTA, SIGNAL = 2.2; EXPRESSED IN HBL100, SIGNAL = 2.4; EXPRESSED IN FETAL LIVER, SIGNAL = 2.6
gcctatttcagaccacggaggatcaggatggacgcccacccctgtgttccagcctccggttgggatcacatgctcacggcatgctatgtcctgatgccaccacctggccttcacctcttccctgcctcctcatcctctgcaggtgccagtgctgaagcccatggatctgatggtggaggtgagccctcggaggatctttgccaatggccacacctaccacatcaactccatctccgtcaacagtgactgcgagacctacatgtcggcggatgacctgcgcatcaacctctggcacctggccatcaccgacaggagcttcagtatccttcactgtggcctggccagtgcctcccacgggcagagtagcttccgttgggtggtgggtttggtttgattggcagacagctggtttggggatggctgcattgtttaacttcttcagtgaggcacctctggctcctagtatgcg

SEQ ID NO: 1280 - DNA, 470 bp, Homo sapiens
  MAP TO AC004624.6; EXPRESSED IN PLACENTA, SIGNAL =  11; EXPRESSED IN BONE MARROW, SIGNAL = 7.2; EXPRESSED IN HELA, SIGNAL =  19; EXPRESSED IN HBL100, SIGNAL = 8.8; EXPRESSED IN LUNG, SIGNAL =  12; EXPRESSED IN ADULT LIVER, SIGNAL =  11; EXPRESSED IN BRAIN, SIGNAL =  11; EXPRESSED IN BT474, SIGNAL =  12; EXPRESSED IN HEART, SIGNAL =   8; EXPRESSED IN FETAL LIVER, SIGNAL =  10
gcagttctctgagtctccccagcccatccacaggctgctgggacacaggagctggtaaccgcaggccccatccaccctagggacatgttggcctgagctcccaccagccattcaggcagctcaatggtgacaaattacactcacatctaaactgttccagtccaggataagccctcaggaaaaataaataaaaagtcaagagagagaaaattacagtgtaggtagtgagggtgatttacccaacatcctactagatgagcacaagcccaggaagagatgaggaggagggtggcaatggtgatggtgatagtgatgagggtggtaatggtgatgatggtgatggtggtcatggtgatggtgatgttggtgatgatggtgatggtgatgatgatgtggtggtgatggtgatggtgactgtgatggtgatggtgattatggtgatgatgtgatggtgatgttgatggtggtga

SEQ ID NO: 1281 - DNA, 466 bp, Homo sapiens
  MAP TO AC004624.6; EXPRESSED IN BT474, SIGNAL = 1.1; EXPRESSED IN BONE MARROW, SIGNAL = 1.5; EXPRESSED IN FETAL LIVER, SIGNAL = 1.4; EXPRESSED IN HELA, SIGNAL = 0.88; EXPRESSED IN PLACENTA, SIGNAL = 1.5; EXPRESSED IN HBL100, SIGNAL =   1; EXPRESSED IN LUNG, SIGNAL = 1.3; EXPRESSED IN ADULT LIVER, SIGNAL = 1.1; EXPRESSED IN BRAIN, SIGNAL = 1.6; EXPRESSED IN HEART, SIGNAL = 1.3
acaaataccccaatttccccaaacctgctgagagtgagctctctcccagccactgtgccacttctgagcaaagctccagttctctcccctacatgcagaggctgagcactgccagcccctgctgcccggctgcagggtggacagctgctggaaacaagcctccacgtcctgtgcaagctcatcgattgtgagtgcacacctgttgtgtcctttgctcacagcctgtggatgaccatgatcagtgggttcggccccttcaactgataaggcaaatctgggaaacagtggcaaacctgtctctcctgcaaagaaaagcatttccttgctctcatgttcctgggagtcaggctcctcgggggcacccctgcaccccagaccggatgcttcttgatgcggcatctcatcctcttcctctagccctttgtcctccaggcttcctccttgcagaagcagagcatttccaagc

SEQ ID NO: 1282 - DNA, 480 bp, Homo sapiens
  MAP TO AC004624.6; EXPRESSED IN PLACENTA, SIGNAL =  17; EXPRESSED IN BT474, SIGNAL =  14; EXPRESSED IN HEART, SIGNAL =  17; EXPRESSED IN BRAIN, SIGNAL =  34; EXPRESSED IN ADULT LIVER, SIGNAL =  12; EXPRESSED IN HELA, SIGNAL =  12; EXPRESSED IN LUNG, SIGNAL =  18; EXPRESSED IN FETAL LIVER, SIGNAL =  21; EXPRESSED IN HBL100, SIGNAL =  14; EXPRESSED IN BONE MARROW, SIGNAL =  15
tggtcctctataaagggtaaatgttcataatacacctgaaaatttaattcagatagagctcattaaggcaaaaataaaaatctttcacaaaattactcggaaacagtatccattttctattcactgagtgtctgccatactcaggatcctggaatacaaactgcaaggtaatcttataaggtcaaaggcaaaaactgtaagcaaaacctttcatgggctagctcttgctcttcccctctcatacacacacacacacatacacacacacacacatacacacacacacacacacaccctgaagatacctcggacagcagcagctgggttccaggtcaccaagggagttcgtggagcagatgatgaaagacctttgtttgttctgaccaagtgcttatggaaaccaggaggcagatctgtgtgctgacagggacgggcacggagaagtcgtgatttcccatgaggctctggaggaaggacgag

SEQ ID NO: 1283 - DNA, 456 bp, Homo sapiens
  MAP TO AC004624.6; EXPRESSED IN BT474, SIGNAL = 1.4; EXPRESSED IN BONE MARROW, SIGNAL = 1.7; EXPRESSED IN HBL100, SIGNAL = 1.4; EXPRESSED IN FETAL LIVER, SIGNAL = 1.3; EXPRESSED IN LUNG, SIGNAL =   2; EXPRESSED IN BRAIN, SIGNAL = 1.7; EXPRESSED IN PLACENTA, SIGNAL = 1.5; EXPRESSED IN ADULT LIVER, SIGNAL = 1.1; EXPRESSED IN HEART, SIGNAL = 1.3; EXPRESSED IN HELA, SIGNAL = 2.1
gaggcatcaaaaactcctgccaggacccagggcggcaggtggcggccttagtctctgaagccccattctgatcctgcacgtcctctgcagctccagccccattctccaagctcaggttctgatggctttcctgacttagctggtacttgtcaccaaggtttttccccttcctgcccaaagtcccccttgccttcccctcttcagttctccccgcaaggcttcctcctccattgttccaagtgtctttcagatccttggggtgttttttcagaaatgggtgatttgaaatgtagggggcctcgtggaagagggaggcaccgcggcctcttgtctggtgacaatcccagcctgggtgtcctgtggctttgggaggaggcggggacctggtggccaactcttcttggattttttgtccatctgagggaacctcctggagcagcagtggtcgccaagaag

SEQ ID NO: 1284 - DNA, 454 bp, Homo sapiens
  MAP TO AC004599.4; EXPRESSED IN HEART, SIGNAL = 3.5; EXPRESSED IN PLACENTA, SIGNAL = 3.5; EXPRESSED IN BT474, SIGNAL = 2.9; EXPRESSED IN BONE MARROW, SIGNAL =   3; EXPRESSED IN HBL100, SIGNAL = 2.3; EXPRESSED IN FETAL LIVER, SIGNAL = 2.5; EXPRESSED IN LUNG, SIGNAL = 3.4; EXPRESSED IN HELA, SIGNAL = 3.4; EXPRESSED IN ADULT LIVER, SIGNAL = 3.1; EXPRESSED IN BRAIN, SIGNAL = 5.6
gacttagtggggtgtccagcttgtagcaggcgctggggaacattcgcattagcaagttagccggctcgggtgtgagtgtttcatgggaccgcacgggagcggggcttgtccctggcacactgcaagtcatgggccggttaagctgcagagagtttcatttgaccctcgaattggatccctggcacggctcggcacttggtcccacggccggccctgctgggtccccggaggtcctagccgtcgccctgcaggtcacggtgctcaggccccttctccgggtttccctgcagagtaaaaatgcgccccacagccagggcgaatacgacgtgtacagcactttccagagccacgagccggagtttgactatctcaagagcctggagatagaggagaagatcaacaagatcaagtggctcccacagcagaacgccgcccactcactcctgtccaccaa

SEQ ID NO: 1285 - DNA, 441 bp, Homo sapiens
  MAP TO AC004599.4; EXPRESSED IN HBL100, SIGNAL = 3.1; EXPRESSED IN FETAL LIVER, SIGNAL = 3.6; EXPRESSED IN BRAIN, SIGNAL = 3.8; EXPRESSED IN HEART, SIGNAL = 4.8; EXPRESSED IN PLACENTA, SIGNAL = 3.4; EXPRESSED IN BT474, SIGNAL =   3; EXPRESSED IN BONE MARROW, SIGNAL = 2.4; EXPRESSED IN ADULT LIVER, SIGNAL =   4; EXPRESSED IN HELA, SIGNAL = 3.1; EXPRESSED IN LUNG, SIGNAL = 3.6
gcacccaataaatgactgccgtgacgatctttcttctcgccctcaggtggtctctggaagctcctctgtgcggggttttctcatttgccagctgtgcatcccccggtcgtagtgcggctcccacgggggtgtaccaggagcctctgctcctcctatgcttcctgaaaaagggcccagagaatatttccatcaggaataactgagtgaatcccagaaacttcctatcacatttagggtgattaggcagatgcatacgattctcactgtgggaaaggagctggcgacctcgatgggttgtggttcccgcagggatgtgcttgcgctgctgttactccagccgtagctgaggcacgggagaaaacggagaccccaagaagttcagaggcttgtgcaggtcacgctgttcctacgaggtagaccctgactttgaccccaggctgt

SEQ ID NO: 1286 - DNA, 484 bp, Homo sapiens
  MAP TO AC004599.4; EXPRESSED IN PLACENTA, SIGNAL =   2; EXPRESSED IN FETAL LIVER, SIGNAL = 1.2; EXPRESSED IN HEART, SIGNAL = 1.3; EXPRESSED IN BONE MARROW, SIGNAL =   2; EXPRESSED IN ADULT LIVER, SIGNAL = 1.4; EXPRESSED IN BRAIN, SIGNAL = 1.6; EXPRESSED IN BT474, SIGNAL = 1.6; EXPRESSED IN HBL100, SIGNAL = 1.1; EXPRESSED IN LUNG, SIGNAL = 1.4; EXPRESSED IN HELA, SIGNAL = 1.4
aagagtggagagaggggacgagggtggactggggtgggccccaggagctggaaagtgaggaaaatccagctgtgtcctgagggttagactccactgccagtgttcacaggatctggagctgatggggacctgcggtgtcaccctgaagggacagatggcccccaggctagcaggaggtggcagtgtccgtttggcagcaacatttgacaagcagaaggcagttggtccctcctgcttcctgtccaggctcttggggctgggaccccactcccagccctgtcctccccaacctccccacacttacacaggccactctggggcagaggaggggtgctgtgatttgtgggtttgggagaagttggaagcataatgggtcaggcctgcagctcggtccacactgcctgtgccaggtggagcaggtgagggcatccctggctctggggtggtgtcactgttcacactttgtcctatagccaggcccttc

SEQ ID NO: 1287 - DNA, 491 bp, Homo sapiens
  MAP TO AC000105.17; EXPRESSED IN HEART, SIGNAL = 1.8; EXPRESSED IN BT474, SIGNAL = 1.3; EXPRESSED IN BONE MARROW, SIGNAL = 2.5; EXPRESSED IN HELA, SIGNAL = 2.2; EXPRESSED IN ADULT LIVER, SIGNAL = 1.6; EXPRESSED IN BRAIN, SIGNAL = 3.7; EXPRESSED IN PLACENTA, SIGNAL = 1.5; EXPRESSED IN HBL100, SIGNAL = 1.9; EXPRESSED IN FETAL LIVER, SIGNAL = 1.5; EXPRESSED IN LUNG, SIGNAL = 2.2
atgagcaggggttcttctcccagtgtgacctgccaatgtggcttccctagctggctttccagaggacgccccctgggtgtgcacatggagggggacggggagccttcagatgtctactgatgttggtgaacctggacctatctcattgccaatgtgtcttgttaagagagagcaggaagcaggagcaggcacaccagccttggcgccccctgctggcactctgctgcgcaggccatgttcttacctccaggcctttgcacatgctgttccctctgcctggaactgtcttccactgtattagtttcctaatgctgctgtaacaaattaccacaaacttataaggcttaaaacaaaaccaatttatgaattgacagttccggaggtctgaaggcagccatgggtcagactgggctaaaatcgaggtgctggggctgtgctcctttccagagactctagaggagctcctgtcctcttgcctcttccagatcctg

SEQ ID NO: 1288 - DNA, 352 bp, Homo sapiens
  MAP TO AC000054.10; EXPRESSED IN HEART, SIGNAL = 2.2; EXPRESSED IN BRAIN, SIGNAL = 2.7; EXPRESSED IN PLACENTA, SIGNAL = 2.9; EXPRESSED IN BT474, SIGNAL =   2; EXPRESSED IN BONE MARROW, SIGNAL = 2.2; EXPRESSED IN FETAL LIVER, SIGNAL = 2.8; EXPRESSED IN LUNG, SIGNAL =   2; EXPRESSED IN HELA, SIGNAL = 2.4; EXPRESSED IN ADULT LIVER, SIGNAL = 2.3; EXPRESSED IN HBL100, SIGNAL = 1.7
tgcactcacacatatgcttcacaactgttactgaaaccaggagagttatcctccctaggatctaccttgacccagaaggaaccagcttgaggaggtcagaaaccagtgctgagtaaagggccatcacttctttacccctccttcccccagtattgggtgtgtgtttcccttctagaggctttatttgggagttccatgtggtagtaaaatatgaagtcattagaaattcatcagtgaatgatggatttcctttggttgcacagccactgggtctgtcttcctgttccatggaagcacgtaggcatttggacggcctatgaattagagaagagagaggcagacagacaggcag

SEQ ID NO: 1289 - DNA, 480 bp, Homo sapiens
  MAP TO AC000029.14; EXPRESSED IN HELA, SIGNAL = 1.3; EXPRESSED IN BT474, SIGNAL = 1.2; EXPRESSED IN FETAL LIVER, SIGNAL = 2.1; EXPRESSED IN LUNG, SIGNAL = 1.3; EXPRESSED IN ADULT LIVER, SIGNAL = 1.3; EXPRESSED IN HEART, SIGNAL = 1.1; EXPRESSED IN PLACENTA, SIGNAL = 1.2; EXPRESSED IN BRAIN, SIGNAL = 1.6; EXPRESSED IN BONE MARROW, SIGNAL = 1.3; EXPRESSED IN HBL100, SIGNAL = 1.2
tgtcctttaatgcctttgactgaagatccagatgaaagtatcagtggtttcttctgtgaagcactattgtgtgggagggctctggagtttgcagtttgggctgctacttacttaccttcactgggactttgagcaaatctcttcattgctctcagcctcagtttgctcatctgtaaaatgaaagtaaaaatacccatttgcctgccctcacagtttggaggatcagatgagaagtagcttttaaatcataatagaaataatgacagctttttggtctcttttagtgagtggtttctgcagagcttcatttggaaaggcctctgtagttggggaaagatggcccattcccagaactccttggagcttcccattaacatcaatgccacccagattaccactgcctatggccatcgggccctgcccaagctgaaggaggagctgcagtcagaggacctccagacgaggcagaaagccctcatg

SEQ ID NO: 1290 - DNA, 467 bp, Homo sapiens
  MAP TO AC000029.14; EXPRESSED IN LUNG, SIGNAL = 5.2; EXPRESSED IN HEART, SIGNAL = 2.8; EXPRESSED IN BT474, SIGNAL = 4.1; EXPRESSED IN BONE MARROW, SIGNAL = 5.5; EXPRESSED IN FETAL LIVER, SIGNAL = 4.4; EXPRESSED IN HELA, SIGNAL = 2.9; EXPRESSED IN ADULT LIVER, SIGNAL = 2.5; EXPRESSED IN PLACENTA, SIGNAL = 6.8; EXPRESSED IN BRAIN, SIGNAL = 4.1; EXPRESSED IN HBL100, SIGNAL = 4.1
gcagctcctcttaggcaatgaaagtgctgccaggcaccagcacagcagggctgtgatgccagtgtgcaccagggccacagagggaacagacgactggctacagagggaaacactgcatggcaggccccacaggactggcccaagagcagggctctgccccaccatggtgacagccctggcccactcaccagtcttggccgacactgaccagtactcggcctgcatctccctggccaggtgcacagcgtctgcttcggcctgctcacatgcggcccctgactgggagaaatggcccttgttgacccagcgtcccggctctcctgcagggaggcccagggggataggcagctgcctgcttcccactgtgctgcctccctccctccccatggctcctccaatgagggctgtaaggggaggcattttcccaagggccacccagaccaccagtgccactctgctcaccagaa

SEQ ID NO: 1291 - DNA, 461 bp, Homo sapiens
  MAP TO AC000029.14; EXPRESSED IN PLACENTA, SIGNAL = 4.6; EXPRESSED IN FETAL LIVER, SIGNAL = 3.6; EXPRESSED IN LUNG, SIGNAL = 4.7; EXPRESSED IN HELA, SIGNAL = 4.2; EXPRESSED IN BT474, SIGNAL = 7.2; EXPRESSED IN BONE MARROW, SIGNAL =   5; EXPRESSED IN HBL100, SIGNAL = 3.8; EXPRESSED IN ADULT LIVER, SIGNAL = 3.1; EXPRESSED IN BRAIN, SIGNAL = 5.1; EXPRESSED IN HEART, SIGNAL = 3.5
cccaggagagagagcacaactccaaggccacctcccacccattccccgcactgggttcagcctgtgccacccagacccggtgcttctgggcctcgcatttcccctctggcaggagagcaagaaaagatgtgactgtgctccaggaacagaaagtgccattcggacccgagataaagagacttagcacatttattcactcacagaggtgaatgaagggctcagggtttgaactcgatgacactgatggcgatccgggctgcccgctgtaaggcttcggccacttgaggcttttcgtaagtctccacctccatggcacggaaagtgggcacgtgcgtctgcagggccttgcggccctcgggggcctctgccagcatggtaagggccttggtggcattcaggcgcgctatggtcatgggggagtgcagcagctccaggagcaggccgatggcttgtgcctccag

SEQ ID NO: 1292 - DNA, 490 bp, Homo sapiens
  MAP TO AC000029.14; EXPRESSED IN HELA, SIGNAL = 2.7; EXPRESSED IN BRAIN, SIGNAL = 3.8; EXPRESSED IN HEART, SIGNAL = 2.6; EXPRESSED IN PLACENTA, SIGNAL =   4; EXPRESSED IN ADULT LIVER, SIGNAL = 4.1; EXPRESSED IN LUNG, SIGNAL = 4.7; EXPRESSED IN FETAL LIVER, SIGNAL = 4.3; EXPRESSED IN HBL100, SIGNAL = 2.4; EXPRESSED IN BONE MARROW, SIGNAL = 2.7; EXPRESSED IN BT474, SIGNAL = 2.5
caatctggtggtgtggtgtcggggagggtggaggaattgggttacagagcctgtgcagggatttggaaccagagggctcctcagaacgggagaaggagatggtctgtaaggacctgttcgactccagtgagggtatgagggacagtgagggaggaaagcagtcccacataggaggacgcccagagtggggaagcaggtcttggggagagctaggtttcagtccgagcgagaagggagaggatgttccaggaacaggctgagaccctggggcctccagaaggcttgaaagaaaggtttcagcagatggggtcagaaaaggagtgttcagggccatagggggagggtgacctgagcttcttgcagtccctgacgcaaacagggataaaggacataatgagattagtcctgaatctgaggcagagagtgatgaggaggctgtgagtttgcgggagggaggggagggcctggctgggagaaggctgggttctag

SEQ ID NO: 1293 - DNA, 471 bp, Homo sapiens
  MAP TO AB023055.1; EXPRESSED IN BT474, SIGNAL = 0.74; EXPRESSED IN FETAL LIVER, SIGNAL = 0.62; EXPRESSED IN PLACENTA, SIGNAL = 0.66; EXPRESSED IN ADULT LIVER, SIGNAL = 0.65; EXPRESSED IN HEART, SIGNAL = 2.6
ctgaaaagccttctggaattgtattagacagttccttgaaggcaagtggtaaaccataaattaataatttcgcttaaagctgagcacgtagtaggtgcttttagaagtttgttctcctctcctttcctttcttccaggtctgccctggcacattgctctggttgggaattccacacaaacttaataaaattaatggctgaataaagtgggctagaaggaccttcgaggccatcctctcaccctctgcctgtccctgtttcttaggaccaggtagaacatgagaagcaaaggatcctcacagaatttgaactcctgcatcaagtcctagaggaggagaagaatttcctgctatcacggatttactggctgggtcatgagggaacggaagcagggaaacactatgttgcctccactgagccacagttgaacgatctcaagaagctcattgattccctgaagaccaagcagaac

SEQ ID NO: 1294 - DNA, 483 bp, Homo sapiens
  MAP TO AB023055.1; EXPRESSED IN ADULT LIVER, SIGNAL = 0.7; EXPRESSED IN PLACENTA, SIGNAL = 1.6; EXPRESSED IN BONE MARROW, SIGNAL = 0.98; EXPRESSED IN LUNG, SIGNAL = 0.87; EXPRESSED IN HELA, SIGNAL = 0.87; EXPRESSED IN BRAIN, SIGNAL = 1.1; EXPRESSED IN BT474, SIGNAL = 0.72; EXPRESSED IN FETAL LIVER, SIGNAL = 0.91; EXPRESSED IN HEART, SIGNAL =  15
atcagctttgacatggaccctgcggtttccttgtgtttgttaaacttgaaattatttttcatacacctagaggaagcaagtgattcaataaccaattctgttttcctcttgacagctttcagtgaatatttgcacgggccccaaattaaaagggcaaggtgtcattgtcatggccaaaagccagaccactataaacttacaatttgagtctcctctgatttgccatcagtagagagagtttggcaggagtttggactgttttctcctacactgtcacaccgggtggctcactgctgcccattattaccaccaataattacagcagcatctccatcagctggtcattcttccaaccaacatccctcccagggtcatatagattccacactgaaagaatgagaaagaaaacaggacacagaacagactagagacttgtataatgtttgaagccactttgttccttcctgtcaaatcaccaccaaa

SEQ ID NO: 1295 - DNA, 480 bp, Homo sapiens
  MAP TO AB023055.1; EXPRESSED IN LUNG, SIGNAL = 1.1; EXPRESSED IN BRAIN, SIGNAL =   2; EXPRESSED IN HEART, SIGNAL = 1.7; EXPRESSED IN PLACENTA, SIGNAL = 1.9; EXPRESSED IN BT474, SIGNAL = 1.2; EXPRESSED IN HBL100, SIGNAL = 1.4; EXPRESSED IN FETAL LIVER, SIGNAL = 4.8; EXPRESSED IN HELA, SIGNAL = 1.5; EXPRESSED IN BONE MARROW, SIGNAL = 6.2; EXPRESSED IN ADULT LIVER, SIGNAL = 1.8
ttggcaggagaatagaaccctggctgccagagatgcaagtgtgtgacgatatgggtgctggtgcatatttagtatgtgcctgtgtccagccatgtgcatgtgtgggtgtgtgagtgtgtgacccagcccttcccccgtggccaagcagagagagtggccttgaggaagccatagcagcaggaccagcatggcctctgctgcctctgtgaccagcctggcagatgaagtcaactgccccatctgtcagggtaccctgagggagccggtcactatcgactgcggccacaacttctgccgggcctgccttacccgctactgtgagataccaggcccagacctggaggagtcccctacttgcccactctgcaaagaacccttccgtcctgggagcttccggcccaactggcagctggctaacgtggtggagaacattgagcgcctccagctggtgtccacactgggtttgggagaggaggatgt

SEQ ID NO: 1296 - DNA, 456 bp, Homo sapiens
  MAP TO AB023055.1; EXPRESSED IN BONE MARROW, SIGNAL = 0.81; EXPRESSED IN LUNG, SIGNAL = 1.5; EXPRESSED IN HELA, SIGNAL = 2.5; EXPRESSED IN ADULT LIVER, SIGNAL = 2.2; EXPRESSED IN BRAIN, SIGNAL = 0.89; EXPRESSED IN HEART, SIGNAL = 0.82; EXPRESSED IN PLACENTA, SIGNAL = 0.83; EXPRESSED IN BT474, SIGNAL = 3.3; EXPRESSED IN HBL100, SIGNAL = 2.3; EXPRESSED IN FETAL LIVER, SIGNAL = 1.2
gccacctttgcccctttactgtgcttgctcctgactctatgtcgcgtctccaaggagaagaagtcctcaccagtgaacggagacctctctgaactaagaataccatggccacgtcagccccactacggagcctggaagaggaggtgacctgctccatctgtcttgattacctgcgggaccctgtgaccattgactgtggccacgtcttctgccgcagctgcaccacagacgtccgccccatctcagggagccgccccgtctgcccactctgcaagaagccttttaagaaggagaacatccgacccgtgtggcaactggccagcctggtggagaacattgagcggctgaaggtggacaagggcaggcagccgggagaggtgacccgggagcagcaggatgcaaagttgtgcgagcgacaccgagagaagctgcactactactgtgaggacgacggga

SEQ ID NO: 1297 - DNA, 483 bp, Homo sapiens; identical to SEQ ID NO: 1294
  MAP TO AB023054.1; EXPRESSED IN BT474, SIGNAL = 2.1; EXPRESSED IN HELA, SIGNAL = 2.1; EXPRESSED IN ADULT LIVER, SIGNAL = 3.2; EXPRESSED IN PLACENTA, SIGNAL = 2.8; EXPRESSED IN BONE MARROW, SIGNAL = 2.6; EXPRESSED IN HBL100, SIGNAL = 1.8; EXPRESSED IN FETAL LIVER, SIGNAL = 2.2; EXPRESSED IN LUNG, SIGNAL = 2.2; EXPRESSED IN BRAIN, SIGNAL = 2.6; EXPRESSED IN HEART, SIGNAL = 2.3

SEQ ID NO: 1298 - DNA, 480 bp, Homo sapiens; identical to SEQ ID NO: 1295
  MAP TO AB023054.1; EXPRESSED IN HEART, SIGNAL = 1.1; EXPRESSED IN FETAL LIVER, SIGNAL = 4.9; EXPRESSED IN LUNG, SIGNAL = 0.8; EXPRESSED IN BRAIN, SIGNAL = 1.1; EXPRESSED IN PLACENTA, SIGNAL = 1.6; EXPRESSED IN BT474, SIGNAL =   1; EXPRESSED IN BONE MARROW, SIGNAL = 6.6; EXPRESSED IN HBL100, SIGNAL = 0.67; EXPRESSED IN HELA, SIGNAL = 0.68; EXPRESSED IN ADULT LIVER, SIGNAL = 0.9

SEQ ID NO: 1299 - DNA, 494 bp, Homo sapiens
  MAP TO AB023049.1; EXPRESSED IN FETAL LIVER, SIGNAL =  14; EXPRESSED IN LUNG, SIGNAL =  15; EXPRESSED IN PLACENTA, SIGNAL =  13; EXPRESSED IN BT474, SIGNAL =  12; EXPRESSED IN BONE MARROW, SIGNAL =  14; EXPRESSED IN HBL100, SIGNAL =  13; EXPRESSED IN ADULT LIVER, SIGNAL =  11; EXPRESSED IN BRAIN, SIGNAL =  15; EXPRESSED IN HEART, SIGNAL =  10; EXPRESSED IN HELA, SIGNAL =  13
gcatccttccagatttcttgcataaatactgcctttttcttttccctgaccaaattgtcagccagcctgttcccctttctttccaggcctcagccaatcagcgagctggcagggcaggtcgggtggctgcagggaagtgcttccgcctgtataccgcctgggcctatcagcacgagcttgaggaaaccacagtgcctgagatccagaggaccagcttgggcaatgtcgtgttgctgctcaagagcttaggtgattgggctacctgagagaggagggaggggctggagtcactgtcctttgaagggactctgttccatccatcacacctctttctagggatccatgacctaatgcactttgatttcctggaccctccaccatatgagacactgctgctggctttggagcagctgtatgctctgggagccctcaaccaccttggggagctcaccacggtgagtcggggggcagcatgggtggaggcaggatgatag

SEQ ID NO: 1300 - DNA, 463 bp, Homo sapiens
  MAP TO AB023049.1; EXPRESSED IN PLACENTA, SIGNAL = 4.4; EXPRESSED IN BT474, SIGNAL = 4.1; EXPRESSED IN HBL100, SIGNAL = 4.2; EXPRESSED IN LUNG, SIGNAL = 4.8; EXPRESSED IN HELA, SIGNAL = 4.2; EXPRESSED IN ADULT LIVER, SIGNAL = 3.9; EXPRESSED IN BRAIN, SIGNAL = 4.7; EXPRESSED IN BONE MARROW, SIGNAL = 4.7; EXPRESSED IN FETAL LIVER, SIGNAL = 3.5; EXPRESSED IN HEART, SIGNAL = 4.1
gctgcctaagaggactttccagctggattctgctgcaggaagatacgatgtggggtcagcatgtagcatccaaagaggcccagatttgagtatgtcattgttttggttgtgcattgcagagggaaggtagagggtgcatcctgaggttctcatgcctgcctgtcaggggatttttcccttgtagggattggtagagaaaggggttgctcctccagcaagatgaggattcgactgtcctttcccaactcaggtccctgagctgcggaagaaatctcgccgagagtacctggctaagcgggagcgagagaagcttgaggacctggaggcggagctggctgatgaggagttcctttttggggacgtggagctgagccggcacgagcggcaggagctcaaatataagcggcgagtgcgggatctcgcccgggagtaccgggcagctggggagcaggagaagctggag

SEQ ID NO: 1301 - DNA, 477 bp, Homo sapiens
  MAP TO AB023049.1; EXPRESSED IN BONE MARROW, SIGNAL = 5.7; EXPRESSED IN HBL100, SIGNAL = 9.3; EXPRESSED IN ADULT LIVER, SIGNAL = 2.9; EXPRESSED IN BRAIN, SIGNAL =   2; EXPRESSED IN PLACENTA, SIGNAL = 1.3; EXPRESSED IN BT474, SIGNAL = 7.2; EXPRESSED IN LUNG, SIGNAL = 1.5; EXPRESSED IN HELA, SIGNAL = 5.8; EXPRESSED IN FETAL LIVER, SIGNAL = 2.8; EXPRESSED IN HEART, SIGNAL = 1.1
tctgtcaagacccctgaaccagttgtccccacagcccctgagctccagccttccacctccacagaccagcctgtcacctctgagcccacatctcaggttactaggggaagaaaaagtagatcctctgtcaagacccctgaaacagttgtgcccacagcccttgagctccagccttccacctccaccgaccgacctgtcacctctgaacccacctctcaggctactaggggaagaaaaaatagatcctctgtcaagacccctgaaccagttgtccccacagcccctgagctccagccttccacctccacagaccagcctgtcacttctgagcccacatatcaggctactaggggaagaaaaaatagatcctctgtcaagacccctgaaccagttgtgcccacagcccctgagctccggccttccacctccacagaccgacctgtcacccccaagcccacatctcggaccactaggagc

SEQ ID NO: 1302 - DNA, 454 bp, Homo sapiens
  MAP TO AB023049.1; EXPRESSED IN BRAIN, SIGNAL = 5.9; EXPRESSED IN HEART, SIGNAL = 4.6; EXPRESSED IN BT474, SIGNAL = 4.3; EXPRESSED IN HBL100, SIGNAL =  10; EXPRESSED IN FETAL LIVER, SIGNAL = 4.7; EXPRESSED IN LUNG, SIGNAL = 6.5; EXPRESSED IN HELA, SIGNAL = 5.2; EXPRESSED IN PLACENTA, SIGNAL =   5; EXPRESSED IN BONE MARROW, SIGNAL = 9.5; EXPRESSED IN ADULT LIVER, SIGNAL = 5.1
tctcttccttcctccccttccaggtaccctagatgaaccatgggaggtcctggctacacagccattctgtctgagagagtctgaggactctgagacccagccttttgacacgcaccttgaggcctatggaccttgcctgtctccacctagggcaataccaggagaccaacatccagagagcccagttcacacagagccaatggggattcaaggcagagggaggcagactgtggataaagtcatgggtataccaaaagaaacagcagagagggtgggccctgagagagggccattggagagagaaactgagaaactgctaccagaaagacagacagatgtgacaggagaggaagaattaaccaaggggaaacaggacagagaacaaaaacagttgttagctagagacacccagagacaagaatctgacaaaaatggggaaagtgcaagtcctgaa

SEQ ID NO: 1303 - DNA, 463 bp, Homo sapiens
  MAP TO Z98884.11; EXPRESSED IN LUNG, SIGNAL = 5.6; EXPRESSED IN HELA, SIGNAL = 4.9; EXPRESSED IN BRAIN, SIGNAL =   3; EXPRESSED IN HEART, SIGNAL = 4.1; EXPRESSED IN PLACENTA, SIGNAL = 3.8; EXPRESSED IN BT474, SIGNAL = 4.1; EXPRESSED IN BONE MARROW, SIGNAL = 5.1; EXPRESSED IN HBL100, SIGNAL = 3.7; EXPRESSED IN FETAL LIVER, SIGNAL = 4.1; EXPRESSED IN ADULT LIVER, SIGNAL = 3.9
tgacactaccagaatggctgacaattttaaacttatgaactgtttatttctggaattttccatttactatttttggaccttggttgaccacaggtaactgaaactacagaaagcaaaaccatgaataaaggaggactactgtattttgtgataagaagattaaagtgtcttttcatgtgcccttactttctagcagtgtgttacaggcaacaatggcagtgagagcagtcctgctactaccggtgcactgtccacggggtcacctcccagggagaatccatcccatcctactgccagcgctctgtccacaggatcgcctcccatgaagaatccatcccatcctactgccagcgctctgtccacaggatcgcctcccatgaagaatccatcccatcctactgccagcacactgtccatgggattgcctcccagcaggactccatcccatcctactgccactgtt

SEQ ID NO: 1304 - DNA, 477 bp, Homo sapiens
  MAP TO AC007374.3; EXPRESSED IN BONE MARROW, SIGNAL = 2.8; EXPRESSED IN HBL100, SIGNAL = 1.8; EXPRESSED IN FETAL LIVER, SIGNAL = 1.9; EXPRESSED IN LUNG, SIGNAL = 2.1; EXPRESSED IN ADULT LIVER, SIGNAL = 1.3; EXPRESSED IN BRAIN, SIGNAL = 1.7; EXPRESSED IN PLACENTA, SIGNAL = 2.4; EXPRESSED IN HEART, SIGNAL = 1.7; EXPRESSED IN HELA, SIGNAL = 1.6; EXPRESSED IN BT474, SIGNAL = 2.1
caaaaatctgatcatggcactgccctgtgtccaggctgttagtacttcccattcctgtggagtcgtgctggcactgtgacccggaacacaggacaccgtggtctagcccgtaactccctccctcatgcagcctcattgctctggggttctgggaatttgcagtccccagcactcctgggacggtgtcttgcttttttgtttttgctctcactgccccctctgcctagaatcctggattcctactccatccctcacccatgcccactcatctttcaatcctgacccaagtatcaccatccctgtggagtttcccagatccttcccagtagctttgagcacttgcccttttccacctccaccgggtcctaaacaggttcctattggaacactcaagacactattgcacacacagtggcccttcctatctatggcttctacatctgcagactctacatctgcagacaaccttggatggaa

SEQ ID NO: 1305 - DNA, 449 bp, Homo sapiens
  MAP TO AC007374.3; EXPRESSED IN BT474, SIGNAL = 3.6; EXPRESSED IN BONE MARROW, SIGNAL =   2; EXPRESSED IN HBL100, SIGNAL =   1; EXPRESSED IN HELA, SIGNAL = 0.84; EXPRESSED IN ADULT LIVER, SIGNAL = 1.2; EXPRESSED IN BRAIN, SIGNAL = 1.6; EXPRESSED IN PLACENTA, SIGNAL = 1.1; EXPRESSED IN FETAL LIVER, SIGNAL = 1.2; EXPRESSED IN LUNG, SIGNAL = 1.4; EXPRESSED IN HEART, SIGNAL = 2.2
ggagtggacagatggcagagccagtgggatttctccagggctggactttctccatgatctcaaagatctcagccaggacaggcgccaggtgataggggaaggagtcagaacagtggggagggcagctcgttcctgagcaacagtcatgagtgaggttctgtgccaggcactgtgaaggtccctgaggctggacagagaggtcccggatgacagagacacctggctacagcacctggacactcccaagcttcaacccacagtaacccaagctttttacctggtctctgagatagcaccttgagggggcagcatccacttttctggctcactctggcccagcaggggtagaggaccagtgttgacctggcagaatctttcaaaagctggagcaagggacctgggcaggaccaccaggctggctggtcggagctctgggtatggtgggagaa

SEQ ID NO: 1306 - DNA, 472 bp, Homo sapiens
  MAP TO AC007374.3; EXPRESSED IN LUNG, SIGNAL = 1.2; EXPRESSED IN BRAIN, SIGNAL = 0.93; EXPRESSED IN HEART, SIGNAL = 1.8; EXPRESSED IN PLACENTA, SIGNAL = 1.1; EXPRESSED IN BT474, SIGNAL =   4; EXPRESSED IN BONE MARROW, SIGNAL = 2.3; EXPRESSED IN HBL100, SIGNAL = 1.2; EXPRESSED IN FETAL LIVER, SIGNAL = 1.2; EXPRESSED IN HELA, SIGNAL = 0.74; EXPRESSED IN ADULT LIVER, SIGNAL = 1.3
aggaaggatcccatgctttggagcctggtggacccaagttcaaattccagctcaccatttccacctgggaaaatcccctggatctctcagagcctcagtctcttcgtctatgaaatcaagctatgcagcttacaacggagttgttctgagctggaaggagaatgctctgtactgcagatgctgattccctccagcctccgtccacaaagcccgtttggggaaatggaccaagcccatctcactgcttaccttgctcaacagcatcttcaacaatcttctggtgcaagttccaggctctctggtcaacgattatggcgacctccttctccaaggcctgcaggaaggcaaccagagcaacagctcctggtgggccatctgtctcttctggaggctcatgattgaaatgtgtggggaacccagtggtgatgagcactgagcgggcatgggacagcgagagagaggccttcagcag

SEQ ID NO: 1307 - DNA, 455 bp, Homo sapiens
  MAP TO AC007374.3; EXPRESSED IN BRAIN, SIGNAL = 1.4; EXPRESSED IN HELA, SIGNAL = 1.2; EXPRESSED IN ADULT LIVER, SIGNAL = 1.3; EXPRESSED IN BT474, SIGNAL = 1.8; EXPRESSED IN HBL100, SIGNAL = 1.1; EXPRESSED IN FETAL LIVER, SIGNAL = 1.9; EXPRESSED IN HEART, SIGNAL = 1.6; EXPRESSED IN PLACENTA, SIGNAL = 0.96; EXPRESSED IN BONE MARROW, SIGNAL = 1.5; EXPRESSED IN LUNG, SIGNAL = 1.6
ctcccatcaccctctctcagcgacctgtactatcgcccccaaagctcttattactctttagaatcatctgatgtgtttatttgtcagggctcattctctatctcccagtcctagaatgggagctctgtggagcagggtcattgcagctataaccccagtgctcagaacactgcctggcacactgtaaatgtttgttgaatgactgaatgaaaggtcataggctgagcaccacctcccctccctgccctggtgccctatggactgactgcagagaagaagagcttctggcctggtcaggctccaagccaggtcgctcaccctgggtagccggccggactgggcggccatccgagtgctcaccagcaatgacggcaaagtcagcctccacgtcgcaggcgatgacatccccgtgccgtatgtgcctcctcacagcctccttgactttacccatccca

SEQ ID NO: 1308 - DNA, 463 bp, Homo sapiens
  MAP TO AC007374.3; EXPRESSED IN BONE MARROW, SIGNAL = 4.8; EXPRESSED IN LUNG, SIGNAL = 4.6; EXPRESSED IN HELA, SIGNAL = 3.4; EXPRESSED IN ADULT LIVER, SIGNAL = 3.8; EXPRESSED IN BRAIN, SIGNAL = 3.8; EXPRESSED IN PLACENTA, SIGNAL = 3.3; EXPRESSED IN BT474, SIGNAL =   7; EXPRESSED IN HBL100, SIGNAL = 3.7; EXPRESSED IN FETAL LIVER, SIGNAL = 4.6; EXPRESSED IN HEART, SIGNAL = 5.3
gttgcctgaagaagccagagtgaaggagggttgaaatcaacgcctttagagtcttaggaataaaagttaaaaagccccagagaaatgttgtcctttgtccacggcacctgcactaacccctcccagaaagtgggcatgcagtttcccaggccaggcgagtgttcgttgctcaccgaagaccagtgtttactagcaggattgtcgccagaagcagctgcattctccccggatgcagacctgcccgttggtagggactctgctcacacggaacatggacggttacacctgtgccgtggtgacgtccaccagcttctggatcatctcggcgtgggtgttgtggaagggcagcccatccacctccatgcccacgatgcccgagacgccactccggactttgtgctgcaccaagatgcccagcattttttcttcctggaaaaaaatagggcagaaatagaaggagtgg

SEQ ID NO: 1309 - DNA, 467 bp, Homo sapiens
  MAP TO AC007365.2; EXPRESSED IN PLACENTA, SIGNAL =  12; EXPRESSED IN BONE MARROW, SIGNAL =  58; EXPRESSED IN FETAL LIVER, SIGNAL =  40; EXPRESSED IN LUNG, SIGNAL =  18; EXPRESSED IN HEART, SIGNAL =  11; EXPRESSED IN BRAIN, SIGNAL =  16; EXPRESSED IN BT474, SIGNAL =  52; EXPRESSED IN HBL100, SIGNAL = 1.5e+02; EXPRESSED IN HELA, SIGNAL =  56; EXPRESSED IN ADULT LIVER, SIGNAL =  21
aaactggaattcggttgctgacccagccccagcctcggctttcttgttggcatcagggggcacagcactccgcctgtaggtatctctgtctgcttcccctcttgtgagtcttgcaggttgctcaccccctagacctttaggccgaggcctgccagcctctggatgactgtggtgtagggtggcaggcacaatctccgggggcagatgaaggtaccagtagaaacgtctccaggcaaactgttcctccatgcagcctcaggacttgagagactgcatggccttcatgacatgaaggttgggcaccttcttgtctgccagctctgggtgcttaggcatgtggacaaccttctttgccaccatgactcccttcttaaaaaggagttcataaacgggaatctggttcttcttaggcatcaacatctccatggctgtagggtctggggccagggctggaaagacctttagtt

SEQ ID NO: 1310 - DNA, 460 bp, Homo sapiens
  MAP TO AC007365.2; EXPRESSED IN HELA, SIGNAL = 3.9; EXPRESSED IN BRAIN, SIGNAL = 3.1; EXPRESSED IN BT474, SIGNAL = 3.4; EXPRESSED IN BONE MARROW, SIGNAL = 3.1; EXPRESSED IN PLACENTA, SIGNAL = 2.7; EXPRESSED IN HEART, SIGNAL =   3; EXPRESSED IN ADULT LIVER, SIGNAL = 2.9; EXPRESSED IN LUNG, SIGNAL = 4.5; EXPRESSED IN FETAL LIVER, SIGNAL =   4; EXPRESSED IN HBL100, SIGNAL = 3.3
atcacagcccttgggtaggtaagggtctagcttcccaaattaaacgcagtcagggtggcatttactgagtgttacgtgccaggcaatgtgctaagcccttgacattgtaccatctcagtaaagcctcataaccacccacgaggtcaatactgctattactcccatttgatagctgtgcacacagaagcttagagaagtcaagggcctgaactaaagtcacatggctacacagagctggggccaggactttggaacccaggctgctctctactcagttgaagctctctcagacctctagatcttcatcttcctccccagctccacctccttcagcctttcacagcccagcagcgtggagaaggcctggaagaggagggaaaagaagtccagtttgaggctatattttggctccttggtcaaaggtggggtgtggaaatgagggtggagagtctggggattt

SEQ ID NO: 1311 - DNA, 455 bp, Homo sapiens
  MAP TO AC007364.2; EXPRESSED IN HBL100, SIGNAL = 1.3; EXPRESSED IN BRAIN, SIGNAL = 1.2; EXPRESSED IN HEART, SIGNAL = 1.3; EXPRESSED IN ADULT LIVER, SIGNAL = 1.1; EXPRESSED IN HELA, SIGNAL = 1.3; EXPRESSED IN LUNG, SIGNAL = 1.5; EXPRESSED IN FETAL LIVER, SIGNAL = 1.3; EXPRESSED IN BONE MARROW, SIGNAL = 1.7; EXPRESSED IN BT474, SIGNAL = 1.3; EXPRESSED IN PLACENTA, SIGNAL = 1.6
gctataggctacttctcctgggttgaaggatgcttggcattttatgtgcacagtgtttgcagactttatacccaaagtttttgtcttctgagtagccaacattaggactgctgaagacagaagggagaccaaggtgatcccaactagggagggagtaggggttagagtgtggagatgggcgagaatgtgccctgtgaaggcacagaacagggaagatgagagaaaaccaggaaacatgcctgagtgaggacccactcctaccgattttagtgagagatgcacttcgtgacctgacaatgtctctagctttggacctgcagggattcattcccagtccctcggtggcagcaaccatgtccaaatagctatcatcttttatgaagactacatttctatctgccattttgtccttctattatcctgtcccccacctaacagccaacagggagctttta

SEQ ID NO: 1312 - DNA, 442 bp, Homo sapiens
  MAP TO AC007359.2; EXPRESSED IN ADULT LIVER, SIGNAL = 5.1; EXPRESSED IN BRAIN, SIGNAL = 4.6; EXPRESSED IN BONE MARROW, SIGNAL = 4.2; EXPRESSED IN HELA, SIGNAL = 4.4; EXPRESSED IN PLACENTA, SIGNAL = 3.2; EXPRESSED IN BT474, SIGNAL = 2.8; EXPRESSED IN HBL100, SIGNAL = 3.3; EXPRESSED IN FETAL LIVER, SIGNAL = 3.9; EXPRESSED IN LUNG, SIGNAL = 5.7; EXPRESSED IN HEART, SIGNAL = 5.2
aagcaagacactgttgcctgtatctcatcctgcaggaatcatgcaggcctctgatagaagtgagaggacaagagttttcttgttggtgtctgtgacaggaatttatggttttaaacctatcaaaatgtcccactcattaaattgtgacagtgtttagaagaaaacactaaacaatggattcccatgatgatcattctccacaaactgggaaacctttagtatttgtgctccttttctgtctagaagagtggcattttttttttttttttgcaggcggatgttatttggatgccagcacatgttggcatgcctcccagtccactgcaggctcatgattcacagaaaaataaagaacacagagcgatgcagcccaaggtaagccacatagacaggccatcaacgggttgggagacaagaaagaaagaaagaaagaaagaaagaa

SEQ ID NO: 1313 - DNA, 420 bp, Homo sapiens
  MAP TO AC007359.2; EXPRESSED IN BT474, SIGNAL = 0.96; EXPRESSED IN BONE MARROW, SIGNAL = 1.2; EXPRESSED IN LUNG, SIGNAL = 0.93; EXPRESSED IN HELA, SIGNAL = 0.84; EXPRESSED IN ADULT LIVER, SIGNAL = 1.1; EXPRESSED IN PLACENTA, SIGNAL = 1.4; EXPRESSED IN FETAL LIVER, SIGNAL = 0.92; EXPRESSED IN HEART, SIGNAL = 1.4; EXPRESSED IN HBL100, SIGNAL = 1.1; EXPRESSED IN BRAIN, SIGNAL = 0.97
ggtgacaggagcataggtaattgcaaaacaaaacaaaaaaaggaaattatttaaatagcaagtgcttaattgtgttaccataccataaacagagaatgtgtccccatgtacaaatgttctcatttccccagcaaatatcaaaaacaatgtaatgataattttaaagcttataatctttttaatttatttataaaaaggtaagtaaataatcattaacatcatcatggtaattatgccataactaacttaagcaatactttcttatcaaagcttaacatatttatatatagcaatcctttggtatctgtaggggattggctccagaaacatctcaaataccaaaatgtatgtctgctcaagcttctgctttataatgatgcagtaggtaagtataatgcacacccatcctcctgtgtagtt

SEQ ID NO: 1314 - DNA, 473 bp, Homo sapiens
  MAP TO AC007344.2; EXPRESSED IN BT474, SIGNAL = 1.2; EXPRESSED IN HBL100, SIGNAL = 1.5; EXPRESSED IN FETAL LIVER, SIGNAL =   1; EXPRESSED IN HELA, SIGNAL = 1.4; EXPRESSED IN PLACENTA, SIGNAL = 1.4; EXPRESSED IN BONE MARROW, SIGNAL = 1.4; EXPRESSED IN LUNG, SIGNAL = 1.2; EXPRESSED IN ADULT LIVER, SIGNAL = 1.8; EXPRESSED IN BRAIN, SIGNAL = 1.1; EXPRESSED IN HEART, SIGNAL = 1.3
cagtgcagagattagggatgccaataccccacacaatcaagaatctgcctataacttttgactctgcccaaacttaactactgtccaaaaatgttagcatactgttgatcagaagccttactgatagcagagttggttaacacatattttgtatgttataaatattatataccactgtatccttacaacaaaataagctagaggaaagaaaacgttattaagaaaatcacaaggaagagaaaatatatttactattcattaagtggaagtagatcatcatgaaggtcttgatcttcatcatcttcacgttgagcaggttgaggaggaggaggaggaggaggaagtggagggttggtcttgctgtctcaggggtggcagaggcagaagaaatttcacttataagcagacctgtgcagttcaaacccatactgttcaaaggtcaactttatatccaaaatgttatcacttccaca

SEQ ID NO: 1315 - DNA, 482 bp, Homo sapiens
  MAP TO AC007325.11; EXPRESSED IN PLACENTA, SIGNAL = 1.4; EXPRESSED IN BT474, SIGNAL = 2.1; EXPRESSED IN LUNG, SIGNAL = 1.2; EXPRESSED IN HELA, SIGNAL = 2.1; EXPRESSED IN HEART, SIGNAL = 1.4; EXPRESSED IN FETAL LIVER, SIGNAL =   1; EXPRESSED IN BONE MARROW, SIGNAL = 2.2; EXPRESSED IN HBL100, SIGNAL = 1.2; EXPRESSED IN ADULT LIVER, SIGNAL = 1.3; EXPRESSED IN BRAIN, SIGNAL = 1.8
tctgacgtattccagtcacattgtaactggaaacgatgttctaagctcatgagtctgtctcccatccaaatgacagtttgtctaagatcattaatttgatttgccaatttttgatcaatactagattgtgaattccacaatcttgtagaatttttttgccaatcattaacaaagtttactgactgaacagaagagtgcaatgcaactcctgctacagcacccgtagctgtgactgcaattaatcccataatcactgcaattaaagtaaaaatgaatcttttggatctatttaaaacaccttttaatacttcagtcaaaatatggacggatggtgaggcctcccacggtcggtccatggacacaaggatccacacgccctctcttgctctcaccagcagaatacggtgttgccaattaaaagttgaatcaatgcaagtaagcaatctacagttttcacaggttatagtctgggagtctggttt

SEQ ID NO: 1316 - DNA, 367 bp, Homo sapiens
  MAP TO AC007250.2; EXPRESSED IN BONE MARROW, SIGNAL = 1.2; EXPRESSED IN LUNG, SIGNAL = 1.2; EXPRESSED IN BRAIN, SIGNAL = 0.95; EXPRESSED IN ADULT LIVER, SIGNAL = 1.5; EXPRESSED IN BT474, SIGNAL =   1; EXPRESSED IN FETAL LIVER, SIGNAL = 1.5; EXPRESSED IN PLACENTA, SIGNAL = 1.2; EXPRESSED IN HELA, SIGNAL =   1; EXPRESSED IN HBL100, SIGNAL = 1.2; EXPRESSED IN HEART, SIGNAL = 0.96
gaatttgaagcattttgggctacaaataatttaggagagttcttagaggagatgaatgttgggataagctttgaaggaatatacagagcctttaaagggaaggaatggtgaaggcaaggttgtagcaatagaaatgtgcaatttattttttgactttggagtagatcagtggctcacataaggggattaacatattagggctaaacagaggggtcttgactacgaggctaatgattctctatatgcaggtgatagggactcattgaatatttttgagcaagggattgatatgattaaaaatgtatttaggaagattagacacagaaggcagaatggattggtgtacagagacgaagtaaagacacgc

SEQ ID NO: 1317 - DNA, 468 bp, Homo sapiens
  MAP TO AC007308.13; EXPRESSED IN FETAL LIVER, SIGNAL =  10; EXPRESSED IN HELA, SIGNAL =  10; EXPRESSED IN PLACENTA, SIGNAL =  11; EXPRESSED IN HBL100, SIGNAL = 8.4; EXPRESSED IN HEART, SIGNAL =  11; EXPRESSED IN BONE MARROW, SIGNAL = 9.9; EXPRESSED IN LUNG, SIGNAL =  19; EXPRESSED IN BRAIN, SIGNAL =  12; EXPRESSED IN BT474, SIGNAL = 8.1; EXPRESSED IN ADULT LIVER, SIGNAL = 9.5
actccagccggtacacagagaggaggtaggtggacatggcgaagtccagcttgttgatgagtgcggacacctcgggaggggggtccagcaggttgatgatagtgctgcggagctcactcagctcagcctggagggagagaaacatccgagggctcatggggcatcccccaggacaaacaggtcccagtggctggcaacatgtgttaataatgacagtgaaaagatctgccctaattggcacagagagcatggtaaaaatgagatgtgaatccttacgggggtgaccgtgtcattcttcatggctgagttatactggaggacggaccgcagtggctccttgctgggaaaggtgagcaagggggacttagtggctatttcacagaccccctcgtaccattcttctggccagagtcctgcaataaagtgaacataaatgaggaaatcaccttggtcggaaagcactgcagt

SEQ ID NO: 1318 - DNA, 460 bp, Homo sapiens
  MAP TO AC007383.2; EXPRESSED IN PLACENTA, SIGNAL = 2.7; EXPRESSED IN HBL100, SIGNAL = 3.8; EXPRESSED IN HELA, SIGNAL = 4.6; EXPRESSED IN HEART, SIGNAL = 9.8; EXPRESSED IN LUNG, SIGNAL = 1.3; EXPRESSED IN BONE MARROW, SIGNAL = 1.7; EXPRESSED IN BRAIN, SIGNAL = 4.2; EXPRESSED IN ADULT LIVER, SIGNAL = 2.4; EXPRESSED IN BT474, SIGNAL = 4.1; EXPRESSED IN FETAL LIVER, SIGNAL = 2.1
ccttcaaagattaagaattgcaaacactatcaatcacaaattggaattataacaccaaatgaggtgatctgattacttcttacctttcgtatttggcagagtcatgttgacaattacatacctgtcatgtagaagtcttttatagttagctgaggtggaacaagtgggtcagcaagaagctgctggttcactagctgcacaaaaaagaagagatcaacaataatatggaaaactagtactgttacaccagtagatacaacattatgaaaactgctcataggcgagctgttacctttgagagctcatttgcttgctggaagtaattagccccttcaatatcatcatatcgaacaagattaggagagacttcttccaatctgttccttacttgatccagagtatcatatggaagagtcattccagcaatctacaacatgtcaggtccccaaaaacaacaaaa

SEQ ID NO: 1319 - DNA, 462 bp, Homo sapiens
  MAP TO AC007638.1; EXPRESSED IN BONE MARROW, SIGNAL = 1.9; EXPRESSED IN BRAIN, SIGNAL = 2.4; EXPRESSED IN BT474, SIGNAL = 2.1; EXPRESSED IN FETAL LIVER, SIGNAL = 2.1; EXPRESSED IN ADULT LIVER, SIGNAL = 1.7; EXPRESSED IN HELA, SIGNAL =  95; EXPRESSED IN PLACENTA, SIGNAL = 1.5; EXPRESSED IN HBL100, SIGNAL = 1.7; EXPRESSED IN HEART, SIGNAL = 1.9; EXPRESSED IN LUNG, SIGNAL = 2.1
tcctgggcataaacctgaacatgtgtatggccttctagattcccagaaataccctggaacttttaaaagtcctttgtgggcagtttatgtgtcaggttttcctttaaagacttctgtcagcctcttgtttttcccaaatgttttctctgcttcaggcagatgtaatgtttaacaattaccggtgattgttgatttcaacaaacgttccaggccatttacattgagccagctctgagtctggttacataaagacaagctctgagagtagaggtttccagggagttaccagacaggtcaaatagtgacaattctctaaagatgaggcttttagggtgctccaaacatgttctgctttctctagtggctgctaggatgctgattttcaccactaccatggttgtgaggctgctggttttcaaggctcttgtgatgctgaggagagggggatgggagtaggacaag

SEQ ID NO: 1320 - DNA, 475 bp, Homo sapiens
  MAP TO AC007695.12; EXPRESSED IN HBL100, SIGNAL =  25; EXPRESSED IN HEART, SIGNAL =  10; EXPRESSED IN LUNG, SIGNAL = 6.4; EXPRESSED IN BRAIN, SIGNAL =  10; EXPRESSED IN ADULT LIVER, SIGNAL = 5.6; EXPRESSED IN PLACENTA, SIGNAL =  12; EXPRESSED IN HELA, SIGNAL =  18; EXPRESSED IN BONE MARROW, SIGNAL =  14; EXPRESSED IN BT474, SIGNAL =  33; EXPRESSED IN FETAL LIVER, SIGNAL =  10
ctgagaacagaggaaacgggaagattccaactgtctcttgcaatggtgacatgaactctttaaaaaaaaaaaaaccaaaaaacaagttctgggcaagttttattaaacaaaattttgtatggtttacttttcaccagtcttctctgccatgcttctaatgaactcagaatcaccgagatcaatgatagacaatgtacagactctagtattttctgcatgctgtgcctaattcaatattcttgccattgtagtggcaataatatcggacaccagttttggccaatagggcctagtactctattttggatttcctcaaagctgggtagttgttagcgaggatgatcaatttcgttttgccttgtctgatcatcttcagggtcagcttgtaacccagcatgtactttccacttttcataaggagctggagtctacagttgattcagtctagcaactttctccatcctctttatggcca

SEQ ID NO: 1321 - DNA, 464 bp, Homo sapiens
  MAP TO AC007279.3; EXPRESSED IN FETAL LIVER, SIGNAL = 1.1; EXPRESSED IN BT474, SIGNAL = 1.2; EXPRESSED IN HBL100, SIGNAL = 1.1; EXPRESSED IN HEART, SIGNAL = 1.6; EXPRESSED IN BRAIN, SIGNAL = 1.5
agcctcaaaatggaaacaatgtaggttttcagtgagatttttaattcatgaaaagaattcacagtttcctctaagacaaaattatagataatgtcctcatatcaactccatatgtaaagagcagagtaatattataacttctttaaaacttcccatctctacttttgactttttgaaactgaagctctaccttggattctgtattcaattttaatatgaaaaatgctccttttctcccactccattattttgtagttatgtagtaacgagttctggattattgcttcctgtgctgctacctcggctctacccaccgctgtttatgctttatgctttggataatgatcgcgaggaagacatttactgggaatgtgtccttcgactaaataagcagccagatattgctctcctgggctttcttggggtgcagaggtaagtgtagtagttacaagcgcaaccaaatg

SEQ ID NO: 1322 - DNA, 476 bp, Homo sapiens
  MAP TO AC007375.4; EXPRESSED IN LUNG, SIGNAL = 2.7; EXPRESSED IN BONE MARROW, SIGNAL = 1.9; EXPRESSED IN BRAIN, SIGNAL = 2.4; EXPRESSED IN FETAL LIVER, SIGNAL = 1.9; EXPRESSED IN BT474, SIGNAL = 2.9; EXPRESSED IN ADULT LIVER, SIGNAL = 1.9; EXPRESSED IN HELA, SIGNAL = 1.9; EXPRESSED IN PLACENTA, SIGNAL = 2.1; EXPRESSED IN HBL100, SIGNAL = 1.9; EXPRESSED IN HEART, SIGNAL = 3.5
ccctgagatcaggtactgggtctctttcatctttgcattcctggttcttggcatcatgcctggcatagagtcagcatcgatgaatgtttttgaagaatgagtggaggagctgggccagtaccatgaatagagaggggaatgagagcagaagcagaggccaacaccaggagcaactgagctactcccagacacctcccgcccccaccagcaggctcactgtggctggtgagcaggcccaaggttctgcctcatctttaacgtgtctcagataagttaggagaaatgcctcctctctccctgcccatccttccttttcttcctggcaggaggggctgcttcccaagcatccccgagggcatgctgagaggcagggcaggagggagatgagggggaatctcatgagcaatgaggccagttggaggacactgggtacagacaaaagccacagtatttggaggaccaaatgcatggacagt

SEQ ID NO: 1323 - DNA, 381 bp, Homo sapiens
  MAP TO AC007378.2; EXPRESSED IN BT474, SIGNAL = 1.2; EXPRESSED IN PLACENTA, SIGNAL = 9.7; EXPRESSED IN HELA, SIGNAL = 2.3; EXPRESSED IN HBL100, SIGNAL =   3; EXPRESSED IN HEART, SIGNAL = 1.7; EXPRESSED IN LUNG, SIGNAL = 1.3; EXPRESSED IN BRAIN, SIGNAL = 0.99; EXPRESSED IN ADULT LIVER, SIGNAL = 1.5
tttttatttccaacctttgtgcatatagctatttaatgcctacatggatggctattatttcacttttttcagttattatgaagagattgggtttcattcatttgtaaagtttcagccagactgcctttcacaaattgatttgtcaaaattgaatgttaatcttgacatcccagtgcgtttttgcccgcgaacaggcctttgaatgaagctgcaaacacacattatctggttgttaattgttttacagatgagaactggactgatgaccaactgcttggttttaaaccatgcaatgaaaaccttattgctggctgcaatataatcaatgggaaatgtgaatgtaacaccattcgaacctgcagcaatccctttgagtttcca

SEQ ID NO: 1324 - DNA, 470 bp, Homo sapiens
  MAP TO AC007536.9; EXPRESSED IN BONE MARROW, SIGNAL =  13; EXPRESSED IN BRAIN, SIGNAL =   5; EXPRESSED IN HBL100, SIGNAL = 4.5; EXPRESSED IN HELA, SIGNAL = 7.3; EXPRESSED IN HEART, SIGNAL = 5.5; EXPRESSED IN LUNG, SIGNAL = 9.4; EXPRESSED IN ADULT LIVER, SIGNAL = 4.1; EXPRESSED IN FETAL LIVER, SIGNAL = 6.1; EXPRESSED IN BT474, SIGNAL = 4.2; EXPRESSED IN PLACENTA, SIGNAL = 6.4
gcacatgcttcaagtccaagcgatttgagaggctgaggtgggaggattgcttatgcccaggagatcgatgatgcagtgagctattgtagtgccactgccctccagcatgggcaacagagtaagaccctgtctcaaaaaataaaaataaaaataaatccaagccttttgactccacagccactctttgtattgtacgtcagggacaggaggagcttgccgttaattgcttctgggaacctagatactaggttacactgtctttaaatttaattttctctgttccttgctcttacaggataactataatgggatgagctttgtctgtattggggctatcttggtctttgtagccttctttgaaattggaccaggccccattccctggtttattgtggccgaactcttcagccagggcccccgcccagctgcgatggcagtggccggctgctccaactggacctccaacttcc

SEQ ID NO: 1325 - DNA, 461 bp, Homo sapiens
  MAP TO AC007678.1; EXPRESSED IN PLACENTA, SIGNAL = 4.9; EXPRESSED IN BRAIN, SIGNAL = 2.9; EXPRESSED IN FETAL LIVER, SIGNAL = 9.8; EXPRESSED IN ADULT LIVER, SIGNAL = 2.4; EXPRESSED IN HEART, SIGNAL = 3.4; EXPRESSED IN HELA, SIGNAL = 3.7; EXPRESSED IN HBL100, SIGNAL = 3.5; EXPRESSED IN LUNG, SIGNAL = 4.7; EXPRESSED IN BONE MARROW, SIGNAL = 2.6; EXPRESSED IN BT474, SIGNAL = 3.1
gtgcacgcgatttcctaaagttgaagatgagaataaagaggggcaggttgaagggttgtgattgaaaaaatggaaggggaagcttttccggcttgatcttaagcaaacactagagagcagtttcgaagacgctgatagcagactttaagaaggcattcggattggccgagatttagaagaaaagaatcaacacagagaagcccaacgaacttcaagagcctgcacactcactgattgcatgtgctcctttctcttccccatttactgttgcctctccattctttggtggattttgctgggaaagggcatctggtgtcatggttgccacctttgccatggctgctgcctctgcggctgctgcactggcttgttgctgagagagcttctctccgaacttctgctgctgcgtctgcaccacgtcaggagtcacggcgtctgtcagggacagggactctatgggt

SEQ ID NO: 1326 - DNA, 383 bp, Homo sapiens
  MAP TO AC007718.1; EXPRESSED IN ADULT LIVER, SIGNAL = 0.91; EXPRESSED IN BT474, SIGNAL =   2; EXPRESSED IN HBL100, SIGNAL = 1.1; EXPRESSED IN PLACENTA, SIGNAL = 0.98; EXPRESSED IN HELA, SIGNAL = 1.1; EXPRESSED IN HEART, SIGNAL = 1.1; EXPRESSED IN LUNG, SIGNAL = 1.4
  unsure 95
  unsure 114
  unsure 185
aacaatagtgagagagaattgcagtcttaactataatttattagggtatgactatattacctaagatgtagttaggatgaaaatgaatgcaaacnagaatgtataggaggatgntttaataaaatcatatgactatatttgatgttaacatataaactatgtacagcatgatgattctccatttncaactcacaaagagaggatgattaaagaagatgaaaatatgcatcttcaccatttgatagtgcattaacctaaagtcctcattcttttattttagctctcagcagataataatcatcagttctcagtttcaaactcttgttccctggaaaaaaaacgcccattaaagaaaaatgaaaacgccttgaagcagaatagct

SEQ ID NO: 1327 - DNA, 487 bp, Homo sapiens
  MAP TO AC008123.9; EXPRESSED IN BT474, SIGNAL = 2.8; EXPRESSED IN HBL100, SIGNAL = 2.5; EXPRESSED IN BRAIN, SIGNAL = 2.8; EXPRESSED IN LUNG, SIGNAL = 3.7; EXPRESSED IN BONE MARROW, SIGNAL = 2.6; EXPRESSED IN ADULT LIVER, SIGNAL = 2.5; EXPRESSED IN FETAL LIVER, SIGNAL = 2.7; EXPRESSED IN PLACENTA, SIGNAL = 2.9; EXPRESSED IN HEART, SIGNAL =   2; EXPRESSED IN HELA, SIGNAL = 2.4
gaggaggccatgcacatcctgcttgaagtacatagactaacaatttttcccaaatcctcctagaggcaggcctcatctttatcttcaactgtgcaagacaggtttgtttgggaaagatctagatcttccttcttttccctgcctcctcccccttcccatccaccccttgaatccaagcctctggcctctcctgagctcccagttctcaagcctggggccatatctgcttcagcctcccacagtgggggatcctgagggatctgtccatcccacgagcacatggttccccacttcccatggagacaaacccccagacccacctatgcacaccacgtccatgaagccatacatcccgtagcagatctggaagagaaggtcttggcgctgccatcttgccgaggggctgaaagttgaccagatgagccaagaaatactggcgatgaggaagagggagcccaggatggcggctgcaacctgaaccttctca

SEQ ID NO: 1328 - DNA, 452 bp, Homo sapiens
  MAP TO AC009491.2; EXPRESSED IN BT474, SIGNAL = 1.1; EXPRESSED IN PLACENTA, SIGNAL = 1.9; EXPRESSED IN BONE MARROW, SIGNAL = 1.7; EXPRESSED IN ADULT LIVER, SIGNAL = 1.3; EXPRESSED IN FETAL LIVER, SIGNAL = 1.2; EXPRESSED IN HEART, SIGNAL = 1.2; EXPRESSED IN HELA, SIGNAL = 1.3; EXPRESSED IN HBL100, SIGNAL = 1.4; EXPRESSED IN BRAIN, SIGNAL = 1.3
aggagtgtcaatgcctctgggggttaagaaaaagacaagcaaatacgtgcacatctgatattaagatatttaggtcatgacatgtaggtctgtgtagcctggctataaataataagggagttaatgcaccatccctgggctcaaagtgactatttcaccttgggcaattcacctgtactttttgagcctcaaattgcacatctcgaaaatgaaagctggaaagaaggttgttatgaagattaaattagataatgtacataatgggcttacaaaagttaatgacgccttgtcagaaatcatcagcaaaatgtactattatcactatcatcatcatcatcatcatcatcattatcatcatcatcatcatcatcatcatttagaggtatactatgagaaaaatggtttggagccaaattgtaactgactctgaaataattgataaagaatttgcc

SEQ ID NO: 1329 - DNA, 474 bp, Homo sapiens
  MAP TO AC008281.2; EXPRESSED IN BRAIN, SIGNAL = 4.7; EXPRESSED IN BT474, SIGNAL =   5; EXPRESSED IN BONE MARROW, SIGNAL = 4.8; EXPRESSED IN LUNG, SIGNAL = 8.4; EXPRESSED IN ADULT LIVER, SIGNAL = 5.1; EXPRESSED IN FETAL LIVER, SIGNAL = 4.4; EXPRESSED IN PLACENTA, SIGNAL = 5.3; EXPRESSED IN HEART, SIGNAL = 6.6; EXPRESSED IN HELA, SIGNAL = 4.7; EXPRESSED IN HBL100, SIGNAL = 4.3
ttctttataaattaaccaggctcagatattctgttgtagcggcaacaaaatgaatgaggacagaaatcagtaccaaataagtgggggtgttgctacaacaaaaacctaaaattatgaaagtggctttggaactgggtagtgggtagaggctgagactgttttcaagtgaatgctggaaaaagcctgtacggttgtgaacagagcattaacggcaattctagtgagggcttgaagagaggtgaaggctctgtcttcttagtgatcacctaaatggttgtgaccagaatgctcatagaaacatgggcagtaacgactatcctgatgaagcctcagatggaagtgaggaacaagttattggaaactggaggaaaggccacccttgttatgatggcagagaacttggctgaagtatgtccaaatcctaggacttttaaaaaagcaatgaactaggatatttggatataagcagtgaac

SEQ ID NO: 1330 - DNA, 469 bp, Homo sapiens
  MAP TO AC009506.2; EXPRESSED IN HBL100, SIGNAL = 2.1; EXPRESSED IN HELA, SIGNAL = 1.5; EXPRESSED IN PLACENTA, SIGNAL = 1.7; EXPRESSED IN HEART, SIGNAL = 1.7; EXPRESSED IN BONE MARROW, SIGNAL = 1.7; EXPRESSED IN LUNG, SIGNAL = 1.5; EXPRESSED IN BRAIN, SIGNAL = 1.4; EXPRESSED IN BT474, SIGNAL = 2.6; EXPRESSED IN ADULT LIVER, SIGNAL = 1.2; EXPRESSED IN FETAL LIVER, SIGNAL = 1.8
ttccctcttgggcctattgttttaaaagacttcattaatttattaattaaaatgataaaacaaattaagatatcaagatttaactctcaaagacaattcctaggaagtatagaataaccagtgctatcccagcgtaaaatcctgaaaaagcaaaaagactaggtgtttaacctagcctttattcaacaggtcaatgcaagtcatgagaatattttattcagtgctcaataaaatattatgcaaattattaaaagaatggcattctaaaattgagttaaaaaagggtattcaccacatgggttgattgtagagctaagtgaagcaactccagtggaaaggccaccttttgaaactactgaagccacagaaggtgtcgaagatgaagttggtgtagtagaggaggctgctgaggatggtaaccgttctccagactccatatctatgagaagggaaaatgttaattctcagt

SEQ ID NO: 1331 - DNA, 467 bp, Homo sapiens
  MAP TO AC008119.6; EXPRESSED IN BRAIN, SIGNAL = 1.6; EXPRESSED IN ADULT LIVER, SIGNAL = 1.2; EXPRESSED IN PLACENTA, SIGNAL = 1.9; EXPRESSED IN LUNG, SIGNAL = 1.4; EXPRESSED IN BONE MARROW, SIGNAL = 1.2; EXPRESSED IN FETAL LIVER, SIGNAL = 1.8; EXPRESSED IN BT474, SIGNAL = 1.5; EXPRESSED IN HEART, SIGNAL = 1.6; EXPRESSED IN HELA, SIGNAL = 1.7; EXPRESSED IN HBL100, SIGNAL = 1.9
ttgtaaaactataaagaaaagcaagggaattatcatcacaaaagtcaggaaagtgattacctctcgggagagggaggaggaggcaatcggagaggggcacataggagacttctaaggtactggcaatgttctatttcttaacctgggtggtaggtacatggatgttcactttattattagtatgtaaactgtacgtatacatttatacactctatatatttcagaataaaacattttaaagatactgtttaactcgcaactatccatcagggaaaggtttgtagagagacgtttactataaaagaagccaacacttaccagtgcttcttcatagggtttatatttctccagctgctgtagtgctttgttatagttctgaattactgactctggtattgggtcttctgaccattcttcatactctgcaaatgtggcctccatatctattgaaagatggattcagcccc

SEQ ID NO: 1332 - DNA, 492 bp, Homo sapiens
  MAP TO AC009487.1; EXPRESSED IN BT474, SIGNAL = 2.9; EXPRESSED IN FETAL LIVER, SIGNAL = 1.5; EXPRESSED IN HELA, SIGNAL = 2.6; EXPRESSED IN PLACENTA, SIGNAL = 1.5; EXPRESSED IN HBL100, SIGNAL = 2.5; EXPRESSED IN HEART, SIGNAL = 2.5; EXPRESSED IN BONE MARROW, SIGNAL = 0.93; EXPRESSED IN BRAIN, SIGNAL = 1.9
gctgaaagggtaaaaactggctctgagaaactgtggtaacaaggtgaaaaactgaaagccttatctaccactgctaatgtgcatctcttaatgatagcactcctttgtcacacatattcatttccatgttttctggataatatggtgtacaatttcagggtttctaatggtgctttttcacacctgtgtgtttttcatctcttcttaatttataccccgttagtgtgttgtttcttttcatatcataaatgtattacttgttctgttctgagcatctgaatgccctctttgtttcaggccggagatggttgttggttggtatcacagtcaccctggctttggttgttggctttctggtgtggatatcaacactcagcagagctttgaagccttgtcggagagagctgtggcagtggttgtggatcccattcagagtgtaaaaggaaaggtagagtagattctatctttattgccatctactgccacattctg

SEQ ID NO: 1333 - DNA, 451 bp, Homo sapiens
  MAP TO AC009492.1; EXPRESSED IN HBL100, SIGNAL = 0.96; EXPRESSED IN HEART, SIGNAL = 5.5; EXPRESSED IN BONE MARROW, SIGNAL =   1; EXPRESSED IN LUNG, SIGNAL = 1.4; EXPRESSED IN BRAIN, SIGNAL = 1.2; EXPRESSED IN ADULT LIVER, SIGNAL = 1.1; EXPRESSED IN BT474, SIGNAL = 1.1; EXPRESSED IN FETAL LIVER, SIGNAL = 1.1; EXPRESSED IN PLACENTA, SIGNAL = 1.2; EXPRESSED IN HELA, SIGNAL = 0.98
ttctgcatgcctcttacagctttttgttcctttttactttcttcccctctctgtacctcagtttggagacagcaaaatacttggatcaaaaacaccttaactgttgctaagtccatttaatgagttcctaatttcaaacattgtacattttctttccagaatatatgtttaatgctgtttttaaaaatattcaaattgctaactaaatttatccatactttaatctcttctgtccactttttcctttgttttcttgaaaatattaattgtacttactttagaatcctgatcttctaactccaatatctgaattatttctgggtctgcctctattgtagaatgtacattgcttataaaagaaccacagatgctcccgacgagatgaacttctataccaagagtggtcccctttgttctgttaggcagaaagggaaagggtcagtcattaatt

SEQ ID NO: 1334 - DNA, 489 bp, Homo sapiens
  MAP TO AC009188.2; EXPRESSED IN PLACENTA, SIGNAL = 0.98; EXPRESSED IN HBL100, SIGNAL = 1.1; EXPRESSED IN HELA, SIGNAL = 0.94; EXPRESSED IN HEART, SIGNAL = 1.6; EXPRESSED IN BONE MARROW, SIGNAL = 0.99; EXPRESSED IN LUNG, SIGNAL = 1.5; EXPRESSED IN BRAIN, SIGNAL = 1.3; EXPRESSED IN ADULT LIVER, SIGNAL = 1.2; EXPRESSED IN BT474, SIGNAL = 1.5; EXPRESSED IN FETAL LIVER, SIGNAL = 1.1
cttaacagatgcactggggggaaactatcatggacatagacagttttaaggatatgttttgagaattatttcagagaaacccatgggcatggggactcaggcttgctgctgacagtcctcgaaattcctactcatccaccattatgcacagaatccactggtatggcatttctgagacttttgtcatcccctcttgacctagtgattggatattacctatagtttcttctcattaacttggaattctcaaattccatttaataaaccatcttaggcaacccaggggtatccatgtatgaattaaatggttgttcatctattagatatttgtgtaccttttctagagctgactataagaaagactctccctaatgtagctgttgagatgatacatggtgagatgaaaaggatagtccgattagcacctgggtcaatgcatccacgtctaggtctaaagaagaccatggagtaagggtaggtggccagatc

SEQ ID NO: 1335 - DNA, 456 bp, Homo sapiens
  MAP TO AC009808.2; EXPRESSED IN ADULT LIVER, SIGNAL = 1.4; EXPRESSED IN BT474, SIGNAL = 1.1; EXPRESSED IN FETAL LIVER, SIGNAL = 1.4; EXPRESSED IN PLACENTA, SIGNAL = 1.2; EXPRESSED IN HBL100, SIGNAL = 1.2; EXPRESSED IN HELA, SIGNAL = 1.6; EXPRESSED IN HEART, SIGNAL =   1; EXPRESSED IN LUNG, SIGNAL = 1.3; EXPRESSED IN BONE MARROW, SIGNAL = 1.8; EXPRESSED IN BRAIN, SIGNAL = 1.5
  unsure 32
ccacctccacatcctgtctcactggaaggtcntccaggagcaataacagggatggagctgtcatctcctaggctaacaatgccttcttctggaacactctctgaaggacctgcctgaggctgtttttcagttaattttttttaaaagaaaattttttgagattttgtgattttccccacaaaattccctctgtgatttccccaccctatcagggctccttgagacccttttacctggccctctgctaaaaagcggaggttctgacttctccatgcttttggagtctgccaaactgggtctaccttgggagtagagaggctagagaatggggagcaagaaaaataatgaggattgttttcttcactctttggaacatagggtcctctggtcagaggaaagggttcttttctcagagttttaggtgactgtatggtgacaatggtgtaagagtgcccc

SEQ ID NO: 1336 - DNA, 473 bp, Homo sapiens
  MAP TO AC009890.1; EXPRESSED IN BT474, SIGNAL = 2.4; EXPRESSED IN HBL100, SIGNAL = 2.4; EXPRESSED IN HEART, SIGNAL = 2.7; EXPRESSED IN LUNG, SIGNAL = 3.4; EXPRESSED IN BRAIN, SIGNAL = 3.5; EXPRESSED IN FETAL LIVER, SIGNAL =   9; EXPRESSED IN ADULT LIVER, SIGNAL = 3.8; EXPRESSED IN PLACENTA, SIGNAL = 5.4; EXPRESSED IN HELA, SIGNAL = 2.8; EXPRESSED IN BONE MARROW, SIGNAL = 3.6
  unsure 41
  unsure 129
  unsure 246
  unsure 263
  unsure 276
  unsure 327
aaccacaggaagagccacacgggccagaagcgacatgcttnttgagtggtaaacccacaaatgaacatacaagttcagaattcataaatgtcccagagaagacagcaagctttagaagcagcatgcatnttcattaccaagcaaatttactgatttgtttcagttttatgtctttggacaaatatagattggcaggattttcatattcagctcacttcatgctgctgcttttgattttttccttcncttagttgtgacctctntgcagaattcctngacactgagctacgatgttctcaagcatgttgcaatgtcaagttcaggcancttaagaatcattaaatccaaaatttctctcatctctgttgtttttggaattggggttgaaaatgggtttgagggcaaagtattctttctaagcagagacctagcaagcactggcttaaaatgctgaaatggttgttctgtctaaa

SEQ ID NO: 1337 - DNA, 473 bp, Homo sapiens
  MAP TO AC009944.2; EXPRESSED IN PLACENTA, SIGNAL = 3.5; EXPRESSED IN HBL100, SIGNAL = 2.8; EXPRESSED IN HEART, SIGNAL = 1.2; EXPRESSED IN BRAIN, SIGNAL = 1.8; EXPRESSED IN FETAL LIVER, SIGNAL = 1.5; EXPRESSED IN ADULT LIVER, SIGNAL = 1.2; EXPRESSED IN HELA, SIGNAL = 2.1; EXPRESSED IN LUNG, SIGNAL = 1.5; EXPRESSED IN BONE MARROW, SIGNAL = 1.4; EXPRESSED IN BT474, SIGNAL = 2.5
  unsure 43
cacttatgcagaaaacagaaaaagaactataaacaatattganactctagttaatgatttgcagactaaaatgtttaggtgtgaagtatactgatggctgcaacttactttaaattgcaataaaacatgaattgagagatggcaagattaagaaataacgagataaagggaatacagcaaagtgttagcaatagtaaaatgcaggtggtgggtatgtcagtaatcactatagaattctttcaagttgtctgaatgtttgaaaatgttcataacaaaacgttaggaaaatatacataccaacaaaacagttgtttctcttcttctcaagaacttggcttatatttctaatactacagagtgagaatttattgttgttaagtttgtccccagatgttgctcttgcatacatgatgtaattgccattttctttttgacccaaattcttagattctcctggtgtgcactctgttcca

SEQ ID NO: 1338 - DNA, 481 bp, Homo sapiens
  MAP TO AC010703.1; EXPRESSED IN BT474, SIGNAL =  30; EXPRESSED IN HBL100, SIGNAL =  43; EXPRESSED IN HEART, SIGNAL =  13; EXPRESSED IN LUNG, SIGNAL = 7.4; EXPRESSED IN BRAIN, SIGNAL =  14; EXPRESSED IN ADULT LIVER, SIGNAL = 6.5; EXPRESSED IN FETAL LIVER, SIGNAL =  11; EXPRESSED IN PLACENTA, SIGNAL =  20; EXPRESSED IN HELA, SIGNAL =  37; EXPRESSED IN BONE MARROW, SIGNAL =  17
ttcaatgatcagtagtttgttctcatctacactgaatgactatagattttttaaagcggaaacaggtacataggtaaccaaagtatacagcttgcttgggaaccttcatcctcattatgtttctggacaaccacatatggatacagtatgggacatcccttaaccttaggcctagtcagctttgttgaacctgttatcaatacgcacatctggagttcccatctccttcatgatggcaaatttctggatctctctgagtgccccaggggcatgcttcttgaagcccactcatggatgtgcttctgagtgttgatggtgtattcttgtgtcaccacctcattgacagcaggagagcccttcttcttcccacccttctctgcaggggccattctgccaggccaaagttggaaagtaacctccatcttaactacccaagaaagaagaaaaacaaacagcatagctttggtgtaagcaaaatgtc

SEQ ID NO: 1339 - DNA, 456 bp, Homo sapiens
  MAP TO AC010726.2; EXPRESSED IN BONE MARROW, SIGNAL = 1.9; EXPRESSED IN BRAIN, SIGNAL = 1.9; EXPRESSED IN HBL100, SIGNAL = 1.4; EXPRESSED IN HELA, SIGNAL = 1.7; EXPRESSED IN HEART, SIGNAL = 1.8; EXPRESSED IN LUNG, SIGNAL = 2.8; EXPRESSED IN ADULT LIVER, SIGNAL = 1.7; EXPRESSED IN FETAL LIVER, SIGNAL = 1.9; EXPRESSED IN BT474, SIGNAL = 1.8; EXPRESSED IN PLACENTA, SIGNAL = 1.8
ctgtgcatttcagggtgttggacagcatccctggcatccacccactagatgttagtatcatttccccagccctacccagttgtttaaataaaaaatgtctccagacattgctcagtgtgtcttgggggacaaaatcaccatcattgagaatcattgttctaaaacaacaaagaaacaaaccatcaaaaaaaacaaaaccaaaaaaaaaacaaaacaaaaaacaaggaaacacttcttcaatttgcacaaagttgaaagccacgctaggcaattcttctcaccaccttcccgttgtcattttgaatctctgtgttatgtatgtctccagtgcctttcagaatgtttaccatttctggcacctctctcataattgcactaggctcctgagtcattttgacaaacaaacaacctttgtatatttgcaaatactcctgggggaggagaggaagggagtgt

SEQ ID NO: 1340 - DNA, 486 bp, Homo sapiens
  MAP TO AC009959.2; EXPRESSED IN PLACENTA, SIGNAL = 2.1; EXPRESSED IN BONE MARROW, SIGNAL = 1.9; EXPRESSED IN BRAIN, SIGNAL = 2.1; EXPRESSED IN FETAL LIVER, SIGNAL = 2.2; EXPRESSED IN HEART, SIGNAL = 1.9; EXPRESSED IN HELA, SIGNAL = 2.1; EXPRESSED IN HBL100, SIGNAL = 1.9; EXPRESSED IN LUNG, SIGNAL = 2.8; EXPRESSED IN ADULT LIVER, SIGNAL = 1.7; EXPRESSED IN BT474, SIGNAL = 2.1
cccctgtatctctctcatcccttttacagcctaagcctgtttctctgcgccaccacaccttaccccagcctcctctgatgatgaaatggaagcaaccacagatgagtggtaccaactgtagtatttctgacttaccatcccactccctccactttagtgcctatgccttcctcccctttatacttcatgattgtctctcatgtattttgtcctttattttctttaacttagctctttccatcctttccccattttattgctccaatgacattcatgctgtactgattctggggcttgctctcaccctcctccacccccttccctgcatccaaggcaaacccacccaaacccacacagccaacagcaccggatggactgtgcacacttgggttgtcatttacactctttctccagcccatggtgctgtccctactcttgctgcagcctggcccacatgaaggctggtgcctgcaatgctctgtgagg

SEQ ID NO: 1341 - DNA, 459 bp, Homo sapiens
  MAP TO AC010134.1; EXPRESSED IN BONE MARROW, SIGNAL = 1.2; EXPRESSED IN BRAIN, SIGNAL = 2.7; EXPRESSED IN BT474, SIGNAL =   1; EXPRESSED IN LUNG, SIGNAL = 1.2; EXPRESSED IN ADULT LIVER, SIGNAL = 1.3; EXPRESSED IN FETAL LIVER, SIGNAL = 1.3; EXPRESSED IN PLACENTA, SIGNAL =   1; EXPRESSED IN HEART, SIGNAL = 1.2; EXPRESSED IN HELA, SIGNAL =   1
agttcctgacatcctccctgggccaccaacccatcctcaaaagctgtgtgaaaacctacaaccttgtactgcaataacgagctctgtactctgctcacaaaagctccttcgtgtgtatcgtctcagttgattctgtcctaaaaaggagtttccaaggttgtccaaggactctcggcttgtcacatataaatacaacactgccacaggccttgtcttcaacattcagttcaattagttaaaatatttcacaggatggcctctgctgatatctcatggagcagaccctcctgatctcaggcatcatgagctgtgatcagggccatcttaccttgcagaaacacagcacaagtacttctctcagccacaggccttgcaactgtcaacagagaagctggtgccgagttctgacatgggaactgagaactctgcccctgtcagggcagacatggcagaagaaga

SEQ ID NO: 1342 - DNA, 468 bp, Homo sapiens
  MAP TO AC010149.1; EXPRESSED IN BT474, SIGNAL = 1.2; EXPRESSED IN BONE MARROW, SIGNAL = 1.5; EXPRESSED IN LUNG, SIGNAL = 1.6; EXPRESSED IN BRAIN, SIGNAL = 0.96; EXPRESSED IN ADULT LIVER, SIGNAL = 1.2; EXPRESSED IN FETAL LIVER, SIGNAL = 1.6; EXPRESSED IN PLACENTA, SIGNAL = 1.5; EXPRESSED IN HEART, SIGNAL = 1.9; EXPRESSED IN HELA, SIGNAL = 1.1; EXPRESSED IN HBL100, SIGNAL = 2.1
gctttcttaatttgaaaccacccaatgaaatggatgatttataataaatacatatttttcccaaagttaaaaaaaaaaaagaagaagaaacaatgtcatccccagccccagcctcagagagggctcctggagcaatcttgaccaacaggtcagatgatcaaagccaaagggtggcctagtggtgggactatttctccccctcctccacaagcttctcttgttcagttttgcttttaaagaattccctgctgattcctaagactcagactaagactgttaaggaattttatttttttctgcaggtttcagcagtagtgacttttcagacctgagtaatggagaagagcttcaggaaacctgcagctcatccctaagaagagggtcaggtaaagaagattaggatgccaagacttggcctgcagaatgtcaggaatgtgaattaaaagctgctgtttccagacgcttttt

SEQ ID NO: 1343 - DNA, 444 bp, Homo sapiens
  MAP TO AC010170.3; EXPRESSED IN HBL100, SIGNAL =   2; EXPRESSED IN HELA, SIGNAL = 1.4; EXPRESSED IN PLACENTA, SIGNAL = 1.4; EXPRESSED IN HEART, SIGNAL = 1.6; EXPRESSED IN BONE MARROW, SIGNAL = 1.3; EXPRESSED IN LUNG, SIGNAL = 1.3; EXPRESSED IN BRAIN, SIGNAL = 1.4; EXPRESSED IN BT474, SIGNAL = 1.9; EXPRESSED IN FETAL LIVER, SIGNAL = 1.4; EXPRESSED IN ADULT LIVER, SIGNAL = 1.1
aaggagtcgacatgccagagtggaatactttggggtggcatgttcttacttcctttagctgtgtggtcactttaagtcccatggccagggctcaggaacttcctaggtcctgtttttcagaaagtatgtaattctccactgcagatggcatggccttcctgcagaatcctagtcagctacattgatccttctattgagacttgttacaaactgcaaacaacatcttttcccaccacagatacctctaataccagagggtctgctggtccataaacccaagtggctgggccccttgtactgcagcctggacctgctgcacggctctttcctgctcagggacccgctcaagctggctctgggcctgcccatcagtacctggttccaagcagtattcacaagtgtgtcatatgcagccttcgagtctgaagaagctgaccaggcatt

SEQ ID NO: 1344 - DNA, 468 bp, Homo sapiens
  MAP TO AC009925.2; EXPRESSED IN BT474, SIGNAL = 1.6; EXPRESSED IN ADULT LIVER, SIGNAL = 1.8; EXPRESSED IN PLACENTA, SIGNAL = 2.5; EXPRESSED IN FETAL LIVER, SIGNAL = 1.3; EXPRESSED IN HEART, SIGNAL = 2.3; EXPRESSED IN HELA, SIGNAL =   2; EXPRESSED IN HBL100, SIGNAL = 1.9; EXPRESSED IN BRAIN, SIGNAL = 1.5; EXPRESSED IN LUNG, SIGNAL = 1.4; EXPRESSED IN BONE MARROW, SIGNAL = 1.9
  unsure 44
  unsure 48
  unsure 176
atgttctaacactaaataaagctcctctttgtcttgctcacccntccnacctgtctgcatatctcattttttctggacacaggacaagaacttgggcaaaggcaccactggccacagaggtttcccgccagaaaagggacaccccagagatcccttaatgttgttatctagttggntgttgtaattgtgccttcaaaaggccattccactgttctatcaacccagctgcttcatgatgtacacgttcaggggaacatggtaagaacagtgaattccataagcatgagcccactgctgcacttctttagctgtaaagtgaatgccttggtaagaggcaatgctgtgttgaataccatgacaatggagaaggcattccatgagtccacagatagtagtattggcagaagcatcgcatgcaggatagagaagcccgtatctgaagtaagtgtctattccagtgaggacaaa

SEQ ID NO: 1345 - DNA, 477 bp, Homo sapiens
  MAP TO AC010683.1; EXPRESSED IN BT474, SIGNAL = 1.1; EXPRESSED IN HBL100, SIGNAL = 0.93; EXPRESSED IN HEART, SIGNAL =   1; EXPRESSED IN PLACENTA, SIGNAL = 0.99; EXPRESSED IN LUNG, SIGNAL =  19
caagtgctgagacagaatagacgaacataaagaaataaagcacacataagaaagtggccaatgccacaagctgattcggttgctctaggaagtccagaggagggcagttactgctcttagcttggggaagggtgaggaggtggtgtgctgaagcctccatggagaaggtgagagatgtaggatcattcatatttggatatttcaggatgaggcagaggggctggatatttccagaagtggaaaaaaaggcatggagacagaacatttccatgtaaataagaaaaacaatacttttttaagtttagctggagcacacagcatggaaaaaggaataatgaaaccatgagaaataagggtgaaaaggttactcaaaaccaaattaaggagggtcttaacactgccacgcagagaactccaaataaagatggtaacaagaaaagaagacaagagaaataaacactgcacttagccaacacc

SEQ ID NO: 1346 - DNA, 464 bp, Homo sapiens
  MAP TO AC009948.2; EXPRESSED IN BRAIN, SIGNAL = 1.3; EXPRESSED IN BT474, SIGNAL = 1.4; EXPRESSED IN LUNG, SIGNAL = 1.4; EXPRESSED IN BONE MARROW, SIGNAL = 1.1; EXPRESSED IN ADULT LIVER, SIGNAL = 1.3; EXPRESSED IN FETAL LIVER, SIGNAL = 1.4; EXPRESSED IN PLACENTA, SIGNAL = 1.5; EXPRESSED IN HEART, SIGNAL = 1.4; EXPRESSED IN HELA, SIGNAL = 1.3; EXPRESSED IN HBL100, SIGNAL = 1.6
ggagggctgtcacttctcagtagttagtatgtccctgttttctttttcatactctgtcatcgctttggcaccattgttaccccgggtctatatgagaatgttgatttggggagtgccactgggtggcccctcagggagcagcactgcctgcatcatgaatgatagttcaatgtttttggtatatgaagcatctgatactgtgtgattagatgattatttgattacccttaaattacttaagtctataactgtatttcccctttgtttatcatcatagttcattcagcagacaacacaagaatggaattaatcattcctggagagcagcatttctacatgaaggcagtgaatgcagctgaaagacagaggtggctggtcgctctggggagctccaaagcatgtttgactgatacaaggactaaaaaagaaaaaggtaactataaacttttcccttgtggtgagag

SEQ ID NO: 1347 - DNA, 466 bp, Homo sapiens
  MAP TO AC010731.1; EXPRESSED IN ADULT LIVER, SIGNAL = 0.96; EXPRESSED IN HBL100, SIGNAL = 0.98; EXPRESSED IN HELA, SIGNAL =   1; EXPRESSED IN HEART, SIGNAL = 1.5; EXPRESSED IN BONE MARROW, SIGNAL = 0.9; EXPRESSED IN LUNG, SIGNAL = 1.8; EXPRESSED IN BRAIN, SIGNAL = 1.1
gatgaactggagctgttgggctgttataaaatcaagtttttaaaaaggcagcttgaatccttggccatcacgatgtctatggattgtgaaaaccttacctgatggcgtttctagattgaaggcatccataagttttgacaatagttcttgcagttcctcttcctccagctcatcctttctctccttgatgttacctgcctctttcttttccacggctgccagagcaggactgctcatttcagcaggaaccattttggggatgtcctgcttcagtccctcctgataactgggtagggcactaatgactttctgtggcatcttttgtgtttggctttgtgccctggtgctgtgcaaagtggtctctggtgattctggatttcgcagagcatgctctgcatttgtgtgacttctgtgacttctgtcaacctcatcaagcttaggaagaggttcccctgttgaagcatct

SEQ ID NO: 1348 - DNA, 456 bp, Homo sapiens
  MAP TO AC011403.1; EXPRESSED IN PLACENTA, SIGNAL = 2.4; EXPRESSED IN HBL100, SIGNAL = 3.2; EXPRESSED IN HELA, SIGNAL = 2.3; EXPRESSED IN HEART, SIGNAL = 2.3; EXPRESSED IN BONE MARROW, SIGNAL = 2.9; EXPRESSED IN LUNG, SIGNAL = 4.5; EXPRESSED IN BRAIN, SIGNAL = 1.8; EXPRESSED IN ADULT LIVER, SIGNAL = 1.7; EXPRESSED IN BT474, SIGNAL = 1.8; EXPRESSED IN FETAL LIVER, SIGNAL = 2.4
acaggtactggggaacacagttcccatttccttgtctctcagccacattgttctgtggttccttctggaattatcacacattgtccatgtgtttaggtgcccaggccaaagtcatcttctcttgattctgacattatctatagagatatcctttgctacttcctacgtgcttttatgctacagcagaaactgggataaaggagacagaaaaccatcttcagttggatttgcattataatctattgtataacaaaactggtgttttatgtagatttctaaatattttccatagggactagaatgatggaacactttactggggccattgcaaatggtggtgtaaggtgtgcaggggccaacttgtgtgacagatctgctaaacaatccatcatcaccattgtccttgcctcagccttgcccaccctcattctttgaactggttccctcagttttcca

SEQ ID NO: 1349 - DNA, 460 bp, Homo sapiens
  MAP TO AC011092.1; EXPRESSED IN BT474, SIGNAL =  12; EXPRESSED IN FETAL LIVER, SIGNAL =  12; EXPRESSED IN PLACENTA, SIGNAL =  19; EXPRESSED IN HBL100, SIGNAL = 9.6; EXPRESSED IN HELA, SIGNAL = 3.3; EXPRESSED IN HEART, SIGNAL = 8.3; EXPRESSED IN BONE MARROW, SIGNAL = 9.6; EXPRESSED IN LUNG, SIGNAL =  13; EXPRESSED IN BRAIN, SIGNAL =  38; EXPRESSED IN ADULT LIVER, SIGNAL = 6.3
tctcctctcctcactctcgcagcctacctttacctacccgcctgctcagtgcccagaacaccttccaccatgaccatctcagcaagctcccacttaaacagaggcgtcaagcaggtgtacatgtccctacctcagggtgagaaagtccaggccatgtatatctgaatcgatggtactcaagcaagactgcgctgcaagtgaacccaagcgtgtggaagagttacctgagtagaattttggtggctctagtactttgaaggttccaacagtgacatgtatctcatgcctgctgccatgttttgggaccccttccacaaggacctccacaagctggtgttctgtgaagttttcaagtgcaatcgaaagcctgcagagaccaatttgaggcacacctgtaaacggataagggacatggtgagcaaccagcacccctggtttggcatggagcaggaatatataa

SEQ ID NO: 1350 - DNA, 499 bp, Homo sapiens
  MAP TO AF188031.1; EXPRESSED IN PLACENTA, SIGNAL = 0.93; EXPRESSED IN HEART, SIGNAL = 0.89; EXPRESSED IN LUNG, SIGNAL = 1.5; EXPRESSED IN BRAIN, SIGNAL = 0.92; EXPRESSED IN BT474, SIGNAL = 1.1
ccgtgtgtgggctgaatacagggattaatgtgaagttgtctgtgaatctgagggggtgactaggagagcttgtgttttgtgggagtactcacgtgtacatgtgtgatactggagtggtggtggaggtttgcgtgttttgggcgtcagtggcattgtatcaggatacgttttgtgtatgtactgtgataagctttgtgaggtttggttaagtggggagctttggaatgggaattgccaatgtggggctcttaccttggatgggggtggaaagatccaacccttttctatgagaaagtggcctcttaccttgaagtcctttaattccttactggctgtgcccacagatacgaccatgtctgcatcagtgtctagcggccaacgggccttgcctatgggctctttcacacgtgtgcggttgtagaccatgaagacctccaccccggagcttccagagaccctgaagctgttggcacccttgggcacatcactggcagagaag

SEQ ID NO: 1351 - DNA, 464 bp, Homo sapiens
  MAP TO AC011199.1; EXPRESSED IN HBL100, SIGNAL = 1.5; EXPRESSED IN HEART, SIGNAL = 1.3; EXPRESSED IN LUNG, SIGNAL = 1.4; EXPRESSED IN BRAIN, SIGNAL = 1.6; EXPRESSED IN ADULT LIVER, SIGNAL = 0.99; EXPRESSED IN PLACENTA, SIGNAL = 0.96; EXPRESSED IN HELA, SIGNAL = 1.4; EXPRESSED IN BONE MARROW, SIGNAL = 1.3; EXPRESSED IN BT474, SIGNAL = 1.6; EXPRESSED IN FETAL LIVER, SIGNAL = 1.4
aagcccccagaaaacaatgagggagaaagaagtggatagaaatggttgaacatgccctggtccttcaggggtgctggagtttggggagtagagccccatccactggagccccccaggcctggcctccagcccctcaggtgaagactgtagggactcactcacaggagcctccagcctctacctaaaggtgtgtagctgtgggtgggggcacagaggggtggaagtcggagctgggaccctaaggatggataggagctcaccaggtgaggtgtgtgtgggtgcctcacttccaactggtctggttgaagaaatcccaaaacgcttcccccacctccctatcagtgcctcagactttgccactagcacgtctgtctgctcctctccagttacaaagtccattcctgagtcttgccctgtggtccctatggcagagtctgtagctgggcctgggatagcttctgaag

SEQ ID NO: 1352 - DNA, 455 bp, Homo sapiens
  MAP TO AC011412.1; EXPRESSED IN LUNG, SIGNAL = 1.4; EXPRESSED IN BONE MARROW, SIGNAL = 2.8; EXPRESSED IN BRAIN, SIGNAL = 2.7; EXPRESSED IN BT474, SIGNAL = 1.5; EXPRESSED IN ADULT LIVER, SIGNAL =   2; EXPRESSED IN FETAL LIVER, SIGNAL = 1.6; EXPRESSED IN HELA, SIGNAL = 2.2; EXPRESSED IN PLACENTA, SIGNAL = 1.4; EXPRESSED IN HBL100, SIGNAL = 1.3; EXPRESSED IN HEART, SIGNAL = 2.2
aaaggaattgaaaacagtatctccaaaagatatttatgcacccatgtttgctgcagcattatcctcaatgttgtggaagcaacctaaatgtcagatgagtgaataaagaaaatgtgatatatacactatatacacacaatggaatattagccttaaaaaggaaggaaattctgatgcatgctacaacatggatgaaccttgaggacattatgctaagttaaataagtcagtcacaaaaaggcaaatacaatatgatttcacttacatgagataagtagttgaattcatagaaacagagagtagaatggggctgggggaggcggaatggggagttgttgttcaatgggtctgcagtttcattcatgtaagatgaacaagttctacagatctgctgtacaaagaagtccatagagttaacaatgctgtaatgtgtacttaaaaactgttaaaggggt

SEQ ID NO: 1353 - DNA, 435 bp, Homo sapiens
  MAP TO AC011416.1; EXPRESSED IN PLACENTA, SIGNAL =  21; EXPRESSED IN HBL100, SIGNAL = 8.7; EXPRESSED IN HEART, SIGNAL =  13; EXPRESSED IN BRAIN, SIGNAL =  16; EXPRESSED IN FETAL LIVER, SIGNAL =  21; EXPRESSED IN ADULT LIVER, SIGNAL =  14; EXPRESSED IN HELA, SIGNAL =  14; EXPRESSED IN LUNG, SIGNAL = 9.9; EXPRESSED IN BONE MARROW, SIGNAL =  12; EXPRESSED IN BT474, SIGNAL = 5.4
ctctctcccgtgtgtgtgtgtgtgtgtgtgtgtgtgtgtgtgtgtgtgtcttccatcatctatcccctaagagcaaaggcattctcttatacaaccagcatataattattgctcaggaactttaacattatctaatttacagtccaaattcaaaatttcccatgtgttccaataacatcctgtatagctgttttttccccccgatccaggatccaaataatgctaatgcatttattttgttatcctgtctctttagtctccatcaatctcaagcgttcctcagcgtttgtgtctttcatgacattgatgcctgtgaagggtcctggccagcggctttgcaggatgtcctttaatgtgtgtttgtctgattgtttactcatgattagattgaggtgaaacattttggcagtactatcgcataggtgatgtttgtcc

SEQ ID NO: 1354 - DNA, 468 bp, Homo sapiens
  MAP TO AC011085.1; EXPRESSED IN BT474, SIGNAL = 0.97; EXPRESSED IN PLACENTA, SIGNAL = 1.3; EXPRESSED IN HEART, SIGNAL = 1.1
gcaactcctcccagtcactcggtatcctggagccaggaatggtggcattgtccttataaagtttagaaaaaattatgtggatccctgtttcaaagggaaactgtgttgaagagcagcccttccagaaggtgtaaggctgtcacagccacctggggttatcttctcatatttcttccctatgaccaagggagttgcccaatcatggaggctttatgtttcctggggacatggacttctgagggggacctgtcatcactatgtcactcaccttccacaaaatcttctggtacttaagcattaggcggatgatgtgggccgcagtgtttgctaacagtaattcttcataatcagagtgtttgcttctactgaagaaaaggtttggtgccatcactgtagaaatgttccacagactcattcggttttttgattcattggcaatcactttattgaagaatgtcatgagggcct

SEQ ID NO: 1355 - DNA, 439 bp, Homo sapiens
  MAP TO AC011484.1; EXPRESSED IN HELA, SIGNAL = 2.4; EXPRESSED IN PLACENTA, SIGNAL = 2.3; EXPRESSED IN HBL100, SIGNAL = 2.5; EXPRESSED IN HEART, SIGNAL = 2.8; EXPRESSED IN LUNG, SIGNAL = 3.9; EXPRESSED IN BONE MARROW, SIGNAL = 2.2; EXPRESSED IN BRAIN, SIGNAL = 3.2; EXPRESSED IN FETAL LIVER, SIGNAL = 2.3; EXPRESSED IN BT474, SIGNAL = 2.4; EXPRESSED IN ADULT LIVER, SIGNAL = 2.2
tgggggacacagttcctgcctcaggacccgggccatatcctccaccgtcctgccctcgctctgcagaaagaggttcagcttggtcaggaattcaatgtcctgcttccggggcatgtagaccactctccacacaccgcccttgcccttgatctccctggggaccacggcgtaattgatgtcctccgtcagctgaatgatggccgccttggatttatcttcttccagataggccttcccagccacttcgaacttgcctagaggtttgaggggcagccgaataatctcttcgaattcctcgtggttgcagtcctccgggatccccaggatcatcagggacttgtaactgtccacctccagggccttgcacccgtgctccaacagtgcaatgtccttcaccccgaacagcatcttgcccaactctttgaggcagcagtatgcc

SEQ ID NO: 1356 - DNA, 497 bp, Homo sapiens
  MAP TO AL031658.10; EXPRESSED IN BT474, SIGNAL = 1.5; EXPRESSED IN HBL100, SIGNAL = 1.6; EXPRESSED IN HEART, SIGNAL = 2.1; EXPRESSED IN LUNG, SIGNAL = 3.1; EXPRESSED IN BRAIN, SIGNAL = 1.9; EXPRESSED IN ADULT LIVER, SIGNAL = 1.9; EXPRESSED IN FETAL LIVER, SIGNAL =   2; EXPRESSED IN PLACENTA, SIGNAL = 1.8; EXPRESSED IN HELA, SIGNAL = 1.5; EXPRESSED IN BONE MARROW, SIGNAL = 1.6
agtcaggctcagaaaaggggcctacgcaggccatgtgggcagggacttctggggtcctgcatagccagtcctcttagacatgaagaatttttgcccctcaaagaggggcacacctggggtcatcctaattacagggctcagggctgggcccctcttgcccaggtctaagggaaacactgagagcaattgtgtaagggtcctagcaggccaggtcctgactaactgaggctcctctctcgacccggctgcccggggcccagggctgcaagtggacgctgcagcgcttccggcagtacctggcgtccaaacacgggcccgaggcagtggagacactcttcagggacatcgacaacatctttgtcaaaagcctgcagagtgtgcagaaggtgatcatcagtgacaagcactgcttcgagctgtacggctatgacatcctcatcgaccaggacctcaagccgtaagtgggtgggtgggagagccaggaggtcatagtttgc

SEQ ID NO: 1357 - DNA, 476 bp, Homo sapiens
  MAP TO AL050325.20; EXPRESSED IN BONE MARROW, SIGNAL = 7.4; EXPRESSED IN BRAIN, SIGNAL = 7.2; EXPRESSED IN BT474, SIGNAL = 4.2; EXPRESSED IN HBL100, SIGNAL = 6.2; EXPRESSED IN LUNG, SIGNAL =  13; EXPRESSED IN ADULT LIVER, SIGNAL = 7.8; EXPRESSED IN FETAL LIVER, SIGNAL = 9.3; EXPRESSED IN PLACENTA, SIGNAL = 9.1; EXPRESSED IN HEART, SIGNAL = 7.8; EXPRESSED IN HELA, SIGNAL = 6.9
agagaagcagaggtgggtggggagggggatgcagggccaggactggtgggcaggggccctgcaagccctgcttactggaacgggagaaggctgggggaggtgttccaaccttcacaagccacaggcaaccaccgagtgacattagacagggaagggatgagatcagaccctggcattagaaaggctggagttctgggtccttcatgctctctcccttaattcttacaagaacccatttcacaggtggggaaaatagaggtcccagagaggttcagtgacttgctccaggtcactctgaaaggacacagatctggctgcctccagctccccctgctccttgagttccctgctgtcttccctggcctctgcctctgggcccaagaactcccagccctcagcatccatggcctccccctggcccacgaagtcctcagccacctccttcctggagggctcagccaaaatcagactgagga

SEQ ID NO: 1358 - DNA, 475 bp, Homo sapiens
  MAP TO AL121603.1; EXPRESSED IN HBL100, SIGNAL =   8; EXPRESSED IN HELA, SIGNAL = 4.7; EXPRESSED IN PLACENTA, SIGNAL = 3.7; EXPRESSED IN HEART, SIGNAL = 2.6; EXPRESSED IN BONE MARROW, SIGNAL = 2.3; EXPRESSED IN LUNG, SIGNAL =   2; EXPRESSED IN BRAIN, SIGNAL =   3; EXPRESSED IN BT474, SIGNAL = 6.2; EXPRESSED IN FETAL LIVER, SIGNAL = 2.2; EXPRESSED IN ADULT LIVER, SIGNAL = 1.4
gccaagtgagccagaaattaagagaccaaaaaagatgccttaccaggtcaaaaattggagactaagatgagtcacgctgccacggagaaaagagtgtatccttgggttaaatagtgtatacaaacaaatgcttcctggaaactagactctcccttcgggttaatgatcaagagttttccatagtcattgtcttttttaaaaatcaggtatttattgagcatatgttgtatgccctcaacattttaagaactgtacttggacgtgcacgcaccctgtccctcaaccaccgctgccgcctccttcttctgtcactcctggtgctgcactgtgttcgttcagtgagaagctggtacctcttttgtgaagcggcagctgagaagactctggcatttgccatggccgaggaaaagcccaaggcattgtcaatggggcagatcagattccgatttgacagtcagccaatcaatgaaacaga

SEQ ID NO: 1359 - DNA, 474 bp, Homo sapiens
  MAP TO AL035684.25; EXPRESSED IN LUNG, SIGNAL = 1.1; EXPRESSED IN BRAIN, SIGNAL = 3.5; EXPRESSED IN BT474, SIGNAL = 4.4; EXPRESSED IN PLACENTA, SIGNAL = 0.99; EXPRESSED IN BONE MARROW, SIGNAL = 3.8; EXPRESSED IN ADULT LIVER, SIGNAL = 1.3; EXPRESSED IN FETAL LIVER, SIGNAL = 1.9; EXPRESSED IN HEART, SIGNAL = 1.3; EXPRESSED IN HELA, SIGNAL = 1.5; EXPRESSED IN HBL100, SIGNAL = 2.1
aggttggtgctgttattgccatttcgtggccacggctcagagaggttaagtgacttgctggaagtctcccagcaggtgagtgtggagtgtagggtgggactcaggtctgtgcagtgtctacatggaggacttgtgaggaagctggaagcctatgtcacccctgtggggtccagctcacctgctggggtcccccaccccgtgtggtggggatcgggtgtggcccttccactcttggcactggccagtcagcctggcctctcctcaccctaagcagtgactgcatctgctggtgtgtcccaggcccgctacgtccaggccaagctgagtgtgcacgaccgctccctcaaagtggccacggtgatcgagagcctggagatggagatggaactgctgtgcctgacgggcgtggaggaccagctgcaggcagatgtgcggcccacgctggagaccctgaggaatgctggcatcaaggta

SEQ ID NO: 1360 - DNA, 486 bp, Homo sapiens
  MAP TO AL121749.2; EXPRESSED IN LUNG, SIGNAL = 1.5; EXPRESSED IN BRAIN, SIGNAL = 2.9; EXPRESSED IN ADULT LIVER, SIGNAL = 1.2; EXPRESSED IN PLACENTA, SIGNAL = 2.7; EXPRESSED IN BONE MARROW, SIGNAL = 1.2; EXPRESSED IN BT474, SIGNAL = 2.3; EXPRESSED IN FETAL LIVER, SIGNAL = 1.8; EXPRESSED IN HEART, SIGNAL = 2.6; EXPRESSED IN HELA, SIGNAL = 1.8; EXPRESSED IN HBL100, SIGNAL = 2.2
agtgctggaccacacctttctaattaaaggagtgtttgcctacaatatagtttctgtaaaccagtttcacaaaaccaggaggtgttaccagtacctgttcaagatccacatgatgagaaatgcaggttttcatatgtaatattccacagccatgcccctgttgtaacagctcacaacagacattcagtcaaatgcatgcattctgcgctatacagaccattaaaaaaggaggcagctttctttccaaatggtctggccaagactctgatgaccaacaccctctgccccccaactcacatgtcctccaccgtgatgtctttcaggatctggcagtaatccacattccatacagcctggtcatcccacaccttggaggccagcaggatcgcccctaaaacaatccgcttccagttggccggacagatatctatctctgcgtatgttaaaagtctttcaaggtacacctgggaagacaagacaatgcca

SEQ ID NO: 1361 - DNA, 475 bp, Homo sapiens
  MAP TO AL031650.21; EXPRESSED IN LUNG, SIGNAL = 1.4; EXPRESSED IN BRAIN, SIGNAL = 4.4; EXPRESSED IN ADULT LIVER, SIGNAL =   2; EXPRESSED IN PLACENTA, SIGNAL = 3.4; EXPRESSED IN BONE MARROW, SIGNAL = 4.9; EXPRESSED IN BT474, SIGNAL = 2.7; EXPRESSED IN FETAL LIVER, SIGNAL = 3.3; EXPRESSED IN HEART, SIGNAL = 3.9; EXPRESSED IN HELA, SIGNAL = 3.4; EXPRESSED IN HBL100, SIGNAL = 3.6
accacagccctgtttcagaggacttcttttacctctcctcagttccctggctattccttcctctttctgctccatttttgccattcttgatcatcttgttcttttccattgtctttgggccttgagcacatttctgtgaaaagttcgaagcttcttcttcttcttctcctccttctcctccttcttcttctccttcttcttctccccctcctccttctcctgctcctccttctcctgctcctcctcctcctgctcctcctcctcctgctcctcctcatcctgctcctcctcctctccttcttctctccttcttctctccttcttcttctctccttcttctctctcttcttcttcttctctctcttcttcttctccttctctccttctctccttcttcttctccttctgctctccttctgctctccttcttctctccttcttctctccttcttctctccttcttctccttctctcc

SEQ ID NO: 1362 - DNA, 474 bp, Homo sapiens
  MAP TO AL033380.10; EXPRESSED IN BONE MARROW, SIGNAL =   1; EXPRESSED IN LUNG, SIGNAL = 1.4; EXPRESSED IN BRAIN, SIGNAL =   1; EXPRESSED IN BT474, SIGNAL =   1; EXPRESSED IN FETAL LIVER, SIGNAL = 0.93; EXPRESSED IN ADULT LIVER, SIGNAL =   1; EXPRESSED IN PLACENTA, SIGNAL = 0.97; EXPRESSED IN HEART, SIGNAL =   1
aaaaatgtttcatgactgcagaacaagatataaatacatcaaggaggatagaagatccatcaaaaccacagatcaacaaatagcgtttgttttagtcatctcttcacctccagcactaaggatccctggccacatcccctacagagtccactattccagagctttctacttctcttacttctggcagatctttgacccagaaggtacactgtgatgagcaattttccacatccctgagggttatggtataaacctgtcttgctaagatggaggattcttgctgtaagagctgggacttatggctccaagcccatctgtggagggcgatcagaccagcagggccaactggttggttggttccatgagggctaaagagcagaagcatgatcctctcagacaatcctgccggatttgggagaagggacagaaattacgaagggtgaagatgaacaggcaagccaaggtgagacagga

SEQ ID NO: 1363 - DNA, 483 bp, Homo sapiens
  MAP TO AL096677.18; EXPRESSED IN PLACENTA, SIGNAL = 1.9; EXPRESSED IN HEART, SIGNAL = 0.92; EXPRESSED IN BONE MARROW, SIGNAL = 1.3; EXPRESSED IN LUNG, SIGNAL = 1.1; EXPRESSED IN BRAIN, SIGNAL = 1.3; EXPRESSED IN ADULT LIVER, SIGNAL = 1.3; EXPRESSED IN FETAL LIVER, SIGNAL = 1.7; EXPRESSED IN HELA, SIGNAL = 1.1
gagagaaattactggagggaattgattcgcttgattatataggctgagaaggcctaagatctgcattctgaagacccaggagagccaatggtatagctccagtccaaatccaaaggcctcagaaccaggagagttgatgatgtaatttctaatctgagtccaagtctgaatcaggagaataccagtgtcctggctctaagacaggcattgagaatgaattcttccttttaaccttttattttattcaggttttcagtagattggatgaggcccacccacattggggagggcaatctgcttattcatcctactgatgcaaacgttaatctcattcagaaacaccccacagacacactcagaataacaccaaatatctgggcaccctgtagcccactcaaggtgacacataaaatcagtcatcacagagagtattgccatcttaacaatactaagtctgacagtcgatgaatacaggttcctttt

SEQ ID NO: 1364 - DNA, 474 bp, Homo sapiens
  MAP TO AL050322.10; EXPRESSED IN PLACENTA, SIGNAL = 1.3; EXPRESSED IN HELA, SIGNAL = 1.7; EXPRESSED IN HBL100, SIGNAL =   3; EXPRESSED IN HEART, SIGNAL =   1; EXPRESSED IN BONE MARROW, SIGNAL = 3.5; EXPRESSED IN LUNG, SIGNAL = 1.2; EXPRESSED IN BRAIN, SIGNAL =   3; EXPRESSED IN ADULT LIVER, SIGNAL = 1.4; EXPRESSED IN BT474, SIGNAL = 2.3; EXPRESSED IN FETAL LIVER, SIGNAL = 1.7
caggccacagaagaaaaaggaccatataggaatttagatttgaatctcagatgatatcgatttttaatactacacagggaaaggatattatttgttaacccagtgtcaactgaagcccctttgattataccaaagctgtcctgagaacagacattcttcacctttcattttcagattcttagggtagaacatttaccatgggttccagtttctctgctccctatggacattgtcacattgatttgccaagtccactttctctaccccctccctcacctccttgaccaccactacctccatcttcactgtcaccacttccatcaccaccacctccactatctctaccacctctgtcttcaccaccacaaccaccaccaaccactgccttcacccccaccaccactgccatcacctccaccacctttacttccacctctactattatcagcagtcactctagcacctcctccacca

SEQ ID NO: 1365 - DNA, 482 bp, Homo sapiens
  MAP TO AL035250.17; EXPRESSED IN ADULT LIVER, SIGNAL = 1.1; EXPRESSED IN FETAL LIVER, SIGNAL = 1.5; EXPRESSED IN PLACENTA, SIGNAL = 1.3; EXPRESSED IN HEART, SIGNAL = 1.9; EXPRESSED IN BONE MARROW, SIGNAL = 0.99; EXPRESSED IN LUNG, SIGNAL = 3.4; EXPRESSED IN BRAIN, SIGNAL = 1.2
gctgccatgtgaagaagaacatatttgcttccccttctgccatgattgttaagtctcctgaggcctctccagccatgctgaactctgagtcaattaaacctctttcctttataaactacatggcatgtagtaggtattcagtgaatggtgactatttttttcagtgaattcagccatgatttatccagagcctataacatgacaggtcccgggctaaagcactagggtaggggaatctggggaagaagcttaccatggcctccgtccatgatcactgtccttgtattctcatggtcaaatgctccctcccttttacaatgacaaaaacaaggttccaaaagttaagcaacttatccaggttgacacggttcttaagaggcaagaaccatacctgacctaaagtgcacagacttgacaagtatgctacagttttctgcacagccttttttctttcaggaacactgttctcttgcttctttgcc

SEQ ID NO: 1366 - DNA, 461 bp, Homo sapiens
  MAP TO AL035706.10; EXPRESSED IN HEART, SIGNAL = 0.9; EXPRESSED IN LUNG, SIGNAL = 1.1; EXPRESSED IN BONE MARROW, SIGNAL = 0.96; EXPRESSED IN BRAIN, SIGNAL = 0.91; EXPRESSED IN ADULT LIVER, SIGNAL = 1.1; EXPRESSED IN FETAL LIVER, SIGNAL = 1.2
tgaccatatttaagggaaaaatagctaagttgggctaatttattattattactcattgcatttaaagaaacttggactagagatcaaagtgcattttgatttgtttgaaaattgtaaatgacccattcccagttctccaaccccataaagttagaatgcagtctgtgagtactctctgctctaatcaagaaggaaggggcttcagcttcaaatgtcaatgctgtaaacatgttaaatctggaaaatattttctaagcaagcaaccatgtgtaaaatttaccgaacttgtcatgaaagggctgcagctgcaaacctgcaaacttctcacttccatgaagactccagatgctgagacagggaagagaggtttcagcttggctccccagctgttgcaccttagagctttgcatgccgccatcttctcagcgtttcaccaggtaaggaagcagtggccatttaat

SEQ ID NO: 1367 - DNA, 460 bp, Homo sapiens
  MAP TO AJ239323.2; EXPRESSED IN BT474, SIGNAL = 1.8; EXPRESSED IN PLACENTA, SIGNAL = 2.6; EXPRESSED IN HBL100, SIGNAL =   2; EXPRESSED IN HEART, SIGNAL = 2.3; EXPRESSED IN BRAIN, SIGNAL = 2.4; EXPRESSED IN FETAL LIVER, SIGNAL = 2.2; EXPRESSED IN ADULT LIVER, SIGNAL = 1.7; EXPRESSED IN HELA, SIGNAL = 1.8; EXPRESSED IN LUNG, SIGNAL = 2.9; EXPRESSED IN BONE MARROW, SIGNAL = 2.3
aaatagaaaataaaaatgatcacaaggaatgtgaaaagttgttgaagctcagtactaatcagtgaaagtcaaatcaaaataactagattttcaatacgtttgctaatatcaagtattggcgagggtaaaggatactctcacacactgatggggagtatgtacatttgagccactctgaagggcaacttggcaggaagtattacattttataagaatgtatttatgcagaggaggcttcaggtcgacctgtggcagtccagcccttgggggttccctcgccttccacctcctgctcatctgcttcactagctatccctatggtgtcggtgtgcaggccgtggcctgctgtggccatagcacttctggctctgctggtctgcctgggggcgctggtcgacacctgccccatcaaacccgaggctcctggcgaagacgagtccctggaggagctgagccacta

SEQ ID NO: 1368 - DNA, 468 bp, Homo sapiens
  MAP TO AL121694.1; EXPRESSED IN BT474, SIGNAL =   5; EXPRESSED IN HBL100, SIGNAL = 5.1; EXPRESSED IN HEART, SIGNAL = 6.2; EXPRESSED IN LUNG, SIGNAL =  11; EXPRESSED IN BRAIN, SIGNAL = 5.4; EXPRESSED IN ADULT LIVER, SIGNAL = 5.6; EXPRESSED IN FETAL LIVER, SIGNAL = 7.4; EXPRESSED IN PLACENTA, SIGNAL = 6.7; EXPRESSED IN HELA, SIGNAL = 6.8; EXPRESSED IN BONE MARROW, SIGNAL =   6
actatttctgcctgggcctcattttccacttgccccaagccttcctcatttctatcctttacctgaaggaggcaagctgccaggtgtgctttgttcgctgttctattggaagtgtagatgtaacttcttactctgaagcaacttgcagagacagaattgaggcagttaatgttttgtcttactttttcatgcaatgtgtgtagtctgcaacactaatagcacaaacaattttgtgtagtcatagtatgacttgttttgctttgaatttcttcatctttttagtaaactgctatgtcaatttaatggcaattctttttgctctaatctctagtgttataactcagtggaaaatggcttgcttgagaaaaaagcatgcacgttggacagccaagataaaagctgaaatacaagctattacagaaaaaattcagaatgcagaagttagacgaattgaattacttaacgagg

SEQ ID NO: 1369 - DNA, 459 bp, Homo sapiens
  MAP TO AL035684.25; EXPRESSED IN HELA, SIGNAL = 3.1; EXPRESSED IN PLACENTA, SIGNAL = 3.4; EXPRESSED IN HBL100, SIGNAL = 2.5; EXPRESSED IN HEART, SIGNAL = 4.2; EXPRESSED IN LUNG, SIGNAL = 5.5; EXPRESSED IN BONE MARROW, SIGNAL = 3.5; EXPRESSED IN BRAIN, SIGNAL = 3.1; EXPRESSED IN FETAL LIVER, SIGNAL = 3.4; EXPRESSED IN BT474, SIGNAL = 3.1; EXPRESSED IN ADULT LIVER, SIGNAL = 3.6
aaggcaagactgggaggccactagaattacccaagcacagagaggagcttgagggtgggaggagagagagaacagcctagcggaaagcctggaagtgaggaataacagggagaattggcagggggtggggtgctgagtatttcagtaggcaggggtgtggagttgaagggtgtaagaggtaagtggtggtgagactagagaaggtgggttagattttataggtcattggtcacatatgggattttgaactttacccgcaaggtaattgtgattcagtggaggatgacatggtcacatgtcccctttagagtctaaagctgagaaaatatcacattggttgtgcaggaaagaatagacctcagggaaggaacaggagagaagaggaggcgaagaggccgaagagtcaccaggagagagatgttgatgggggtcctggcaaggctggtattgtggagagga

SEQ ID NO: 1370 - DNA, 459 bp, Homo sapiens
  MAP TO AP000553.1; EXPRESSED IN BONE MARROW, SIGNAL = 2.3; EXPRESSED IN BT474, SIGNAL = 1.8; EXPRESSED IN HBL100, SIGNAL = 1.7; EXPRESSED IN HEART, SIGNAL = 2.9; EXPRESSED IN LUNG, SIGNAL = 2.6; EXPRESSED IN BRAIN, SIGNAL = 1.9; EXPRESSED IN ADULT LIVER, SIGNAL = 2.1; EXPRESSED IN FETAL LIVER, SIGNAL = 2.2; EXPRESSED IN PLACENTA, SIGNAL = 2.3; EXPRESSED IN HELA, SIGNAL = 1.8
gaaacctttgccctagtgtcctagggcaccgcacacccccgcaccccttcttcacacattcggcttcccttgtccagggtcccaccatagaggagcctcccctgcttcacccaccactttcatagctgacaactggcttctgttactgtctagtcttactaaacaaaaggggcagtggctccttctggccacaaaattccaggattcctctccaacttctacccaatcaggtgcttctcttacctagtattttaattttgacgtgtctttcccaagcctgtgtctggagcatggtggttctgcatcgagctgaaactgctgggattcctgtgcttgggacacagcccagcacatcacaggtgacagttccagagcatggaaccggtgtcatgtttccagtcgattcaagggagagcatctgtaggcccgatgtgtggatgtgggacattattatacgaa

SEQ ID NO: 1371 - DNA, 469 bp, Homo sapiens
  MAP TO AF170801.1; EXPRESSED IN BONE MARROW, SIGNAL = 1.7; EXPRESSED IN BRAIN, SIGNAL = 1.6; EXPRESSED IN BT474, SIGNAL = 1.5; EXPRESSED IN HBL100, SIGNAL = 1.4; EXPRESSED IN HEART, SIGNAL = 2.2; EXPRESSED IN LUNG, SIGNAL = 2.1; EXPRESSED IN ADULT LIVER, SIGNAL = 1.4; EXPRESSED IN FETAL LIVER, SIGNAL = 2.2; EXPRESSED IN PLACENTA, SIGNAL = 1.8; EXPRESSED IN HELA, SIGNAL = 1.4
agtggctcagcaggcttttccccgctcttggccccattcaaaaccgccagccttagaggctccccagaaatgagttggagcagtcttcccatgtgtagtgcatgctgggtccaaactccagaggtcccccagtcactgctccccagaatggcatggagcgtggggtatggtttgccctttacctcatagggtgtatcagggcatgctcagatgctgaaaccccagaagcttcaatgatgtggcaggcctccgatatctcccagcctgaggcaggtacctgcattcctaggtcacctgggttctcccaggtccaggcagcatgagatcatcgacacagtagtgaccctgtggccttatagtaaagccagtgttgacagcacagtgggcaaggcagtaagtgtactgcagtcctcgccaagtcaacacaaactgtcttctctccatggatagggtgtggagaagagtgcag

SEQ ID NO: 1372 - DNA, 469 bp, Homo sapiens
  MAP TO AP000427.1; EXPRESSED IN BONE MARROW, SIGNAL = 0.94; EXPRESSED IN BT474, SIGNAL = 1.7; EXPRESSED IN LUNG, SIGNAL = 1.2; EXPRESSED IN BRAIN, SIGNAL = 1.4; EXPRESSED IN ADULT LIVER, SIGNAL = 1.7; EXPRESSED IN FETAL LIVER, SIGNAL = 1.5; EXPRESSED IN PLACENTA, SIGNAL = 1.3; EXPRESSED IN HEART, SIGNAL = 1.5; EXPRESSED IN HELA, SIGNAL = 1.3; EXPRESSED IN HBL100, SIGNAL = 1.1
catgttctgttcttgttccttccaaaataaagtacagcaaagaagagaatttaagagagtatcccatgaaacataaagaagaaagctggccttgcctaggactgttgaacactgaaagtcatacatcagttctaggcaagccaaaagcaaaatcatctgtgccttgtataggacagggtaaggaagctgagaagacataggagaatgacaggttctgagttatgtgttaaaagatactctttttaacggctatgtggagaaaggatggcttttactctcttaattttgttttacttttcattgtagtctgaattaggtgacttagatacctggcaggaaaataccaatgcatgggaagaagaagaagatgcagcctggcaagcagaagaagttctgaggtatttgagtggcatttatattgcaacctgagtagaagaactagatttcttccctgctgtgtttcaagtca

SEQ ID NO: 1373 - DNA, 468 bp, Homo sapiens
  MAP TO AL035661.16; EXPRESSED IN HBL100, SIGNAL = 2.1; EXPRESSED IN HELA, SIGNAL = 3.4; EXPRESSED IN PLACENTA, SIGNAL = 3.4; EXPRESSED IN HEART, SIGNAL =  14; EXPRESSED IN LUNG, SIGNAL = 3.4; EXPRESSED IN BONE MARROW, SIGNAL =   3; EXPRESSED IN BRAIN, SIGNAL = 5.7; EXPRESSED IN BT474, SIGNAL = 3.2; EXPRESSED IN FETAL LIVER, SIGNAL = 4.1; EXPRESSED IN ADULT LIVER, SIGNAL = 5.8
agaatgaaagtgtgggagggggctggagtactgatacatcctgaggcaggatagtgcagatggactgctggcctttccagctgaaaacaaactgcttcgggtggtctttattagcagggacagaggaaaaaataacatttgccggatcaatggctgtataccaggtaccaggagatgtgttgatttgctcaagcaatgaaaccacatctggcacagaagcctgtgattgtagttaccacccagttaagcctatgcttaattgtcattctccaagatccatctctctcctgcacaggccaacaggagagatgaatgggaatgcaatgggaattgccacctctgcatccttcaaatctttgatggcagcagtaatctctgccattcctccagtaatgtggtattgctttctgtttactactggtggggggtggttagagaaggcactagtggcttccacatggtctttct

SEQ ID NO: 1374 - DNA, 460 bp, Homo sapiens
  MAP TO AL078583.15; EXPRESSED IN BRAIN, SIGNAL = 1.5; EXPRESSED IN BT474, SIGNAL = 2.4; EXPRESSED IN HEART, SIGNAL = 0.94
gtcagtttgtcctatgcccgggaatgaacaatgatagcttggagatgagaaggaagatggagttggtttggtcagatctctttcactataataattttctcagttatactttcgcaaaggtggcttcattcctgcagggagccggctttccagccttcttgctgagctcagggcttcgaaagatcactggacgtacccttcctataaagttaatttattcagcacagcaccctttaaactttatttccatccctcagaaatataattgttagctttttttctccagttgatcacactaacctgagaaaactgtgtaaaatacagcaattctgtgttagttctggggaggatgtggctgttgctgttggtgccaccagcctgaatagtttcccttcacttggtgtctttcctttcctgaaagaaacctcggtggtaaaggccgtggctgagtctgtcaact

SEQ ID NO: 1375 - DNA, 459 bp, Homo sapiens
  MAP TO AJ238093.1; EXPRESSED IN FETAL LIVER, SIGNAL =   2; EXPRESSED IN ADULT LIVER, SIGNAL = 1.3; EXPRESSED IN HBL100, SIGNAL = 3.3; EXPRESSED IN HELA, SIGNAL = 1.1; EXPRESSED IN PLACENTA, SIGNAL = 2.8; EXPRESSED IN HEART, SIGNAL = 1.1; EXPRESSED IN BONE MARROW, SIGNAL = 0.98; EXPRESSED IN LUNG, SIGNAL = 1.1; EXPRESSED IN BRAIN, SIGNAL = 1.1
ttggaggacctgttaccaccagacttaggaggtagtagttttccagtgacttttaatttccctaccagtcttttttttttttttttaaatacagggttctaggttagtgtaggaaaaaaaactggtgtattttattccacaagaagcttttggtaaattatttattaaggaaacaactgttggacattgagatggcttttaaagatttacctagaagagataataaaacagataaaactgatctgctcaggggcctgtcttcagtcttttcaggctcgtttactgtggtgttcatgccagcgcagctggtagacagtgttgctgtggctgtagaaataacactgctcatttttatggaggatattgctgtatgccagttaaagaaattcaagttgaaagacctttaaattttttttaataatacacttccttccccacccccaagctgtcaccatgatt

SEQ ID NO: 1376 - DNA, 459 bp, Homo sapiens
  MAP TO AL078634.17; EXPRESSED IN LUNG, SIGNAL =   1; EXPRESSED IN BRAIN, SIGNAL = 1.5; EXPRESSED IN BT474, SIGNAL = 1.9; EXPRESSED IN PLACENTA, SIGNAL = 3.2; EXPRESSED IN BONE MARROW, SIGNAL = 1.2; EXPRESSED IN ADULT LIVER, SIGNAL =   2; EXPRESSED IN FETAL LIVER, SIGNAL = 8.3; EXPRESSED IN HEART, SIGNAL = 1.3; EXPRESSED IN HELA, SIGNAL = 3.3; EXPRESSED IN HBL100, SIGNAL = 5.4
tcagccacatacctcccttcttcaatatatcctacacaattcatattccagaaaatatacagattaatcaaaataatccgaaaacaagggtgtggggttctaaacactgtgacagtgagctatatttacataattggagttaatatgactataaaaaagagtatattcctaaaacaactaacataagacaacatcctaaaaatattataataaaataatctgaatggcaacagcagcagcgagaggatgaacaagttatacaccttgaaagatgatgacactggggaccatgctcagaatgaagaaaacagcacacagaaagatggagagaaggaaaaaacagaacaagacaagaatcagagcagcagcaagaggaaagctattgtccctggaccagcagagcatcccctacagtacaactacactttctggtattccaggagaacccctagccatctc

SEQ ID NO: 1377 - DNA, 386 bp, Homo sapiens
  MAP TO AL049911.1; EXPRESSED IN BT474, SIGNAL = 1.1; EXPRESSED IN FETAL LIVER, SIGNAL = 0.98; EXPRESSED IN PLACENTA, SIGNAL = 1.1; EXPRESSED IN HEART, SIGNAL = 1.1; EXPRESSED IN LUNG, SIGNAL =   1
tttttctctcctttgtgcccttatgtattttattgacttaaattgtagaactggtgaattttactttttgttcttatttgttttcacatatctctaccatttcttgaacataagccagaatgtatcttccatgtatattttctgcttctcccaggatagtgcatatgatttgacagatacaaagtatgttttttgttgttgttgttgtctttctgacaaattgattgagtgaataaatacaattttttctgaagttttttttgtgtgtgtttgctttctgtgttttgtttgtaataggaggcagcaacaaagacagtaactggacaacgagaacgtgatattggcattattgaacgagctccacaagatcaaacaagtaatgacaa

SEQ ID NO: 1378 - DNA, 447 bp, Homo sapiens
  MAP TO AL035404.19; EXPRESSED IN BONE MARROW, SIGNAL = 0.93; EXPRESSED IN LUNG, SIGNAL = 1.2; EXPRESSED IN BRAIN, SIGNAL = 1.2; EXPRESSED IN FETAL LIVER, SIGNAL = 0.91; EXPRESSED IN HELA, SIGNAL = 1.3; EXPRESSED IN HEART, SIGNAL =   1; EXPRESSED IN BT474, SIGNAL =   1; EXPRESSED IN PLACENTA, SIGNAL = 1.2
tggactgtctcctgccactctctcctgctgtctacactgcaagtccactctagggtggcccttgctgctcccggcctggcctccctcccctcagagtctcatggccccctccctccctgaagtttctgtccacgctacctttggccttctctgtccatcttatagaaaaataccacctctcccatcactctctgtcccctaatctccctttaccatcaaacatggtacatatatatttgcctagtggtttctcatttgtctcccccaacaggaacgccagctccatgcatctggggttccgttttcttcattgctgtatccagcacctacaagagaacctggcacagactcggtgccccatgaatattactggatggaggcagacagagctgatctctgtgtcctgaagggttggtgagttgatactgatgagtcagaggccaaagc

SEQ ID NO: 1379 - DNA, 499 bp, Homo sapiens
  MAP TO AL096765.4; EXPRESSED IN BONE MARROW, SIGNAL = 4.5; EXPRESSED IN LUNG, SIGNAL = 2.6; EXPRESSED IN BRAIN, SIGNAL = 3.3; EXPRESSED IN BT474, SIGNAL = 3.5; EXPRESSED IN ADULT LIVER, SIGNAL = 2.8; EXPRESSED IN FETAL LIVER, SIGNAL = 3.9; EXPRESSED IN HELA, SIGNAL = 4.3; EXPRESSED IN PLACENTA, SIGNAL =   7; EXPRESSED IN HBL100, SIGNAL = 5.9; EXPRESSED IN HEART, SIGNAL = 3.4
ttttccctaggattatgacttgtgtatcacctgctataacactaaaaaccatgaccacaaaatggagaaactaggccttgcttagatgatgagagcaacaaccagcaggctgcagcacccagagccaggcgttctcgcgcctgagtatccagcgctgcatccagtctctggtccatgcttgccagtgtcggaatgccaattgctcactgccatcctgccagaagatgaagcgggttgtgcagcataccaagggttgcaaacggaaaaccaatgcggtgcccattcaagcagctcatgccctctgctgctaccatccaagcactgccagaaacaatccggtgccgtttcctaaacatcaagcagaagctcccgaacatgcacaccgactacagcaggcccaaatgcttcgcaggaggatggccagcatgcagcggactggtgtggttgggcagcaacagggcctcccttcccccactcctgccactccaacgacaccaac

SEQ ID NO: 1380 - DNA, 378 bp, Homo sapiens
  MAP TO AL022337.19; EXPRESSED IN BT474, SIGNAL = 1.1; EXPRESSED IN FETAL LIVER, SIGNAL = 1.4; EXPRESSED IN HBL100, SIGNAL = 5.7; EXPRESSED IN HEART, SIGNAL = 1.4; EXPRESSED IN LUNG, SIGNAL =   1; EXPRESSED IN BRAIN, SIGNAL = 1.9; EXPRESSED IN ADULT LIVER, SIGNAL = 1.3; EXPRESSED IN PLACENTA, SIGNAL = 1.4; EXPRESSED IN HELA, SIGNAL = 1.3; EXPRESSED IN BONE MARROW, SIGNAL = 1.7
gccaaaataagaagtggttggttaaaagaaaaatgattagtcgaaccgggtgattggaggcatgtggatgaaacaaccaattgaattgttctcttttcagtatggtggagtggctttgaaatcagacaactttgagttcaagtctgaactctgctatttactacctaggtgatattgaaaaagtgctgttttacctagctgagcctcggtttcctcatctgtgaaatggggataatgatagaacctaccccataaggtatttggaaggattaatgagattacagttttttcagcttgtagtaaaatattgataattaggagttgctaccatcttcatcatcatcaccaccatcatccacaccaccaccatcatcttca

SEQ ID NO: 1381 - DNA, 447 bp, Homo sapiens
  MAP TO AL109918.5; EXPRESSED IN HELA, SIGNAL = 2.4; EXPRESSED IN PLACENTA, SIGNAL = 4.9; EXPRESSED IN HBL100, SIGNAL =  11; EXPRESSED IN HEART, SIGNAL = 2.5; EXPRESSED IN LUNG, SIGNAL = 3.4; EXPRESSED IN BONE MARROW, SIGNAL = 7.2; EXPRESSED IN BRAIN, SIGNAL = 2.6; EXPRESSED IN FETAL LIVER, SIGNAL = 3.6; EXPRESSED IN BT474, SIGNAL = 2.7; EXPRESSED IN ADULT LIVER, SIGNAL = 2.2
gcaaataagcccatgaaaatctcatcgttagccattagagaaatgcaaattaaaaccgcgatgaagtctcctcatagtgcagctgccattaccgctgccctctgccctccggcctgtcaatctacctgcagcatgagcagcctgcacctctacagcacatcggtcactggctcccacaaaatcaagtcccagcagagtgaggtgacctgaatcctggataggaagcgcatctaataccaactagtggacatctcccaggacaacgccctgagggatgagatgcgagtcttggtgggcaactccaaggctgccccaccccggattgtcaatggggaccactaccgtggaggctttgagctcttcatggaggctgtggaacaaaacatgctgcaggagttcctgaaaccggcctgagtcaagctggcccacagttcccctgctggactc

SEQ ID NO: 1382 - DNA, 366 bp, Homo sapiens
  MAP TO AC011499.1; EXPRESSED IN BT474, SIGNAL =  36; EXPRESSED IN PLACENTA, SIGNAL =  21; EXPRESSED IN HBL100, SIGNAL =  65; EXPRESSED IN HEART, SIGNAL =  14; EXPRESSED IN BRAIN, SIGNAL =  10; EXPRESSED IN ADULT LIVER, SIGNAL = 9.5; EXPRESSED IN FETAL LIVER, SIGNAL =  18; EXPRESSED IN HELA, SIGNAL =  60; EXPRESSED IN LUNG, SIGNAL = 8.4; EXPRESSED IN BONE MARROW, SIGNAL =  16
taacccagtttggtggcaagttctttagtctttgccttttccagctttggcaatgcaagccagggattttggacccaggatgttgcctccccagtgactacagatctcatcatatctgttaatttaattggtcctggtagcttccaccagcttagccaaagctcctttgtctcccaagttaactggcgtgaaggtaacagtggtgctggtcttcctgtggactcagtaccccagtcttgccttcccctcattaatgcagtcaggaactcccatcttacaatccagggcaggcaggaagacagacagcttgctgggatccatgtcacacgcagtcaccatcagctgagccttcttgctgtgtgtgaa

SEQ ID NO: 1383 - DNA, 474 bp, Homo sapiens
  MAP TO AC009756.1; EXPRESSED IN PLACENTA, SIGNAL = 5.4; EXPRESSED IN BONE MARROW, SIGNAL = 6.9; EXPRESSED IN BRAIN, SIGNAL = 7.4; EXPRESSED IN HELA, SIGNAL = 6.7; EXPRESSED IN HBL100, SIGNAL = 4.1; EXPRESSED IN HEART, SIGNAL = 4.5; EXPRESSED IN LUNG, SIGNAL = 3.9; EXPRESSED IN ADULT LIVER, SIGNAL = 3.1; EXPRESSED IN FETAL LIVER, SIGNAL =   6; EXPRESSED IN BT474, SIGNAL = 4.3
  unsure 124
  unsure 134
  unsure 145
  unsure 168
  unsure 179
  unsure 198
  unsure 287
  unsure 311
  unsure 321
  unsure 332
  unsure 342
  unsure 354
  unsure 365
  unsure 372
  unsure 418
aaaccttgtaaatatatggaatatgggaatacatgtagtttttataaagactttaatgtataccagaaaattcataatgagaagttctataaatgtaaggaatacagaaggacctttgaaagangttggaaaangttactccacnttcaaagagttcatgatggtgangaaacactttngaatgctcattctgtgggnaaatcctttagagtgcatgcacaacttactcgacatcagaaaatccatactgatgagaaaacttacaaatgtatggaatgtggcaaggnacttcagatttcattcacagcttnaccgaacatncagagaattcnatactggtgnagaaaccctacnaaatgtatgcnactgtgnagaaggtttttagaattagttcacagctcattgaacatcagagaanttcacactggtgagaaaccttatgcatgtaaggaatgtgggaaggcttttggagta

SEQ ID NO: 1384 - DNA, 483 bp, Homo sapiens
  MAP TO Z97055.1; EXPRESSED IN BONE MARROW, SIGNAL = 8.2; EXPRESSED IN BT474, SIGNAL = 5.8; EXPRESSED IN LUNG, SIGNAL = 9.1; EXPRESSED IN BRAIN, SIGNAL = 6.4; EXPRESSED IN ADULT LIVER, SIGNAL = 7.5; EXPRESSED IN FETAL LIVER, SIGNAL = 6.9; EXPRESSED IN PLACENTA, SIGNAL =   7; EXPRESSED IN HEART, SIGNAL = 7.7; EXPRESSED IN HELA, SIGNAL = 5.9; EXPRESSED IN HBL100, SIGNAL = 4.6
tcacagcatgagacaggaggtcagcacaagatacaggtcataagcaccttgctaataaagtatgttgcagtaaagatgctggctaaaacccaccaaaaccaggatggccatgacagtcacctctggttgtcctcactgctacactcccaccagcaccatgacagtttacaaatgccattgcaacatcaggaagttatcctatatggtctaaaaaaggggggcatgaataatccaccccttgtttagcatatcatcaagaaataaccataaaaatgggcaaccagcagccctcggggctgctctgtctatggagtagccattctttcattcctttactttcctaataaacttgctttcactttatgaactcaccctgaatttctttcttcttcctccactacttcttcttcttcttcttcttcttcttcttcttcttcttcttcttcttcttcttcttcttcctcttcctcttcttcttcttcc

SEQ ID NO: 1385 - DNA, 473 bp, Homo sapiens
  MAP TO AC006001.2; EXPRESSED IN PLACENTA, SIGNAL = 4.6; EXPRESSED IN HELA, SIGNAL =  12; EXPRESSED IN HEART, SIGNAL = 5.4; EXPRESSED IN BONE MARROW, SIGNAL = 4.8; EXPRESSED IN BRAIN, SIGNAL = 7.3; EXPRESSED IN BT474, SIGNAL =  14; EXPRESSED IN HBL100, SIGNAL = 8.5; EXPRESSED IN LUNG, SIGNAL = 5.5; EXPRESSED IN ADULT LIVER, SIGNAL = 2.4; EXPRESSED IN FETAL LIVER, SIGNAL = 6.4
aagcaatttcatccagccagtgtgttatttcgaatttctctggctgtctttgtctcctttggcaaaaaaaaaaaaaaaaattgatctctttcaataaacccatttattaaatttcatcaatatgctatctcctcttctaggtactatggaagatatcaaggtcccatactcaagcctacgctaatcacctgctaggactacaaagttgattgtagagggagagacatacccaaagtgtgtgccatctcggtcgatgaagtaccggccctcggagtccgtggggatgtagtgccgcccactgaacatggctgccaacatggtgtcttcgtagcaccgcagtgtggacaggcgtgtagtgaagtgagcccctccgatgttaaggggaacaacctcaggaaactggaaagaaatcaccagggctctcaggcaggcaacggggaatgagagctggggctgctccatcttcaatccct

SEQ ID NO: 1386 - DNA, 483 bp, Homo sapiens
  MAP TO AC007728.1; EXPRESSED IN BT474, SIGNAL = 0.98; EXPRESSED IN FETAL LIVER, SIGNAL = 0.92; EXPRESSED IN HBL100, SIGNAL = 1.5; EXPRESSED IN HELA, SIGNAL = 1.3; EXPRESSED IN PLACENTA, SIGNAL =   1; EXPRESSED IN HEART, SIGNAL = 0.89; EXPRESSED IN LUNG, SIGNAL =   1; EXPRESSED IN BONE MARROW, SIGNAL = 1.3; EXPRESSED IN BRAIN, SIGNAL = 1.4
cattaggacaagtgggtcgcaagcttcaggggcggcaaagggaagtcagaaaacatggtgagaaaattattctgcagtgatagcttttctgacaaatataacagtttgtcaaaaagcatataatagggcgaaatctgcacaaaacctcacagagaaaaaaattgaaatttttgggtcaagttaaattaccagttccagtccagcgagcacttcattcagtcctggtggctgaccgatccaacggattaccccatagaaaggagggttctccttaacttcagccaatgagcccacttctagaccatgtgagttcccaggaggcatggccaagggtggactctcttggacgggtgcagtgtttagctcttccattacagactgggctgacagagaaagtggactgtggccaatacttccattggtattgggcatcttggtgagactgaatggtaaagagtggaatctgttctcggtggtcagtga

SEQ ID NO: 1387 - DNA, 474 bp, Homo sapiens
  MAP TO AC006042.2; EXPRESSED IN HELA, SIGNAL = 1.4; EXPRESSED IN HEART, SIGNAL = 0.97; EXPRESSED IN PLACENTA, SIGNAL = 1.2
tggcaatgagatgatatgcagatttatataaaatggataggcttcatagggtctgtgggagccctggaaatgtatgtgagatttaacatgaatgtattttccttgggacatggttcatacatttcatctgatcatacaacagggctattagtgtaaatatatatatcacaggaaaaattgacaggatgacattctacaaactatgaagttagataactttaaattttattttattcactaatgactaatcttttttttcactttctgtagcggacaaggcaaaatctcagcaagttcggacctctagtacaataaggcgaacctcctctttggatacaataacaggaccttacctcacaggacagtggccacgggatcctcatgttcactacccttcatgcatgaaagacaaagctactcaggtaaaatcaggaaatcaaaatcagcttattaccctgcacttcttctgttttg

SEQ ID NO: 1388 - DNA, 483 bp, Homo sapiens
  MAP TO AF165423.1; EXPRESSED IN ADULT LIVER, SIGNAL =  16; EXPRESSED IN BT474, SIGNAL = 8.1; EXPRESSED IN FETAL LIVER, SIGNAL = 9.2; EXPRESSED IN HBL100, SIGNAL =  10; EXPRESSED IN PLACENTA, SIGNAL =  15; EXPRESSED IN HELA, SIGNAL =  16; EXPRESSED IN HEART, SIGNAL = 9.4; EXPRESSED IN BONE MARROW, SIGNAL = 9.2; EXPRESSED IN LUNG, SIGNAL = 7.1; EXPRESSED IN BRAIN, SIGNAL =  16
gtctgaaaagtggcctcgtgggaggagaaagactgaccgtccccgagcccaacaccagtaaagggtctgtactgaggtggattagtcaaagaggaaagcctcttgcagttgagagaggaaggccgctgtcttctgcctgcccctgggaactgaatgtctcggtataaaacccaattgtacatttgttcaattctgagatgggggaaaaaccgccctatggtgggaggtgagacatgttggcagcaatgctgccttgttattctttagtccgctgagatgtttgggtggagagaaacataaatctggcttacgtacacgtccagtcatagaaccttcccgtgaacttcatgatgacatagattctattgctcacatgttcgttgctgaccttctccttattatcaccctgactcctactacattcctttttgctaaaataataaaaataataatcaataaaaactgagggaactcagaggccag

SEQ ID NO: 1389 - DNA, 472 bp, Homo sapiens
  MAP TO AL050343.14; EXPRESSED IN BONE MARROW, SIGNAL = 1.7; EXPRESSED IN LUNG, SIGNAL = 1.9; EXPRESSED IN BRAIN, SIGNAL = 2.2; EXPRESSED IN BT474, SIGNAL =   3; EXPRESSED IN ADULT LIVER, SIGNAL = 1.7; EXPRESSED IN FETAL LIVER, SIGNAL = 2.3; EXPRESSED IN HBL100, SIGNAL = 2.7; EXPRESSED IN HELA, SIGNAL = 3.3; EXPRESSED IN PLACENTA, SIGNAL = 4.5; EXPRESSED IN HEART, SIGNAL =   4
tcatctggcagctttacttttatgtgaaatattttaccctgcaactgagacaggtaagtgcatttttgtactgctaagtaaatttgtttaaagtttgtgtatgtggttttcagtacttttttggttaatctgatactgttttcccatcttacattgtgataaaaatggtctctctttagaaacacatcctttatagaactttgaccaaacatttctttattctgaagattcatttctaataacaaaactttgagtgttttttttctgccctctgtacagagatgtacggcttttaatcttggaatatgcccgttggtctatgattgacaagtaccaggctttgatggacggcctttcccttgagtctctgctgagcttcgtcaaagaattcaaatcccagctctttgtggagggcctggtacaagggaatgtcacaagcacagtgagtgtgagatgctctgtaggccaggtc

SEQ ID NO: 1390 - DNA, 472 bp, Homo sapiens
  MAP TO AC010896.1; EXPRESSED IN HBL100, SIGNAL = 2.3; EXPRESSED IN HELA, SIGNAL = 2.2; EXPRESSED IN HEART, SIGNAL =  17; EXPRESSED IN LUNG, SIGNAL = 1.4; EXPRESSED IN BRAIN, SIGNAL = 2.2; EXPRESSED IN ADULT LIVER, SIGNAL =   2; EXPRESSED IN PLACENTA, SIGNAL = 2.3; EXPRESSED IN BONE MARROW, SIGNAL = 1.6; EXPRESSED IN BT474, SIGNAL = 3.7; EXPRESSED IN FETAL LIVER, SIGNAL = 2.8
tggactctgctatgctgtaataggtgtagattctgtagttacaggaaagggttaattacttgctcaagatggaaaaaaaagatagtggttagaaaactttaatttgtgagccctctttagagatcctctttagagatcctctgcttgtcttggacttgattgattaatggtagacaaatagattttaacttttccaaataacacagaacaatcctaggtgttagcataacaccggttaacagtgtacctgctccttggatatctcctttcccagctccctgcggtttctgagttctccaccagtgagaccatgggccactctgcagaccgactggccgctgcctttgctgtttctcggctggaacaggatgaatatgcactgcgctctcacagtctagccaagaaggcacaggatgaaggactcctttctgatgtggtacccttcaaagtaccaggtgaaatgaaatgcttc

SEQ ID NO: 1391 - DNA, 471 bp, Homo sapiens
  MAP TO AL078623.21; EXPRESSED IN BT474, SIGNAL = 0.98; EXPRESSED IN FETAL LIVER, SIGNAL = 1.1; EXPRESSED IN PLACENTA, SIGNAL = 1.1; EXPRESSED IN HBL100, SIGNAL = 1.5; EXPRESSED IN HELA, SIGNAL =   1; EXPRESSED IN HEART, SIGNAL = 1.3; EXPRESSED IN BONE MARROW, SIGNAL = 0.93; EXPRESSED IN LUNG, SIGNAL = 1.3; EXPRESSED IN BRAIN, SIGNAL = 1.8
agtactgtagcctgggtggcttataaacaacggcaatttatttctcacatttctgaagtctgggaagtctaagatcacaatgccaccatggttggggtccagggaggatccttttttgagttgcagaatgccaattccttgctgtttcctcacatggcagaaagagggtgagagagctctctggagtccctattataaaaacactgatcctatttataagagttctaccttcactcctcaaacacctccctaggccccagctcctaccacagtcaccttgggggttagaatttcaacatatgaatttggagaaatgtaaacattcagtgcttaccagtgctttaggggatgttttacagaatcggacttttgctctgaagtggaggccatcaggaagtggtgttaacactatgattgaatactttaaaaatgtgatctacaatttggaaggaagtaaggttaaagctgtgg

SEQ ID NO: 1392 - DNA, 471 bp, Homo sapiens
  MAP TO AF165423.1; EXPRESSED IN PLACENTA, SIGNAL =   3; EXPRESSED IN HBL100, SIGNAL = 4.6; EXPRESSED IN HEART, SIGNAL = 1.9; EXPRESSED IN BONE MARROW, SIGNAL = 1.5; EXPRESSED IN LUNG, SIGNAL = 2.2; EXPRESSED IN BRAIN, SIGNAL = 3.3; EXPRESSED IN BT474, SIGNAL = 3.2; EXPRESSED IN FETAL LIVER, SIGNAL = 4.5; EXPRESSED IN ADULT LIVER, SIGNAL = 3.5; EXPRESSED IN HELA, SIGNAL = 8.9
atcatctcccacggtaccacaggcctggtcacatgggacgctgcccgctaccttgcagaatgggccatcaagaacctggcagccttcactaacaggtgacctcggggcacagggcagccgccatctaccttgcagaatgggtcattgagaacctggcagccttcactaacaggtgacctcggggcacagggcagggcaccgaggcaggcttaccctggtgcagtcgaagacacggtcccctttcctcccgccaggactgtcctagagcttggcagtggcgccggccttacaggcctgtccatctgcaagatgtgccacccccggacatacatcttcagcgactgtcacagccgggtcctcgagcagctccgagggaatgtccttctcaatggcctctcattagaggcagacatcactgccaacttagatagccccagggtgacagtggcccagctggactgggacgtagcg

SEQ ID NO: 1393 - DNA, 466 bp, Homo sapiens
  MAP TO AC010680.2; EXPRESSED IN HEART, SIGNAL = 9.1; EXPRESSED IN BRAIN, SIGNAL = 3.4; EXPRESSED IN BT474, SIGNAL = 5.3; EXPRESSED IN ADULT LIVER, SIGNAL = 1.4
ccatagtcaaaaatttaaatggaaccaatacaaaaaaaaaaaacaaattatcaataaaatagatctgaaatactgatgttgtttaactaggtagatttttgtttagtgaagcagttggatggatagaattaatatgctaatagtatctttatctattttagctcctgaaatcattgatgtatcctctaaagctgaagaagtaaaaataatgactataaccagaaagaaagaggttcagaaagaaaaagaagctgtgtatgagaaaaagcaagcagtccacaaggagaagagagtcttcattgaatctttcgaagaaccttatgacgaactggaggtagaaccatacacagagccatttgaacaaccttattatgaagaaccagatgaagactatgaagagattaaggtagaagctaaaaaagaagttcacgaggaatgggaagaagattttgaagaagggcaagaa

SEQ ID NO: 1394 - DNA, 456 bp, Homo sapiens
  MAP TO AF188032.1; EXPRESSED IN BT474, SIGNAL = 2.7; EXPRESSED IN FETAL LIVER, SIGNAL =   4; EXPRESSED IN PLACENTA, SIGNAL = 3.5; EXPRESSED IN HBL100, SIGNAL = 2.9; EXPRESSED IN HEART, SIGNAL = 3.1; EXPRESSED IN LUNG, SIGNAL = 3.2; EXPRESSED IN BRAIN, SIGNAL = 3.3; EXPRESSED IN ADULT LIVER, SIGNAL = 4.6; EXPRESSED IN HELA, SIGNAL = 3.3; EXPRESSED IN BONE MARROW, SIGNAL = 4.4
ccccttcttcacagctcaactaggcagtgccccaggggggactctgtgtgggggctccaaactcacattttccttccaagctgctcaagtagagatctccatgagggctctgcctctgcagtaggcttctgcttggccacccaggctttccatacatcctctgaaatctaggcacaggcttctaagcctcagctcttgcattctttgaaactgcaggcttaacaccacctggaagccaccaaggtttacagcttttgccctccagaagagcagcctgagctgtacctgagcccctttgagacatggctggagctggagtggctgaaatgcaaagagcagcgtcctgaggttgagcaaggcagcagggccctggacctggcccacaaagaaaccactcagtcttcctacaactctggaactgtgatgggaggggctgccatgaaggcctctgaaatg

SEQ ID NO: 1395 - DNA, 465 bp, Homo sapiens
  MAP TO AP000459.2; EXPRESSED IN BT474, SIGNAL =  73; EXPRESSED IN FETAL LIVER, SIGNAL =  28; EXPRESSED IN HBL100, SIGNAL =  83; EXPRESSED IN HEART, SIGNAL =  19; EXPRESSED IN LUNG, SIGNAL =  14; EXPRESSED IN BRAIN, SIGNAL =  59; EXPRESSED IN ADULT LIVER, SIGNAL = 7.3; EXPRESSED IN PLACENTA, SIGNAL =  24; EXPRESSED IN HELA, SIGNAL =  56; EXPRESSED IN BONE MARROW, SIGNAL =  30
ttattttgagccagccaaccagatggtaagatgtgatccacaccatggtaaatacataacttgcagcctattgtaccctggtgacgtggttcccaaagacttcagtgctgccactgacaccatcaaaaacaaatgcagcatccagtttgtggattgctgtccctctagcttcaaggttggcattagttaccaacttcccactgtggtacctgttggagacccagccaaaggacagagagctgtgtgcatactgagcaacatcacagccattgctgaggtgtgggctcacctggaccgcaagttttacctgatgtatgccaagttcctttgttcagtattccgtgggtgaacgggtggaggaaggagagttttccgaggcccaccaggacatggttgtccttaagaaggattatgaagtggttagtgtggattctgttgaagaagagggtgagaaggaaggagagg

SEQ ID NO: 1396 - DNA, 465 bp, Homo sapiens
  MAP TO AC011342.1; EXPRESSED IN HBL100, SIGNAL = 1.2; EXPRESSED IN BONE MARROW, SIGNAL = 1.8; EXPRESSED IN BRAIN, SIGNAL = 1.6; EXPRESSED IN FETAL LIVER, SIGNAL = 1.2; EXPRESSED IN HELA, SIGNAL = 0.91; EXPRESSED IN HEART, SIGNAL = 0.96; EXPRESSED IN LUNG, SIGNAL =   1; EXPRESSED IN BT474, SIGNAL = 1.4
ggtagaagagcccttccaataaagattatatgtaaaaaaaaatccagtagataaaatataaaaggagagcatctatattactagttaagacaggggtgggagttgcctgacctccccaagcctgcagtaggctccctcccacctctccaaagtggtctctcaggtgtctgtgaaattctagggctccaaagcaatggcttgtttctgagcacattcagtgattctaaatatctcctttcattgcaggtgtctcagccatcctcatcccccgcctggacttggtcatctccctggtaggctccgtgagcagcagcgccctggctctcatcatcccagccctcctggagatcgtcatcttttactctgaggacatgagctgtgtcaccattgccaaggacatcatgattagcatcgtgggccttttagggtgtatatttgggacataccaagccctctatgagttgc

SEQ ID NO: 1397 - DNA, 454 bp, Homo sapiens
  MAP TO AP000514.1; EXPRESSED IN HELA, SIGNAL =  45; EXPRESSED IN PLACENTA, SIGNAL =  14; EXPRESSED IN HBL100, SIGNAL =  28; EXPRESSED IN HEART, SIGNAL = 8.2; EXPRESSED IN LUNG, SIGNAL = 6.2; EXPRESSED IN BONE MARROW, SIGNAL =  33; EXPRESSED IN BRAIN, SIGNAL =  13; EXPRESSED IN BT474, SIGNAL =  23; EXPRESSED IN FETAL LIVER, SIGNAL =  11; EXPRESSED IN ADULT LIVER, SIGNAL = 4.2
tcctagcaagccagaggaagggcttttcaaagttatagttacttttggcagaaatgtcgtagtactgaagattcttctttcggtggaagacaatggatttcgccttcactttcctgtccttaatatccactttgttgccactcaacacagtgggggtgttttcacacactcataccagatctctatgccagttaggcacattcttgtaagtaactctcgatgttacatcaaacactatgatggtactctgggcttggatataatagccatctctcagtccactgaatttctccaggccggctgtgtcccatacattgaacttaacaggtcctctgttggtatggaacactaggggatgaacctcaacacccaaggtggctacatacttcttctcaaattcaccagtcaaatgatgtttcacgaaagtcgtttttccagtaccaccatcaccaac

SEQ ID NO: 1398 - DNA, 464 bp, Homo sapiens
  MAP TO AL109752.4; EXPRESSED IN ADULT LIVER, SIGNAL =  75; EXPRESSED IN BT474, SIGNAL = 4.9e+02; EXPRESSED IN FETAL LIVER, SIGNAL = 1.6e+02; EXPRESSED IN HELA, SIGNAL = 3.9e+02; EXPRESSED IN PLACENTA, SIGNAL = 3.6e+02; EXPRESSED IN HBL100, SIGNAL = 3.7e+02; EXPRESSED IN HEART, SIGNAL =  90; EXPRESSED IN BONE MARROW, SIGNAL = 2e+02; EXPRESSED IN LUNG, SIGNAL = 1.3e+02; EXPRESSED IN BRAIN, SIGNAL = 1.2e+02
cgtgattacagggacatctcaggttgactgtgctgtcctgattgttgctgctggtgttggtgaatttgaagctggtatctccaagaatgggcagaccagtgagcatgcccttctggcttacacactggatgtgaaacaactaattgttggtgttaacaaaatggattccactgagccaccctgcagccagaagagatatgaggaaatcgttaaggaagtcagcacttacattaagaaaattggctacaaccccaacacagtagcatttgtgccaatttctggttggaatgatgacaacatgctggaggcaactgctaacgtgccttcgttcaagggatggaaagtcacctgtaaagatggcaatgccagtggaaccacgctgcttgaggctctggactacatcctaccaccatctggtccaactgacaagcccttgcgcctgcctctccaggatgtccacaaaa

SEQ ID NO: 1399 - DNA, 452 bp, Homo sapiens
  MAP TO AL050402.16; EXPRESSED IN HEART, SIGNAL = 3.1; EXPRESSED IN BT474, SIGNAL = 2.4
atcctttctgagcgagatgcttgctgaatactaatcggaagggttccaggctgccagggggcatttatcctgccacagaggccccagtgggtcccaccccttctctctcccttgggcaggggtgccgagggctgagcacccttctccacaccatgtgttacctttatttccctttgtggccggggacagagggggaacaggtggacgcgacctgaaaccttccccacccccacctgggcgtcttcttcccaggaagccgtgggactggtagcaagattgttttatgcaaattccaatatctgtatgcagccacggccgtgaggatgaacacaagaaataattgccaaattatgcacgttgagttggttttcctgagtctcgagcccttaaaagataaagaagaaacacagcgacgagagtgtctaaaacagacaaacaacctcttggctctg

SEQ ID NO: 1400 - DNA, 451 bp, Homo sapiens
  MAP TO AC011481.1; EXPRESSED IN BT474, SIGNAL = 5.7; EXPRESSED IN PLACENTA, SIGNAL =  13; EXPRESSED IN HBL100, SIGNAL = 7.5; EXPRESSED IN HEART, SIGNAL = 7.1; EXPRESSED IN BRAIN, SIGNAL = 8.3; EXPRESSED IN ADULT LIVER, SIGNAL =  32; EXPRESSED IN FETAL LIVER, SIGNAL =  33; EXPRESSED IN HELA, SIGNAL =  11; EXPRESSED IN LUNG, SIGNAL = 6.1; EXPRESSED IN BONE MARROW, SIGNAL = 8.5
acaagtccctggggagaaagcacagatggttagagggaggaggggctgggggcctggactcctgggtctgagggaggagggtctggggacctggactcctgggtctgagggaggaggggctgggggcctggactcctgggtctgagggaggacgggctgggggcctggactcctgggtctgagggaggaggggctgaggcctggactcctgggtctgagggaggaggggctggggcctgaacttctgggtcctggatgcagtcggtggtatgggccagaccccatttctccaggggcaggtgctacctgagtttctcatctacagcgggcaggtatgtcttctcgtacaggttctgggcggctgtctttgctgactcccagtaactggagagagattccttcacctgggtgaggaaggtcgggctaggcatctcatcttgctggggctgtt

SEQ ID NO: 1401 - DNA, 463 bp, Homo sapiens
  MAP TO AC010686.1; EXPRESSED IN BONE MARROW, SIGNAL =   2; EXPRESSED IN BT474, SIGNAL = 5.4; EXPRESSED IN HBL100, SIGNAL = 8.9; EXPRESSED IN HEART, SIGNAL = 2.1; EXPRESSED IN LUNG, SIGNAL = 1.5; EXPRESSED IN BRAIN, SIGNAL = 2.1; EXPRESSED IN ADULT LIVER, SIGNAL = 1.5; EXPRESSED IN FETAL LIVER, SIGNAL = 2.5; EXPRESSED IN PLACENTA, SIGNAL = 3.6; EXPRESSED IN HELA, SIGNAL =   5
tttcgctggaaatcatcaagaacacttactaccctcctatttccacacctcaacttctgctgaaatgaagggtgagacttatggtcaatgaaaaacatctgttcagaacctaagaattgtcattgtctgtaagtctcatgtttcatcccgcccaatactatatggccccagggacctgccatagggaggtctggttgtcctgctccctgaaggttaggtattttattgcttccagattgttctaatatggttttcagccatctgacatttttttctaggtgtttgctgagaacaaggatgagattgctttagtcctgtttggtacagatggcactgacaatcccctttctggtggggatcagtatcagaacatcacagtgcacagacatctgatgctaccagattttgatttgctggaggacattgaaagcaaaatccaaccaggttctcaacaggctgactg

SEQ ID NO: 1402 - DNA, 449 bp, Homo sapiens
  MAP TO AL078621.19; EXPRESSED IN PLACENTA, SIGNAL = 1.1; EXPRESSED IN HBL100, SIGNAL = 1.4; EXPRESSED IN HELA, SIGNAL = 1.3; EXPRESSED IN HEART, SIGNAL = 2.4; EXPRESSED IN LUNG, SIGNAL = 1.6; EXPRESSED IN BRAIN, SIGNAL = 1.3; EXPRESSED IN FETAL LIVER, SIGNAL = 2.6; EXPRESSED IN ADULT LIVER, SIGNAL = 1.7
cgactgaagatcagtgaggcatatcttatttacaggttaataattggctactagatgcaggtgcaccaaatggtcttagagacattagataggagagacaatgtcagtgctccccctaccctgcctcccctaatctaaagcctactctgtttcttttatcaagtgattggctgtatgttaacagagcctggggcactttcctgttgaaatgcctttaatcccaagcaactggattgattttttttttttttttttggatggtttagattggacgactgattattggacagaatggcatcttgtcgacacctgcggtctcctgcattatcaggaagatcaaggcagctggtggaatcattctaacagccagccactgccctggaggaccagggggagagtttggagtgaagtttaatgttgccaatggaggtatgtggttcagtatatgc

SEQ ID NO: 1403 - DNA, 456 bp, Homo sapiens
  MAP TO AL121577.1; EXPRESSED IN FETAL LIVER, SIGNAL = 0.92; EXPRESSED IN BT474, SIGNAL = 1.2; EXPRESSED IN HEART, SIGNAL = 3.3; EXPRESSED IN BRAIN, SIGNAL = 1.1
atgcaaatgaatgagcatggctattctttaataaaactttatttagaaaaactggcagtgagccatatttggcctgcaggctatagtttgctagaagcctagttcttaggcaacttagttatcacattgctatatgagctttcaagtaatattggctttattgttttatatcctgttgatcttttcactaaatcaaactagctgtcctcccaattgtgtgaattttatgccttgtttgttaatacaggggcagctcacggcttgtcgtctattcttcagatgcttctttcttaccatgagcatctcaagccctcagatcgggaattggtatggcagagcgtggactttctcatggaacaggaacaaaactgcaactggccacctgagctcggcgagaccatcgagagagagaatgagctggtgcactggtgccatggcgctccaggtctcacacac

SEQ ID NO: 1404 - DNA, 466 bp, Homo sapiens
  MAP TO AC006371.2; EXPRESSED IN BONE MARROW, SIGNAL = 2.8; EXPRESSED IN LUNG, SIGNAL = 1.6; EXPRESSED IN BT474, SIGNAL = 1.5; EXPRESSED IN PLACENTA, SIGNAL = 3.3; EXPRESSED IN HBL100, SIGNAL = 3.7; EXPRESSED IN HEART, SIGNAL = 2.1; EXPRESSED IN BRAIN, SIGNAL = 1.9; EXPRESSED IN ADULT LIVER, SIGNAL = 5.9; EXPRESSED IN FETAL LIVER, SIGNAL = 1.7; EXPRESSED IN HELA, SIGNAL = 2.7
cctttccctgagttatggtggacatcattgaataattcatgggctttttcctaattctccttagtccttctagaatacaggtcagcagatgtttatgactgcagtccccatgatttgagtctaggtcctggtggggatccatactggggttggcttgttgactggtttagaatttgtccctttcttcagctgtcattctagcatttacttgaccaagatatcaggtatctccaaactcttgggctgcagctaaagccacattattttcattaaacgccagggtttggtctaacaaaagcatgacatctatccaattgaggtcaaagatttgccctagaccatgtaggacatctatataactatcaggatcatctgaaaacttccgcagatctaccttgatctgctttaaatcagagaggaagaaggggacatgtacccaggttgggccaaattcccctccccctac

SEQ ID NO: 1405 - DNA, 455 bp, Homo sapiens
  MAP TO AP000555.1; EXPRESSED IN BONE MARROW, SIGNAL = 2.8; EXPRESSED IN BT474, SIGNAL =   6; EXPRESSED IN HEART, SIGNAL = 2.9; EXPRESSED IN HBL100, SIGNAL = 6.8; EXPRESSED IN LUNG, SIGNAL = 2.2; EXPRESSED IN BRAIN, SIGNAL = 7.3; EXPRESSED IN ADULT LIVER, SIGNAL = 2.2; EXPRESSED IN FETAL LIVER, SIGNAL = 2.9; EXPRESSED IN PLACENTA, SIGNAL =   4; EXPRESSED IN HELA, SIGNAL = 5.1
agttccaccctgggacatccccagaaaccgcccacagctcagcactgcaacctttgtacttctctcaccaaatgtcgagtgaagctgccactttaaatctttttttgtaagtcttacaaacattaagtactgcacataacgcttcttgacaagtgttacacctctatatggtacaagtgaccacagtaactacagagtgacactgctgggtgcagtacttcctttttatttagaaaaatgactgcattttctaaaagctgggccaatagcacataccttatatatgttagtgactaccatgatatgagaaaagacgtggacaagtgctccccaaggattccggagacggaagcacttgctgcaggctgcaacatcagccaaggtatttccacaagctcctgctctggggaaacagttatggtcaaaaggtgaagtgcaaataaggggctgtcact

SEQ ID NO: 1406 - DNA, 465 bp, Homo sapiens
  MAP TO AL096869.1; EXPRESSED IN PLACENTA, SIGNAL = 3.3; EXPRESSED IN HELA, SIGNAL =   3; EXPRESSED IN BONE MARROW, SIGNAL = 2.6; EXPRESSED IN BRAIN, SIGNAL = 2.3; EXPRESSED IN BT474, SIGNAL =   5; EXPRESSED IN HBL100, SIGNAL = 6.1; EXPRESSED IN HEART, SIGNAL = 4.5; EXPRESSED IN LUNG, SIGNAL = 2.4; EXPRESSED IN ADULT LIVER, SIGNAL = 1.5; EXPRESSED IN FETAL LIVER, SIGNAL = 3.2
cagatgaaccatatgaagttgccatttttatattcaaaacatggctgaatattggcaatttcatattagtcagcttggcgactattttgactgttgcccctgaacacaggaaatactggagaacttactatgggcccagcccaatggcgatatattcccggctccgaggaactgactggaaactcgaggacaagtaggatgcagagctcctgaagcctccatggctgactgtctctctctctctctgacctctccaggccctgatccttcaccagctaggccgctacagtctggcggagaagatcctccgggacgcggtgcaggtgaactcgacagcccacgaggtctggaacgggctgggcgaggtcctccaagctcagggcaacgatgcggcggctacggagtgcttcctgacagccttggagctggaggccagcagccccgccgtgcccttcaccatcatcc

SEQ ID NO: 1407 - DNA, 455 bp, Homo sapiens
  MAP TO AC010083.1; EXPRESSED IN BT474, SIGNAL = 2.3; EXPRESSED IN FETAL LIVER, SIGNAL =   1; EXPRESSED IN PLACENTA, SIGNAL = 0.97; EXPRESSED IN BONE MARROW, SIGNAL = 1.3; EXPRESSED IN BRAIN, SIGNAL =   5; EXPRESSED IN HBL100, SIGNAL = 1.6; EXPRESSED IN HEART, SIGNAL = 1.4; EXPRESSED IN LUNG, SIGNAL = 1.1
gaagcttcagattaagaagacggaattgcctgtacgggtgatggaattgctaggtgcctgcctgaaacgtggagcgaggacagaggcggagctggggagggagggcggtgggaaaggcggatgtgcagcgctagttcttgttaaggatgcttttcaggcttctctccacggcttcgtccagctcttcctccagctcctctttcttggacatggccaacttggactggtaatcccgcaccacctggtcgatgtacggggcactctgagtgccatgcagcatcagggtccactccttcagcacccccttctgcggggcgctgccgacaaatcccagctccagggtccaggtgcctcgggcgtcttccccccacgtgtgagtggtcatgaaaggccacttgtcaaagcccaccttggagtcgtcatcccttggacgccggctcagcaaaatggacttg

SEQ ID NO: 1408 - DNA, 464 bp, Homo sapiens
  MAP TO Z99716.4; EXPRESSED IN BT474, SIGNAL =  26; EXPRESSED IN ADULT LIVER, SIGNAL =   7; EXPRESSED IN PLACENTA, SIGNAL =  15; EXPRESSED IN BRAIN, SIGNAL =  11; EXPRESSED IN BONE MARROW, SIGNAL = 5.9; EXPRESSED IN FETAL LIVER, SIGNAL =  12; EXPRESSED IN HEART, SIGNAL =  25; EXPRESSED IN HELA, SIGNAL =  38; EXPRESSED IN HBL100, SIGNAL =  35; EXPRESSED IN LUNG, SIGNAL = 4.8
aaacctcgcaattccctttcagctccagctttgcccacatcagctgctacacgagtatgggcaaaatcaagagggtacacaaaacacaaggatgtggccccagtggcaccgcctgatgccagattccctgcaaagtagcgccaaaactgggatctcttgtccacaccatccaggaagatctgcttgtatttatctttgaaggtgaagttaagagcctgggtgggggaagtatctgatgacactggccaggttaccgcaccaggacaggactccgtgctccttgggaatacagaccatgcagtctctaatgcccttgtattgcttatctgcagtgatctgcttgctggcatgctgcacctgtagcagcagcttgacccgctcgatgggtgctaccgccatcttggagatggctgcggccactccacctgccagggagtccttggcgaaggacacagcagcctctg

SEQ ID NO: 1409 - DNA, 454 bp, Homo sapiens
  MAP TO AL049732.9; EXPRESSED IN BONE MARROW, SIGNAL = 2.3; EXPRESSED IN LUNG, SIGNAL = 1.6; EXPRESSED IN BT474, SIGNAL = 4.2; EXPRESSED IN PLACENTA, SIGNAL =   2; EXPRESSED IN BRAIN, SIGNAL = 4.1; EXPRESSED IN ADULT LIVER, SIGNAL = 2.8; EXPRESSED IN FETAL LIVER, SIGNAL = 3.3; EXPRESSED IN HEART, SIGNAL = 2.5; EXPRESSED IN HELA, SIGNAL = 2.7; EXPRESSED IN HBL100, SIGNAL = 3.9
agctgactccaccactaaagctggcactggtacaaggcatgccaccaaagctaatgctggcttcactgctgaaactagtgctggtgctgtgtgcacaaccaaagctaatgctggctgcgctgctgaagctggagctagtgctcagtgtaccaccaaagctaatgctggctgtattgctgaagctggcactggtgctgggtgcaacaccaaaggtaatgccaggtccaccactgaagccaccactggagctgggtgcaccattgaagctaatactagcaccatcgctgaagccagccctggtactagctcctctgctgaagttgacgttggtgctggcatctgcattttcttgggctctggcctcaatttcaaatgaaaatctgctccaggcctgagcatcatcgcctaactcttcccttgttaggcagtcgatatccatgtcatcccaattcca

SEQ ID NO: 1410 - DNA, 464 bp, Homo sapiens
  MAP TO AL031427.15; EXPRESSED IN PLACENTA, SIGNAL =  25; EXPRESSED IN HBL100, SIGNAL =  55; EXPRESSED IN HELA, SIGNAL =  36; EXPRESSED IN HEART, SIGNAL = 7.7; EXPRESSED IN BONE MARROW, SIGNAL =  13; EXPRESSED IN BT474, SIGNAL =  21; EXPRESSED IN LUNG, SIGNAL = 6.4; EXPRESSED IN BRAIN, SIGNAL =  11; EXPRESSED IN ADULT LIVER, SIGNAL =  13; EXPRESSED IN FETAL LIVER, SIGNAL =  18
gggtttcctgtttaagctgcagtaacttttctgactatggatcattgctccttctgtggcagatttttacagttcctctaatgcatgtgggacgactgtctcaaagtaacctgcagctttcctgacaactccttgctttctctcctgctaagaactgtagcccttttctgctgtttttagaaccttctgctaccatatctaccactcccaccaccagatccataaccaccatcatagggactgcctgagctgcttccaccaaaattgccccctttcatgagtccttaatttgattgctgttgtccattataatttccaaaatcattatagttcccaccaccaccatagttaccacggccaaaatttcctccttcattgtaaccatcatatcctccaccaccgccaccatatccaccaccttggtttccacatcctggtccaccacgaccatagccccctctact

SEQ ID NO: 1411 - DNA, 463 bp, Homo sapiens
  MAP TO AP000548.1; EXPRESSED IN BT474, SIGNAL = 0.99; EXPRESSED IN FETAL LIVER, SIGNAL = 3.1; EXPRESSED IN PLACENTA, SIGNAL = 1.3; EXPRESSED IN HEART, SIGNAL = 0.86
ttgaggtgttggtctgatgtgtctactataaaaggccatgataatatcttgtgaagtggtttggtgagaattttgtttattaagaactgcttctattgggtgaaaacagtgatttttctgagattctaaggcattacagtttttcctgccactgggcagcttaatactaaataatgacattttggtacctgatcagtggcttaaatatagtatagctatagggacaaatgcccctttatctttgcatttatttatttatttatttatttatttgtttgtttgtttgttttagactatttggagttttcctggtcttactggatgtcactctcgtccttgccgacctaattttcactgacagcaaactttatattccttcggagtatcgttctatttctctagctattgccttattttttctcatggatgttcttcttcgagtatttgtagaagggtaagtttg

SEQ ID NO: 1412 - DNA, 463 bp, Homo sapiens
  MAP TO AJ238093.1; EXPRESSED IN LUNG, SIGNAL = 7.5; EXPRESSED IN BT474, SIGNAL = 4.9; EXPRESSED IN PLACENTA, SIGNAL =  29; EXPRESSED IN BONE MARROW, SIGNAL = 6.8; EXPRESSED IN BRAIN, SIGNAL = 4.6; EXPRESSED IN ADULT LIVER, SIGNAL = 7.5; EXPRESSED IN FETAL LIVER, SIGNAL = 7.2; EXPRESSED IN HEART, SIGNAL = 5.2; EXPRESSED IN HELA, SIGNAL = 7.4; EXPRESSED IN HBL100, SIGNAL = 4.3
gaagagctgacggagaccactgtgcttcggtgacagattcggctccagagagggagctttctcccttaatctctttgccttccccagttccccctttgtcacctatacattccaaccagcaaactcttccccggacgcaaggaagcagcaaggttcatggcagcagcaataacagtaaaggctattgcccagccaaatctcccaaggacctagcagtgaaagtccatgataaagagacccctcaagacagtttggtggcccctgcccagccgccttctcagacatttccacctccctccctcccctcaaaaagtgttgcaatgcagcagaagcccacggcttatgtccggcccatggatggtcaagatcaggcccctagtgaatcccctgaactgaaaccactgccggaggactatcgacagcagacctttgaaaaaacagacttgaaagtgcctgccaaagc

SEQ ID NO: 1413 - DNA, 450 bp, Homo sapiens
  MAP TO AC004955.2; EXPRESSED IN PLACENTA, SIGNAL = 1.6; EXPRESSED IN HBL100, SIGNAL = 1.7; EXPRESSED IN HELA, SIGNAL =   2; EXPRESSED IN HEART, SIGNAL = 0.94; EXPRESSED IN BRAIN, SIGNAL = 1.1; EXPRESSED IN FETAL LIVER, SIGNAL = 1.2; EXPRESSED IN BT474, SIGNAL = 1.9
atgggctgtaaggaatggtggatataatgtcaatgatcactaagttttagaggatttgaaaggaagaatagtagaatgttttcaaaattaggaagtcagttgggaaagaaccagttttgttcattaggaatggaagtgatactttttttctggtatcaaaacaatcttgactttttctccttctcttagggtatatttccttttttccgatcctgcaacagcctctttaaactgtttaaatgagaatgtccttggctcagagagtactactcacctggcttttcacactactcttcttgatcatgttggtgttgaaactggatgagaaagcaccttggaactggttcctcatattcattccagtctggatatttgatactatccttcttgtcctgctgattgtgaaaatggctgggcggtgtaagtctggctttgaccctcgacatggat

SEQ ID NO: 1414 - DNA, 448 bp, Homo sapiens
  MAP TO AL121757.2; EXPRESSED IN BT474, SIGNAL = 9.9; EXPRESSED IN FETAL LIVER, SIGNAL = 3.4; EXPRESSED IN ADULT LIVER, SIGNAL =   5; EXPRESSED IN HBL100, SIGNAL = 7.2; EXPRESSED IN HELA, SIGNAL = 8.1; EXPRESSED IN PLACENTA, SIGNAL = 9.7; EXPRESSED IN HEART, SIGNAL = 1.7; EXPRESSED IN BONE MARROW, SIGNAL = 2.3; EXPRESSED IN LUNG, SIGNAL =   3; EXPRESSED IN BRAIN, SIGNAL = 1.9
ttcttctttaatgttggttatttcctttcttctgctgggtttgggtttggtttgttcttgtttctctagttccttgaggtgtaaccttagaatgtcagtttgtgctgtcagtctttttgatgtagatattttagggctatgaactttcctcttagcaccaccgttgctctatcccaggggttttgataggttgtgtcactattgtcattcagtctgaagaattttttaatttccatcttgattttgtttttgacccagtgatcattcaggagcagattatttaatttccatatattcgcatggttttgaaggttccttttggagttaatttttagttttattccactgtggtctaagagagtacttgatataattttaattttcttaaatttattgaggctcgttttgtggcctatcatatggtccatcttggagaaaattccatgca

SEQ ID NO: 1415 - DNA, 349 bp, Homo sapiens
  MAP TO AC006445.10; EXPRESSED IN BONE MARROW, SIGNAL =  20; EXPRESSED IN LUNG, SIGNAL =  12; EXPRESSED IN BRAIN, SIGNAL =  17; EXPRESSED IN FETAL LIVER, SIGNAL =  14; EXPRESSED IN ADULT LIVER, SIGNAL = 6.7; EXPRESSED IN PLACENTA, SIGNAL =  20; EXPRESSED IN HEART, SIGNAL =  15; EXPRESSED IN BT474, SIGNAL =  28; EXPRESSED IN HELA, SIGNAL =  34; EXPRESSED IN HBL100, SIGNAL =  66
atcatggccaccttcataccccttgtgaagcccaaaatagtcaaaaagagaaccaagaaattcatcgggcaccggtcagactgatatgtcaaaattaagcgtgactggcagaaacccagaggtagtgacaacagggttcatagaaggttcaagctccagatcttgatgcccaacattacttatgggagcaacaaaaaaacaaagcatatgctgcccagtggcttccagaagttcctggcccacaaggtcaaggagcaggaagtgctgctgatgtgcaacaaatcttactgtgctgagattgctcacaatgtttcctccaacaaccctggccagctttctttggagcagt

SEQ ID NO: 1416 - DNA, 452 bp, Homo sapiens
  MAP TO AB020862.1; EXPRESSED IN HBL100, SIGNAL = 2.6; EXPRESSED IN HELA, SIGNAL = 3.3; EXPRESSED IN HEART, SIGNAL = 3.9; EXPRESSED IN LUNG, SIGNAL = 5.4; EXPRESSED IN BRAIN, SIGNAL = 2.5; EXPRESSED IN ADULT LIVER, SIGNAL = 3.6; EXPRESSED IN PLACENTA, SIGNAL = 4.3; EXPRESSED IN BONE MARROW, SIGNAL = 3.2; EXPRESSED IN BT474, SIGNAL = 2.3; EXPRESSED IN FETAL LIVER, SIGNAL =   4
tgttattttctggaggatttttggttttagttttttttttttttatagcagccatcttaatgggtatgaggtggtctgttgtgctcatgttaaaaagatgcggaggatgcctgcatcctctgcatagcccagaagcactcaaacatcagaaggaagtgggacataagagatctccctggaaagtcgaggctgcagtgagccatgatcacaccactgcacttcagcctgggtgacagaggtgaccctgtctcaaaaacaataaagagagagagagagagagctcccactgaagcgtacgctaaaggaccaactgagtttcacgagaaggtggttcagattcccatgtcttcttccagtgtcgatcaatgccacctctccctcaattcatacttacagtgttatagggcattaaatgcacgtagttcacaaaagaagaaaaagttccagcctgg

SEQ ID NO: 1417 - DNA, 376 bp, Homo sapiens
  MAP TO AB020875.1; EXPRESSED IN HEART, SIGNAL = 1.2; EXPRESSED IN PLACENTA, SIGNAL = 1.4; EXPRESSED IN BRAIN, SIGNAL = 1.7; EXPRESSED IN FETAL LIVER, SIGNAL = 2.3
tcttttctatctcagtgcccgaactgatcaatcaaggattttattttcaattttaaaattctgggaatccaggtttgattctaccaagtatcagccaagtgaatctgagtagaccattcttcctttctttacatcatatcaatttagtactttgtgtaagctagaggaaattatatttgcttgcagtatcacctaagaagatcattaggttaccacaggtgataatacttgataaaccataacattgtgtccatcatcatcatcatcatcatgattctatctttgtttcctgtgattgagaccttgaggccaagaatgacgcgtcttcttttatctgtcccccaaatttctagtgcaatgataagccactcagtga

SEQ ID NO: 1418 - DNA, 477 bp, Homo sapiens
  MAP TO AC007298.17; EXPRESSED IN HBL100, SIGNAL = 0.92; EXPRESSED IN HELA, SIGNAL = 0.97; EXPRESSED IN HEART, SIGNAL = 0.97; EXPRESSED IN LUNG, SIGNAL = 1.1; EXPRESSED IN BRAIN, SIGNAL = 1.1; EXPRESSED IN ADULT LIVER, SIGNAL = 0.9; EXPRESSED IN PLACENTA, SIGNAL = 1.1; EXPRESSED IN BONE MARROW, SIGNAL = 1.4; EXPRESSED IN BT474, SIGNAL = 1.3; EXPRESSED IN FETAL LIVER, SIGNAL = 1.4
ggtacacatttcctgtgggcacaccattaaggcatctagtaaaaaatcctaattgtgctcaaaggactttcacagagtttggcagcttgaatagaggcgtggaacctgcagttcccaggcctggttgagtggagcctcgctgcggctgggagggtatcgggggatggtggtatgaaagtctgcaccaacgcagaaaaacaatgttgattttaattccactttgatatagatgacacataaaacttggtaaagggagtgctgcgaactaaagtcacaagaaggtggcattactctgtgatgtttcttccgtccagaatgaatggggattatcaagattttgacttgggaaaattcacgcaagatttccaaaagttgttggcttttggcttgcttgtagaaattgtaagggggcagccttggtcttcgtcgtggatataggaacaagtctgggcccagggcatggctaggaaatgaggt

SEQ ID NO: 1419 - DNA, 482 bp, Homo sapiens
  MAP TO AB023048.1; EXPRESSED IN BT474, SIGNAL = 2.1; EXPRESSED IN FETAL LIVER, SIGNAL = 1.5; EXPRESSED IN HBL100, SIGNAL = 1.4; EXPRESSED IN HELA, SIGNAL = 1.2; EXPRESSED IN HEART, SIGNAL = 2.2; EXPRESSED IN BRAIN, SIGNAL =   2; EXPRESSED IN ADULT LIVER, SIGNAL = 1.5; EXPRESSED IN PLACENTA, SIGNAL = 1.2; EXPRESSED IN LUNG, SIGNAL = 1.2; EXPRESSED IN BONE MARROW, SIGNAL =   2
cagagcggggtgaatctaacatgtctatggtgagaatagctcaggagaggggtggtgggggaggagagatggtagaaagccattcctctgtggccgtgtcctcacaatagaggtgggtgtcgtacagaggaggaggtagaatgtgtcacctggtggagttggtgatggaggaggcagaaggttgaggaaacgtgaccgtgatgggtatggaagtggaagatctatttgacttcggaagtggccacccaaatagaagagggcgggcttgtatacaaagtggcaggccctgcttcttttgtgactgtgatcactgggtgtaaggagggagctggaggaggagatgacagaattggattcattcatgggcatgccagtggccgtggctgggacggaggtgacatcatctaccacactgtggtggtcagcaaaggtggggtgagtgtgcttgggcagatgtgggaggacctgacccaagtggagaa

SEQ ID NO: 1420 - DNA, 464 bp, Homo sapiens
  MAP TO AC007425.16; EXPRESSED IN BONE MARROW, SIGNAL = 3.1; EXPRESSED IN LUNG, SIGNAL = 3.6; EXPRESSED IN BRAIN, SIGNAL = 3.4; EXPRESSED IN ADULT LIVER, SIGNAL =   3; EXPRESSED IN BT474, SIGNAL = 3.8; EXPRESSED IN FETAL LIVER, SIGNAL = 3.4; EXPRESSED IN PLACENTA, SIGNAL = 3.1; EXPRESSED IN HBL100, SIGNAL = 2.4; EXPRESSED IN HELA, SIGNAL = 2.5; EXPRESSED IN HEART, SIGNAL = 3.2
ggtggcttcgtgaattttccctggaattaaaacttactttgcctcccataactgaattgactgtatgtcagagggaggacagtggctgggaggtaactctgactttcatgctttattaagtcctcacttgcctgcagcctcacttcttttaggtatgacctaattttcattgagttcttttgtctgcacggctaataacgacattatcctcaacgacaataataacagctactgttttaagagtttgttcaatagtgccaggtattgtccactgtctcattccatccttacaacagcccctctgaagtcactattttcaacattttgcagacgaggaaactgaggcacagaaaagttgagttcttttctcaaggtcagatagggaataggatttgcaccaagtttctctttatccaagagtttgacctctgaagcactgtattcctctccttgcccccatattt

SEQ ID NO: 1421 - DNA, 384 bp, Homo sapiens
  MAP TO AL109847.1; EXPRESSED IN BT474, SIGNAL = 4.2; EXPRESSED IN FETAL LIVER, SIGNAL = 3.5; EXPRESSED IN PLACENTA, SIGNAL = 4.6; EXPRESSED IN HBL100, SIGNAL = 3.6; EXPRESSED IN HEART, SIGNAL = 3.5; EXPRESSED IN LUNG, SIGNAL = 5.1; EXPRESSED IN BRAIN, SIGNAL =   3; EXPRESSED IN ADULT LIVER, SIGNAL = 2.7; EXPRESSED IN HELA, SIGNAL = 3.3; EXPRESSED IN BONE MARROW, SIGNAL = 2.9
ttttagaaaagaccagagacttgagagatagactaacctgcatgtgaaattcacctccgtcacttttgctctggtatttcgagcaagttatttaacttcctttgtaaagtgaagattatacttctttagagttgctgtgaggatgaaagcactcagaataagttcttgttgaatggtggatgtataaggaataccatgtggtaatgattatatgtttcaatattgtcaggtgaagtgaaggacaaaaatgttcaagtggtcgagcttcccattgtagacagtcttcatccccgtcctccatatttacccttggctgtaccagaagacctcgcagatcgacttgtacgagtgcatggtgaccctgcagtgtggtgggtgtctcag

SEQ ID NO: 1422 - DNA, 500 bp, Homo sapiens
  MAP TO AC006364.3; EXPRESSED IN BRAIN, SIGNAL = 1.8; EXPRESSED IN BT474, SIGNAL = 1.5; EXPRESSED IN FETAL LIVER, SIGNAL = 1.1; EXPRESSED IN PLACENTA, SIGNAL = 2.1; EXPRESSED IN HELA, SIGNAL = 1.2; EXPRESSED IN HBL100, SIGNAL = 1.6; EXPRESSED IN HEART, SIGNAL = 1.9; EXPRESSED IN LUNG, SIGNAL =   1
ggtatcccttatttatttgatgagtgtaatttaaaaagttaaatgaaggtgaattgttgtgaaataaaaacctaacaggtccttttaatagaataaacttaaaattaattgttggagttcatgtcttttgtcactaaagaattcaaccagtagaaatgtaactctgaaaaaaaattattttccaaaatgttctgttatttaaagtctcattttgtctcatgttttgtgttaatatcccagtgaaccagtattagcatacagttccctctgtttattgttgtattctttctctccctcttcaagactcaatgatgaggcacggcggctcattgctgatttggggagcacatctattactaatcttggttttagagacaactgggtcttctgtggtgggaagggcattaagacaaaaagcccttttgaacaggttagtgtcatagactctcagaattaacaaaaacaaattctgtgaaaccttacggtacattttcccatcc

SEQ ID NO: 1423 - DNA, 364 bp, Homo sapiens
  MAP TO AC009311.1; EXPRESSED IN BONE MARROW, SIGNAL = 1.7; EXPRESSED IN LUNG, SIGNAL = 1.7; EXPRESSED IN BRAIN, SIGNAL = 1.3; EXPRESSED IN ADULT LIVER, SIGNAL = 1.4; EXPRESSED IN BT474, SIGNAL = 1.5; EXPRESSED IN FETAL LIVER, SIGNAL = 2.2; EXPRESSED IN PLACENTA, SIGNAL = 1.9; EXPRESSED IN HBL100, SIGNAL = 1.6; EXPRESSED IN HELA, SIGNAL = 2.3; EXPRESSED IN HEART, SIGNAL = 1.8
tttctgttcccagagcatccctcctttcctctgtgttccataatgccaccagagttctctttctaaaactcagatctgacttggatattctcttgcttggaaaatcttcctaagatttcttgtctcttctaagataaaataaaaaatattaagcagagattatgaatgtaaagttttgtaattcaaagctcttagaaatctttctatttatcattttttccttcttagatattttcaggaacatctaagaggacagtgcttctgacaggaatggaaggcattcaaatggatgaagaaattgtggaggatttaattaacattcactttcaacgggcaaagaatggaggtggagaagtagatgtgg

SEQ ID NO: 1424 - DNA, 430 bp, Homo sapiens
  MAP TO AB020866.1; EXPRESSED IN BONE MARROW, SIGNAL = 0.99; EXPRESSED IN BRAIN, SIGNAL =   1; EXPRESSED IN BT474, SIGNAL = 1.9; EXPRESSED IN FETAL LIVER, SIGNAL = 1.9; EXPRESSED IN HELA, SIGNAL = 1.5; EXPRESSED IN HBL100, SIGNAL = 1.4; EXPRESSED IN HEART, SIGNAL = 1.5; EXPRESSED IN LUNG, SIGNAL = 1.1
ttgtcgcctgaaccacataggcagagtcagagacaatataaacaggttgatcaaaatcttccaatacaaatataactgcttgtagcttagctctttgtggagaatgaaactgggtttgaataaccttttcttctggtcctgtataagctgcttttccattctgagagccatcagtaaagacagttacagccccctccaagaggatagaactggttattttaggtaaaatccaggtagccaattttaggaactgaaaaatttttgttttagggtaatgattatctatatggccaacaaaaccagctaaattagactgccattctgataaatgtataaaggcttgttgaacctgtgctttgtttaaaggaactacaattttatctggatcagtgccagtgaatctaactattcttaattgggcttggcctat

SEQ ID NO: 1425 - DNA, 479 bp, Homo sapiens
  MAP TO AC007115.1; EXPRESSED IN HEART, SIGNAL =  18; EXPRESSED IN LUNG, SIGNAL =  11; EXPRESSED IN BONE MARROW, SIGNAL = 0.95; EXPRESSED IN BRAIN, SIGNAL = 2.2; EXPRESSED IN ADULT LIVER, SIGNAL =   4; EXPRESSED IN BT474, SIGNAL = 1.4; EXPRESSED IN FETAL LIVER, SIGNAL = 3.6; EXPRESSED IN PLACENTA, SIGNAL =  34; EXPRESSED IN HBL100, SIGNAL = 1.3
gagccacaccctaatgcaacacaaatgttcccctaatgcagaggaataattccatgaggaaaatatcatgttgagtttattattaaatacaaaaagtcatttgacttggttgcaaaagataaagcaaaaattttaccctacaatgaatgtaattcttagaagaagaaaaatatgttgttactgttaagatgatcatcataacattaatttcttggtaaatatatgctgtgtgattctgtagccacatgtcctttctactcacagcacactcctattactcttatgctaggtctggacaaagtgccaaaggatcttccccctgacacaactctgctagacctgcaaaacaacaaaataaccgaaatcaaagatggagactttaagaacctgaagaaccttcacgtaagaactatttttttttaactcacaataagataagactcaaggtatttttcaaaacactacctagataaggccaa

SEQ ID NO: 1426 - DNA, 445 bp, Homo sapiens
  MAP TO AB020872.1; EXPRESSED IN HELA, SIGNAL = 0.93; EXPRESSED IN PLACENTA, SIGNAL = 0.97; EXPRESSED IN HBL100, SIGNAL = 0.91; EXPRESSED IN HEART, SIGNAL = 1.4; EXPRESSED IN LUNG, SIGNAL = 1.2; EXPRESSED IN BONE MARROW, SIGNAL = 0.93; EXPRESSED IN BRAIN, SIGNAL = 1.2; EXPRESSED IN BT474, SIGNAL = 0.96; EXPRESSED IN ADULT LIVER, SIGNAL = 0.95; EXPRESSED IN FETAL LIVER, SIGNAL = 0.97
tgctaaaatccagcttggtctccactcaccaagacaagcacttgctggatacatttctcttgagagtcatgctattttcacatggtcacaaaagctgtatgtgctgtctctatgttcttatagtcaataatcatcagcaagcaagtgcctgtgtacttctgcaagtcttcccacagtcctgaaagagctttccaaacgaggaaacaagaaacttagatactttacccaaagccacatttcaaaatgaacgagtctggatttaagtcaaaccagtgtttaaacaaacaaacaaacaacaacaacaacaacaacatcaacaaaaaactcataccaagaaaaaagaaagaaaaagcaaaagcagatatcttacttcctattgacttaagcaattctgttaaatgcagtgctatgaatctctccatcatcatccagtccacccaaaata

SEQ ID NO: 1427 - DNA, 494 bp, Homo sapiens
  MAP TO AC007458.13; EXPRESSED IN FETAL LIVER, SIGNAL = 2.3; EXPRESSED IN HELA, SIGNAL = 2.8; EXPRESSED IN PLACENTA, SIGNAL = 2.5; EXPRESSED IN HBL100, SIGNAL = 2.3; EXPRESSED IN HEART, SIGNAL =   2; EXPRESSED IN LUNG, SIGNAL = 1.7; EXPRESSED IN BONE MARROW, SIGNAL = 2.9; EXPRESSED IN BRAIN, SIGNAL = 2.3; EXPRESSED IN BT474, SIGNAL = 1.6; EXPRESSED IN ADULT LIVER, SIGNAL = 3.7
ttgccatcttcatgttcagcaaactaaggataaggaggaagtggaggagttggtcttgccatctcagggatggcagaagcaaaagaggtggaggaagtggaaggggaggcaggagaggcaggcacttggtgtaactttaaggaaatacatagtaatttctgtctgacttttttaatttctctaaaaatatttctatacagtactaacccttcttccaccatttgctttagtttcagtcctcgtatcatagaaaagttcatgtcataaaagaagttaaaaccactcttgaataattggaacccttatgccaattgtctaatgtcaatttgttttctgggattgcttcttctatgtcttcttcctcatcgtctggcactggttcagaaacactcatctccatcaagtcgtcttctgctaattcctgtggtgcagtgtctactagctcttgaatttctccaagatccatatcttgatatcttcaacctgctcctgcc

SEQ ID NO: 1428 - DNA, 476 bp, Homo sapiens
  MAP TO AC007568.1; EXPRESSED IN BRAIN, SIGNAL = 1.1; EXPRESSED IN ADULT LIVER, SIGNAL = 1.2; EXPRESSED IN BT474, SIGNAL =   1; EXPRESSED IN HEART, SIGNAL = 0.88
tttcatgtggtcagcattttctgtcactaggtctgtctggcatgcaacagaccttgtcacagttccttctgttcccacagatatggaaaccaaacgcctatcttttgtcttccgtggaagagagaggcttggtttgctgtcacttccccttttcagttgctcaatcattttcctcatcttgtctatctcctctttgaggtcagtggtgtgtgcttcttcccggttcagcttggcacgaagctgttcccgctcagtgtcaaactcagagagttgtttttccatctgagcttccatttctgtgcttcttcgtttctcagcggagagttcctcttctaattcattcgtctttttcttttcctcttccagtttggccattacgtcttcgagcttctgggcctcctctatgactttgcctgagagctgcttgcactctttgaccagcatcaggaccacctgcttgttcttgccacgctctt

SEQ ID NO: 1429 - DNA, 459 bp, Homo sapiens
  MAP TO AC009491.2; EXPRESSED IN BT474, SIGNAL = 2.6; EXPRESSED IN FETAL LIVER, SIGNAL = 1.9; EXPRESSED IN ADULT LIVER, SIGNAL = 1.4; EXPRESSED IN HELA, SIGNAL = 1.2; EXPRESSED IN PLACENTA, SIGNAL = 2.2; EXPRESSED IN HBL100, SIGNAL = 1.6; EXPRESSED IN HEART, SIGNAL = 0.9; EXPRESSED IN LUNG, SIGNAL = 1.2; EXPRESSED IN BONE MARROW, SIGNAL =   2; EXPRESSED IN BRAIN, SIGNAL = 1.5
ccacttgaatcctgtttcctgacttactttccctaaacaatttttgatagtctgattcattcgctccacctttccagaactctgaggtccataaacagcatgtagcttccaagtgagtcctaatgcctttgctgtcttctgtaccaagtcaggcaaaaacgccagccagttatttgagctgattcataagggcagtccaaacctaggaataagatttcagagaagcagatgttttacctcgtaggcctcttcagttcttgttggataagcctccacccacccagtgtaagtacacagaagaacccgcaaatacttgttacctctacattgcagcatttctgtgaaatccccctgaatatcctcaaaaggagctgctccataagcttgtatgaatggtggaactgtggggccttgcctcgcattggctgttggcaagtaacacaccatcgtgctactgct

SEQ ID NO: 1430 - DNA, 478 bp, Homo sapiens
  MAP TO AF152363.1; EXPRESSED IN PLACENTA, SIGNAL = 2.7; EXPRESSED IN HELA, SIGNAL =   3; EXPRESSED IN BONE MARROW, SIGNAL = 2.3; EXPRESSED IN BT474, SIGNAL = 1.5; EXPRESSED IN HEART, SIGNAL = 2.1; EXPRESSED IN HBL100, SIGNAL = 1.5; EXPRESSED IN LUNG, SIGNAL = 2.3; EXPRESSED IN BRAIN, SIGNAL = 2.2; EXPRESSED IN ADULT LIVER, SIGNAL = 2.8; EXPRESSED IN FETAL LIVER, SIGNAL = 2.8
aacccatggctaggctcagctttaaaaggtcttatctgtgattccttgtggaaaacatttccatcagtgccaatccaaaaagcctatgtagaaatagttattcttgctgcactttatgcaaataatcaggccaagtgtaagactaaagtctattttgcaaagcactcagtcctaccataatttttttaacaaaaatgaggactggagagacagaaattatgttccaaaatttgccatacatttgtcattaaatgctaaactcattagttgtttttaagttttcatctaccttttagaccaaccctgcttgctcctgtgaaccaagcagcaatctccagctgcagctcagaaagaacaggagggatgggtaatgtagaaatatggatcaatattctagctctgaacaattatcctgcaaaccctgccaggtgatggaataaatagggtgcccattaccaggaggtttcctttttgggaa

SEQ ID NO: 1431 - DNA, 484 bp, Homo sapiens
  MAP TO AC009743.1; EXPRESSED IN PLACENTA, SIGNAL = 2.1; EXPRESSED IN HELA, SIGNAL = 1.7; EXPRESSED IN BONE MARROW, SIGNAL = 1.9; EXPRESSED IN BRAIN, SIGNAL = 1.7; EXPRESSED IN BT474, SIGNAL = 1.4; EXPRESSED IN HBL100, SIGNAL = 1.5; EXPRESSED IN HEART, SIGNAL = 2.1; EXPRESSED IN LUNG, SIGNAL =   2; EXPRESSED IN ADULT LIVER, SIGNAL = 1.6; EXPRESSED IN FETAL LIVER, SIGNAL = 2.9
gaaactccttggcaaactgggacagttggtcgccctggatcagtggttctcaactgcagatgattttgcccctcaggtagggttgccagataaaacagaagatactctgttaagtttgattttcagatagacaatgaataatttttcagtataagtatgtcccaactactacaatgggacacatttagagttaaaaagaattattctttgcttgtctaaaattcgaatttaactaggcttttaaaacattttttaaaaaattttttttgtaaaactgacagtcttacccccaggagatagttggtaatgattggaagcctcttcggttttcacaaccacaacttcatcagggatgctactagcatctagtgagtagaggccaggcatgctgctaaacttcctataaggcaccaatgcagacaacagctgcctaaaacaaagaattatctggcctgaaatgtcagtggtgcagaggttgggaaat

SEQ ID NO: 1432 - DNA, 470 bp, Homo sapiens
  MAP TO AC009948.2; EXPRESSED IN BRAIN, SIGNAL = 5.4; EXPRESSED IN BT474, SIGNAL = 2.2; EXPRESSED IN ADULT LIVER, SIGNAL = 1.2; EXPRESSED IN HEART, SIGNAL = 9.7
tcacaacaatcagtgctggacttatttatgaattcagggtgtatgcagaaaatgctgctggagttggaaaacctagccatccttctgaaccagtcttggcaattgatgcttgtggtacgtatttgtcatgggaagggcagttctgataacaaaaatgcaaatcttacttctgcgaagcaaaatattataagtgccgctaatctgcttctcttattaccacagaacccccaagaaatgttcgtatcactgatatttcaaagaactctgtcagcctttcatggcaacaaccagctttcgatggaggtagcaagattacaggctacattgttgagagacgtgaccttccagatggcagatggaccaaggccagcttcaccaatgttactgaaactcaattcatcatctctggcttgactcagaattcccagtatgaattccgtgtctttgctaggaatgctgttggttccatt

SEQ ID NO: 1433 - DNA, 478 bp, Homo sapiens
  MAP TO AC009966.2; EXPRESSED IN PLACENTA, SIGNAL =  16; EXPRESSED IN HBL100, SIGNAL = 1.1; EXPRESSED IN HELA, SIGNAL = 1.3; EXPRESSED IN HEART, SIGNAL =   5; EXPRESSED IN BONE MARROW, SIGNAL = 0.99; EXPRESSED IN BT474, SIGNAL = 1.7; EXPRESSED IN LUNG, SIGNAL = 7.8; EXPRESSED IN BRAIN, SIGNAL = 6.5; EXPRESSED IN FETAL LIVER, SIGNAL = 1.5
gattaaagcccagagaggggcagtgacttgaccaaggtctcatggttacgagctaacaaggctatctgccatctggctccagagctcagcttcctaacaagtgccttggagtgactccacctgcatgggctcttggacaaggcagccccatgccccctccctacccatccctttatgcagccttagcagctccctctccagcaggcagaagggctgggtctggctggtgcttagacacacaccccagttccaacccactttgcctcccttagccaggactcttctggcaaaaacccaaaaaccttcccggagccagggtgatgacattacctaccttcatctgcttgatggtgtagaccagcgtgccgaagggcccctcctttaccagcttcttccccaccaccttggcccggatcactgcagagacagaaggagacaataagaggttaggaaggcctgaaccacatcaggaacagca

SEQ ID NO: 1434 - DNA, 349 bp, Homo sapiens
  MAP TO AC010132.2; EXPRESSED IN HBL100, SIGNAL =   1; EXPRESSED IN HELA, SIGNAL = 1.6; EXPRESSED IN HEART, SIGNAL = 1.3; EXPRESSED IN LUNG, SIGNAL = 1.3; EXPRESSED IN BT474, SIGNAL = 1.1; EXPRESSED IN PLACENTA, SIGNAL = 1.2; EXPRESSED IN BONE MARROW, SIGNAL = 2.5; EXPRESSED IN BRAIN, SIGNAL = 1.7; EXPRESSED IN ADULT LIVER, SIGNAL = 1.2; EXPRESSED IN FETAL LIVER, SIGNAL = 1.5
aaaagccagggctcttatgccaaacagttaagtaagtagtgaaagcaaaggaaaagttattgaaggaaattagagatgctatacaagtgagcacatgagtgataagaaagtgaaagggcctggttattgacatggagaaagtttgaatggtctgtgtagaagatcgaaccagaaacaacgttaccttaaaccaaagcccaatccagagcgaggccctaactctctttaattctatgaaggccgagagaagtgacaaagctgcagaagaaacgttggaagctagcataggtttgttcatgaggtttaaggaaagaagccatctccataacataaaagcacaaggtggagc

SEQ ID NO: 1435 - DNA, 489 bp, Homo sapiens
  MAP TO AF188030.1; EXPRESSED IN PLACENTA, SIGNAL = 1.8; EXPRESSED IN HBL100, SIGNAL = 1.5; EXPRESSED IN HELA, SIGNAL = 1.5; EXPRESSED IN HEART, SIGNAL = 2.2; EXPRESSED IN BT474, SIGNAL = 1.4; EXPRESSED IN LUNG, SIGNAL = 1.8; EXPRESSED IN BONE MARROW, SIGNAL = 1.6; EXPRESSED IN BRAIN, SIGNAL = 1.6; EXPRESSED IN ADULT LIVER, SIGNAL =   2; EXPRESSED IN FETAL LIVER, SIGNAL = 2.1
tgtggtcctatgactcagcatcttgagtgcttaaaatcccagtgaccttgggattttaaagcatgaattccagagccaggccacctggactcagaagggagtgctgcccccatcccgcccaagcctgagtgcatgacctggcaccagtgtgtgatgacctggcaccagtgtgtgaagacctgtgcgtgatgacctggaaccagtgcgtgatgacctgacaccagtgtgtgatgacttggcaccagtgcttgatgacctgacaccagtgcatcatgacctgacaccagcgcgcaatgacctgacaccagtgcacgatgacctggcaccagtgcgtgatgacctgacaccagtgcgtcatgacctgacaccagtgcgtgatgacctggcaccagtgcgtgatgacctgacaccagtgtgtgatgacctggcaccagtgtgcgatgacgtggccccagtgtgccatgacctggcaccagtgtgtgatgacct

SEQ ID NO: 1436 - DNA, 471 bp, Homo sapiens
  MAP TO AC009488.1; EXPRESSED IN FETAL LIVER, SIGNAL = 1.8; EXPRESSED IN ADULT LIVER, SIGNAL = 1.2; EXPRESSED IN PLACENTA, SIGNAL = 2.7; EXPRESSED IN HELA, SIGNAL =   2; EXPRESSED IN HEART, SIGNAL =   2; EXPRESSED IN BT474, SIGNAL = 1.9; EXPRESSED IN HBL100, SIGNAL = 3.8; EXPRESSED IN BRAIN, SIGNAL = 1.4; EXPRESSED IN LUNG, SIGNAL = 1.7; EXPRESSED IN BONE MARROW, SIGNAL = 1.5
tttgactcagagctgccatcctggagagcccacattggcatggtccccacggcccacccacagatgtggtgtttccctaggaagtgtggttggcttggcttggagctgcctaagagaaacactgacgtccccaacctcaccctttgggtccctgaaaatgctgcccctgctgcccctcccaggccctggtggagactcagctgtctggggaagctgctttgggcaggacccatcaccttgcctggtgttgcctgggcagcccccagctcaccttccaccctgatggctcaccttgggcatggcagccatagataccatcctgttggccacagaactcctgggccctacacctccagggctggcagcgaattctgttgttgctttcacagacgcacaactctttgcagcctggcttgtaccaccgctcccctacctggggaagacagcagggaaggaagagaaagtgttttt

SEQ ID NO: 1437 - DNA, 468 bp, Homo sapiens
  MAP TO AC009497.2; EXPRESSED IN BONE MARROW, SIGNAL =   1; EXPRESSED IN LUNG, SIGNAL = 0.91; EXPRESSED IN BRAIN, SIGNAL =  18; EXPRESSED IN BT474, SIGNAL = 4.9; EXPRESSED IN ADULT LIVER, SIGNAL = 5.9; EXPRESSED IN HEART, SIGNAL =   1
ccagcaacacagttcttgcctaagagatgctctcaatgttttcatgcatgtagacacagaagacaaaccaatgtatcaaaacttatggcttgaatttaaataaaaacagtattccccgacccccccaaaaaaggtaaactaagggagatggagttagtttgagtaggctctctagaaaaagtgggtttggaaaaattactcttctattttctgttcacatctaccagtatctgtacaaaactgcttatgagaaacagaaaggccattacattggctgtcgcagcgccaaggaagaccctaaactggtttgggcagcaaatgtgttgaagatgcagaatgacaggctgtacaaaaaggcctacaacgaccacaaagccaagatctccatccctgtggacatggtgtccatcagcgctgccaaagaaggtcaggcactggcaagtgatgtggactatcgccattacctgc

SEQ ID NO: 1438 - DNA, 491 bp, Homo sapiens
  MAP TO AC009571.2; EXPRESSED IN FETAL LIVER, SIGNAL = 8.1; EXPRESSED IN ADULT LIVER, SIGNAL =  11; EXPRESSED IN PLACENTA, SIGNAL =  16; EXPRESSED IN HBL100, SIGNAL =  57; EXPRESSED IN HELA, SIGNAL =  11; EXPRESSED IN HEART, SIGNAL = 7.7; EXPRESSED IN BRAIN, SIGNAL = 8.1; EXPRESSED IN BT474, SIGNAL =  17; EXPRESSED IN LUNG, SIGNAL = 8.6; EXPRESSED IN BONE MARROW, SIGNAL = 9.8
  unsure 432
gccagataagagaataaaagcaggctgcctgagccagcagcagcaacttgctcgagtccccttccacactgtgtaggctttgttcttcacactgtgtaggctttgttctttcactctttgcaataaatcttgctgctgctcactctttgggtccacactgcctttatgagctgtaacactcaccacgaaggtctgcagcttcactcctgaggccagcgagaccacaaacccaccaggaggaatgaacaactctgaacagaaggaatgaacaactccagacgcgccgccttaagagctgttaacactcaccgggaaggtctgcagcttcactcccgaagccagcgagaccacgaacccaaccgaaggaagaaactctaagcacgtctgaacatcagaaggaacaaactccggacacaccatctttaagaactngtaacactcaccgtgagaatccgtggcttcattcttgaagtcagtgagaccaagagccc

SEQ ID NO: 1439 - DNA, 467 bp, Homo sapiens
  MAP TO AC009958.1; EXPRESSED IN HBL100, SIGNAL = 2.6; EXPRESSED IN HEART, SIGNAL = 1.8; EXPRESSED IN BONE MARROW, SIGNAL =  84; EXPRESSED IN LUNG, SIGNAL =  15; EXPRESSED IN BRAIN, SIGNAL = 0.91; EXPRESSED IN ADULT LIVER, SIGNAL = 5.9
tggggattaggacaaggaaagacagctacgatgaagtgggccttcatggcccttttacaaaaactctccagtgaacttcaaagtgtgactgcaatttgagaaacattctcagcaggcgaaggcaccagaaggggcatctgggacagctgagcctcacgcatctgctcccctgggtgatttatgttatgacttgttacactgtgggagggagattatcatactgttgacagtaatatgttgcaatatcttcaggctgcaggctgctgatggtgaaagtaaaatctgtcccagatccacttccactgaaccttgatgggacccctgtttccaaattggatgcatcgtagatcaggagcttaggggctttccctggtttctgctgataccaatttaaatagttgctaatgtcctgactcgcctggcaagtgatggtgactctgtctcctacagatgcagacagggaggat

SEQ ID NO: 1440 - DNA, 478 bp, Homo sapiens
  MAP TO AF165176.1; EXPRESSED IN ADULT LIVER, SIGNAL = 2.4; EXPRESSED IN BT474, SIGNAL = 1.1; EXPRESSED IN FETAL LIVER, SIGNAL = 2.9; EXPRESSED IN PLACENTA, SIGNAL = 2.9; EXPRESSED IN HBL100, SIGNAL = 1.6; EXPRESSED IN HELA, SIGNAL = 2.6; EXPRESSED IN HEART, SIGNAL = 2.3; EXPRESSED IN BONE MARROW, SIGNAL = 2.2; EXPRESSED IN LUNG, SIGNAL = 3.5; EXPRESSED IN BRAIN, SIGNAL = 2.3
ttactgtttactatttgttgtgctttgattaagagtaattataggctaggaaaatatgaaaaacatgaatgttgggtatttttaaaaatagaaggaggcccttctccctgttttatattgatagaattctcattttagatcctattaaaatgatatcaacattctcaagatatttccaggcaggcttcagttctgtgacagcttttcagcaggggattcccatgtttgctcattatttgggtcgtcatagacccataaatatcctgcattttttttttttttacagcagcctctgtgtccctcacactcgtccattttggtccattttggtccattttgtgtctgatgataaagcacaggagaaatccacccgtcgctgggatccacaggggagtaacgccaaaacacggcaccgctactgtcttcgcagcttttaggatgaggagcctatttctctcccatcactgtaaaataattt

SEQ ID NO: 1441 - DNA, 459 bp, Homo sapiens
  MAP TO AL078592.4; EXPRESSED IN BONE MARROW, SIGNAL = 4.2; EXPRESSED IN LUNG, SIGNAL = 6.4; EXPRESSED IN BRAIN, SIGNAL = 4.4; EXPRESSED IN ADULT LIVER, SIGNAL = 3.8; EXPRESSED IN BT474, SIGNAL = 7.2; EXPRESSED IN FETAL LIVER, SIGNAL = 4.9; EXPRESSED IN PLACENTA, SIGNAL = 4.8; EXPRESSED IN HELA, SIGNAL = 4.2; EXPRESSED IN HBL100, SIGNAL = 4.9; EXPRESSED IN HEART, SIGNAL = 5.8
gatcgagggaaagaaaaggcaaaagattatacaaaaggaggaaaagagataggaaaagcatagtggcagaacaattaattctaatacacagccttgacatggagcaagaaggaggctgtctgcaagccatgaagagagagctcttaccaggaactgaatcggccaccttggtctgaaacttctagcttctagcttccagaactgtgtgaaaataaatgtctgtgccttaagctacccagcctatggtatttattatggcaggccaagctgactaatacaaccctcacctcctctgtctcatttctgggtagctatcctgaaattcatgattctgacattctcctatatgcaaagaacattgaagtctatgagcagactgaatgtatatgtctaaatatccttgtgaactaagcatgatggaagagaggagacaagaacagccacactccactgaatgac

SEQ ID NO: 1442 - DNA, 455 bp, Homo sapiens
  MAP TO AL031778.1; EXPRESSED IN HEART, SIGNAL = 3.2; EXPRESSED IN BONE MARROW, SIGNAL = 2.6; EXPRESSED IN LUNG, SIGNAL = 2.9; EXPRESSED IN BRAIN, SIGNAL = 3.4; EXPRESSED IN ADULT LIVER, SIGNAL = 2.5; EXPRESSED IN BT474, SIGNAL = 2.6; EXPRESSED IN FETAL LIVER, SIGNAL = 3.4; EXPRESSED IN PLACENTA, SIGNAL = 2.6; EXPRESSED IN HBL100, SIGNAL = 1.9; EXPRESSED IN HELA, SIGNAL = 4.3
gaaggccaccctcctaaatctcaggatgcctgccctggggccccttccacactctcccccagtggagctagggaatttgggtgggaaacaaaggggagaacataaggtgagctgagagggagagggagaagagagcaggccaagccatacccacctgccaggttcctgtctttgcctactgataaataggggatactaatggccagattttccattcccccaccccagcacccgctgtcactcaattaaaaaaagatagagggagagagcctgggggaggggcaggaggccttggctataaagcctgtggctaagtggggaaagcacgaagcctggcctgctgggtccttttcccgtcatccccagccagatttagctgctgacagctgcttgggactctgccgccagggcctggcccagacctgcctgcctctctcctctccctcagtgactcc

SEQ ID NO: 1443 - DNA, 495 bp, Homo sapiens
  MAP TO AL034548.24; EXPRESSED IN FETAL LIVER, SIGNAL = 1.3; EXPRESSED IN HELA, SIGNAL = 1.1; EXPRESSED IN PLACENTA, SIGNAL = 1.2; EXPRESSED IN HBL100, SIGNAL = 1.3; EXPRESSED IN HEART, SIGNAL = 1.2; EXPRESSED IN LUNG, SIGNAL = 1.3; EXPRESSED IN BONE MARROW, SIGNAL = 1.5; EXPRESSED IN BRAIN, SIGNAL = 1.3; EXPRESSED IN BT474, SIGNAL = 1.6; EXPRESSED IN ADULT LIVER, SIGNAL = 0.91
aaccaccccactcaactctgccttcctcaaaaacccagaagtggaaggctgtacccacttggttgacacatgggatctgggaactagaagggcccttagagattacaccacccagcctgctgtgtacagatgggaattggaggcctttgcagagatgggaaaggtcacatctgcccctggtcagtggcagatccaaggtggaaacccaggaccgcccctccctccctgtacagggttctgccatccacaccaggctgccttccccaagaacagagagcctccgtgagctcagagtgtgactggtttaagaggcagtggcaaaaagatcacatacttgggtctccgaagcagaacatcctcaaatatgacctctcggggttcccgggtctgggcttggagctcttccacctcggcccttaatacaggcatgttctcctcaaactggtcaataatctgagaggaaaggcacagcaggggagaagggagaggcaaatg

SEQ ID NO: 1444 - DNA, 491 bp, Homo sapiens
  MAP TO AL035408.5; EXPRESSED IN BONE MARROW, SIGNAL = 1.1; EXPRESSED IN LUNG, SIGNAL = 1.2; EXPRESSED IN BRAIN, SIGNAL = 0.92; EXPRESSED IN BT474, SIGNAL = 1.1; EXPRESSED IN FETAL LIVER, SIGNAL = 0.97; EXPRESSED IN PLACENTA, SIGNAL = 1.2; EXPRESSED IN HEART, SIGNAL = 1.1
gcttcaatctgacccacctcaagattatatattttcctctgtccttcagcaacctgacttcggtccttcccaaagtctacaaccacttgaggagctaaagttctacattcagaatcatctgagactgttagagctgacaggagccttagagtctgtcttctccagccctgccacttgacaaacaaggaaaccaagatccacagatgtgaagcgacttgtccagggtcacacagatccttggtagtaggcatggactagaatccaggcctcctaattcccaggccacaggaagtttgaattaccttatgagaagatggaattattgtccaataccctggctggcctccacttcatcacatcccttgaaacatttgcaagtgaagacgtgcaactgatgaccacattgcctataaaggatcttggtggtgggaaggaaattagccttgaccagctgtttcattttatttcagtttattttaatgcatcagcca

SEQ ID NO: 1445 - DNA, 454 bp, Homo sapiens
  MAP TO AL035462.12; EXPRESSED IN PLACENTA, SIGNAL = 4.2; EXPRESSED IN HBL100, SIGNAL = 2.1; EXPRESSED IN HELA, SIGNAL = 3.2; EXPRESSED IN HEART, SIGNAL = 3.1; EXPRESSED IN LUNG, SIGNAL = 4.7; EXPRESSED IN BONE MARROW, SIGNAL = 3.1; EXPRESSED IN BRAIN, SIGNAL = 2.6; EXPRESSED IN ADULT LIVER, SIGNAL = 2.7; EXPRESSED IN BT474, SIGNAL = 2.6; EXPRESSED IN FETAL LIVER, SIGNAL = 3.3
gttcaaatcccagctgtgccggttcttaaccatatgaacctgggtgcaccatgtaacctccctgagcttctgtttccttttttcctttagggatgtgttaaaatcgccctcagaatatggtcgagacaatgaaacaagacaatgaagcactgagcatcatgcctggcacataggaaatgccaaaatatatattcccgtatttccttcacattccaaagggtgaattaattcaggatggcctgaaccatagctgtcactgtcttcgggaggatatttgaggacaaaaacgagtttttgactttggaacagtaaataagacaagactttgattcgcttagttctgccttgagtcctgccagtgtagatggaatccatgccagacatgattccatttcgaatgtagaatcagcataatttaacctcatcttggaaatctcatgtcccagttcacagc

SEQ ID NO: 1446 - DNA, 489 bp, Homo sapiens
  MAP TO AL031733.3; EXPRESSED IN HEART, SIGNAL = 0.89; EXPRESSED IN LUNG, SIGNAL = 1.5; EXPRESSED IN BONE MARROW, SIGNAL =   1; EXPRESSED IN FETAL LIVER, SIGNAL =   1
ctgtaattgacgggttgtgggatcctaggcaattgacttaactgttcagactctcatctgtaaaatgaggataataacaccccctacaaggtcatggggatactaggagatggtgtttgattagacagtttgggttcacatccagaccttgccttttactagatgtgtgatcttaggcaagacacttgaccttattgagccttagtttccccacttgtaaaataaacatttataatagcacttattttttagaattgtgataaagcccaaatgagatattgcatataaagccccagcacagtgcctggcacataataagctctcccctcattttagctattgttgttgtcacctaagataccaactggcacacagtaggtgttagtcaaaatgtgggctcccttgcactcttcgtagagataccaggctgttgccagtttggccctgaagaattctaagggggtggcagggatctgctgttgccaagtc

SEQ ID NO: 1447 - DNA, 442 bp, Homo sapiens
  MAP TO AL031985.10; EXPRESSED IN BT474, SIGNAL = 1.4; EXPRESSED IN FETAL LIVER, SIGNAL = 1.4; EXPRESSED IN ADULT LIVER, SIGNAL = 1.4; EXPRESSED IN PLACENTA, SIGNAL = 1.4; EXPRESSED IN HBL100, SIGNAL = 1.3; EXPRESSED IN HEART, SIGNAL =   1; EXPRESSED IN LUNG, SIGNAL = 1.1; EXPRESSED IN BONE MARROW, SIGNAL = 2.5; EXPRESSED IN BRAIN, SIGNAL = 1.8
aaacctgaacatgaccaacgtatcagcagatggaaattaatgtaactcagagtcatacttctgtggagtctggggtcacaattcggtgaagtctagctcaaggtctggatctggaccctaaagggaaaatggctcggtcagcagcccattggtaagctatagcaggcctcgtagggactctaactactttgctgtgtaaagagcattgtgagtagagtaatcctgagaaattccagctggaaagggttagccagggagagttcgggctgactttatgtttttccctctttaaccaacctgtatgtgtgttttcttggcagcaatgttcatggctcccgctcagatggcatatcccacagcctaccccagcttccccggggttacacctcctaacagcataatggggagcatgatgcctccaccagtaggcatggttgctcag

SEQ ID NO: 1448 - DNA, 460 bp, Homo sapiens
  MAP TO AL080246.13; EXPRESSED IN LUNG, SIGNAL = 1.5; EXPRESSED IN BONE MARROW, SIGNAL = 3.7; EXPRESSED IN BRAIN, SIGNAL = 3.7; EXPRESSED IN FETAL LIVER, SIGNAL = 2.3; EXPRESSED IN BT474, SIGNAL = 1.8; EXPRESSED IN ADULT LIVER, SIGNAL = 2.6; EXPRESSED IN HELA, SIGNAL = 2.9; EXPRESSED IN PLACENTA, SIGNAL =   3; EXPRESSED IN HBL100, SIGNAL =   2; EXPRESSED IN HEART, SIGNAL = 2.1
ttggacacaaatagaatgagcacattctaccagtactttcgtggatgttcttgcctcagatgacaccgagattaaaaaagtgtccccgaaagttaaaaaaatgatggacaaatagtgggggaaggatttatttgaaggggcagaaatggtgagagtggatgaatggccaaagtgtgtcaggttccaagggagatcatgtgaagtacttagcatcacgctaagggctcaccatggcctccaggatgggtggctacaaaacaatgatgatgatgatgatggtgatggtgatgatgatgatggtgatgatgatagtgatgatgatgatggtgatgatgatagtgatgatgatgctgataatgatggtgatggtgatggcgatgatggtgatggtgatgatgatgtaacgatgatggtgatgataatgatggcaatggtgatggtgatgatggtgatggtgatg

SEQ ID NO: 1449 - DNA, 442 bp, Homo sapiens
  MAP TO AL034431.13; EXPRESSED IN FETAL LIVER, SIGNAL = 9.8; EXPRESSED IN ADULT LIVER, SIGNAL = 3.4; EXPRESSED IN PLACENTA, SIGNAL = 5.6; EXPRESSED IN HELA, SIGNAL = 2.5; EXPRESSED IN BONE MARROW, SIGNAL = 2.8; EXPRESSED IN BRAIN, SIGNAL = 3.2; EXPRESSED IN BT474, SIGNAL = 2.4; EXPRESSED IN HBL100, SIGNAL = 2.2; EXPRESSED IN HEART, SIGNAL = 3.9; EXPRESSED IN LUNG, SIGNAL = 3.5
tgcatgtgtgcaatatgtgtgcccacacgtgcatgtatgcaggtgcacacatgtagctatgcgcatatgtataagtatgcatgcatgcgtgtaggtgtacatacataagtgtgggtgtgtgcatgtgtgcatacatgtgtaggtgtgtgtgtgtgcacatgcatgtgtgtaggtgtcttagtccttttccactgcttaaacaaaatacattgaactggataatttataaacaatagaaacttatttctcacagttctggaggctgggaagtccaggatcaagatgccagcagattcggtgtctggtgaggacccattcctcaaagacagcaccctcttggtgtcttcacaacggagaagagacagaagggccaggcagctctctgcagcttctttcctaagggctctgatcccattcatgagggcagaaccctcacaatttc

SEQ ID NO: 1450 - DNA, 479 bp, Homo sapiens
  MAP TO AL035078.32; EXPRESSED IN LUNG, SIGNAL = 2.7; EXPRESSED IN BT474, SIGNAL = 2.3; EXPRESSED IN ADULT LIVER, SIGNAL = 5.3; EXPRESSED IN HEART, SIGNAL =   2; EXPRESSED IN PLACENTA, SIGNAL = 5.6; EXPRESSED IN BRAIN, SIGNAL = 3.4; EXPRESSED IN BONE MARROW, SIGNAL = 2.5; EXPRESSED IN FETAL LIVER, SIGNAL = 2.2; EXPRESSED IN HELA, SIGNAL = 2.9; EXPRESSED IN HBL100, SIGNAL =   2
tgctcattcaggagcaggttatttaatttccatgtatttgcatggttttgaaggttccttttggtgttgatttccagtttcattccactgtggtctgagagagtgcttgatgtaatttcaattttcttagatgtattgaggctccttttatggcctatcatatggtctatcttggagaaagttccatgcactgttgaatagaatgtgtattctgtggttgttgggtgaaatgctctgtatatatctgttaagtccatttgttccaaggtatagtttaaatccattgtttctttgttgactttctctcttgatgacctgtctagtactgtcagtggagtattgaagtcccccactattattgtgttgctgtctatctcatttcttaagtctattagtaattgtttcataaatttggaagctccagtgttaggtgcatatatatttaggattgtgatattttcctgttggacaaggccttt

SEQ ID NO: 1451 - DNA, 490 bp, Homo sapiens
  MAP TO AL035587.5; EXPRESSED IN LUNG, SIGNAL = 1.5; EXPRESSED IN BT474, SIGNAL = 1.8; EXPRESSED IN FETAL LIVER, SIGNAL = 1.5; EXPRESSED IN ADULT LIVER, SIGNAL = 2.4; EXPRESSED IN PLACENTA, SIGNAL = 1.7; EXPRESSED IN BRAIN, SIGNAL = 1.7; EXPRESSED IN BONE MARROW, SIGNAL = 1.6; EXPRESSED IN HEART, SIGNAL = 1.2; EXPRESSED IN HELA, SIGNAL = 2.1; EXPRESSED IN HBL100, SIGNAL = 1.7
ctttgtcagctggagatctggctggggttcgcctgaccctttcatgatgtctgtgtgtaaaacttcattctttggagaattcctcagacttttgtcctggaaggaattgttacacgtcatctccaagtgcgaatctgctaggatgcttgacagtttgctctcagtaccatgatccgatctggatgaggttttccggtgcccctcagggccgggagagcactgactggccttcagaggctctctccggctggccttctcttcagacgtgctctggtactgcactaagcccactttgtcaaatttcagtgctctgccaaggcattctgtttttttagaaatgtttccttctgcagagaccacgatgtgattaggcactagatgaaactggtcatgattcatgggttccgtcacaccggttttggctcggtctctgccttgggccttggctggcggttgcagagagctgcttgctttactgccatgctggtca

SEQ ID NO: 1452 - DNA, 476 bp, Homo sapiens
  MAP TO AL096887.5; EXPRESSED IN LUNG, SIGNAL = 1.3; EXPRESSED IN BT474, SIGNAL = 0.99; EXPRESSED IN ADULT LIVER, SIGNAL = 3.6; EXPRESSED IN HEART, SIGNAL = 1.2; EXPRESSED IN PLACENTA, SIGNAL = 1.2; EXPRESSED IN BRAIN, SIGNAL = 1.1; EXPRESSED IN BONE MARROW, SIGNAL = 1.1; EXPRESSED IN FETAL LIVER, SIGNAL = 1.9; EXPRESSED IN HELA, SIGNAL =   1; EXPRESSED IN HBL100, SIGNAL = 1.1
atccttctcaccctgtgctgatatagtacctttctatacaaaaacgtccttctccctcttcccttggattgcataaactatgtacatgccttcctcagggcacttttctaggacagtgtcagcctaaggatctttgtttgggtggcttttagaaactcaggaagacaggagcatcatatgcctataggcagctggcttccaggtcagtagttttgctctgaccctaaaatcagactcccatcccaatgagtatctacaggggaggaccgggcattctaagcagtttacgtgccaattcaatttcttaacctatctcaaagatggagatcagtgtgagtccaatccatgtttaaatggcggcagttgcaaggatgacattaattcctatgaatgttggtgtccctttggatttgaaggaaagaactgtgaattaggtaagtaactattttttgaatactcatggttcaaagtttccc

SEQ ID NO: 1453 - DNA, 475 bp, Homo sapiens
  MAP TO AP000347.1; EXPRESSED IN FETAL LIVER, SIGNAL = 1.8; EXPRESSED IN ADULT LIVER, SIGNAL = 1.6; EXPRESSED IN PLACENTA, SIGNAL = 1.9; EXPRESSED IN HELA, SIGNAL = 1.8; EXPRESSED IN BRAIN, SIGNAL = 2.5; EXPRESSED IN BT474, SIGNAL =   3; EXPRESSED IN HEART, SIGNAL = 0.95; EXPRESSED IN HBL100, SIGNAL =   2; EXPRESSED IN LUNG, SIGNAL = 1.2; EXPRESSED IN BONE MARROW, SIGNAL = 2.8
ttgtcctaggccagttggtgcttccggagcccaacgaggccaagccagatggtgagggggcttgcagtctgcaagactttccgggggtggtgttttggggctacaattcccttaaattccacccggtcatttctgtgcttggaaaacccagtgaaaaatgactggtgtggtgaccttttctccttttccagatcctgctccacgtcctgggcaacacgcattaacaatgccggccctggagccagcaccaccactgctggcggacctggggcctgctctggagccagagtcacctgcagccctgggtccaccaggatatctacattcagcaccagggccagcaccagcaccaggggaagggccccctccagggacagtgctggagccacagtcagccccagagtcctcctgtccctgtcgtgggtctgtaaagaaccaacccagtgaggagctgcctgacatgacgaccttccct

SEQ ID NO: 1454 - DNA, 471 bp, Homo sapiens
  MAP TO AP000352.2; EXPRESSED IN HBL100, SIGNAL = 6.3; EXPRESSED IN HELA, SIGNAL = 9.3; EXPRESSED IN BONE MARROW, SIGNAL = 5.4; EXPRESSED IN LUNG, SIGNAL = 4.9; EXPRESSED IN BT474, SIGNAL = 6.7; EXPRESSED IN ADULT LIVER, SIGNAL = 4.3; EXPRESSED IN HEART, SIGNAL =   5; EXPRESSED IN PLACENTA, SIGNAL = 8.2; EXPRESSED IN BRAIN, SIGNAL = 4.5; EXPRESSED IN FETAL LIVER, SIGNAL = 9.9
tttctgaaagctccctggctggtgacattctctgctgccattgcacacaggccactggactgcccttctaggcacctccgggctgcatggggcctatgttgtgctggggctcgttcttccctttcttttgctgcccctcatctgttttccttcagttgtctctgctcaggccttgggcccagatgtgctgagctcaccgtgcacttcacctggcttcttgctgtactaggactccttgctccggctgaaggactatcggcagtgttttgagtgttccgatgtggctctgaacgaggctgtccagcagatggtgaactcaggtgaggctgccgccaaggaggagtgggtggccacagtgacccaactgctgatgggcatcgagcaggccctctctgcggacagcagtggtagcatcctgaaggtatcatcctccaccactggccttgtgcggctcaccaacaacctcatcca

SEQ ID NO: 1455 - DNA, 458 bp, Homo sapiens
  MAP TO AP000356.1; EXPRESSED IN FETAL LIVER, SIGNAL = 3.2; EXPRESSED IN ADULT LIVER, SIGNAL = 1.6; EXPRESSED IN PLACENTA, SIGNAL = 3.2; EXPRESSED IN HBL100, SIGNAL = 8.3; EXPRESSED IN HELA, SIGNAL = 5.9; EXPRESSED IN BT474, SIGNAL = 3.2; EXPRESSED IN HEART, SIGNAL = 2.7; EXPRESSED IN BRAIN, SIGNAL = 2.6; EXPRESSED IN LUNG, SIGNAL = 2.1; EXPRESSED IN BONE MARROW, SIGNAL = 2.8
catgggagatgctctcttttcattcctagttttacttctgtccatcccatcattcctcctcaccccacatcttgcacatatttgccagatagtttcctccaaaccaggagctgagcttttttttttttccttggtagaaaatgcagctttggtgtttttgctaagttttatggagtgccaggccttaaaggaagcatgatgtgtgccacatgccttttcagactctgaaagatgaactgactgttgtctctctcattgtagaactctcttcctgccaagatgtctattggtgtgccgattaaagtactgcatgaggccgagggccacattgtgacatgtgagacgaacaccggtgaggtatatcgggggaagctcattgaagcagaggacaacatgaactgccaggtattctgctttgcatgtgaggctgtgtgggaggaatggccctgtgtcttgaa

SEQ ID NO: 1456 - DNA, 464 bp, Homo sapiens
  MAP TO AP000512.1; EXPRESSED IN BRAIN, SIGNAL = 1.6; EXPRESSED IN BONE MARROW, SIGNAL = 1.7; EXPRESSED IN LUNG, SIGNAL = 1.2; EXPRESSED IN ADULT LIVER, SIGNAL = 1.2; EXPRESSED IN BT474, SIGNAL = 1.3; EXPRESSED IN FETAL LIVER, SIGNAL = 2.7; EXPRESSED IN HBL100, SIGNAL = 2.1; EXPRESSED IN HEART, SIGNAL = 1.5; EXPRESSED IN PLACENTA, SIGNAL = 2.3; EXPRESSED IN HELA, SIGNAL = 2.3
ttgtggatggatggggtatcgcatatactctttcagtgcctagatgtcctagggccttttatttttctaatgcatatggaggccttgagtgagtagtagagtacctaataggcactttttcctaatgacaggccaggactctgatcttggagcttatctacctctctaattcttagatttcccactacacctcgggaagaatgtggtaggccgaatgcctgactgctctgtggccctgccctttccatctatctccaaacaacatgcagagattgaaatcttagcctgggacaaggcacctatcctccgagactgtgggagccttaatggtactcaaatcctgagacctcctaaggttttgagccctggggtgagtcaccgtctgagggaccaggaattgattctctttgctgacttgctctgccagtaccatcgcctggatgtctctctgccctttgtctccc

SEQ ID NO: 1457 - DNA, 457 bp, Homo sapiens
  MAP TO AP000518.1; EXPRESSED IN HEART, SIGNAL = 0.97; EXPRESSED IN PLACENTA, SIGNAL = 3.7; EXPRESSED IN BONE MARROW, SIGNAL =   1
aatgcatggaaacatcagcctcaaaatatacacagaaaagcaagacaagggtccaaaacaggatgaagcagaagaaacaaagagagatgtccattgttgagctactctgaggtgccaggcatgatgaacatgtaggatgcagcacctcagcgaggtggaggcagggcctggctgcggtgacccaggcttaccttgtagtggctgagggcattttcaatggtcagttcatgatgagacatgtgttcaggggacaccaggcattccacacatagaagaagtctgctctcctcacagaacctgcacaccctcttctggtggttggggcagatatagcctgtccctagcacctcctcagaacagggcttccggcagagggggcagcagaagaccccagaggctgaggccttctccacatgctgtgtcaggcacactcgacagaagagatgtccgcagttgg

SEQ ID NO: 1458 - DNA, 464 bp, Homo sapiens
  MAP TO AP000350.1; EXPRESSED IN PLACENTA, SIGNAL = 1.4; EXPRESSED IN HBL100, SIGNAL = 1.9; EXPRESSED IN HEART, SIGNAL = 2.2; EXPRESSED IN BONE MARROW, SIGNAL = 2.6; EXPRESSED IN LUNG, SIGNAL = 1.7; EXPRESSED IN ADULT LIVER, SIGNAL = 3.4; EXPRESSED IN FETAL LIVER, SIGNAL = 3.2; EXPRESSED IN BRAIN, SIGNAL = 1.8; EXPRESSED IN BT474, SIGNAL = 1.7; EXPRESSED IN HELA, SIGNAL = 5.7
agcagcactcctggactaccagctatctatatgtatagctacttcttattatatgctaaataaggggcaggttattcatgaattttctagcaaagggatccggagttcctggaactgagggttcctcccccttttaaatcacataagataacttttgggtattgccgtggcatgtgtaaactgtcatggtgctggtgggaatgtcttttagcatgcattatcactagcatataatgagcagtgagggacaaaagtgaggtcacttttgttgccatcttggttccagctggtttcagctgatttcttcactgcatcctgttccgaccagattctgttttgatcagcgggatcatgaccaaggtcttgaccagtgcttggaaaacaagttctgctgatctcctatctcaacattacattattaggaaaccctatttaaaaaaatgagcaaaggactttagaagcca

SEQ ID NO: 1459 - DNA, 458 bp, Homo sapiens
  MAP TO AP000365.1; EXPRESSED IN PLACENTA, SIGNAL = 4.2; EXPRESSED IN HEART, SIGNAL = 0.95; EXPRESSED IN BONE MARROW, SIGNAL =   1; EXPRESSED IN LUNG, SIGNAL = 1.3; EXPRESSED IN ADULT LIVER, SIGNAL = 0.97; EXPRESSED IN FETAL LIVER, SIGNAL = 0.97
atctctggagcacaaggtggtagactgagagctttgatatttctactcctactgcagatgagctggtataactccgaaggtatggaatttgctgttgtctgtgacccagcaaataaaaatagaaaaataattcgatagaaaaataatagaaatagaaaaaatttaaaaaacaaaccaagcctcattctatgacattttaggcagtgtgataatatgcatatactggtcactttaatctttcctacaggggcagctggttgccctaatggtggattctctgttcaaggatggtgagctagtgttcagctcaggaagccactccacagagatggccaccaaaagggcttcagtggtcccatctcaattaacacctgaaacattgttaattactacagtgaaggtcacaaatgggtttttattagtgaaactgttggcttacaaagcagcatgatggatgt

SEQ ID NO: 1460 - DNA, 470 bp, Homo sapiens
  MAP TO AP000509.1; EXPRESSED IN HBL100, SIGNAL = 1.7; EXPRESSED IN LUNG, SIGNAL = 3.2; EXPRESSED IN BONE MARROW, SIGNAL = 2.8; EXPRESSED IN BRAIN, SIGNAL = 2.7; EXPRESSED IN ADULT LIVER, SIGNAL = 2.3; EXPRESSED IN BT474, SIGNAL =   2; EXPRESSED IN FETAL LIVER, SIGNAL = 2.1; EXPRESSED IN HELA, SIGNAL = 2.3; EXPRESSED IN PLACENTA, SIGNAL = 2.6; EXPRESSED IN HEART, SIGNAL = 2.2
tcattattgtgggagtgggctcctgataaaaagtatgtttggcccctttgccctacctctttcaccatgggatgacactacaggaaggcccccacaagatgctgataccatgctcttggacttcccagcctccagaactgtaagaaatacatattttaataaattgcccagtctgtggtattctgttacagcagcagaaaatgaaacctagtttgttatgttatcatgtttatttatttatgtttgttattcttgagtcataatagagtcttactcagatgtgcattcatgcctggcctctgcaggaggggcctgtcttcagccagggacaagcagaacattatggtcagcatcatccacaaggtcaagaggccacagagccccctgagggcagtatactggccccttcgatattgtatcctacccagcaggttagtaggactgcatgactgacaggaatcattgtagcc

SEQ ID NO: 1461 - DNA, 463 bp, Homo sapiens
  MAP TO AP000513.1; EXPRESSED IN BT474, SIGNAL = 2.8; EXPRESSED IN HELA, SIGNAL = 6.5; EXPRESSED IN PLACENTA, SIGNAL = 6.1; EXPRESSED IN HBL100, SIGNAL = 5.9; EXPRESSED IN HEART, SIGNAL = 1.5; EXPRESSED IN LUNG, SIGNAL = 1.4; EXPRESSED IN BONE MARROW, SIGNAL = 1.3; EXPRESSED IN ADULT LIVER, SIGNAL =   2; EXPRESSED IN FETAL LIVER, SIGNAL = 2.1; EXPRESSED IN BRAIN, SIGNAL = 1.9
tgtggctcctgctacacatccctgaggcaaccccgccaactcactccttgaatccatgtcgatgccaaaatccaagttcttaaagagtggtttctgtccctggtagccgaatgtcacacctgaaagccacgaaaagaagcaatttatattcttttcagtccctgcaaagtccctctcatgtgctggccttggagaacaggagcaatctcagccttggtggagaatttagggtgcacatacatgcttccggtgcttcctgtggagcagcagaggcccgcggcactcaccatgcagacccagcactggagggctgagtggtggggggtctggaaaagtgaagcgcacagtgtactccttagggcgcttcaggagctcaggggcctcctgggattcctcatcttggtttttccgtcggcatttctgctgcttccgagtcagggcttccttcgtttgtttttcctgg

SEQ ID NO: 1462 - DNA, 453 bp, Homo sapiens
  MAP TO AP000548.1; EXPRESSED IN LUNG, SIGNAL = 4.2; EXPRESSED IN BRAIN, SIGNAL = 0.97; EXPRESSED IN ADULT LIVER, SIGNAL = 1.6; EXPRESSED IN HEART, SIGNAL = 3.7; EXPRESSED IN PLACENTA, SIGNAL = 6.6
gtagcggatctctcgcacccgctgcaggatgtcccctttggactgtgcctcgctgaaggggtactccacggtcaccatgtaggagtactgcagcaccgtgacgtggatgctgtcctggcccacatccatccgctgaatcacctcctccatgaactccttgctcctgttgaagtcggcttcaccaattttgtccaatccttccgggacaaatgccacatccagaaccatggagttcctcttgggccccagggtcgaaagccccaagagccccgggcccacagtgacttgtgccatgtgggggggcagagtaggaggaggggcttcaggggcaaggtcacagaggtagctaacgatctcttccctttgctgctccagctcatccacaccgctcagcacgaaggccttgttctcaggggcctgcttctcaatgaggcggatctgcttgaggttggc

SEQ ID NO: 1463 - DNA, 358 bp, Homo sapiens
  MAP TO AC004852.2; EXPRESSED IN BRAIN, SIGNAL = 2.8; EXPRESSED IN FETAL LIVER, SIGNAL = 3.5; EXPRESSED IN BT474, SIGNAL = 2.1; EXPRESSED IN HELA, SIGNAL = 2.4; EXPRESSED IN PLACENTA, SIGNAL = 2.8; EXPRESSED IN HBL100, SIGNAL = 1.7; EXPRESSED IN LUNG, SIGNAL =   3; EXPRESSED IN BONE MARROW, SIGNAL = 3.2; EXPRESSED IN ADULT LIVER, SIGNAL = 2.4; EXPRESSED IN HEART, SIGNAL = 2.4
atgcttccagtacagcctgcagaactgtgagccaattaaatctcttttctttaaagttactcagtctggggtatttctttgtagttagccaaatggacaaatacaactccataactaagtgtatttattatgtgtcaattctaaatttaaatattaataatttttgataaaaactaagatacaaaatcactcattagtttacacaaagtcagggtcatcgatagctctgtcttccacatctatatcttgtcccactgaaaggtgttcaggggcaataacatgcatggagctgtcatttcctgtgataacaatatcttcttctggaatacctcctgaaggacttgcctgaggctgtttt

SEQ ID NO: 1464 - DNA, 468 bp, Homo sapiens
  MAP TO AC007833.1; EXPRESSED IN PLACENTA, SIGNAL = 5.5; EXPRESSED IN HBL100, SIGNAL = 8.5; EXPRESSED IN HEART, SIGNAL = 5.9; EXPRESSED IN LUNG, SIGNAL = 6.2; EXPRESSED IN BONE MARROW, SIGNAL = 5.4; EXPRESSED IN FETAL LIVER, SIGNAL = 7.2; EXPRESSED IN ADULT LIVER, SIGNAL = 4.8; EXPRESSED IN BT474, SIGNAL = 3.7; EXPRESSED IN HELA, SIGNAL = 4.8; EXPRESSED IN BRAIN, SIGNAL = 5.3
acagatgttccctctgcccatggtaaactgaccagccaaaagttaagttttacagaccaaacatatgaatcagtttgacaaatagaaaaaaggtaaaataactcttaaaagtcaatttgtacagaccatgtaaataagaacaaggccttttgcttcctagcaaaataagcttatgagtaaatactcaaacacaaagcaattttttcttacttgggtaaagaaaccacacatttaaattaaatttaccatttaatttccacatacctgatctagcatgttttcactaaacgccttatacacatggaaagggttaaaggcagaaggctgatcttctatactcctcaaggtcgtctttaaaggtcggatgggtaatggcttttcctctgaactattcatagaaaacagctgttcttttaaatattccttcaaagaaaagaaattacaagttgtgacggtgagaagcagaca

SEQ ID NO: 1465 - DNA, 460 bp, Homo sapiens
  MAP TO AC006371.2; EXPRESSED IN BRAIN, SIGNAL = 3.6; EXPRESSED IN FETAL LIVER, SIGNAL = 4.5; EXPRESSED IN BT474, SIGNAL = 3.4; EXPRESSED IN HBL100, SIGNAL = 2.3; EXPRESSED IN HELA, SIGNAL = 2.5; EXPRESSED IN HEART, SIGNAL =   3; EXPRESSED IN PLACENTA, SIGNAL = 3.3; EXPRESSED IN LUNG, SIGNAL = 3.4; EXPRESSED IN BONE MARROW, SIGNAL = 3.9; EXPRESSED IN ADULT LIVER, SIGNAL = 2.9
tggccacaagagaaatggagtgttttacactatagcaggtgggcacaggagcagagagggagtgtctttaagcacaatacctacagcaatgaaatgctgactcttctctgatttcctctcctttctaattctatagacaagcaaaagtagagatgcatgccaaccaaagaggggcatattttcagggctgcttttctttcctggcctctcccatcttgatgaaaaggaccatgtgaagtgtgtgtgtgcatgtgcccaagcatgtgccttgtggttgggagctccatgtaaaacggctgttcttcttcttcttctcctccttctcctccttctttttcttcttcctcttctccttcccctctcctcctttcttcttcttcttctttcttcttctcctcctccttcttcctcctccttcctcctcctcttctcctcttcctcctcttcctcctcctcttcc

SEQ ID NO: 1466 - DNA, 489 bp, Homo sapiens
  MAP TO AC008015.4; EXPRESSED IN BONE MARROW, SIGNAL = 2.5; EXPRESSED IN BRAIN, SIGNAL = 1.9; EXPRESSED IN FETAL LIVER, SIGNAL = 1.8; EXPRESSED IN ADULT LIVER, SIGNAL = 1.5; EXPRESSED IN BT474, SIGNAL =   2; EXPRESSED IN HEART, SIGNAL = 1.5; EXPRESSED IN HELA, SIGNAL = 1.3; EXPRESSED IN HBL100, SIGNAL = 1.5; EXPRESSED IN PLACENTA, SIGNAL = 1.4; EXPRESSED IN LUNG, SIGNAL = 1.6
atgagctcccaggtgatgtcgacgctgctggtccgctggtccgtgaatctcaattctagcaacaaagaatgtacaagatcatagcagatacctggttcgtagggggtactcaacaggcagtgcctttgttattattatcaaggtcgtcaatgcaatgtaggtgagactgtctctttcttgaccacagcccatatcctccttcaaaactgtgtcgttcaaggtttcccttgaagccactggaacacaaatgttggaggggcccaaagtgagggccatcacagatggcccagtggccaaatcgtctattggacatctctagaagcagacattgctcccgctgacccagggtccaatgggcccagttgtttgggctctcatctgggaagctgggatggcagtggtgttgcccagccacttcaccactccatacatcacagctgcctgaaggtacaacagaggtcactagagtccctatccctcatcccaaat

SEQ ID NO: 1467 - DNA, 470 bp, Homo sapiens
  MAP TO AC004019.11; EXPRESSED IN BRAIN, SIGNAL = 2.8; EXPRESSED IN BT474, SIGNAL = 1.9; EXPRESSED IN HBL100, SIGNAL = 2.6; EXPRESSED IN HELA, SIGNAL = 2.5; EXPRESSED IN PLACENTA, SIGNAL = 3.8; EXPRESSED IN LUNG, SIGNAL = 3.6; EXPRESSED IN BONE MARROW, SIGNAL = 4.1; EXPRESSED IN ADULT LIVER, SIGNAL = 2.9; EXPRESSED IN FETAL LIVER, SIGNAL = 4.5; EXPRESSED IN HEART, SIGNAL = 3.6
ttgagcccagaagattgaggctgcagtaaaccatgatcctgccactacattctaacagggtgacagagcaagaccctgtctctaaaagaaaaaaaaaaatagattaaacacttttgtcaggagtgcagtaggtggtgcgtgtgcatgccacttactgccccagggggcacagaatgtcgagttgtcccagtatggatgattccaggcctgatcaccggggtgatgaaggcagtaccctcgtgactacagtgtcttgtttcttctgtcgttaacacgtcttcattaattcttcattgcttctttctcgtggctgtagaatgcagatgcacccggtccagtcgcaggcctcgttcccaaagacccccacagcagcaacatcacaggaggaggtgccgcctcataagcctccaacacttcccctggatcaggtaaggatcactaaaaattagagctgttcttcttcctccagg

SEQ ID NO: 1468 - DNA, 457 bp, Homo sapiens
  MAP TO AC007768.1; EXPRESSED IN PLACENTA, SIGNAL = 5.9; EXPRESSED IN BONE MARROW, SIGNAL = 6.2; EXPRESSED IN LUNG, SIGNAL = 5.7; EXPRESSED IN BRAIN, SIGNAL = 5.5; EXPRESSED IN ADULT LIVER, SIGNAL = 5.8; EXPRESSED IN FETAL LIVER, SIGNAL = 4.4; EXPRESSED IN BT474, SIGNAL = 5.4; EXPRESSED IN HEART, SIGNAL = 4.2; EXPRESSED IN HELA, SIGNAL = 4.3; EXPRESSED IN HBL100, SIGNAL = 3.8
  unsure 226
cagccatgtggaactctttcctttataaattacccagtttcaggtatgtctttatttgcagcatgaggatggactaatatagcaaattggtactgggagagtggggctctgctataaggatacccgaaaatgtggaagcaactttggccctgggtaacaggcagaagttaaaacagtttggagggctcagtggaagacatgaaaatatgggaaagtttggaacttncccagagacatgggcctcagaagatagaacaatgtgggaaagtttgaaacttcttagaggcttgttaaatggctttgatcaaaatgcttatagtgatatggacaatgaagtctatgctgaggtggtctcagatggagaggaggaacttgttgggaacttgagcaaaggtgactgttgctatactttaccaaagagactggcagcattttgcccctgccctagagatctgtg

SEQ ID NO: 1469 - DNA, 473 bp, Homo sapiens
  MAP TO AC007868.1; EXPRESSED IN BT474, SIGNAL = 2.8; EXPRESSED IN HBL100, SIGNAL = 3.1; EXPRESSED IN HELA, SIGNAL = 3.7; EXPRESSED IN PLACENTA, SIGNAL = 5.5; EXPRESSED IN BRAIN, SIGNAL =   4; EXPRESSED IN LUNG, SIGNAL = 3.7; EXPRESSED IN BONE MARROW, SIGNAL = 5.1; EXPRESSED IN ADULT LIVER, SIGNAL = 5.9; EXPRESSED IN FETAL LIVER, SIGNAL = 4.1; EXPRESSED IN HEART, SIGNAL = 4.1
ctggtgctcagctgactgggctcagggccaggctgagaccctaaactcgtctggaaaagctggcactttgctgtaagagtatgccagccaggagtgggcctattgctcattctgcacaccaagaaaacacactgagttgcttcaggggcaggcagtggggggacagggcagctgactgcacccacctctgtccctttcagcttcacccctaccccacctcccacctctgccctctttcaacccccacagaagaagcctggactacccacagctgcaaattcctgaattccctaattcgaggcaaggacctggtgtcttattcaaatgaatctgtttggcaaaagacccagctctcaaaaccagcctacttacaacagtctagaggggcctgccctggcgagagaatgtctcagggctccactgaagtacagaagagcagtagccagggtgagggggtcctacaccaggaatga

SEQ ID NO: 1470 - DNA, 467 bp, Homo sapiens
  MAP TO AC005948.6; EXPRESSED IN FETAL LIVER, SIGNAL =  17; EXPRESSED IN BT474, SIGNAL =  22; EXPRESSED IN HEART, SIGNAL = 8.3; EXPRESSED IN HELA, SIGNAL =  28; EXPRESSED IN HBL100, SIGNAL =  19; EXPRESSED IN PLACENTA, SIGNAL =  25; EXPRESSED IN BRAIN, SIGNAL =  11; EXPRESSED IN LUNG, SIGNAL = 9.1; EXPRESSED IN BONE MARROW, SIGNAL =  16; EXPRESSED IN ADULT LIVER, SIGNAL =  12
agtgggtttccgaaaagagctaagtctaaaggagagaacctacagttttctcccaaatgggggcatctcactatagcatcatggagtttgctgtttaacctctctgttaagcaattcaaggagttaccttctatggaggtggcttctcagattatttttttcctataatatcctcctccagctgcttcttgacaaagaagcacttgtttattcactccacacaattttttttgcaagtcttttcatttttgttaataagtttcattttctatttagctttctgactctgtgcttgtgccttcaacactttcacaatgattttctcttcgtcgataaggaaagcatgcttgatcctgtcatgaacacatttagcatacatggaaccaccataggccctgctgacatatttctttgttttggacaatctcataggaattttaggtcttacagcatgaacccctcaaagt

SEQ ID NO: 1471 - DNA, 483 bp, Homo sapiens
  MAP TO AC007919.18; EXPRESSED IN BONE MARROW, SIGNAL =  15; EXPRESSED IN FETAL LIVER, SIGNAL =  23; EXPRESSED IN ADULT LIVER, SIGNAL = 9.3; EXPRESSED IN BT474, SIGNAL =   3; EXPRESSED IN HEART, SIGNAL =  14; EXPRESSED IN HELA, SIGNAL =  12; EXPRESSED IN HBL100, SIGNAL = 7.2; EXPRESSED IN PLACENTA, SIGNAL =  22; EXPRESSED IN BRAIN, SIGNAL =  15; EXPRESSED IN LUNG, SIGNAL = 2.3
ccacattgatgaaccaactgacattaatttagttatttggggaaagagttatatatatgtgtgtgtgtgtgtctgtgtgtgtgtgtgtgtgtgtatgtgtgtattttactatttagtacatcagtaatttccatcggtaacctccaccttgaattttaatcacaacctataaactatattttgactatttcttgtcagaaatgatggctcaatatcaacattgccaaagtcaaaacatcagttttggaggacatccttgacatcactccaacagacaggttacgggttgagactttgaatggaaaggcacaggtgcctggagtgcacttgtggggccctgacaggcccattgcagtcctcaggttcctcggcttctcaggacagttcatcatagcagccccaccctgctggcagtactccgtctgggcttctctgatgccttcttcccattttttcttgttttcccaacttctgcttcctctg

SEQ ID NO: 1472 - DNA, 471 bp, Homo sapiens
  MAP TO AC006318.2; EXPRESSED IN PLACENTA, SIGNAL = 1.1; EXPRESSED IN BONE MARROW, SIGNAL =   1; EXPRESSED IN LUNG, SIGNAL = 0.94; EXPRESSED IN ADULT LIVER, SIGNAL = 1.1; EXPRESSED IN FETAL LIVER, SIGNAL = 1.1; EXPRESSED IN BT474, SIGNAL = 1.2; EXPRESSED IN HEART, SIGNAL = 1.4; EXPRESSED IN BRAIN, SIGNAL =   1
accattgtcaccaccctctcctctacttcatctaccctcatccagggttctcagaggtgggagagaaagaggaaggaagtgataagagcacaaggagaaaacaaattatctatctgaaaatatcttacctgatttcccgcttcgaaaaggctcaaaatgtctaaattttcctctttttctgccattatatttgcaaggaaaggcaagtacagctaaacaattctgacacctgaggcaaattatcctttgagattgccttagtcaggggtttgaagcatctcacatgatcctctggatagataattatgatgatgaggaggaggatggtggtgttcactgtggtagtgaatgctaatgaagagcttatcacctgccaaaatcacatgcccaccacaattctgtatgcaggtactattaacaatccattttcccagctgggtgatatggtttggctttgtgtccccatcaaaa

SEQ ID NO: 1473 - DNA, 464 bp, Homo sapiens
  MAP TO AC006369.3; EXPRESSED IN HEART, SIGNAL = 1.3; EXPRESSED IN BT474, SIGNAL = 1.1; EXPRESSED IN HBL100, SIGNAL = 1.1; EXPRESSED IN PLACENTA, SIGNAL = 0.96; EXPRESSED IN BRAIN, SIGNAL = 1.2; EXPRESSED IN LUNG, SIGNAL = 1.1; EXPRESSED IN BONE MARROW, SIGNAL = 1.1; EXPRESSED IN ADULT LIVER, SIGNAL = 1.4
tgaatcttcctcctaggcccagctctgtcgaacttttttttaagccaaggaaaagaaaatcttaagcctgatatataaacagataataacataatttctttggttaaaaaggagagagattggccctacttatcacgtatttaagaaaataacaacatgcccttttgttttttctcttctctcatacatcactaattctggtggggtctgtccagagtccgtcagatggctatgactttttcagccacctcctcgtgctgtcagctcccggtagccttgccgtccagtttataacgccagcagccagagcctgcaccattctgcgcaaatgggattatataattaatgttaacccaaaagcaggacttctattcatcatcattcagttcattcctgtgggcttcatccagccccggctctcggtccaggtaattctggaccccagttagccactggcacaatga

SEQ ID NO: 1474 - DNA, 491 bp, Homo sapiens
  MAP TO AC008013.8; EXPRESSED IN BT474, SIGNAL = 1.6; EXPRESSED IN FETAL LIVER, SIGNAL =   1; EXPRESSED IN HEART, SIGNAL = 1.1; EXPRESSED IN HELA, SIGNAL = 0.96; EXPRESSED IN HBL100, SIGNAL = 4.4; EXPRESSED IN PLACENTA, SIGNAL = 1.1; EXPRESSED IN BRAIN, SIGNAL = 1.7; EXPRESSED IN LUNG, SIGNAL = 1.2; EXPRESSED IN BONE MARROW, SIGNAL = 1.6; EXPRESSED IN ADULT LIVER, SIGNAL = 1.7
ttcaaagcaccctgtgtctggcctcaccaccgcctcccaccagcttctggatgtgaccctttacctgagccatctccccagcctctctcagctctgcccatcacacctctgccctaagttggggctcagtttttgtgtcttcctctccatagccatcttctacactgtctctggctgatggtcccttacgctgttgagaaacctccgcatcacaccatccacagtccgcagtgttctagaattagctggggggagttggaagtgggcccggtgccagggcaggggtggggctggtcccgctgatggggacttcgctcctaccctcctcagctgagtgatgaactgaagcagcacttgaaccggactctggctgagaactacgggcagcccggagccacgcagatcaccgcctcagtggaccgactccagcaggatgtaagccatgccccatatggccttgaaggccaagcccacaaggattcaaatcccga

SEQ ID NO: 1475 - DNA, 461 bp, Homo sapiens
  MAP TO AC006445.10; EXPRESSED IN BONE MARROW, SIGNAL = 1.4; EXPRESSED IN BT474, SIGNAL = 1.3; EXPRESSED IN FETAL LIVER, SIGNAL = 1.1; EXPRESSED IN HEART, SIGNAL = 1.1; EXPRESSED IN HELA, SIGNAL = 1.6; EXPRESSED IN HBL100, SIGNAL = 1.4; EXPRESSED IN PLACENTA, SIGNAL = 2.2; EXPRESSED IN BRAIN, SIGNAL = 1.4; EXPRESSED IN LUNG, SIGNAL = 1.2; EXPRESSED IN ADULT LIVER, SIGNAL = 1.4
tgtcagaaatggtacatcccagatgcttttctgagtacatgtcaattttttatgaacgctggctgtgaactgcatatgtaaactatccaaaatgtgtttgagattaagttaaacagttgtgaattgcaagtgctgaaacaaaaaggaagtggaaaaccatttctctgcctccaagtccctaatatcctaagttctaaactccatgactctctctcttggaagtatctttgggaattgtaaaatccaggtgttacccttctatttgaacagaatcctcagagccagaaagaaaacgccagaaatcagtttctgatccagtggaggacaagaaagagcaggagtctgatgaggaagaggaagaagaggaagaggacgagccttcaggagccaccacaagatccaccaccagatcagaggctcagaggtaatgggggcagcacagagctgccagagaccttcac

SEQ ID NO: 1476 - DNA, 483 bp, Homo sapiens
  MAP TO AC006509.15; EXPRESSED IN ADULT LIVER, SIGNAL = 3.1; EXPRESSED IN HBL100, SIGNAL =  19; EXPRESSED IN PLACENTA, SIGNAL =   4; EXPRESSED IN BRAIN, SIGNAL = 2.8; EXPRESSED IN LUNG, SIGNAL = 2.2; EXPRESSED IN BONE MARROW, SIGNAL = 2.6; EXPRESSED IN FETAL LIVER, SIGNAL = 3.8; EXPRESSED IN BT474, SIGNAL = 9.9; EXPRESSED IN HEART, SIGNAL = 2.2; EXPRESSED IN HELA, SIGNAL =  15
cgcctattttagcgcagaagtccctgcgaataatagtctctagcatagagcccaatgaattggtctccccaagcatccttagccctgtctttgccacattcagcccctccaggaccatggccacaacctgccctgagttcatgtacttcacttatattgagcgcctaatatgtgccaggcactgggatacactaatgaatacgccacgatctgcttgagcactcagacctaagggggaaagacaatccatccacaaaatggaccttgtgctcagaaaggtccgggaagaatgggtggtctttcaggttagtgtagtgctacttcaggggtttctcagaggcccgaaggaacttcatggtcaccaggtagaatcccttctgctcagagtatttgatgatttcacccaccaggctgtgctgaacagcactcggattgataatgatgctctcagtgttggccatggcctgaggatctgacagtgtc

SEQ ID NO: 1477 - DNA, 460 bp, Homo sapiens
  MAP TO AC009594.2; EXPRESSED IN BT474, SIGNAL = 1.4; EXPRESSED IN FETAL LIVER, SIGNAL = 1.2; EXPRESSED IN HELA, SIGNAL = 0.96; EXPRESSED IN PLACENTA, SIGNAL = 0.96; EXPRESSED IN HBL100, SIGNAL = 2.3; EXPRESSED IN HEART, SIGNAL = 1.1; EXPRESSED IN BONE MARROW, SIGNAL = 1.3; EXPRESSED IN LUNG, SIGNAL = 0.92; EXPRESSED IN BRAIN, SIGNAL = 1.1
  unsure 93
  unsure 404
  unsure 419
gatgtcagcacaggccaacttcatgacagctagaatttcacatgagaaatgattgatgacattcttcctgcagaaaggcaattgtactacaanatgtagtttgtactgcagagttgacaatccctgcaaaccaggacccaacagccatgggtacataggcattcttgctcatgatgatgggatatctcagagggttgcagatagccacatagcggtcaaaggccatcatgcccagaagcacacactctgttgtccccatggccaagccaaggaacatctgcactgcacagccagaaaaggaaatggtctttctttctgaaaggaagctcactagtgtggagggaatagaggtggtggtgtagcagatgtccaagaaggagaggttccccagaaagaagtacatnaggggtgtgaaggtngagggtccaagatgctgattaaaatgagagtaccattcccc

SEQ ID NO: 1478 - DNA, 477 bp, Homo sapiens
  MAP TO AC009474.1; EXPRESSED IN BT474, SIGNAL =  50; EXPRESSED IN ADULT LIVER, SIGNAL =  16; EXPRESSED IN FETAL LIVER, SIGNAL =  28; EXPRESSED IN HELA, SIGNAL =  45; EXPRESSED IN PLACENTA, SIGNAL =  37; EXPRESSED IN HBL100, SIGNAL =  51; EXPRESSED IN HEART, SIGNAL =  23; EXPRESSED IN LUNG, SIGNAL =  23; EXPRESSED IN BONE MARROW, SIGNAL =  34; EXPRESSED IN BRAIN, SIGNAL =  20
aaggatatagcaaagaaagcatgacttacattgtaaattcagaaaacaacaaaataataagaaagtaatactaacaaaactatagaaagtgacaggcgtaaggctaaatatatcagtaataacaataaatataaaaaaatattattttttaaaaaacactcaggttgctttagaagatacaactttttcagttttaaagaacatatccaaacgaagacaacacatataagttagtagtaaaaatctagataaatataaataacagtaaataaaaatgctgctctctcggccttagcaccattttcttggaaacctctgcaccatgagagccaagtggaggaagaagcgaatgcgcaggctgaagcacaaaagaaaaaagatgaggcagaggtccaagtaaactgctagcttgtttcacgattcaagaggatcaatatcaataatggggaaggaaaggaggcaggattagacagatgt

SEQ ID NO: 1479 - DNA, 376 bp, Homo sapiens
  MAP TO AC009414.2; EXPRESSED IN PLACENTA, SIGNAL = 0.96; EXPRESSED IN HBL100, SIGNAL = 1.1; EXPRESSED IN HEART, SIGNAL = 1.7; EXPRESSED IN LUNG, SIGNAL =   1; EXPRESSED IN BONE MARROW, SIGNAL = 1.1; EXPRESSED IN ADULT LIVER, SIGNAL = 1.2; EXPRESSED IN BT474, SIGNAL = 1.1
tcatgtataaaagctgcctggtacagtgcctggcatactgtaaattctcaacacatgcagctattattactgctctttcatcactatggtgaaatagcctctctggatgccaacagagctgagagtctcataatacatcatttcatactttgcatcaattaacttttcaagaggttaacttgaagtggaaggaagacattgatggaatggaagaatgtgtcattcaggaaagctgcggtcacctgtggtttgagaaatgccctctcccagagcagtggttcctgaacctcagaaaccatcagacactccgagagtacttattacacatgcagattctggggctccacgtggtgctggccaaatcagagctgtgaca

SEQ ID NO: 1480 - DNA, 482 bp, Homo sapiens
  MAP TO AC009752.1; EXPRESSED IN PLACENTA, SIGNAL =   2; EXPRESSED IN BRAIN, SIGNAL =   2; EXPRESSED IN FETAL LIVER, SIGNAL = 1.8; EXPRESSED IN ADULT LIVER, SIGNAL = 1.5; EXPRESSED IN HEART, SIGNAL = 1.2; EXPRESSED IN HELA, SIGNAL = 1.7; EXPRESSED IN HBL100, SIGNAL = 2.5; EXPRESSED IN LUNG, SIGNAL =   3; EXPRESSED IN BONE MARROW, SIGNAL = 1.8; EXPRESSED IN BT474, SIGNAL = 2.1
ctgaccagcctaaagctgccggggtcctcccagctcagggacgctgtcctcacaggaatgcctaatggggcttcctccctgcccatcccaacccctggggccacacattgcttattttggattacaccgggcagcctgtgccccggtcagaggcagggagagcttgggcaggactggggagtgtgactcatttctgtctacccagccaagcaccaaaggcgatgctggcaagcgggagacggtccacagccactcaccagcagccagaagccaggctcaagacagccaggcctcagcttacacagaggccaccaaagaatggcccggcaggatgccaaacctcgtttatctgagcggagcaaggccgcctggtcagtgtccactccacacccaggccctcctctctttgctgcggccacagcagacacgccagctgccccatcgctgcacaatgccaagcctccgtccacctcgccctgaac

SEQ ID NO: 1481 - DNA, 464 bp, Homo sapiens
  MAP TO AC010754.1; EXPRESSED IN PLACENTA, SIGNAL = 2.4; EXPRESSED IN BONE MARROW, SIGNAL = 1.8; EXPRESSED IN BRAIN, SIGNAL = 1.7; EXPRESSED IN FETAL LIVER, SIGNAL = 1.3; EXPRESSED IN HEART, SIGNAL = 1.3; EXPRESSED IN HELA, SIGNAL = 1.2; EXPRESSED IN HBL100, SIGNAL = 1.3; EXPRESSED IN LUNG, SIGNAL = 2.1; EXPRESSED IN ADULT LIVER, SIGNAL = 1.3; EXPRESSED IN BT474, SIGNAL = 1.7
  unsure 35
ccacttaccaaatgaaatgcgaagaggctgggctncaagttgatggcaccactgcagtcaaacctggcagacagagagagactctgccatctctttattttattttgtttttttccatttcttaaaaaaaaaaaagaaagaaaaaataaaaagaagaaatggaaaggtttggggggatgtcagctgctggcagaggaaggctgtggggagtggctaacctgccctgtcttccaggatcaagagaaacgccagcggggatgagctggtgcgctgtgctgtggatgccgccaccgcctacgagaacatcctcaatgccatcaaagcggccgaggacgcagccaacagggctgccagtgcatctgaatctgccctccaggtgggcacctgtaccagcagcttctccacattcgctgtggagatggctgatttttatattttctttccgtgggctccaaggaatagaa

SEQ ID NO: 1482 - DNA, 397 bp, Homo sapiens
  MAP TO AC010092.1; EXPRESSED IN BRAIN, SIGNAL = 0.98; EXPRESSED IN BT474, SIGNAL = 1.4; EXPRESSED IN BONE MARROW, SIGNAL =   1; EXPRESSED IN LUNG, SIGNAL = 0.94; EXPRESSED IN FETAL LIVER, SIGNAL = 1.1; EXPRESSED IN PLACENTA, SIGNAL =   2; EXPRESSED IN HEART, SIGNAL = 1.1; EXPRESSED IN HELA, SIGNAL = 1.1; EXPRESSED IN HBL100, SIGNAL =   1
gtcccacagactcaacaggcattcttttaacataaacaatgcttcttggatataattaattcagaaaatctttaagaggctcacttccagaaataaaattccaatagcaccagataacttaaaaggatttaattcatgtcacagaaataatgtattaaaagataaatgctaacttatttatatagaagttctcaataaaaaacaacaaattataaaacttattcagtgtacataaccctcccaaagactacacatgaaaaacttgaaagatgacttacagatgaggaaggagtggaatgtgaatgtgaattttgaggagaacggattgcaggaggtatgcctcttactggacttgagccatttccaccctggtactgagtaaaagaaaaaggaagca

SEQ ID NO: 1483 - DNA, 499 bp, Homo sapiens
  MAP TO AC010128.1; EXPRESSED IN ADULT LIVER, SIGNAL = 1.8; EXPRESSED IN PLACENTA, SIGNAL = 1.8; EXPRESSED IN BONE MARROW, SIGNAL =   3; EXPRESSED IN BT474, SIGNAL = 1.5; EXPRESSED IN FETAL LIVER, SIGNAL = 1.7; EXPRESSED IN HEART, SIGNAL = 1.9; EXPRESSED IN HELA, SIGNAL = 1.6; EXPRESSED IN HBL100, SIGNAL = 1.4; EXPRESSED IN BRAIN, SIGNAL = 2.4; EXPRESSED IN LUNG, SIGNAL = 2.2
tgctcattgaatttcagtttttagatatttttgtaagagatctggactcaccctgtcattcaggttgaagtgcagtggcacaatcatagctcactgcagacttgaattgctgggcataatttgtcctcccatcttagtctcctgagtatctgggactacagttgcactgccatgctccaataattttttactttttatagagacagggtttcactatgttgcccaggcttgttgtgaatgactgatattaaggaagctggtctctctctgtcacccaggaagaaattcagtggaatggtcagaattcattgcagtcttgaactgctgggcagttcaagtgatccttccccctcagcctcctgagtacctggaactacaggtgcaccaccatgctcagattgattgactgattgattgattgattatagacacacagtctcactatgttgcccaggctgatcttgaatgcctagccttaagagttcccctgtcttggcat

SEQ ID NO: 1484 - DNA, 470 bp, Homo sapiens
  MAP TO AC010904.1; EXPRESSED IN BONE MARROW, SIGNAL = 1.8; EXPRESSED IN LUNG, SIGNAL = 1.9; EXPRESSED IN BRAIN, SIGNAL = 1.3; EXPRESSED IN ADULT LIVER, SIGNAL = 1.2; EXPRESSED IN BT474, SIGNAL = 1.1; EXPRESSED IN FETAL LIVER, SIGNAL = 1.4; EXPRESSED IN PLACENTA, SIGNAL = 1.3; EXPRESSED IN HBL100, SIGNAL = 0.92; EXPRESSED IN HELA, SIGNAL = 1.1; EXPRESSED IN HEART, SIGNAL = 1.5
ggagaccttcttctgccctcatctgagaaatcagattagataagtccattgtcaggtaataacagtagaaaaagagacacagtggatacgcagtgtccctaacattgtataaaagatcccagtttatagaacgcttccgaattcatgatctcatttggatagcattagacactgtaagggaactaactctgttgttcagagcaatgtcccctatcctattggtacttcctgttccattgacaaactctgtcctattagtatttactgttctgctggttatttcctgttctcttggcatctcctgtcctgttagcatttcctgttttataacagtggcatcacctgtcctgttagtattgtctgtcctattagccatccctgctctattttctgttctgttaacatcccctgtcctattagtatttcctgtcctattagtattttctgtcctgttgacatcacctctcctg

SEQ ID NO: 1485 - DNA, 461 bp, Homo sapiens
  MAP TO AC010125.2; EXPRESSED IN BONE MARROW, SIGNAL = 1.9; EXPRESSED IN LUNG, SIGNAL =   2; EXPRESSED IN BRAIN, SIGNAL = 1.4; EXPRESSED IN BT474, SIGNAL = 1.2; EXPRESSED IN FETAL LIVER, SIGNAL = 1.7; EXPRESSED IN ADULT LIVER, SIGNAL = 1.8; EXPRESSED IN HELA, SIGNAL = 1.5; EXPRESSED IN PLACENTA, SIGNAL =   2; EXPRESSED IN HBL100, SIGNAL = 1.4; EXPRESSED IN HEART, SIGNAL = 1.8
cattaaataaaggttttgtggatggtgggaatcaccttcaatgctggagtgagagtttacagatgaacaagtagagcaggctagaatcatccatgtggtaatatttagaattgaaggtatagtaattcctcacttaacatcaaaaatacatttttggaaacatgactttaagggaaataatatataacaaaacccatttttttctcaacagtagtgtaacgaaattacattgaacaaagtgatattattcacggaccagctatatattgttttgcttaaagctacagtatccaagaccctttcaaggatgttaagtaaggaattactgtagtatgtacttatgttaggcttcatgtgagggttgagaatgttgtagttccaaaaatcaaggaagtgctgaaaaatacaaaacaaataaaaacatcatttgtagttatgttagtggggccagagttaactga

SEQ ID NO: 1486 - DNA, 475 bp, Homo sapiens
  MAP TO AC010131.1; EXPRESSED IN HBL100, SIGNAL = 4.6; EXPRESSED IN HEART, SIGNAL = 4.6; EXPRESSED IN LUNG, SIGNAL = 2.9; EXPRESSED IN BRAIN, SIGNAL = 3.4; EXPRESSED IN ADULT LIVER, SIGNAL = 3.4; EXPRESSED IN PLACENTA, SIGNAL = 3.3; EXPRESSED IN HELA, SIGNAL = 2.5; EXPRESSED IN BONE MARROW, SIGNAL =   3; EXPRESSED IN BT474, SIGNAL = 2.5; EXPRESSED IN FETAL LIVER, SIGNAL = 3.1
tccaagctaactcaccccactatcttgcttttcccttaaatattcctgcatttgtgagtgcagctgactttggaagacatttaggcttttgtttaaatgacagtaggccttgactaagactcagtcacttttgtaaagctattgggaagccatcaggctgggaagatgacaggagcttgaatcctgctgaggtgcagaccattgttctggaggttgtaagatatgcaacttcctcaattactgcttcaaataacactagtgtagattggtcttttgagagatatctctccaggtttttcatttgtgatgcaaatggctccacctggacctgccgaccctgctctcctatggccccacgaagaagcaattcagcctgcaggagcaacatttgagagacattatggcagagcaggaaagggctataccattgaaactgttttggattaaagtacaactcagccatttaccatctgtg

SEQ ID NO: 1487 - DNA, 467 bp, Homo sapiens
  MAP TO AC011331.1; EXPRESSED IN LUNG, SIGNAL = 1.8; EXPRESSED IN BONE MARROW, SIGNAL = 1.2; EXPRESSED IN BRAIN, SIGNAL =   2; EXPRESSED IN BT474, SIGNAL = 1.8; EXPRESSED IN FETAL LIVER, SIGNAL = 1.3; EXPRESSED IN PLACENTA, SIGNAL = 1.5; EXPRESSED IN HEART, SIGNAL = 1.3
tacaggaagggcttaggacggtgcttggctcatataaacactcagtggcaaagaggttgatgcttaagtacacaggaagtgtttaccagtacacataattgtataccagtgagctccaccattcaatttactgtctgtccggtacattgaccctgtgaggcccactctcggtgtggcactgctaacaggttttattgttgcttactcacttgaaaagtgtctcccttggctagacctttgtcctgagcactggacacacataggtgctcagcagcgtccctctctgcaatgcaaaagggataccgtgtgcctctgcatgtcagctctagtcctggcatcccaggagcatacggtgacagtggaagtgaagcgcaagccgagtcctgggaaccaatgtctgccagaattaattaaaagtaagcatctttttttccctggttagttaatccaggatgaattccctgagt

SEQ ID NO: 1488 - DNA, 487 bp, Homo sapiens
  MAP TO AL050343.14; EXPRESSED IN BONE MARROW, SIGNAL = 8.5; EXPRESSED IN BRAIN, SIGNAL = 6.5; EXPRESSED IN HBL100, SIGNAL =  15; EXPRESSED IN HELA, SIGNAL =  12; EXPRESSED IN HEART, SIGNAL = 8.6; EXPRESSED IN LUNG, SIGNAL = 4.6; EXPRESSED IN ADULT LIVER, SIGNAL = 5.3; EXPRESSED IN FETAL LIVER, SIGNAL = 7.4; EXPRESSED IN BT474, SIGNAL =  18; EXPRESSED IN PLACENTA, SIGNAL =  10
caccatgtggtgggtgttcttggggtcagggagcatgcccttggctgtatcatacacgctgaggtaggttgcccagtacatatggatgccctgcaccgagatgctgaagccctgggacaggcctcggatcccatcagccttgatcttctccaggcagtctgccaggcctttgagctcccactatatgcccaatttcccaacgttggctgccaggcaggttctggcaaattccaggggatagaagaagcacagggagatggccccagccgcccctcaggaagccaggttgcctgcaaaatatctccagaactgtgcatgcttatgcacgcctcccagaaggacctgcttgtacttatccctaaaggcaaagttgagggcttgcatggggaagcagtggatggtgctggccaggtgcccctccagaaggacaagtgccctgctccttggggatgtggaccttgcagcccaccacaccacgcctttgtac

SEQ ID NO: 1489 - DNA, 494 bp, Homo sapiens
  MAP TO AL109830.7; EXPRESSED IN BT474, SIGNAL = 3.4; EXPRESSED IN PLACENTA, SIGNAL =  21; EXPRESSED IN BRAIN, SIGNAL =  15; EXPRESSED IN FETAL LIVER, SIGNAL =  22; EXPRESSED IN ADULT LIVER, SIGNAL =  11; EXPRESSED IN HEART, SIGNAL =  18; EXPRESSED IN HELA, SIGNAL =  12; EXPRESSED IN HBL100, SIGNAL = 7.2; EXPRESSED IN LUNG, SIGNAL = 1.6; EXPRESSED IN BONE MARROW, SIGNAL =  17
aaaaccaggcactttcttgccttagggtagtctgactacatttcattgtatgtactttggctttatttgatattttgaaaatttttgtctacctaaataacaagcagagagagcctccctaaaagaaaatgatatttattctggagtaggatattgcaatgggaatatgtgtggcactgcgaactgtgttgtgtgtgtgtgtgtgtgtgtttgtgtgtgtgtgtgtgtgtgtattttgggaggtaataaaaaggcaaaagcttttcatttttaaattttattaatatatttattttatttgcaggggagggcataaacactatctcccactacacagattatgcagttgagtgtcctacacttggggaaatcatgagagtcagcacaaggagcctcccttgggaaaacactttcctgatcctggtgtctctcctgccaggtaagtgtagacaaataaagggaaaaaaaaggaggattacataattgttttgaaa

SEQ ID NO: 1490 - DNA, 492 bp, Homo sapiens
  MAP TO AF153342.1; EXPRESSED IN BONE MARROW, SIGNAL = 1.2; EXPRESSED IN BRAIN, SIGNAL = 1.2; EXPRESSED IN BT474, SIGNAL =   1; EXPRESSED IN HBL100, SIGNAL =   1; EXPRESSED IN LUNG, SIGNAL = 1.6; EXPRESSED IN ADULT LIVER, SIGNAL = 1.2; EXPRESSED IN FETAL LIVER, SIGNAL = 1.2; EXPRESSED IN PLACENTA, SIGNAL = 0.94; EXPRESSED IN HEART, SIGNAL = 1.1
cacaagttagtgtggggctgaagtggtggaccatcacgaagcccagggatggagcctgacccttgtgctgctagagctgtgagactaaggagccagagtcaccatcccaggctggatctttaggcaagaactcttgtttaaagtactgctattgtggttcattgaagccttcttattctcattttctacagcagctgaacctatgttttgactaacacagccttcaactataagctggtgatgaactcccagttacccttctgaaagccttaattgcagtgttcccttaattaaaacgtctttaatcaaacctgttgttaaaagtgtggaccctggggtcagaaatgtcatggctgtgaaccaaatcggcccggcactcgctgtgcggacaggcctcatttctctctatccacttgaccacgtaggtcctccagtagtctactaactggcctgtctcaccctttctcattccctgctccataatgccctgtt

SEQ ID NO: 1491 - DNA, 492 bp, Homo sapiens
  MAP TO AL121749.2; EXPRESSED IN PLACENTA, SIGNAL = 5.8; EXPRESSED IN BONE MARROW, SIGNAL =   6; EXPRESSED IN BRAIN, SIGNAL = 5.6; EXPRESSED IN FETAL LIVER, SIGNAL = 6.6; EXPRESSED IN HEART, SIGNAL = 6.3; EXPRESSED IN HELA, SIGNAL = 5.3; EXPRESSED IN HBL100, SIGNAL = 3.5; EXPRESSED IN LUNG, SIGNAL = 4.7; EXPRESSED IN ADULT LIVER, SIGNAL = 5.5; EXPRESSED IN BT474, SIGNAL =   3
tctgtgcctggcttatttcacatagtgatggacacctaggttgcctccctgtctgggctattgtgaacagtgttttaatgggagtgcagctgtctctccagcacactgatttcgattcctctggatatatagccagaagtgggattgccggatcatatggcaattctatttttagtctttttaggagcctccatattgtcttctagaatggctgtaataattcgcctttgcaacagcagtgcaaaggggctcccttttctccataccattctcacaggtgtgatgaattctgatagttttccaggtgtttcttttaggttttcttggtagcaaccacattagcttcaaggttactgaacacgagataaatgactgtagaacccatgagtgcctgcaggaagaaatgatgttcaagaaccactttatctacatttctatacctccagctttcctccttttgctcaagatgtgactatggcttgatccctgtcc

SEQ ID NO: 1492 - DNA, 491 bp, Homo sapiens
  MAP TO AL109656.1; EXPRESSED IN BRAIN, SIGNAL = 1.9; EXPRESSED IN FETAL LIVER, SIGNAL = 2.3; EXPRESSED IN ADULT LIVER, SIGNAL = 1.5; EXPRESSED IN PLACENTA, SIGNAL = 3.1; EXPRESSED IN HBL100, SIGNAL =   1; EXPRESSED IN HELA, SIGNAL =  14; EXPRESSED IN HEART, SIGNAL = 3.6; EXPRESSED IN BONE MARROW, SIGNAL = 2.9; EXPRESSED IN LUNG, SIGNAL = 1.7
aaatgtgtgtttagttatgtacaatggaatactattcagcccttaaaaagatattcatcgtgctcaacctggtcctaatgctgccctggctgctcagctgacctccttttaccttatgatacctggatatccctctcctgttcagccccacagttcccaacaatttggttcctgctccatgatcaggattttcaataaaccagacactccagagaaaaaataaaaaagaaagaaattcagtcagttgtgacagacatgggtgaaactgaagaacattatcctaaattaaaataagtctacacagaaagacaaataccacatgttctcacttacatgtagaatctaaaacaatcaaactcatagaagcagaattagaatggtggttaccagaggctggagtgttgggggaaatggggagatgattgtaaagggtacaaagcctcagactagaaggataagattttttcaagatctattaacacaatgtgggg

SEQ ID NO: 1493 - DNA, 490 bp, Homo sapiens
  MAP TO AL109946.5; EXPRESSED IN PLACENTA, SIGNAL =   1; EXPRESSED IN HEART, SIGNAL = 1.1; EXPRESSED IN BONE MARROW, SIGNAL = 1.4; EXPRESSED IN LUNG, SIGNAL = 1.1; EXPRESSED IN BRAIN, SIGNAL = 1.2; EXPRESSED IN ADULT LIVER, SIGNAL = 1.3
tttttggtggcctttacaatgtattactgccacttcacatgtgagaaaaaccgaggataatagtctattaatttcctgatggtatttaatgggactcccattacctgtgaggaagtttctcgctttccagatagtggcatgggcacagaggactaggaaagcatacttagaatcagtgcaaatgttaactgtttttcctttgcttaatttgagtgcccttgtgagggcaattagtttggctaattaagcacttgtccctgagtagagagacacactctcaacaatatcattcagagtaactattgcataccttgccttatgtatcccttgttctacaaaagaacttctgtctgtaaagagaatccagtttgggttctctaagagggtttccttgagatcctctctggtcacataggtctgtactactagctgttcacagtcatgttcaagcttcccagcttcctctgggaggaaggtggctggatttagg

SEQ ID NO: 1494 - DNA, 489 bp, Homo sapiens
  MAP TO AL118496.4; EXPRESSED IN ADULT LIVER, SIGNAL = 1.1; EXPRESSED IN BT474, SIGNAL =   1; EXPRESSED IN HELA, SIGNAL = 0.92; EXPRESSED IN HEART, SIGNAL = 1.5; EXPRESSED IN BONE MARROW, SIGNAL = 1.3; EXPRESSED IN LUNG, SIGNAL = 0.91
gacatgggagaaggaaagggtaaaaaggaaaggacttaaggaagataaaggaccaaatcagggaaggatggccaacctctggaggcttggggagcttttatatgtgatgcccccaagaaccaaggcactgagacctcgtgcctttgtaagggaatgaggtagctcagctaaggctacaatgcctgccctcattctcaacttggtgtggctttggaccaatcacctgatctctgaaaaatgcttaagggtttgttagggtccaaggtatatggtatactttagagaaggcaaatgtggcagcagaacagggagcaagagaaggaaatagctgccttgctctctccatggacattgacagcaccctcattatagactatggggtagcaagaattgcctacctgcaaacaactgtgggcgtcagggttacaacgattatctactcatggatggcaatccagctggagagacagtaaggtccatttcccctgc

SEQ ID NO: 1495 - DNA, 486 bp, Homo sapiens
  MAP TO AL031772.4; EXPRESSED IN ADULT LIVER, SIGNAL =   2; EXPRESSED IN PLACENTA, SIGNAL = 2.6; EXPRESSED IN FETAL LIVER, SIGNAL = 1.6; EXPRESSED IN BT474, SIGNAL = 1.4; EXPRESSED IN HEART, SIGNAL = 1.3; EXPRESSED IN HELA, SIGNAL = 1.2; EXPRESSED IN HBL100, SIGNAL = 3.1; EXPRESSED IN BRAIN, SIGNAL = 1.4; EXPRESSED IN LUNG, SIGNAL = 2.2; EXPRESSED IN BONE MARROW, SIGNAL = 2.1
tcaaatgttacctagcacctgactagaacaaaaaaacaacactggtgaaaactacaccaaaatagagcaatctgtcttgtttgttgtttggtttttaacaaacagaaagcaggcaaggtgaattaacacctataccttgaaggtgacaaggaacatcatattcgatctcatcatgtctcgacgggcttaggaacaaagttccatccaccagtgggaactgttcgaacaccgggagcgcccggtggcacagggcacagtttaccacgtttctgtggctggcactgagcgcggccagaatgaacttccgcaagtcttccccctggcccacttgggcatcgtcttccatgcgcacgtggaaagtgttcagcttatgcctggggatgtgagtgaggagttcggagaggtccagccgccgaaggaactgcacgggggtgtcgaagtgtccccccctgtgaactgccaaccccgcagggctgtaatcaaagt

SEQ ID NO: 1496 - DNA, 481 bp, Homo sapiens
  MAP TO AP000493.1; EXPRESSED IN PLACENTA, SIGNAL = 3.8; EXPRESSED IN ADULT LIVER, SIGNAL = 3.2; EXPRESSED IN FETAL LIVER, SIGNAL = 4.5; EXPRESSED IN BT474, SIGNAL = 3.3; EXPRESSED IN HEART, SIGNAL = 3.6; EXPRESSED IN HELA, SIGNAL = 2.6; EXPRESSED IN HBL100, SIGNAL = 2.3; EXPRESSED IN BRAIN, SIGNAL = 2.9; EXPRESSED IN LUNG, SIGNAL = 3.2; EXPRESSED IN BONE MARROW, SIGNAL = 5.3
atggcttaacggaggatggcaagcagccttctctgatcacttctaggagggttatttgcagttatcagctgctgggggtcagggggcatctctcgtgcctccatctgtagatcctgtgaaaactcccccctccttgccttcgtgacttctctgcaggatgactcgggaaagagaaggataaggaaagaaagtcaaagtgagcccctagatagctgtaaacctggttctattgtactttgaaaacaaagcatttctcttgtcctccacagtgaggacatcaggaagtaagcctcccctgggggaccatgcagataaaggcagaaggagtaggtcagaccccagaagatgggacttttctgattcaagaagttcagtatctttgtgaggaactgcgccacacgaatgttgatgcgcagttcagtgtgacaaaggctgtttgtacaataaatattgttgaatcagtgctgcctgtgtggatatg

SEQ ID NO: 1497 - DNA, 471 bp, Homo sapiens
  MAP TO AL109628.2; EXPRESSED IN PLACENTA, SIGNAL = 2.8; EXPRESSED IN HELA, SIGNAL =   3; EXPRESSED IN HBL100, SIGNAL =  11; EXPRESSED IN HEART, SIGNAL = 1.8; EXPRESSED IN BONE MARROW, SIGNAL = 3.5; EXPRESSED IN LUNG, SIGNAL = 2.2; EXPRESSED IN BRAIN, SIGNAL = 3.7; EXPRESSED IN ADULT LIVER, SIGNAL = 3.1; EXPRESSED IN BT474, SIGNAL = 2.7; EXPRESSED IN FETAL LIVER, SIGNAL = 2.3
ccttttgtaaaagcagtaaccccattcatgaggatgtacccctcatgctctagtcacttcctgaaggccccactgatctgggagggaggcagagaagtgccaggaagggaagggcgtggtccttggctagggcttcaccctcaggcctgtgcctacagacctaggtgaagactagcatttctgttttcctgcccaaatgttgcatttcccaagaccactgtggcccaccatgcccccatcctgtgcttttaagaaccccaagaccctagcgggcacaacacatgcagctggatatcaagaggaatgcattggcggaagaacacaaaagcagcaggacgtcgagaggggcatgccggcaaagagcacaccgggagactccagtagacaccggcaggccaaccagtggaacgacacagagtttggctggggtggccggaggagggcccgggctgctgagctgcctgactccag

SEQ ID NO: 1498 - DNA, 470 bp, Homo sapiens
  MAP TO AL078604.10; EXPRESSED IN PLACENTA, SIGNAL = 1.7; EXPRESSED IN HBL100, SIGNAL = 1.4; EXPRESSED IN HEART, SIGNAL = 1.3; EXPRESSED IN LUNG, SIGNAL = 1.2; EXPRESSED IN BRAIN, SIGNAL = 1.7; EXPRESSED IN ADULT LIVER, SIGNAL = 1.9; EXPRESSED IN HELA, SIGNAL = 1.4; EXPRESSED IN BONE MARROW, SIGNAL =   2; EXPRESSED IN BT474, SIGNAL = 1.6; EXPRESSED IN FETAL LIVER, SIGNAL =   1
atctgggactccagcacaaccaccctgcccctccctgaccactttaatcacaggcagcccagcagttaaaggaacactgacatgcagagataagagagaaccaatgcaagaactccagcactcaaatggccagagtgacttatatcttccaaatgatcacactagtactccaagaagggttctaaaccaggctgtgttggctgaaatggcagaaatagaattcagaatatggataggaatgaagatcatcaagatcttccagagaatggcaaaacccaattcaaggaaactaagaatcacaataaaatgatacaggagctgaaagatgaaatagccagtataaaaaagaacctaactgctctgatagagctgaaaaacacactacaagaatttcacaatgcaatcacaagtattaactgcaaaatagaccatggtgaggaaaggatctcagaccctgaagactggctgtc

SEQ ID NO: 1499 - DNA, 481 bp, Homo sapiens
  MAP TO AL121655.1; EXPRESSED IN BONE MARROW, SIGNAL =   1; EXPRESSED IN BRAIN, SIGNAL =   1; EXPRESSED IN BT474, SIGNAL = 2.1; EXPRESSED IN ADULT LIVER, SIGNAL =   1; EXPRESSED IN FETAL LIVER, SIGNAL = 0.91; EXPRESSED IN HELA, SIGNAL = 1.5; EXPRESSED IN PLACENTA, SIGNAL = 1.1; EXPRESSED IN HBL100, SIGNAL = 1.3; EXPRESSED IN HEART, SIGNAL = 1.2
tcatgaagactgtggagagatacagaaaaatgttatgtcataataaataaaaagaaaaatcaaaattacatgtatatcatgattacaaatctttacaaatatgcatatgatctaagactggtgggaaaaaatttaaatgtctgaattatgagattatggctgaatactttcttaaaaactttaacatccataaatcacacagtaaaaagtcgctatacataactatgatatttcagataggggaatctattttgctttctttactaactccatttgtggacacaattatcttacctttcctttgcaagcacagcaagtccctgtaataagataggcacaactgtctgatccaggtaggcacgagttggcaaagactggagatctaccttctgctttgatgacttttctgcattaatcttctcattttctactattctctagtgaattcaaaaaaacagtgcatgaacatttcaaataacca

SEQ ID NO: 1500 - DNA, 471 bp, Homo sapiens
  MAP TO AF172273.1; EXPRESSED IN LUNG, SIGNAL = 1.9; EXPRESSED IN BONE MARROW, SIGNAL =   3; EXPRESSED IN BRAIN, SIGNAL = 1.8; EXPRESSED IN BT474, SIGNAL = 1.8; EXPRESSED IN ADULT LIVER, SIGNAL = 1.8; EXPRESSED IN FETAL LIVER, SIGNAL = 2.1; EXPRESSED IN HELA, SIGNAL = 1.6; EXPRESSED IN PLACENTA, SIGNAL = 2.3; EXPRESSED IN HBL100, SIGNAL = 1.7; EXPRESSED IN HEART, SIGNAL = 1.9
gaatgtgttagggaggccaggagagtagattctcttaccatgctctattcaattccttgcaagtaccacccagtggccaaacccaagcagaagccagaggcaaggaatatactgatgttgccccagtggtcagctagtaaataaacatttaacaacaagctctgagacatgtatgtgtgcatgcatgcttacttgtagtatttgccagtgtccatagtgtaaatattcctaccacagtcaccaaacacggagttaggaggagatgcatacaatcagttcttgcaggctctagtgctccactgaagtaaacagatggggtcagcctcccacagcacagacagagtagagaaggatggagagtggatctggaagggcaaacaaaacaaccagtgctgctgcagctgtcgacatcaggccaatggttctgacatctggagcaaggacatcagggcctccaccttcaccatcaac

SEQ ID NO: 1501 - DNA, 471 bp, Homo sapiens
  MAP TO AL050318.12; EXPRESSED IN HBL100, SIGNAL = 0.96; EXPRESSED IN HEART, SIGNAL = 0.96; EXPRESSED IN BONE MARROW, SIGNAL =   1; EXPRESSED IN BRAIN, SIGNAL = 1.3; EXPRESSED IN FETAL LIVER, SIGNAL = 1.1; EXPRESSED IN ADULT LIVER, SIGNAL = 1.2; EXPRESSED IN BT474, SIGNAL = 0.97
ggctgttatgtgaggttctgcattttcatctaatgttgataagtggaattccacatcttcctcctgaaaagtcttgcagtgtcttgttggtcaaccacaatttgcctagctttctcctagttgttgggtatttactcacgtaactaatttctgagtgcccacctgtgtctggctgtgtgcctatggctggaaaacctacagccaagcttactcctgaaggctttgggcgacagtgccttgcggtgggaaggctgtggccctgggacttggttactagccaggtgatttaggaaaatcatccacaccttctgaacctcccttttctcatgttgtggaaacacaaggcttcggtgagagtcaaagaaaacaggcacaccccttgtttcattgtgccttgcttttttgcgctttgcaggtactgcgtttttttcaaattgagggcttttggcaaccctgtgtcgagcaaagtct

SEQ ID NO: 1502 - DNA, 471 bp, Homo sapiens
  MAP TO AL118498.6; EXPRESSED IN BONE MARROW, SIGNAL = 2.7; EXPRESSED IN BRAIN, SIGNAL = 1.8; EXPRESSED IN BT474, SIGNAL = 1.4; EXPRESSED IN HEART, SIGNAL = 1.6; EXPRESSED IN LUNG, SIGNAL = 1.5; EXPRESSED IN ADULT LIVER, SIGNAL =   2; EXPRESSED IN FETAL LIVER, SIGNAL =   2; EXPRESSED IN PLACENTA, SIGNAL = 1.8; EXPRESSED IN HELA, SIGNAL = 1.4; EXPRESSED IN HBL100, SIGNAL = 1.3
catcccatctccacaaaaatacaaaaattagctggatatggcagcttgtgcctgtggtcctagttagttgggatgctgaagcaggaggaccacctaagctgggagtttgaggctgcagtgaaccgtgaaccactgttctccagtctgggcaatagagtaagaccctgtcttgaaaaaaataaaaatgaaagcgcccctttccacctggccccacatttcctgcaggtgggcaacataccatcttgtgtgcattctggatcttcatcctgtgcatcagtgagctttcctttgcttttagcaggaggacacagctctgaatgaagtcacagtatgcaaatttcccgttgctctttaagtcgtattttataatgagctgctgacactcctctttgcttatgtccaggttgaatttctccacaagagctacagaaaaaaatggcagttcaattggtggcgattcattcattcatt

SEQ ID NO: 1503 - DNA, 477 bp, Homo sapiens
  MAP TO AL050343.14; EXPRESSED IN HEART, SIGNAL = 0.85; EXPRESSED IN BONE MARROW, SIGNAL = 1.5; EXPRESSED IN BRAIN, SIGNAL = 0.9; EXPRESSED IN FETAL LIVER, SIGNAL = 0.87; EXPRESSED IN ADULT LIVER, SIGNAL = 1.5
ggcttctcctgatatgactggttataatgctctgcagaagtaaagggaaacaaaaagattacattaaacttactatcattccatctgcgtgcttctccgcattactctggtccttaaggaaaaatgttaaaaatattaacttcattcttacatgtaagtaactccttgtgtatttctcctacaagaaagcttatttactaggtaagtaataatgttagaacatgatttatctgcctccactaagattttaattccatgtgtacattcttagccaaacacaattctaactctggctacacaacaatcaacaccaacagcatggcaattatttttctatatagggatttaactaagttcatcgtggaaatatcctgtagaactgtagtcacattcaaaattccaggcaaaagtgatctctacatggatgaacctttgaaaacatgatgttaagtgaaagaagctagtcacaaaagacca

SEQ ID NO: 1504 - DNA, 456 bp, Homo sapiens
  MAP TO AL079339.11; EXPRESSED IN BT474, SIGNAL = 2.1; EXPRESSED IN ADULT LIVER, SIGNAL = 2.3; EXPRESSED IN PLACENTA, SIGNAL = 2.8; EXPRESSED IN BONE MARROW, SIGNAL = 2.5; EXPRESSED IN BRAIN, SIGNAL = 2.5; EXPRESSED IN FETAL LIVER, SIGNAL = 2.9; EXPRESSED IN HEART, SIGNAL = 2.5; EXPRESSED IN HELA, SIGNAL = 2.2; EXPRESSED IN HBL100, SIGNAL = 1.8; EXPRESSED IN LUNG, SIGNAL = 2.3
acaccagctctgccagtgaccgtgggtgacacatagtgcctcccagagcctcagttttctctctgtaaaatggacataaatactctgaacaagcaaatagttagaaggcgcacactagcaaccagcatgggagctgtgatggaggtggtgatgttgatggtgacccacctggggccagacatgtgcttagcattggagatgcaaaaagaaagaagcctggtctgtgtcctcttgttactcaggtctcatcttcaaatgtcccctccccagaggggcttcctgggtggaacgatctcgatgagccactgtctcaccttacatgttcccttcatagcctgcatggtctccatgtgcccagtcgtctttttgcccagtaggccctccatggggttagaagctaggttcaattcattcatctctgcatccccactgtctggcagagttcctagcacagag

SEQ ID NO: 1505 - DNA, 456 bp, Homo sapiens
  MAP TO AL121758.4; EXPRESSED IN LUNG, SIGNAL = 3.5; EXPRESSED IN BRAIN, SIGNAL = 3.9; EXPRESSED IN ADULT LIVER, SIGNAL =   4; EXPRESSED IN PLACENTA, SIGNAL = 4.3; EXPRESSED IN BONE MARROW, SIGNAL = 4.5; EXPRESSED IN BT474, SIGNAL = 3.1; EXPRESSED IN FETAL LIVER, SIGNAL = 4.4; EXPRESSED IN HEART, SIGNAL = 4.1; EXPRESSED IN HELA, SIGNAL = 3.2; EXPRESSED IN HBL100, SIGNAL = 2.7
tgaagtacatcccccaggtctcatggctgagcccacagtctggttccagggactgcattcacagcctgcatcccctgcaggctctgtattgaagtggagacatcagccaagtatgaacaccagcaactggcagagcttggctgagaagttgcctgtacacaaccgatgggctctctcaacctgttctcttagagctaaacttacctactcagtctgggcacccacggtcctcctctgcaggggcagcctgccaaggacacagagaagaggaggagaaaggaatgtaggccatgggcaccctgccatgaccaagctgaagaccccgcagcagccaccatgtcccacagctcagcaactgagacactgttcattcctcactcaggttccatgtccactgggggccgggatctgaaggtctgaggtttagttttagatggcctgtgatccctttgaaat

SEQ ID NO: 1506 - DNA, 464 bp, Homo sapiens
  MAP TO AL117356.1; EXPRESSED IN ADULT LIVER, SIGNAL = 1.3; EXPRESSED IN FETAL LIVER, SIGNAL = 2.3; EXPRESSED IN PLACENTA, SIGNAL = 0.97; EXPRESSED IN HEART, SIGNAL = 0.91; EXPRESSED IN BONE MARROW, SIGNAL = 1.1; EXPRESSED IN LUNG, SIGNAL =   1; EXPRESSED IN BRAIN, SIGNAL = 1.6
aagctccaaagcagagaggggagagctgcaggaaggcagtttcttaagttctaaggaaaacatgtaggcttctaaatttatttatttatcttattttttggctgaaggaagtaaaataaatggagtccaaggaaaaacaactccctctgggaccttggcttcagctacctctccttgttttaatgagatcatttttgattctgaggttttgtctccagaaaaccatccagaatggagctgcttttgaaatattaggcatatcccaggacccaaaaccccgaggagttcaactgtctgcagatcatttggaccacccacctgtggtagctgcacagcctgtccaaaccccacagaaacgcaaatgcctgcctctcactatctctccaaatggcgcccaggaggctttgctcctccgtggaattgctgagctagacaagaatattactcctctggcccagtgttac

SEQ ID NO: 1507 - DNA, 453 bp, Homo sapiens
  MAP TO AP000463.1; EXPRESSED IN BONE MARROW, SIGNAL = 1.7; EXPRESSED IN LUNG, SIGNAL = 1.1; EXPRESSED IN BRAIN, SIGNAL = 1.7; EXPRESSED IN ADULT LIVER, SIGNAL = 1.2; EXPRESSED IN FETAL LIVER, SIGNAL = 1.1; EXPRESSED IN HELA, SIGNAL = 1.1; EXPRESSED IN PLACENTA, SIGNAL =   1; EXPRESSED IN HBL100, SIGNAL = 0.92; EXPRESSED IN HEART, SIGNAL = 1.1
gccagtttattggtcaggattctccagagaaacagaaccaataagattatctatctgtctatctatctgtctatctatctatcatctatctatctatctatcatctatctatctatctacatctgtcactgtatctatctaatctgtcactctgtcgtctatctaatctgtcactgcatctatctaatctgtcgctctatcatctatatatttatctatctatctatctatctatctatctatctatctatctatctaatctgtcactctatctgtctagctacctacctccctatctatgaggagaattattacgggaatcacaattatgaaggccgagaagtaccacaatctgctgtctgtgagctggagagccaggaaagtcagaggtataattccctctgtgtccaaaggctcaagaagcaggagcattgttgttcaagggcaggagag

SEQ ID NO: 1508 - DNA, 430 bp, Homo sapiens
  MAP TO AL121748.1; EXPRESSED IN LUNG, SIGNAL = 2.7; EXPRESSED IN BRAIN, SIGNAL = 1.3; EXPRESSED IN BT474, SIGNAL = 1.6; EXPRESSED IN ADULT LIVER, SIGNAL = 3.1; EXPRESSED IN FETAL LIVER, SIGNAL = 1.6; EXPRESSED IN HELA, SIGNAL =   1; EXPRESSED IN PLACENTA, SIGNAL = 8.8; EXPRESSED IN HBL100, SIGNAL = 1.8; EXPRESSED IN HEART, SIGNAL = 2.7
gagactgaaaattgtatatgattgggtacaaaatcatgtctttattccatatgttgtattttatttcttagcatggagtcgcccaggaaatcattttacattatctgtttcatttcacttcccagattatccttgctctggaatgttgggtatggtgtctggacttatttctgactcccagatcacatcatccaaccaaggggacagaaactggatgcctgaaaacatccgcctggtaaccagtcgctctggctgggcacttccacccgcacctcattcctacatcaatgagtggctccaaatagacctgggggaggagaagatcgtgaggggcatcatcattcagggtgggaagcaccgagagaacaaggtgttcatgaggaagttcaagatcgggtacagcaacaacggctcggactggaagatgatc

SEQ ID NO: 1509 - DNA, 489 bp, Homo sapiens
  MAP TO AC011399.1; EXPRESSED IN BT474, SIGNAL = 2.5; EXPRESSED IN PLACENTA, SIGNAL = 2.7; EXPRESSED IN HBL100, SIGNAL =   3; EXPRESSED IN HEART, SIGNAL = 0.95; EXPRESSED IN BRAIN, SIGNAL = 1.8; EXPRESSED IN FETAL LIVER, SIGNAL = 1.5; EXPRESSED IN ADULT LIVER, SIGNAL = 1.9; EXPRESSED IN HELA, SIGNAL = 3.1; EXPRESSED IN LUNG, SIGNAL = 1.1; EXPRESSED IN BONE MARROW, SIGNAL = 1.9
catgggtgaatttcagttttgaatattgaagatagataatgtggtagacttcaattgtttaacacaacttgtacttggattaatatacttcaaattcttgtaccaggcatgaagaaggaaaggtgcaggtagagttaacaaatcagaaaaatttaccgtgtctgagttttggaagtagcagtacttgtcttttcttcttgggaatgaaggagcagtgaggggtatttagaggaattcacatccatcacaaaatttaactcttggcttttaccaccactgctactctcactgttgcagtctgtgctgtccaagttatctgaatcactattcccacctgcaccaccacctctaggttctccatttattttatttttatctgccttttgttgggctaaagacatatgttgttctggtaaaattaaatgtgctgtaggaggggtttcttttgttttgttcttcttatttttccgattggtgctgggagttgtc

SEQ ID NO: 1510 - DNA, 492 bp, Homo sapiens
  MAP TO AL118508.6; EXPRESSED IN BT474, SIGNAL = 1.9; EXPRESSED IN PLACENTA, SIGNAL = 1.1; EXPRESSED IN BRAIN, SIGNAL = 1.6; EXPRESSED IN ADULT LIVER, SIGNAL = 1.3; EXPRESSED IN FETAL LIVER, SIGNAL = 1.2; EXPRESSED IN HEART, SIGNAL = 0.86; EXPRESSED IN HBL100, SIGNAL = 1.7; EXPRESSED IN BONE MARROW, SIGNAL = 1.9
tctagaacagtgaaggcgtcctcaggcaacctcagggaaggggaggggctgacctgggccccagtgtcccatcagctgcctggagttcttcaggttccaaggagaggctgggctgggtctcctgggcaggcctcctgggtggctgtcagctggacagtcctccacccctcacccagcacagcgatggagcctcagcacgcagtgtgtggtccaggattcggagcaatagactgaggaagggggctgggcggggagagaacgtcacttcctgagtcccacgcaccatccactcagcagctgctgaggcccgtggctcacctttgaccctcactgtgacctggctgatctttcggaaaggttggtccaggcagctggcaatatccaggaagtgggctctggggacagcaactgcagagatgcttacatgctgttttatctagaaagcaaagaataacattagaaaaataaagtagatttcctgctcttagctga

SEQ ID NO: 1511 - DNA, 489 bp, Homo sapiens
  MAP TO AL096869.1; EXPRESSED IN BT474, SIGNAL = 1.6; EXPRESSED IN ADULT LIVER, SIGNAL = 2.6; EXPRESSED IN PLACENTA, SIGNAL = 2.7; EXPRESSED IN BONE MARROW, SIGNAL = 1.9; EXPRESSED IN BRAIN, SIGNAL = 1.9; EXPRESSED IN FETAL LIVER, SIGNAL = 1.5; EXPRESSED IN HEART, SIGNAL = 2.2; EXPRESSED IN HELA, SIGNAL = 2.1; EXPRESSED IN HBL100, SIGNAL = 1.7; EXPRESSED IN LUNG, SIGNAL =   2
ccactctgagaaggtggctcttctgaagttcaaagaggggcctgaagtcggagctttctttaaactgtcttccagtttacatgcttgtttgctgtgtgaaaacatctcatcccattatgcgtgatgagctggaagtatggcagagagggctggaatcgagggaaaaaggtgagcttcggcttgcctggcattgctaaattataaaacactggtgtttttctctctctctcgtctcttaaattgtccatctgttcattgagatttgggaaaaattgctgtctcctattttcttagttggcaccatgttttccagtttgtgtccctgtgggaggagagattcagcatgaagatgatgaacttcccagggggctcctccagaaactggcactcggtgtctgtgtgtctgtccagtttatccatcagcctagtgagggctacccaggatccagacaggcaggacaggctcacgcattggcacatctgcagttt

SEQ ID NO: 1512 - DNA, 405 bp, Homo sapiens
  MAP TO AL121754.3; EXPRESSED IN PLACENTA, SIGNAL = 0.99; EXPRESSED IN HELA, SIGNAL = 1.6; EXPRESSED IN HEART, SIGNAL = 1.1; EXPRESSED IN ADULT LIVER, SIGNAL = 1.2
aaaagcataaggaagcagtgagaagacctcaggaatacaaaggtggtttaaaatgaaataactttctacgtagcttttaactacaaatctttcaacatataagtattcttccataaatatctgtactacatgggtcataacagaagcaatattatactttaggtatatatgctcatatagcttaattttttttaagtttttactcacttgtggtcatgatgttaggagggcaagagggtattccatgatctactgcccatctgtaggctccttctccaactaaaaagctaacaacagaaaaattatttttaaaattcacagtgtcatcttctcctacatattcaataaatataggtaatatggtaaggcagttgagaaaaagtcttgcatatggacataattcca

SEQ ID NO: 1513 - DNA, 486 bp, Homo sapiens
  MAP TO AL034417.14; EXPRESSED IN LUNG, SIGNAL =  14; EXPRESSED IN BRAIN, SIGNAL =  12; EXPRESSED IN BT474, SIGNAL =  61; EXPRESSED IN PLACENTA, SIGNAL =  34; EXPRESSED IN BONE MARROW, SIGNAL =  25; EXPRESSED IN ADULT LIVER, SIGNAL =  18; EXPRESSED IN FETAL LIVER, SIGNAL =  42; EXPRESSED IN HEART, SIGNAL =  10; EXPRESSED IN HELA, SIGNAL =  99; EXPRESSED IN HBL100, SIGNAL =  90
acttggaagccaggacattgcctccccagtgacagcagatctcgtcgtgtctgtctttgtaattggtcctgatagcttccaccagcttagccaaagctcctttgtcttccgagttaacccatgcgaaggcaacagtggtgcaggtcttcctgtagactagacgtcccagtcttgccttccccttgatagtgcagtaagggacccccattttacgacacagggcaggcaggaagacaacagctcgatgggatccatgtcgtgtgcagtgatcaccagctgagactttttgttctccaccaaggtggtgacgttgttaactcctgcttgaaggacattgaaggactggtggtctcttagtggggacatcccctttgctggcagctgtcttctcagcccagagccaacagcctctgcttcttctcttgctttgtctctggtctgtacttgtgggccagcttaagcagctgagtagctgtatggcggtcc

SEQ ID NO: 1514 - DNA, 470 bp, Homo sapiens
  MAP TO AC008132.19; EXPRESSED IN PLACENTA, SIGNAL =   6; EXPRESSED IN HBL100, SIGNAL = 4.4; EXPRESSED IN HELA, SIGNAL = 6.1; EXPRESSED IN HEART, SIGNAL =   5; EXPRESSED IN BONE MARROW, SIGNAL =   7; EXPRESSED IN LUNG, SIGNAL = 4.1; EXPRESSED IN BRAIN, SIGNAL = 4.2; EXPRESSED IN ADULT LIVER, SIGNAL = 6.2; EXPRESSED IN BT474, SIGNAL = 3.4; EXPRESSED IN FETAL LIVER, SIGNAL = 9.8
agcccctaccgctctacgggaggcctcccggaacgaaagcggagaagggggccagcctcatcccactgccagctgaacctcagttcctgaaacacagtgagtgaggacggacctcaggctgtctcttcgggtcacacccagtgtgaaaagatggcagatacagcaccagggcagacactcgcccccaggggtggctcccccagatcccaggcctctaggccctgtagatgcaagtttcccctgctgccacgcaggcgaggggagcctttgatgctgccacctcccttagagctggggtaccgggtcactgctgaagacctggaccaggagaaggaggcggctttccagcgcatcaagagtgcactgcaggttgaggacaaggccatttagtactgcagaccctcacggccttcccacactttgtcctcacttgcaacagaggcttctggtctgcctgccatttctaaagc

SEQ ID NO: 1515 - DNA, 478 bp, Homo sapiens
  MAP TO AL021395.8; EXPRESSED IN BT474, SIGNAL = 1.3e+02; EXPRESSED IN FETAL LIVER, SIGNAL =  24; EXPRESSED IN HBL100, SIGNAL =  42; EXPRESSED IN PLACENTA, SIGNAL =  28; EXPRESSED IN HELA, SIGNAL = 1.1e+02; EXPRESSED IN HEART, SIGNAL =  12; EXPRESSED IN BONE MARROW, SIGNAL =  30; EXPRESSED IN LUNG, SIGNAL =  16; EXPRESSED IN BRAIN, SIGNAL =  50; EXPRESSED IN ADULT LIVER, SIGNAL =  17
tggaagggaacaaggaaaacatggaatccaaagggaactgcagcaagagcacaaagattctaggatactgcgagcaaatggggtggaagggtgctctcctgagctacggaaggaatagtctggtggttaagataaaatggaagtcaaacttatcgaagttgtctgcagtcagcaatgattatcttcttgctggtcttgccattcctggacccagagtactccatggcctccacaatcttcatgccttctttcaccttgccgaagaccacatgcttgccatccaaccactcagtcttggcagtgcagatgaaaaactgggaatcgtttgtgttgggtccagcatttgtcatggacaagatgccaggacctgtatgctttaggatgaagttcttatcatcaaatttctccctgcagatgggcttgccaccagtgccaatttggcgtgtgaagtcaccaccctggcacataaaccctggaa

SEQ ID NO: 1516 - DNA, 477 bp, Homo sapiens
  MAP TO AL080317.11; EXPRESSED IN BONE MARROW, SIGNAL = 7.2; EXPRESSED IN LUNG, SIGNAL = 7.2; EXPRESSED IN BRAIN, SIGNAL = 6.6; EXPRESSED IN PLACENTA, SIGNAL = 7.8; EXPRESSED IN ADULT LIVER, SIGNAL = 6.8; EXPRESSED IN FETAL LIVER, SIGNAL = 7.3; EXPRESSED IN BT474, SIGNAL = 5.6; EXPRESSED IN HEART, SIGNAL = 6.1; EXPRESSED IN HELA, SIGNAL = 6.8; EXPRESSED IN HBL100, SIGNAL = 4.7
tattaatagcggcacaggcgtcaaattttaaggttacatttttggggacctttctttcttctgttctagctattaccttacttgtgtcacctagaaaaggaccagtccttaattttattttaaaaactgtgaacatgggaggcttaaaatgggtcataatacgcatcaggttggttattccctgggctgcataccttggatagaatagcattatacaaacaagtttcttttagagtcccggtacacttataataaccataaaataataggactgtagcaatcttttgtcctacctcagtgacttgatgtatatactggaaacagttatcagtctgaggaaggtcagtggaagtccttactgttcaagtccaaattttaaggaaattgggtcccgcgatgaatttcctcatgtttcggccgtgcgtggaccagtcagcttccaggtgtgactggggcggggcttgtcgtcttcttcag

SEQ ID NO: 1517 - DNA, 476 bp, Homo sapiens
  MAP TO AP000426.1; EXPRESSED IN HBL100, SIGNAL = 1.1; EXPRESSED IN HELA, SIGNAL = 1.1; EXPRESSED IN HEART, SIGNAL = 0.97; EXPRESSED IN BRAIN, SIGNAL = 5.5; EXPRESSED IN ADULT LIVER, SIGNAL = 0.95; EXPRESSED IN PLACENTA, SIGNAL =   1; EXPRESSED IN LUNG, SIGNAL = 1.1; EXPRESSED IN FETAL LIVER, SIGNAL =   1; EXPRESSED IN BT474, SIGNAL = 2.4
ttttgtttggctgaccagtgtgttgcaaaacctagacagtgttactggactcgtatagagtttatttgtttgttttttcttcttcccaaaggaacaattacaaattataaaatgcagccctaaagagcagctctacaaattatatatgttttcttttctatctgcagctgaattcttgccgccaggatggggaaacagaacagcaagctgcgcccggaggtcatgcaggacttgctggaaagcacagactttacagagcatgagatccaggaatggtataaaggcttcttgagagactgccccagtggacatttgtcaatggaagagtttaagaaaatatatgggaactttttcccttatggggatgcttccaaatttgcagagcatgtcttccgcaccttcgatgcaaatggagatgggacaatagactttagagaattcatcatcgccttgagtgtaacttcgagggggaagct

SEQ ID NO: 1518 - DNA, 475 bp, Homo sapiens
  MAP TO AC011342.1; EXPRESSED IN PLACENTA, SIGNAL =  11; EXPRESSED IN HBL100, SIGNAL = 2.3; EXPRESSED IN HEART, SIGNAL = 1.5; EXPRESSED IN LUNG, SIGNAL = 1.9; EXPRESSED IN BRAIN, SIGNAL = 1.9; EXPRESSED IN ADULT LIVER, SIGNAL = 1.5; EXPRESSED IN HELA, SIGNAL = 2.2; EXPRESSED IN BONE MARROW, SIGNAL = 1.7; EXPRESSED IN BT474, SIGNAL = 1.9; EXPRESSED IN FETAL LIVER, SIGNAL = 0.99
ttcccattctcaaaacagccgcacaagatgagagacggccatagcactgtagagcatggattattatggataaagggccttgaagatcacatctaagttcaagtctcccatttcgtagatggataactgaggctcccggaagataagtgattcctgataggtcacactggcttacaaatccagagacatgcagatctgcagaaggagaatgcaaagacccttctctccaaaccccatctctttagccacaggggtaacgctctctcctccctaagtacttacttctttgaagggacagtggcaaggaagcccataggtacgcaggggctctgggcagggctccccagtaggaattaacatgtcaagcacatcacagaagtgttcaaaggtacagctgccaatgtagtctgtgcatgggatcttgatccagaggccagccacctccttctccaaaactaaatccacctggtaaaaa

SEQ ID NO: 1519 - DNA, 467 bp, Homo sapiens
  MAP TO AF176681.1; EXPRESSED IN BT474, SIGNAL = 2.4; EXPRESSED IN FETAL LIVER, SIGNAL = 3.7; EXPRESSED IN PLACENTA, SIGNAL = 3.2; EXPRESSED IN HELA, SIGNAL = 4.8; EXPRESSED IN HBL100, SIGNAL = 1.9; EXPRESSED IN HEART, SIGNAL =   2; EXPRESSED IN BONE MARROW, SIGNAL = 2.2; EXPRESSED IN LUNG, SIGNAL = 1.7; EXPRESSED IN BRAIN, SIGNAL = 2.1; EXPRESSED IN ADULT LIVER, SIGNAL = 5.1
tcagtactccaccaacagcactagataggtcatcaagacagaaagttaataaagaaacaatggatttacactatactctggaacaaacagacttaatagatatttacagaacattctatccaataactgcagaatatacattctattcatcaatgcatggaactttctccaagatagaacatatataataggccacaaaagaagtctcaataaatttaagaaaattgaaattatatcaagtactctcttagaccacagtggaataagctggaaatcaactccaaaggaaaccttcaaaaccatgcaaatacatggaaattaaataacctgctcctgaattatcattgggtcaacaatgaaatcaagatagaaattaaaaaattattcaaactgaacaacaatagtgacaaaacctatcaaaacctctgggatacagcaaaggtggtggtaagaggaaagttcatagc

SEQ ID NO: 1520 - DNA, 478 bp, Homo sapiens
  MAP TO AC005082.2; EXPRESSED IN HEART, SIGNAL = 3.9; EXPRESSED IN LUNG, SIGNAL = 4.6; EXPRESSED IN BONE MARROW, SIGNAL =   2; EXPRESSED IN BRAIN, SIGNAL = 2.1; EXPRESSED IN BT474, SIGNAL = 5.7; EXPRESSED IN ADULT LIVER, SIGNAL =   2; EXPRESSED IN FETAL LIVER, SIGNAL = 1.9; EXPRESSED IN HELA, SIGNAL = 5.1; EXPRESSED IN PLACENTA, SIGNAL =  27; EXPRESSED IN HBL100, SIGNAL =   2
catacattcttccttcttctgtgttctataggtgtaaaatggtgataactttgctttaaaaaatcaacaggtagaaaatggaatcaccgcagagtccttacaatatccccttaaggagggatttaataatatgacctgcgtgaatattttgttagccattaaggagcctccctcaaagatcactgcgaaaccttacctaaagaaggggtgggttttgaaggtctgggtggtggtggcggtggcggacaaggtcctggtgctgcagctttcacagtgaggttaaggctgaaggttccattgagcacatacgtgtgattcacagtatgattggtggaaacaaacaggccagtattatccccgaagctccacttgtagttaatggtagaataattgaggaagtggctaggatcatgaatcaggacatcaaacataatggggagatctttgaggaaggtttcgtcggatgaatttcgatcgt

SEQ ID NO: 1521 - DNA, 467 bp, Homo sapiens
  MAP TO AL096678.8; EXPRESSED IN BT474, SIGNAL = 2.7; EXPRESSED IN PLACENTA, SIGNAL = 3.9; EXPRESSED IN HBL100, SIGNAL = 2.6; EXPRESSED IN HEART, SIGNAL = 3.1; EXPRESSED IN BRAIN, SIGNAL = 3.3; EXPRESSED IN ADULT LIVER, SIGNAL =   3; EXPRESSED IN FETAL LIVER, SIGNAL = 3.3; EXPRESSED IN HELA, SIGNAL = 2.9; EXPRESSED IN LUNG, SIGNAL = 3.4; EXPRESSED IN BONE MARROW, SIGNAL = 3.3
gaaaaggctcagaggagacgttacacatggtgggtggtgatggagaaggctggtgatatacaggatccttaagactctaaaatactgacccgcagccatatgactgtgtgaatgtggatttgctctcacgtttgttttccttctgaaaccaggtgtggaccaattagtggtgactgcaggtccagcagcagcttccgacagctcccctccagtggttaggcccaaagagaaggccctcaactccactgctacccagagactccagcaggagctgtcgtcttctgactgtacaggctcccgactgagaaacgtcaaggtccagacagccttgctacccatgaatgaggcagccagatctgatcagcaggctgggccctgcgtcaacagaggcactcaaactaagaagtctgggaagagtgggccaacaaggcatcgtgcccagcaacccgcagccagcagcacctgtg

SEQ ID NO: 1522 - DNA, 474 bp, Homo sapiens
  MAP TO Z95114.19; EXPRESSED IN BONE MARROW, SIGNAL =   7; EXPRESSED IN BT474, SIGNAL = 7.1; EXPRESSED IN HBL100, SIGNAL = 7.4; EXPRESSED IN HEART, SIGNAL = 8.4; EXPRESSED IN LUNG, SIGNAL = 8.2; EXPRESSED IN BRAIN, SIGNAL = 7.3; EXPRESSED IN ADULT LIVER, SIGNAL =  11; EXPRESSED IN FETAL LIVER, SIGNAL = 8.6; EXPRESSED IN PLACENTA, SIGNAL = 9.8; EXPRESSED IN HELA, SIGNAL = 6.1
ctcccctctattcctccccccaatatattcgttagtctaaaggaaatttcttcttcctattccccacactctccagtcccctctcctcccttattccaggctccagcattcctgccttctccttggtgcacttgccatctgcattaacccctcccctgctgtgctcagctacagaaatgccaaagtcactaacactcagctccataaactttaccttgccctctttatccccctaataaaatgcctgcattttgtcgtggcctgtgtatggctcacctcccctgctggctgcactggtctggggtcagtgggtatggcatggattcagacgctgatagatctgagtgagctccattagattctcctccagctcctgagcctgccgcctcagctcctcagcagatgcagactttgccccctcatgcaagtgctttgactcgtatacaaggttgaccacatccagtgcaaggaaga

SEQ ID NO: 1523 - DNA, 467 bp, Homo sapiens
  MAP TO AC006946.18; EXPRESSED IN BONE MARROW, SIGNAL =   3; EXPRESSED IN BRAIN, SIGNAL = 2.7; EXPRESSED IN BT474, SIGNAL = 3.5; EXPRESSED IN HEART, SIGNAL = 2.9; EXPRESSED IN LUNG, SIGNAL =   4; EXPRESSED IN ADULT LIVER, SIGNAL = 3.7; EXPRESSED IN FETAL LIVER, SIGNAL = 2.5; EXPRESSED IN PLACENTA, SIGNAL = 3.2; EXPRESSED IN HELA, SIGNAL = 3.5; EXPRESSED IN HBL100, SIGNAL = 3.9
cgaatgattaaaaataagtgttgggattatattttctttggatttctctattttctatttaaagattgccctatcagaatcccatcttcatttttttgttctttctgacataggttttcaagggacatgagtgacccgaggatggtgttgagcctctctttgtaagggttgtttctttgttactcacgtactggtaattatcttaccatctctgcagagcccacccacctttgggttcctgttggacatcgatggagtgcttgtgcggggccacagagtgatccctgctgctctgaaagccttccgaaggctggtgaactcccaggggcagctgcgggtgcccgtggtttttgttacaaatgctgggaacatcttacaacacagcaaagcccaggagctgtcagccctgctggggtgcgaggtgagaaggcagccagaggcatggaagcccaaggacctggttccta

SEQ ID NO: 1524 - DNA, 446 bp, Homo sapiens
  MAP TO AC008013.8; EXPRESSED IN PLACENTA, SIGNAL = 3.3; EXPRESSED IN BONE MARROW, SIGNAL =   4; EXPRESSED IN BRAIN, SIGNAL = 3.2; EXPRESSED IN HELA, SIGNAL = 2.4; EXPRESSED IN HBL100, SIGNAL = 2.1; EXPRESSED IN HEART, SIGNAL =  18; EXPRESSED IN LUNG, SIGNAL = 1.2; EXPRESSED IN ADULT LIVER, SIGNAL = 1.4; EXPRESSED IN FETAL LIVER, SIGNAL =   3; EXPRESSED IN BT474, SIGNAL = 2.8
ctgtctctacccccagcatcacatgggtctttgttacagcaccagccagtccgtctgggaagacagacttcttgtatctacaggggcgacgtggaggtcaggcaagccggcacctgctgtcctgggaccatgttcctgacctacctctcccatgtcatcagggacactgcactgaggggtcccaggccactgagccaagccaccctggtcaccttctggctcccacctctgtgctgcacctgagtgtgatgccctaggaccccattaagtcaggctgagtcttgcacccacaccctgcgactccattttctgctacacaggatctctctgatgttgacgagcagcatggagacctggggagaccccccaagcgcctcctccatgtcatccttgggctccagcttggcgctcacacacacaggaaaggacttcagcttctcctggga

SEQ ID NO: 1525 - DNA, 460 bp, Homo sapiens
  MAP TO AL035684.25; EXPRESSED IN FETAL LIVER, SIGNAL = 2.3; EXPRESSED IN BT474, SIGNAL = 1.2; EXPRESSED IN HEART, SIGNAL = 1.5; EXPRESSED IN BONE MARROW, SIGNAL = 0.96; EXPRESSED IN BRAIN, SIGNAL = 1.4
aaagatggccaaatattcattctcatttgtccttttatatgaaacagatttttaaaaaggcaattggagtagctaatgacatccagaaccccgttgattcgagtggggctgggggtgggggcttaaattggcccaaacagctaatcaggccgaaagaaagaggtgagttgattaccctggaaattgcacaggaattcttcaaagatgtggccaataattagagtttaagatgctactctttatgcacataacttagcataattttattaggcagctcatcaccaacagaattagtgaaaatcaggccagaaaaaatctgagagccaggcttatgcagacgtggaggcttttgctctaaaatggtctgctcacgcttggggaagaccccaagagaaagcactacctttcttctgggccctgagcgggttgggagtggaaatgaatcagagccatttcaggg

SEQ ID NO: 1526 - DNA, 444 bp, Homo sapiens
  MAP TO AL117352.3; EXPRESSED IN BONE MARROW, SIGNAL =  13; EXPRESSED IN LUNG, SIGNAL =  12; EXPRESSED IN BT474, SIGNAL =  11; EXPRESSED IN PLACENTA, SIGNAL =  18; EXPRESSED IN BRAIN, SIGNAL =  11; EXPRESSED IN ADULT LIVER, SIGNAL =  16; EXPRESSED IN FETAL LIVER, SIGNAL = 9.2; EXPRESSED IN HEART, SIGNAL = 6.8; EXPRESSED IN HELA, SIGNAL =  18; EXPRESSED IN HBL100, SIGNAL =  15
gagtatccacacaaaggttctccaaggccccaccagagtagctggatacagagtgtccattggtgcactcacaaaccctgagctagacacagggtgctgattggtgtgtttacaaaccttgagctagatacagagtgccgattggtgtatttacaatccctgagctagacataaaggttctccacatccccaccagactcaggagcccagctggcttcacccagtggatcccgcacagggatgctgtgcacccgcactccttggcccttgggtggtcgatgggactgggcaccatggagcagagggtggcgctcgttggggaggctcgggcagcacaggagcccatggaggtggtgcgaggctcaggcatggcgggctgcaggtgccgagccctgccccgcgggaaggcagctaaggcccggtgagaaatcgagcacagtgccg

SEQ ID NO: 1527 - DNA, 459 bp, Homo sapiens
  MAP TO AL109823.6; EXPRESSED IN BONE MARROW, SIGNAL = 2.5; EXPRESSED IN BT474, SIGNAL = 3.4; EXPRESSED IN LUNG, SIGNAL =   8; EXPRESSED IN BRAIN, SIGNAL = 1.8; EXPRESSED IN ADULT LIVER, SIGNAL = 3.6; EXPRESSED IN FETAL LIVER, SIGNAL =   9; EXPRESSED IN PLACENTA, SIGNAL =  65; EXPRESSED IN HEART, SIGNAL =   5; EXPRESSED IN HELA, SIGNAL = 3.7; EXPRESSED IN HBL100, SIGNAL =   3
actcatctggaaaacggagccatgttagaatccaccccctcactcttgcaataagaattaagtgggttgatatttataaagtgcttaggacagggcctgccccagagtcagcgccatgtaagtgtctgtggggtgaaatcacacatgctaagtggttaggtcactacctagcatgttgtcagttggcggtcaacaaatgctccaggaacacagggctttaccagagaaaggctccaggttgaggttgagcaggtacttggtgccacactcgggccccaagatcccattgtagctgacggtgcgggcacagagcaggaggcggcagacgtactcctcagcggtgttgttggtgatgtgggcaaagacgtcaaagtcactgcccatgttcatgctctggcccacacggatccgcatggccatccctgtctcctccttctcggccagtttgttcaggtggtt

SEQ ID NO: 1528 - DNA, 409 bp, Homo sapiens
  MAP TO AL117340.3; EXPRESSED IN PLACENTA, SIGNAL = 1.3; EXPRESSED IN HBL100, SIGNAL = 1.6; EXPRESSED IN HELA, SIGNAL = 1.4; EXPRESSED IN HEART, SIGNAL = 1.3; EXPRESSED IN BT474, SIGNAL = 1.3; EXPRESSED IN LUNG, SIGNAL = 1.1; EXPRESSED IN BONE MARROW, SIGNAL = 1.2; EXPRESSED IN BRAIN, SIGNAL = 1.1; EXPRESSED IN ADULT LIVER, SIGNAL = 1.7; EXPRESSED IN FETAL LIVER, SIGNAL = 2.5
gatttttcccctattctttagctgtatttaagagataagaagcaaccgtcacacatgcatcatgtttaaagcagtaatttattctgagatttacttttgtctgttttctttccagtccaggtatcaatattttcaagaatattaaagtataataatcaaacattcaattcataacatatatgcttatcagaagcttttacaaaatggaaattttatgttagaagatttgggctaccagtaatattcactgtgcatattttaaaaaaaaaggtgaacagagttcattgtttagggaaaatgattatggagaaactaaaatcaagagcaattttaatgtggatattaatgacagtgatcactttcatatccatgactttatctgttcctaaggactaaagggatgaaggca

SEQ ID NO: 1529 - DNA, 394 bp, Homo sapiens
  MAP TO AC009696.2; EXPRESSED IN BT474, SIGNAL = 1.1; EXPRESSED IN FETAL LIVER, SIGNAL =   1; EXPRESSED IN ADULT LIVER, SIGNAL = 1.1; EXPRESSED IN HBL100, SIGNAL = 1.2; EXPRESSED IN HEART, SIGNAL = 1.6; EXPRESSED IN BONE MARROW, SIGNAL = 1.3; EXPRESSED IN LUNG, SIGNAL =   1; EXPRESSED IN BRAIN, SIGNAL = 1.4
gccttgaagaaacaccatcagtaccatatatagtcactcactttcaaattatcctgtgtgaacaatcctttctccccaggggtgaggggagggagatgctgctaaagcatttgcagggagatgtttaggccgtccttcatattgatcctcctgacaagtcactacctgaaatatagaacttccagggctatttaagggctcttaaaatatgtaaaccaatcatctactggtaagcagggaattccagacaaaagccctcgacatacccctataaatcagtaacctggctgtgaaatctgatgatgagaaggaagacatacaggaaatgacagcttgccttgaggtgaggagctgggggatcaccaacaatgctgcccttgttggcatgtaagga

SEQ ID NO: 1530 - DNA, 462 bp, Homo sapiens
  MAP TO AC010680.2; EXPRESSED IN BONE MARROW, SIGNAL = 1.2; EXPRESSED IN LUNG, SIGNAL = 1.1; EXPRESSED IN BRAIN, SIGNAL = 3.7; EXPRESSED IN BT474, SIGNAL = 2.4; EXPRESSED IN ADULT LIVER, SIGNAL =   2; EXPRESSED IN PLACENTA, SIGNAL = 0.97; EXPRESSED IN HEART, SIGNAL = 5.8; EXPRESSED IN HELA, SIGNAL = 0.95; EXPRESSED IN HBL100, SIGNAL = 1.1
ggttccccaattccaatttcattttctgcaagaactctgaagaagaatggagtcttctccgacaaatctattagcttgaaggatgtgctagaacatttgtgtgacacgacagaccatgttctcttggtggcatctctcttttcaatgacataattaattattggagatcctccatcaatgagaggaggatcccagagcaaagtgactgtgcctcgagaaacatgtttaacctgtagtttctggcaggcagctggtgtgtcaagcactttaacactcacagttgaagacttaggttcaccaactccattttctattgtgagaatatattttcctgtatcattgcgagtaacttgaggaatggtgagtaatgaggatgaatcagtgttttcaatgctgtatctggcatcactgccaagattcttctcatcttttctccatgtgacagtaggtggaggtctgcct

SEQ ID NO: 1531 - DNA, 445 bp, Homo sapiens
  MAP TO AL049757.14; EXPRESSED IN BONE MARROW, SIGNAL =  20; EXPRESSED IN LUNG, SIGNAL =  14; EXPRESSED IN BRAIN, SIGNAL =  12; EXPRESSED IN ADULT LIVER, SIGNAL =  12; EXPRESSED IN PLACENTA, SIGNAL =  32; EXPRESSED IN FETAL LIVER, SIGNAL =  26; EXPRESSED IN BT474, SIGNAL =  46; EXPRESSED IN HEART, SIGNAL =  10; EXPRESSED IN HELA, SIGNAL =  72; EXPRESSED IN HBL100, SIGNAL =  39
tagcgcatgtaatctgcaacattctggcccatgaagtgcttctggtgtactcctgcattaaattccttgctttcagaatcataaccagggaatcatttggtgctgtgagggacagacaagcctccatccacaactcccttcagggcgccaaaaactttattgccagtggtagttctggcaagacctgcatccatacagcaggtgaaggcacctggctgaccatcagtactttccacattgtatttatcgccagtcacctccacttggccgtcatagatcttgtccatgccaaacctatcaagaagcctgcgggccagcagcaggccagtacaatatgcagcagcataatttgtcgggccaaccttcacaccgtattttggcagttcgtgtgcatatgccgcgcagactatcatatccccctctatacgggcataagcaatctgac

SEQ ID NO: 1532 - DNA, 460 bp, Homo sapiens
  MAP TO AC007376.7; EXPRESSED IN HBL100, SIGNAL =  62; EXPRESSED IN HELA, SIGNAL =  75; EXPRESSED IN HEART, SIGNAL =  11; EXPRESSED IN LUNG, SIGNAL =  13; EXPRESSED IN BRAIN, SIGNAL =  12; EXPRESSED IN ADULT LIVER, SIGNAL =  11; EXPRESSED IN PLACENTA, SIGNAL =  28; EXPRESSED IN BONE MARROW, SIGNAL =  26; EXPRESSED IN BT474, SIGNAL =  43; EXPRESSED IN FETAL LIVER, SIGNAL =  29
ttgaaaggcattttagtgtggtttatgtgtaatatcaaagattatttaacacttctcacattttatagatgctctacaaggtcacatgcttttaaaatagtagcaagttaaacttcactcttttttttttttttttttttagaaactgatgtttattttccattaaccatttttccatgttgcttaagagcctatgcaagaacagcttaagaccattcagtggttgctcctacccattcagtggcctgagcagtgggagctgcagaccagtcttctatggcaggctgagcgctccagtcttcagtagggaactgctgaataggcacagagggcacctgcacaccttcagaccagtctgcaacctcaggccgagtagcagtgaactcaggagctggagcagtccattcaccctgaaattcctcctcggtcactgccttttcagcagcagcctactcttctt

SEQ ID NO: 1533 - DNA, 458 bp, Homo sapiens
  MAP TO AL109954.10; EXPRESSED IN BONE MARROW, SIGNAL = 1.5; EXPRESSED IN LUNG, SIGNAL = 1.5; EXPRESSED IN BRAIN, SIGNAL = 1.8; EXPRESSED IN PLACENTA, SIGNAL = 1.7; EXPRESSED IN ADULT LIVER, SIGNAL = 1.6; EXPRESSED IN FETAL LIVER, SIGNAL = 1.3; EXPRESSED IN BT474, SIGNAL = 1.1; EXPRESSED IN HEART, SIGNAL = 1.5; EXPRESSED IN HELA, SIGNAL = 1.3; EXPRESSED IN HBL100, SIGNAL = 1.2
tgtgtgtgtgtggcatgaacttatgcaaaaaccattgcacagtctcttgctgctctcccctcgagttcggctgctgatgaagggggaggaggaggagaggagagctgtgggtgtccaccaccagctgctcttaaatcctgccagggcaggtagggtcagtgtgattcgacttgtccctgaggagtacagagaacactcttcctgttcctctgcagctgaaggatgatggctgagccctggcaggccctacagctcctgttggccattctattgactctgatggccctcccctaccaagcaaggaagaaaacctttctaagcgtccatgaagtgatggcagtagaaaactatgcgaaggacagcttgcagtggatcaccgaccagtataacaaggaaagtgatgacaagtaccacttcaggatcttccgagtccttaaagtccagaggcaggtgagtgt

SEQ ID NO: 1534 - DNA, 414 bp, Homo sapiens
  MAP TO AL035457.11; EXPRESSED IN HBL100, SIGNAL = 3.8; EXPRESSED IN HELA, SIGNAL = 4.3; EXPRESSED IN HEART, SIGNAL = 2.5; EXPRESSED IN LUNG, SIGNAL = 2.3; EXPRESSED IN BRAIN, SIGNAL =   2; EXPRESSED IN ADULT LIVER, SIGNAL =   2; EXPRESSED IN PLACENTA, SIGNAL = 2.7; EXPRESSED IN BONE MARROW, SIGNAL = 2.1; EXPRESSED IN BT474, SIGNAL = 4.7; EXPRESSED IN FETAL LIVER, SIGNAL =   3
cacgtacatcacacgggaagagtgcgtgggagggacgccacccctgaggccgtcctcggaaatgacatctaccagcaaagccgcctttcattccctgactaggacagaccccgttacaggtggagagagagacaggaagggagaaagaaagacagaggggcctagcaagagaattaaaaacaaagccgccgtctgcgaatctgcttccttcctaacacttgacgcgttgtaattacatgttcgtttaggtgtggggttatttgctatctgtccccagctaggctgcaagctctgcacacacacctgggcaggcctgagtttcttcgtttcttttcccctccgttcccttcccttccttttgccaatctgcatagtgtctggcacatgtgtgacccgcagaagatgctcaatgac

SEQ ID NO: 1535 - DNA, 391 bp, Homo sapiens
  MAP TO AC009475.2; EXPRESSED IN PLACENTA, SIGNAL = 1.4; EXPRESSED IN HBL100, SIGNAL =   2; EXPRESSED IN HEART, SIGNAL =   1; EXPRESSED IN BONE MARROW, SIGNAL = 1.2; EXPRESSED IN LUNG, SIGNAL = 1.3; EXPRESSED IN BRAIN, SIGNAL = 1.4; EXPRESSED IN BT474, SIGNAL = 4.2; EXPRESSED IN FETAL LIVER, SIGNAL = 1.2; EXPRESSED IN ADULT LIVER, SIGNAL = 1.5; EXPRESSED IN HELA, SIGNAL = 1.2
tgcaaatactgttcccttgtgtcaattacatacagcatgcctacaaagagagaatggtaattcttcttcattcacagacaggacacatggcagtgcactattcaaaatgctttgataatcttaatttttgtttctggtgctgagatattatgaaaggaactgcatttgcaacttattaaatacttccaggaacaaatagttcactttgcttgggacttgtagttttgagtaattaatcatccatggagcaggagccagtcaggagatacccgttggtaccactggtcccattggtggttgtcgcagtgtggggattctttcccggaggttctgagtcctcctcatctgagctagactcaatatcacttcgatcatccttggacacctgtgg

SEQ ID NO: 1536 - DNA, 468 bp, Homo sapiens
  MAP TO AC007748.2; EXPRESSED IN HEART, SIGNAL = 1.3; EXPRESSED IN BRAIN, SIGNAL = 3.2; EXPRESSED IN BT474, SIGNAL = 1.5; EXPRESSED IN FETAL LIVER, SIGNAL = 1.1; EXPRESSED IN HELA, SIGNAL = 2.5; EXPRESSED IN PLACENTA, SIGNAL = 1.1; EXPRESSED IN HBL100, SIGNAL = 1.6
tttggctgcatgagtagcagtgaactctggatgacatctgaaaattctcatcctggggaaaggctggcttcagactcaggagggagtgggggcagcagaatgcagggggcaaacatgctaaactgggtattgagcaccaaaatggggcaagtgtagctccggttgtccctctgggactcactgcctcatctgccagtgactcgggggctttctggtcacagtcggcatcttcttcatgaaggaaaatgcttaagtaacagctataaatgttaaataacagtggctgagctgcagaaatacttacggatctcacagtttgctcccacccaaccatgcgggcagtggcagttataaccattgggctggtccaggcagctcccaccatggtggcaggggttactgtcacattcatttatgtcaatgtcgcactcttcacctagggagataagaaaaagcagtggtgaaacc

SEQ ID NO: 1537 - DNA, 483 bp, Homo sapiens
  MAP TO AC004938.2; EXPRESSED IN HELA, SIGNAL = 1.5; EXPRESSED IN PLACENTA, SIGNAL = 1.2; EXPRESSED IN HBL100, SIGNAL = 3.3; EXPRESSED IN HEART, SIGNAL = 1.5; EXPRESSED IN BONE MARROW, SIGNAL = 1.5; EXPRESSED IN LUNG, SIGNAL = 0.99; EXPRESSED IN BRAIN, SIGNAL = 2.6; EXPRESSED IN BT474, SIGNAL =   2; EXPRESSED IN FETAL LIVER, SIGNAL = 2.1; EXPRESSED IN ADULT LIVER, SIGNAL = 1.5
atctcttgcaatgcatgctcaaggaagatggagtaggctcacccatgcctttgggtttcctggacctccccttgggaggatggctctgcagaggggctttaatgtgagatgtgagctcctcaccactgggggcagtatcgggcacctgcaggcactgagggtgcctgccggctactttgtctggcctagctgaggctggtgggcatactgggtaggtgctaagtggctagggggctgagcctgtttgcattgcaggtggactccaaggccacgctgggcctcggcggggtggccgtggtcctgggagcagtcatggctgccatgggcttcttctcctacttgggtatccgctcctccctggtcatcctgcaagtggttcctttcctggtgctgtccgtgggggctgataacatcttcatctttgttctcgagtaccaggtaagaagggaggagctctccacacccccaactgcccactcttct

SEQ ID NO: 1538 - DNA, 454 bp, Homo sapiens
  MAP TO AC008122.15; EXPRESSED IN HELA, SIGNAL = 1.3; EXPRESSED IN PLACENTA, SIGNAL = 3.5; EXPRESSED IN HBL100, SIGNAL = 1.5; EXPRESSED IN HEART, SIGNAL = 1.6; EXPRESSED IN LUNG, SIGNAL = 1.1; EXPRESSED IN BONE MARROW, SIGNAL = 1.5; EXPRESSED IN BRAIN, SIGNAL =   1; EXPRESSED IN BT474, SIGNAL = 1.6; EXPRESSED IN ADULT LIVER, SIGNAL = 1.1; EXPRESSED IN FETAL LIVER, SIGNAL = 1.2
cctcatacccactcccagtcagtacttctcaaaggtaactgctattcagacctctgtcaacacagattagttctttatgttcttgaacttgatataaatgaaatcatatggtatgtattattttggcacagagtttttgatgatgatttaggtttgattgtacctgaaaactaaaggaaatacagagctagctggaaggaacttttatagtagtaggggaccctagtacaccatctagatcccccacttcaggactgagcagtcagcccccagctgccaagagtgttggtgactcacccctgagtctccatctggagcttgcccttaccgcagctgaagacagctgccttacccaagtcatgcagggcaacctgcatccaatgaatccagtgactggttgaggtgttataaacgtcccagttcaggacaacattgccctatgcccactggtgat

SEQ ID NO: 1539 - DNA, 458 bp, Homo sapiens
  MAP TO AC006020.2; EXPRESSED IN BT474, SIGNAL = 1.5; EXPRESSED IN FETAL LIVER, SIGNAL = 1.2; EXPRESSED IN ADULT LIVER, SIGNAL = 3.2; EXPRESSED IN HBL100, SIGNAL = 1.4; EXPRESSED IN PLACENTA, SIGNAL = 1.1; EXPRESSED IN HEART, SIGNAL = 0.92; EXPRESSED IN LUNG, SIGNAL = 0.95; EXPRESSED IN BONE MARROW, SIGNAL = 1.5; EXPRESSED IN BRAIN, SIGNAL = 1.3
ctagtcccagaaccagggctgtacatgaaggagagaatgattgaaaaataacatctcctaaaagtaagttcttttattcctcagctggagtaagcatagggtgaaaataatacttttaatcaaagtaaagaaatcaaagtgacactagcaaacattttattttcactcagatgctccttaattttcatatgcaggttcattttattctcacataaaaatattggaaatactcaccttatcatgaatggcccgccgattcgaaggctgtatcaagaccttgtatcccagattggtgatgcctttgatgtgcttgggagctagcggggcccttctctcccaggcgttcacatcctccctccggacggccaacacagctttgtggtgaagacccttggagaggctgacccccagcctgcccagtccagtcctatgtacttgcagcatcttgacacctggtg

SEQ ID NO: 1540 - DNA, 458 bp, Homo sapiens
  MAP TO AC009185.2; EXPRESSED IN LUNG, SIGNAL = 0.94; EXPRESSED IN BT474, SIGNAL = 1.3; EXPRESSED IN ADULT LIVER, SIGNAL = 1.5; EXPRESSED IN PLACENTA, SIGNAL = 1.1; EXPRESSED IN BONE MARROW, SIGNAL = 1.5; EXPRESSED IN FETAL LIVER, SIGNAL =   1; EXPRESSED IN HEART, SIGNAL =   1; EXPRESSED IN HBL100, SIGNAL = 1.1
tggcagttatctccattttggaagaatataaactgaaatgcaggaggtgaaagagtttgggctgggatcagagcccagaagtaagtcctcatgaagccctttccactaggaccacccaaagtaggtgaaggaagggagaagttgagaaaggaaaggagattatctgtaatgtattatttattaatgcgttcccagtcatttcagtgagaactgtccctttaccctggacctgtgggtgttcaccctgcatgctcataccaagtctctgtggatgacacatgcctcttccaggtaggccatgccctcacacacatccagacacatgcccagcagggtctctgcagcaaaaagtccccgctgggtgcgtagataatctgacaggcagccgtgctccatgaactcaaacaccaggcagatgggggcctgctccaggcacaccccatacagctgcaccagtt

SEQ ID NO: 1541 - DNA, 470 bp, Homo sapiens
  MAP TO AC010680.2; EXPRESSED IN BONE MARROW, SIGNAL = 0.94; EXPRESSED IN BRAIN, SIGNAL = 2.9; EXPRESSED IN BT474, SIGNAL = 2.2; EXPRESSED IN HEART, SIGNAL = 5.8; EXPRESSED IN PLACENTA, SIGNAL = 1.4
tgctccaaaacaagcttcagagtagctaatttggaggagggaaaatcctacttcttccgagtgtttgctgaaaatgagtatggcattggtgatcccggtgaaactcgtgatgctgtcaaagcttcccgtaagcaaatgaaccatcatcccatcattttgagttatatccttcctttgttatatggggcttacacttatcatttctcctttgctttagaaactcctggaccagttgtggacctgaaagtgaggtctgtatctaagtcatcctgtagcattggctggaaaaagcctcacagtgatggtggaagtcggattattggatatgtagttgatttcctgactgaagaaaataagtggcaacgagttatgaaatccttaagcctacagtactctgcaaaagatttgactgaagggaaggaatataccttcagagtgagtgctgagaatgaaaatggagaaggaacccc

SEQ ID NO: 1542 - DNA, 475 bp, Homo sapiens
  MAP TO AL021394.7; EXPRESSED IN HELA, SIGNAL = 1.7; EXPRESSED IN HEART, SIGNAL = 1.3; EXPRESSED IN LUNG, SIGNAL = 1.2; EXPRESSED IN BRAIN, SIGNAL = 1.5; EXPRESSED IN BT474, SIGNAL = 1.2; EXPRESSED IN PLACENTA, SIGNAL = 3.8; EXPRESSED IN BONE MARROW, SIGNAL = 2.1; EXPRESSED IN ADULT LIVER, SIGNAL = 3.7; EXPRESSED IN FETAL LIVER, SIGNAL = 1.4
tctgcgttccatagctacctcatatggcttagggcagatcctgccgtgggatttataccagcacaccaacgctaagaggggcctaattctccctcaggggagcagccagagaggacaacacaagttcagtgagcgcaaaggaccttcagagggggaaagggaggaaacaggtcagccttccagggcagcaaggcaagacactccctagtttgagggtttgagccttccagggcaggcaaggcaagacaagacatccctaatttgagggtttgagccttccagggcaggcaaggcaagacatccctggtttgagaggttgagtcttccaggaaagccaagacaagacaccactggtttgaggggttgagccttccgcaaatttcagggggttgaacctcacacaaacctccggtagtaaggaaaatattcagaactcccctttcctttcttctcaggggaagaaagagtagctcca

SEQ ID NO: 1543 - DNA, 406 bp, Homo sapiens
  MAP TO AC010724.1; EXPRESSED IN PLACENTA, SIGNAL =  14; EXPRESSED IN HBL100, SIGNAL = 8.5; EXPRESSED IN HELA, SIGNAL =  13; EXPRESSED IN HEART, SIGNAL =  13; EXPRESSED IN BRAIN, SIGNAL =  12; EXPRESSED IN BT474, SIGNAL =   7; EXPRESSED IN LUNG, SIGNAL =  15; EXPRESSED IN BONE MARROW, SIGNAL =  10; EXPRESSED IN ADULT LIVER, SIGNAL =  10; EXPRESSED IN FETAL LIVER, SIGNAL =  12
agctggccatacaaatccaccgcagcacagggctgcatctggcccagggctctgccatgcccatcttgcctaccaacctgttggtggagaccagcgccgtggggcaggatgtgaccgtgctgttccgtgtcaccggaggcctgccgttcagggagctgcagaagcagggggctggtggggtggaggatgctgagtggtgggtcacacaggcgttcaccagcaggatgtggagcagggcacgtgaggtacctgagcactgaccacagcactacaccgaggacaccgtggagaacctggatctgcaggtgcaggtgagctggaaaatcctgagcaatctgtccttcctagtgaccatccagagagccactgtgtggatgctgcagctggagccactgcacactcagaa

SEQ ID NO: 1544 - DNA, 464 bp, Homo sapiens
  MAP TO AC011004.1; EXPRESSED IN HBL100, SIGNAL =   1; EXPRESSED IN HELA, SIGNAL = 0.91; EXPRESSED IN HEART, SIGNAL = 1.5; EXPRESSED IN LUNG, SIGNAL = 1.1; EXPRESSED IN BRAIN, SIGNAL = 1.5; EXPRESSED IN ADULT LIVER, SIGNAL = 2.7; EXPRESSED IN PLACENTA, SIGNAL = 1.4; EXPRESSED IN BONE MARROW, SIGNAL = 1.3; EXPRESSED IN BT474, SIGNAL = 1.4; EXPRESSED IN FETAL LIVER, SIGNAL = 1.5
tgtgcatggtaggtatggatgatttagtaaacacataaaatatgtcattctttcaaaggcaggagcctcttcctttcctccccctgcccttttccccttgtcactaaaatccatgtcccaggttgaaattgggtacttctttcctatagaaacattgttatgggacatggtcaggttcagtagcatctgatgcgggtatataatggattaagtttgcaggccagcctgagaacttaactaccattcatgacattgtttctttggggaaaaaacatacccatttccaaaacagctgaagcatagtcttctggatcctgcgcctctttgtgaagttggcctttgctggtggctctgccactggtttggaaatcagagatggtttttccatgcccatgatgaggacaaaggtgagtgtcccctgtctccacattgggaaaagaaacacacccatcccttagaaagga

SEQ ID NO: 1545 - DNA, 354 bp, Homo sapiens
  MAP TO AC011193.1; EXPRESSED IN ADULT LIVER, SIGNAL =   2; EXPRESSED IN BT474, SIGNAL = 2.9; EXPRESSED IN FETAL LIVER, SIGNAL = 2.9; EXPRESSED IN HBL100, SIGNAL = 2.4; EXPRESSED IN PLACENTA, SIGNAL = 2.7; EXPRESSED IN HELA, SIGNAL = 2.6; EXPRESSED IN HEART, SIGNAL = 3.1; EXPRESSED IN BONE MARROW, SIGNAL = 2.3; EXPRESSED IN LUNG, SIGNAL = 2.2; EXPRESSED IN BRAIN, SIGNAL = 1.6
  unsure 52
  unsure 149
  unsure 218
  unsure 285
acaagcaaaatggcacctgctgttgagctggctgggtgggcctcccagcaangctgccttccctgtctctgctgcccagtcactcagagctggtcttgacctttgggacagcgtgcagctcatatgggcctagcagatcatagcccagngtagcacagggatggatcttcttgtcttgtagttcctacagcattttgtgtgacaccatgtttttcttntctgtagcccgaggaggctgccattcaaacagccaccaattctccctggctggcgagacccaagtgntataatagcatcatgtttctaatggtcacagcaaagaaggattcagtcagagtcaaagctgatggccac

SEQ ID NO: 1546 - DNA, 470 bp, Homo sapiens
  MAP TO AC011304.1; EXPRESSED IN HEART, SIGNAL = 0.88; EXPRESSED IN BONE MARROW, SIGNAL =   1; EXPRESSED IN BRAIN, SIGNAL = 1.1
cattgtggaaagactgaataaataagtgaactaagctctaagaaaaaatatgatgatataaaaagatatagaagtaaaaacctgggctggtatagcataattaatgtatcagtaaagtatgtacagtgtagaagtggcagaaagacagcatagagagtaagacctgaccaaaagctttaagaaaagttctatacccttaaacgagattaaagtggactcaggaaaacatgggacacatgagggaaaggacacatgctccagatgggccaaagctcagagcatctctaccttctccaggaggaaaggggaggcaaagcagcaggcagaagacagcacagccaggtcagcacagggcgaagccaggtgggctccatcatacaggtagtgaggagccactgccaggtgggctttattcattagttggttttgtttcctttagtaacaaagagacatgatcaaagttgaccttt

SEQ ID NO: 1547 - DNA, 486 bp, Homo sapiens
  MAP TO AL031284.9; EXPRESSED IN BONE MARROW, SIGNAL = 4.2; EXPRESSED IN LUNG, SIGNAL = 1.4; EXPRESSED IN BRAIN, SIGNAL = 1.4; EXPRESSED IN ADULT LIVER, SIGNAL = 1.5; EXPRESSED IN BT474, SIGNAL = 1.5; EXPRESSED IN FETAL LIVER, SIGNAL = 3.4; EXPRESSED IN PLACENTA, SIGNAL = 1.5; EXPRESSED IN HBL100, SIGNAL = 1.5; EXPRESSED IN HELA, SIGNAL = 1.7; EXPRESSED IN HEART, SIGNAL = 2.5
ttcacttgtccgtttccctcctttcagttgaaaacaaagggattggataaacttattgaaactcacacataatgagtctctcctttctagtggatattaatgaagagaggtccctaaaaggaagtgcttaattcaaaggtatgaatttagcaaacactactcaaagaagtgaatcatgatggaagggcttcagacacccaggggaagttggtaaaggagggagattttttcagccagagccttttctgagccattctgctcagcccaagtatgagaccactcaccccaccttgtccttacccagcatggcagacaaactgggtatcgttgctctctgatcattatcctccgttcccttgggtagaggctttggcaggcaccaggccacagtcagcccaaaataggctgcgaacacgtagaagtgcctcaggttcatgtggtagtctgtctgcaataaaacccagtaagagcagtgagtgtcggcat

SEQ ID NO: 1548 - DNA, 467 bp, Homo sapiens
  MAP TO AC010678.1; EXPRESSED IN HEART, SIGNAL = 1.2; EXPRESSED IN BONE MARROW, SIGNAL = 1.1; EXPRESSED IN BRAIN, SIGNAL = 0.98; EXPRESSED IN ADULT LIVER, SIGNAL =   1; EXPRESSED IN FETAL LIVER, SIGNAL = 1.1; EXPRESSED IN PLACENTA, SIGNAL = 0.95
tgttgttatggaaaagagtgtggagaacattcacctgatcggaatttctggcaccattaaggttgcaggtatttagattgtcataccccacgtcctagtgattggtcctcttgtaaactgaactggtggtggattcaaaacagccaccttgcagaccttcttgctgatctcttttgttattttgtaacttttcctgtgcccttgaataagaccttgtgtagggaaacctacgaccgtcatgctttacttcgtttagactcctattctgttcccctgtggctacgctctcaccttaaggatgatctgagtggtccttttccccctcatccttgccccctaccccatgcatcttgttttccagtgtgacagcaagttcagcatctccaagacttggctctgctctcactccttgaacccttaagggaaaaagctgaatttgaactgtttgcttttgaatcgtggagaca

SEQ ID NO: 1549 - DNA, 488 bp, Homo sapiens
  MAP TO AL008723.8; EXPRESSED IN HBL100, SIGNAL = 0.9; EXPRESSED IN HEART, SIGNAL = 0.95; EXPRESSED IN BONE MARROW, SIGNAL = 1.4
gggctaggttaatgggaaggttcccaggacactgcactctagggtaaccagcttctccctggagggagagggtactgtctgcatcaccccatggtatcaccaagcaatcagtgttgagtcaactcccccagggagaccaggtatccctgtccatgaaaattcctcctagtggcataaatgccctctgataaactcatccccatgactacatgatggttggtgggaaaaccaaacccaagacgccgatgtcctccagggatcctgctgctggtcacaggatgtcacttgtccccttatctgtgggggtgagggtgaggggtgtgtggactcaatgagcagatgccaccagggggagtggccagagcttccttcctcacagctgcagtgggggctgggggtaggggcatcccagggaggggtttttgtatgagcctgtgtcacaatgtggcgctgggtctgctggcgggcctcctgatggttcttgcctg

SEQ ID NO: 1550 - DNA, 451 bp, Homo sapiens
  MAP TO AC010720.1; EXPRESSED IN BT474, SIGNAL = 4.4; EXPRESSED IN FETAL LIVER, SIGNAL = 4.5; EXPRESSED IN PLACENTA, SIGNAL = 6.4; EXPRESSED IN HBL100, SIGNAL = 4.3; EXPRESSED IN HEART, SIGNAL = 6.3; EXPRESSED IN LUNG, SIGNAL = 5.3; EXPRESSED IN BRAIN, SIGNAL = 4.4; EXPRESSED IN ADULT LIVER, SIGNAL = 4.8; EXPRESSED IN HELA, SIGNAL = 4.5; EXPRESSED IN BONE MARROW, SIGNAL = 5.6
attttcctccggtgattgtgatggtaaaaccagaaggtattcttctgacagataggtagttagcaagagttgggcagttggggaagtttcatttcctagtgtgagatgagcatgctgagctgaaaaggagattgaggcctgtaacttatggagcaggtctcgtccaaggataaaggaaaaggacactctggaaccaccagaaaagagtgtgtcactcttttctgtcccaagtttacttctcgggagcgtgtgacagggtactcttgaatagctccagttgcctttgtacagttattttttttatttgagacactgctcaagggagtctgcagtactgagtgttctgcctcagtgtctactaggaaacgtacaggctggtcctccactgtagcagttactatgggatcctgggggccaagagtgagggagccctggccccatcaattatcag

SEQ ID NO: 1551 - DNA, 476 bp, Homo sapiens
  MAP TO AC010799.1; EXPRESSED IN BONE MARROW, SIGNAL = 3.9; EXPRESSED IN LUNG, SIGNAL =   3; EXPRESSED IN BRAIN, SIGNAL = 3.8; EXPRESSED IN ADULT LIVER, SIGNAL = 3.1; EXPRESSED IN BT474, SIGNAL = 3.6; EXPRESSED IN FETAL LIVER, SIGNAL = 2.6; EXPRESSED IN PLACENTA, SIGNAL = 3.8; EXPRESSED IN HBL100, SIGNAL = 8.9; EXPRESSED IN HELA, SIGNAL = 4.8; EXPRESSED IN HEART, SIGNAL = 2.1
  unsure 21
  unsure 50
  unsure 200
  unsure 232
  unsure 322
gctcctttacttgctgctccnaactgcagtgtgctcttgttctcattgtntctggacagagagaagcaatcagcagccacccactgcagctggagaccccagaacttggtgtctgcctcccatggcactgggaaggctggaggcaggttagaaaaatcaccccctctctcccacagccacctggctcacaggtgcctttnagaagtaacctttcacgcgagggctacactgnccccattttagaggtggggaaacaaaggcccggagggctagggaggagggcaggctccccagttggggcaacgcaccagctcctcgaagnacgctctgtggcttggccagctgccgaagcttctcgtgctgctcctgaagcctctcctcctgcttccgaagcctctcttcctgttcccgaatcctctcttcttgtcgccggttcaggagacttatgtgctgattgtttttgacctgggactgga

SEQ ID NO: 1552 - DNA, 486 bp, Homo sapiens
  MAP TO AL022068.2; EXPRESSED IN PLACENTA, SIGNAL = 1.1; EXPRESSED IN HEART, SIGNAL = 0.91; EXPRESSED IN BONE MARROW, SIGNAL =   1; EXPRESSED IN ADULT LIVER, SIGNAL = 1.1
aaaccatacctccccctaccccaaaaggaaaaatcaaatcatagacatcaacctgtttattgtgaaacccaagatttaaagaaaaaaaaaagcaaaaacaacagaaaagttgaaataaattttgtttgatgttagacacaatacgtgggactctatcaacaattccattgcaagaggaaaaatcaaattggatgtattttttattaagattttttcattcttaaaaggcttatagtgacttcaaactatgaaggtttcaatatacttaatgaacagaaaacacatttaatcattcttcctgtctacttccaacagtaaggcattacctcctccagccactaggcccagagtaccttctctccacaatattttccctctaatgtggacacagaatagtccatcaaattcctcatttttcaccctaacacaacttaaaagaatcggcaaaccaatattttgtttcatggtccctcgtagccacagaaa

SEQ ID NO: 1553 - DNA, 482 bp, Homo sapiens
  MAP TO AC011191.1; EXPRESSED IN BONE MARROW, SIGNAL = 3.2; EXPRESSED IN FETAL LIVER, SIGNAL = 0.97; EXPRESSED IN HEART, SIGNAL = 0.84; EXPRESSED IN LUNG, SIGNAL = 1.2
cagatcacaatgaatctggaggtaggttatatcagggctactttgtcagctcactttatcatcaaggacccagtcgtctttgtattttgctatcatcttagcagtaggcctcgttgttacaaaatggctgcctctgcttcaggcatcacaactgcatccaaagacaggaagctaggcatgaggccagagtcctctctctgaaaagttctttttaccgggaaagtacaatcctttccaaagtctctcagcaaactttcctttctatttcaggggccaaagctgggtctcatgtgcactcctagactagggacaggggccatcttcccggatttcagggagtcgtcatcagatctaaacaatgtggattctgtcagcaggaagagagtgggcaatgtttgctggatgggcaaacgtggcatctatggggccatttggaaagtaaggaggctttccaagagcctagaatttgcatctctgaggcc

SEQ ID NO: 1554 - DNA, 459 bp, Homo sapiens
  MAP TO AC011288.1; EXPRESSED IN HELA, SIGNAL = 0.95; EXPRESSED IN PLACENTA, SIGNAL = 1.2; EXPRESSED IN HEART, SIGNAL = 0.93; EXPRESSED IN BONE MARROW, SIGNAL = 1.2; EXPRESSED IN BRAIN, SIGNAL = 1.3; EXPRESSED IN BT474, SIGNAL = 1.2; EXPRESSED IN ADULT LIVER, SIGNAL = 1.2
tgagcccatagatgatgcagccaaatccaatttatatgaaaaaagcaaccccatttagtccagtcaacactaaaagtagcgtgaaataatgaaatagttaagccagtaacttttggagtggtttgttataaaataatagataattaaaataggagtcagctgtgtatagaggttaatgaagccatgagatggttaagacaatcaatatgtgacatgaaagaaaaaaggctatcttagtctgttttctgttacctgaattccataaactgagtaatttataaagaaaataaatgtatttatttcttacagttctagaggctgataagtccaagcatatggtgccagcatctggtgaggccttcttgctgtgtaatctcatggcagaagagtggaaggacaagtgagcacatgcaaaagggattgtacaaggtgctgagctggctttattacaacttgctc

SEQ ID NO: 1555 - DNA, 466 bp, Homo sapiens
  MAP TO AL109829.6; EXPRESSED IN BONE MARROW, SIGNAL =   7; EXPRESSED IN BRAIN, SIGNAL = 5.8; EXPRESSED IN FETAL LIVER, SIGNAL = 4.8; EXPRESSED IN BT474, SIGNAL = 5.1; EXPRESSED IN ADULT LIVER, SIGNAL = 7.7; EXPRESSED IN HELA, SIGNAL =   6; EXPRESSED IN PLACENTA, SIGNAL = 8.1; EXPRESSED IN HBL100, SIGNAL =   4; EXPRESSED IN HEART, SIGNAL = 5.5; EXPRESSED IN LUNG, SIGNAL = 4.9
aacccaaaagtccacagtccaaagtctcatctgagacaaggcaagtgccttctgcctatgagtctgtaaaatcaaaggcaagctagttacttccaagatacaatgggggtacaagtattgggtaaatatagccattccaaatgggagaaattggccaaaacaaagggggttacagggttcatgcaagtccaaaatccagtggggaagtcaaattttaaagctccaaaatgatctcctttgactccaggtctcacctccaggtcacgctgatgccagaggtgtgggttcctgtggtcttgggcagctccacccctgtgactttgcagggtacaccctccatcctggctgccttcatgggctggcattgaatgtctgcggcctttccaggtacatggtgcaagctgtcggtggatctactattctggggtctggaggacagcatggtggcccttgtcttacagctcca

SEQ ID NO: 1556 - DNA, 487 bp, Homo sapiens
  MAP TO AL049593.4; EXPRESSED IN BRAIN, SIGNAL = 2.8; EXPRESSED IN ADULT LIVER, SIGNAL = 0.93; EXPRESSED IN BT474, SIGNAL = 0.99; EXPRESSED IN HEART, SIGNAL = 0.99
aatccccatcttgcattctgcttctagggaacccaaactaaaaatatatgtattcgaatgaagcaattgggtctctgagaagtttagtaacatagtctcaaagttagcaagtgatagagccagactggaacccaggtagagctgacatcaagctttgctcttaaactctagctgggcaagatcaaccatttcttcctaagaaggtagccgctcttctttccatctggatgttcagccctcccattcccttagctttcatattcatttgttgcagaagtggaagcacagaccatcgaagaactaaagcaacagaaatcgtttgtgaaacttcaaaagaaacactacaaagaaatgaaagacctggttaagagacaccacaagaaaaccactgaccttatcaaagaacacactaccaagtataatgaaattcagaatgactacttgagaaggagagccgctttggaaaagtccgccaaaaaggacagta

SEQ ID NO: 1557 - DNA, 452 bp, Homo sapiens
  MAP TO AL049648.6; EXPRESSED IN PLACENTA, SIGNAL = 3.1; EXPRESSED IN HELA, SIGNAL = 2.3; EXPRESSED IN BONE MARROW, SIGNAL = 3.4; EXPRESSED IN BRAIN, SIGNAL = 2.6; EXPRESSED IN BT474, SIGNAL = 2.4; EXPRESSED IN HBL100, SIGNAL =   4; EXPRESSED IN HEART, SIGNAL = 3.1; EXPRESSED IN LUNG, SIGNAL = 2.8; EXPRESSED IN ADULT LIVER, SIGNAL = 3.7; EXPRESSED IN FETAL LIVER, SIGNAL = 2.9
atgaaaagtgctgtccccacagatccgtgaagggcggtgggaggggtggtttgcatgagagaggagctctgctaaggtgactggaaagtgctgcctgagacctgttccctggaagcacagctctttttggttaaatacataaactaccataaaaaccacaattacagtgactaccatggtgataatttcaatgcactgaattatatgaaaaaataaaacaaacaaaacctgggacacaattgaacagcacaagaagtaggaatgtggcacagtctgtaatttatgtttattgccatgggtttcgacggaccaaatggctcatgcctgcctgcactgtagctgagtcatgtttgatatctcaaagtggcagtaaaaaaaatctttatggctcccatgctattttcataccttatttattctgtttttttcccctgtttttaagtcatcttttg

SEQ ID NO: 1558 - DNA, 476 bp, Homo sapiens
  MAP TO AL049812.3; EXPRESSED IN PLACENTA, SIGNAL = 1.8; EXPRESSED IN HBL100, SIGNAL = 1.4; EXPRESSED IN HELA, SIGNAL = 1.5; EXPRESSED IN HEART, SIGNAL = 2.8; EXPRESSED IN BONE MARROW, SIGNAL = 1.8; EXPRESSED IN BT474, SIGNAL = 1.5; EXPRESSED IN LUNG, SIGNAL = 1.5; EXPRESSED IN BRAIN, SIGNAL = 2.1; EXPRESSED IN ADULT LIVER, SIGNAL = 1.1; EXPRESSED IN FETAL LIVER, SIGNAL = 1.2
gttgctaggcaggcctgtagacttgccatggtgacacgggagccaccttacgcttctggtctattctttccaggctctttgtatgagaaaaggagccaagagcccaccttgtgtctaggtttggaccagagcctgcaggggaacaaaggtccttgggactagtagatcagaagcagggggggctggctggtggggtcagggccctgaggtccagccacctccacctcaggaagaatatttgccctagaatgccagctaggagctttctgcccgggctcggcttacatccatcagtgctgcgttgatgtaattgctggattctccgtccactgagataaggaagggcaggcagcggtccagaggcagcacgtccatacttcgattcttatcatggttcgggcgagcaatgctgcagtcctcgggccgcacacgggtgtcacaatgttgagggtctgtggggcacaaaggtgaataga

SEQ ID NO: 1559 - DNA, 464 bp, Homo sapiens
  MAP TO AL109757.1; EXPRESSED IN PLACENTA, SIGNAL = 5.6; EXPRESSED IN HBL100, SIGNAL = 1.7; EXPRESSED IN HELA, SIGNAL = 2.5; EXPRESSED IN HEART, SIGNAL = 1.4; EXPRESSED IN BT474, SIGNAL = 1.3; EXPRESSED IN LUNG, SIGNAL = 1.6; EXPRESSED IN BONE MARROW, SIGNAL = 2.9; EXPRESSED IN BRAIN, SIGNAL = 1.7; EXPRESSED IN ADULT LIVER, SIGNAL =   4; EXPRESSED IN FETAL LIVER, SIGNAL = 0.92
ccagctgggatgagtaggtctgaagtggctaatccactccaccatcccagtctccctaatcctttggatcccttcctgtacgttaaaccaaaggagatcacacatttccacctctctcacggtgggccatcttttaatccatatttcagctaaccaagtaaataaactattagaaccttttttacctctccaagctgcaacattaaaagcagaatgcctacttagtgggcccagatcaataaatcctgatccaaccctatgttccttccactattatcccatacccttaatatccattcccgtatctgttctccagatttctttctatataaattagagaactcaaacagttcttttcgagtgtagtacacctcctcgtgagtcacactctcaacctcacatctaggggcctgccgggactttaggtctagaagcaaacaggggtgttgggggtgactcctgag

SEQ ID NO: 1560 - DNA, 486 bp, Homo sapiens
  MAP TO AL109933.5; EXPRESSED IN HBL100, SIGNAL = 1.1; EXPRESSED IN HELA, SIGNAL = 8.7; EXPRESSED IN HEART, SIGNAL = 1.1; EXPRESSED IN LUNG, SIGNAL = 1.2; EXPRESSED IN BRAIN, SIGNAL = 1.2; EXPRESSED IN BT474, SIGNAL = 0.96; EXPRESSED IN PLACENTA, SIGNAL = 1.1; EXPRESSED IN BONE MARROW, SIGNAL = 1.3; EXPRESSED IN ADULT LIVER, SIGNAL =  15; EXPRESSED IN FETAL LIVER, SIGNAL = 9.4
agcatgggtctgatttccctttagcacagagagaataggatgaacaacacctaaagcctacatttcagtgaactcctgaggcagaagtttcagttgcaaagaaagaaaaacatgataaatggacgctctgatcaatcacccacagtaaccaataaccataactgttttaaaccagcaataaaataaagaccaataacatcccataggacttgtaggtcacttttcagaggctgcactcaggcactgacacatgttttcttttgatttcaagaacagggcaggtccaaatcctggaatctgggtgtgcatcatactcactgcagcgggggatgtcacaaagttcccagcgcttgttggggtcggtggtgaaacaccaaggccgcagctccctatcggggttacgacagtaattcttcttcaggttcttgtttggaaatctgaatggacaagaaagattttagtagcactgaacatttacattcatgg

SEQ ID NO: 1561 - DNA, 486 bp, Homo sapiens
  MAP TO AL049756.16; EXPRESSED IN HBL100, SIGNAL =  53; EXPRESSED IN HELA, SIGNAL =  49; EXPRESSED IN HEART, SIGNAL = 9.6; EXPRESSED IN LUNG, SIGNAL =  18; EXPRESSED IN BRAIN, SIGNAL = 7.8; EXPRESSED IN ADULT LIVER, SIGNAL =  17; EXPRESSED IN PLACENTA, SIGNAL =  34; EXPRESSED IN BONE MARROW, SIGNAL =  22; EXPRESSED IN BT474, SIGNAL =  41; EXPRESSED IN FETAL LIVER, SIGNAL =  31
cccaagtctgccttcaaataacactacactgcttcttgtgtagtgcaggttcttagaatattctcaattcctcccttccatttcttttgccattttactattccatatactataataatctaataaatggttgctgttactttgaacagttatttattgaatcaattaagaataaaaaataaaaattctattttaccttcatttatcccttctccaatgttctttctttctttatggagtctgaatttctggcctatattattttctgtctccatgtacttactggcacaaatagggcagcctccagggctccagaggagagctgctcatattcatctgacaccatgtggccacagagtagaaactcatccacttttgccttcttccaacccaggtcaaagaggcgaatcttggcattagggaaaccttggcagaagtaagaatgggtatggcttcttcttacaatactggtaacactgggtgggg

SEQ ID NO: 1562 - DNA, 494 bp, Homo sapiens
  MAP TO AL049822.17; EXPRESSED IN BONE MARROW, SIGNAL = 9.8; EXPRESSED IN LUNG, SIGNAL = 3.1; EXPRESSED IN BRAIN, SIGNAL = 1.7; EXPRESSED IN ADULT LIVER, SIGNAL = 2.7; EXPRESSED IN BT474, SIGNAL =  12; EXPRESSED IN FETAL LIVER, SIGNAL =  10; EXPRESSED IN HBL100, SIGNAL =  26; EXPRESSED IN PLACENTA, SIGNAL =  11; EXPRESSED IN HELA, SIGNAL =   9; EXPRESSED IN HEART, SIGNAL = 1.7
caataggactcgagtatgcaggatacctattttgattgggcaaaactggcatctgacgtcatccacggataatcaccaatcagcactgacctattctactcctaatttgcataataacatttaaataaagaggacgaaacagccctaaggttgtcttttattttgttttccaccatgcctgaaccagtcaaatctgctccagtccctaaaaaaggctccaagaaggccattaacaaggctcagaagaaggatggaaagaagcgcaaacgcagccgcaaggagagctactctgtgtatgtgtacaaggtgctgaagcaggtccaccccgacaccggcatctcttccaaggctatgggaatcatgaactccttcgtcaacgacatctttgagcgtatcgccggagaagcgtcacgcctggcgcattacaacaagcgctcgaccatcacttcgagggagatccagacggccgtgcgcctactgctacccggggaatt

SEQ ID NO: 1563 - DNA, 489 bp, Homo sapiens
  MAP TO AL050330.9; EXPRESSED IN HBL100, SIGNAL = 2.8; EXPRESSED IN HELA, SIGNAL = 2.1; EXPRESSED IN HEART, SIGNAL = 1.4; EXPRESSED IN BONE MARROW, SIGNAL = 1.8; EXPRESSED IN LUNG, SIGNAL = 1.9; EXPRESSED IN BRAIN, SIGNAL = 1.6; EXPRESSED IN PLACENTA, SIGNAL = 2.5; EXPRESSED IN ADULT LIVER, SIGNAL = 1.9; EXPRESSED IN FETAL LIVER, SIGNAL = 2.2; EXPRESSED IN BT474, SIGNAL = 1.3
gcacactttatagttactgctcccaggggtgctgtcgactagccacagctactggtccccagatttctcagcccaaagagaccctatggccatggaaaaaataagtttgtccctagaatatctgcttcctttcttgccttagagatgtgatggctggtgtctttgtctgactctacccctttgttgaacagcccagtttattgtcgtggggcccactgatcccatcttggccacggttggagaaaacactacgttacgctgccatctgtcacccgagaaaaatgctgaggacatggaggtgcggtggttccggtctcagttctcccccgcagtgtttgtgtataaaggtggcagagagagaacagaggagcagatggaggagtaccgaggaagaaccacctttgtgagcaaagacatcagcaggggcagcgtggccctggtcatacacaacatcacagcccaggaaaacggcacctaccgctgttactt

SEQ ID NO: 1564 - DNA, 978 bp, Homo sapiens
  MAP TO Z95114.19; EXPRESSED IN BONE MARROW, SIGNAL =  13; EXPRESSED IN LUNG, SIGNAL = 8.5; EXPRESSED IN BRAIN, SIGNAL =  11; EXPRESSED IN ADULT LIVER, SIGNAL =  14; EXPRESSED IN BT474, SIGNAL = 7.4; EXPRESSED IN FETAL LIVER, SIGNAL = 7.6; EXPRESSED IN PLACENTA, SIGNAL =  11; EXPRESSED IN HBL100, SIGNAL = 6.1; EXPRESSED IN HELA, SIGNAL = 9.8; EXPRESSED IN HEART, SIGNAL = 5.5
aggtgcccagatttcatattgttcaaacacacatgctctacaatttgtgcagttaacgcaattatcacatggtcctgaggtgacatacatcctcctcagctgacaggattaggagattaaagtaaagacaggcataagaaatcacaagggtattgattggggaagtgatcagtgtccatgaaatcttcacaatttgtgtttagagattgcggtaaagacaggcataggaaattataaaagtattaatttggggaactaataaatgtccatgaaatcttcacaatccacgttcttctgccatggcttcagccagtccctccgtttggggtccctgacttcccgcaacaattgggcctagcctgcttttagactctgatggatatgggtgagctcattgagattctcctccagctcctgagcccactgcctcagcgactcagcagactcggattttgcccccttgtgcaagtccagtgagtcttgcacaaggttgactacatccagcacaacaaggacacctgaagtggccttgcccaggttccgggctacttttctcactatccgggtgggggccccacgtgttctcagtgtctcaacaacatttataggtacatatcgccaagcaatcaaagggcgtccaacagtggctttagatctcctgagtgtatggacatcattcgcaatcatttttgtggcttcgtcaaaatcaagtgcaaaagaaagcacattgggtgtgatgtcacgcagaatgtcccttaatgcctccaattggtcagtgctggttgcagtcagcctgctggctgtgagttctgctgaccttgtgtatgtgttctccacgatgctggaggcgatcccagccgtggcagatgctattcccagccctaccccagctgcagtaatgctcaggctcagccctgctgtaaatggtgccaacataacgccaatgacagacaggatgccagtggagccagacaccac

SEQ ID NO: 1565 - DNA, 474 bp, Homo sapiens
  MAP TO Z82201.1; EXPRESSED IN ADULT LIVER, SIGNAL = 1.2; EXPRESSED IN BT474, SIGNAL = 1.1; EXPRESSED IN FETAL LIVER, SIGNAL = 1.5; EXPRESSED IN HELA, SIGNAL = 1.1; EXPRESSED IN PLACENTA, SIGNAL = 0.99; EXPRESSED IN HEART, SIGNAL = 1.2; EXPRESSED IN BONE MARROW, SIGNAL = 1.4; EXPRESSED IN LUNG, SIGNAL = 0.98; EXPRESSED IN BRAIN, SIGNAL = 1.3
ggcaactcaacaaagcaaagacagtcttttcaataaatggtgctggaacaactggacatccacctttaaataaatgaatctagacacacagaccttataccctccacaaaaattaactcaaatggatcacaaacctaattataaaatacaaaactatgaaactctcgtaagacggcataagagaaaatttagatgaccttgagtttggcagtgacttgttagatacaatccatgaaaggttctagtcccgaccctttccttaccctgaacctagagggctgctctgaaagtgggccacacagagctccagtctgtgggattggttggtgtgggccagcgcagacagtccactccatagagtacacaatacagacagttgactctatggagttcacagcacagacagtccactttatgcagcccacagcacagacagtccactctatagagtccacagtgcagcaagtcctgtct

SEQ ID NO: 1566 - DNA, 961 bp, Homo sapiens
  MAP TO AP000427.1; EXPRESSED IN BONE MARROW, SIGNAL = 2.5; EXPRESSED IN LUNG, SIGNAL = 1.8; EXPRESSED IN BRAIN, SIGNAL = 9.8; EXPRESSED IN ADULT LIVER, SIGNAL = 2.3; EXPRESSED IN BT474, SIGNAL = 6.4; EXPRESSED IN FETAL LIVER, SIGNAL = 2.8; EXPRESSED IN PLACENTA, SIGNAL = 2.1; EXPRESSED IN HELA, SIGNAL = 3.2; EXPRESSED IN HBL100, SIGNAL = 1.7; EXPRESSED IN HEART, SIGNAL = 1.5
agggtcatgagcatgctttctataccccactggtgggacatttactggaaccaggtctccatgcctttgaagatacctccggttttaaacagtgaacaggcttcaactaaatatagtgcaaatcaaataccaaggagcaaaacgacagaatagagactgtcacagatgattgacttcctgtttctctacctggcacaacccacatgggacacattggcacacggtaacaacaacttctatttaggttttgatacggaaggcggtgcggcggagcgaatgcagggcaaccacgcaacagcccctgagcaaggccccgatgttatacacaggatccgttccccctctctgagtactgaatgcccacagaaccgtggggaccacgggggcagccacagccaggagatccaccaggaagctgctgctccagtactgcctcacgacgcccccgcgagccagtgggatgacaccatccaacctctcttccacgcaggctgcaaaatccagctctctcatgaggcggtttgcatgaacttctgcatccacattggcgtagggggtctccacgggagacaaaaggatggctgagtttggatttcttggagttaaatcaaccactaaggcagagagggactctgggaagctctccatcgagtctggttcagactcatcaggggacgccaagctcgagggacaggggtcctggagcttctgcagcacactctgaatgagctctgagatggctgggctgtagggcaccacgtcggtctgaacggctcgctccaccaccacactgccctcctcctgacccatgactatgggcagcagctccaggacgttagccccaggggtggaatgcacaagctccaggtcaccagattctgtggtggtggctgtcactatctcatcgaacaaatctgtgctgttggctatgctatctcctaccagtagctccctgtcagcc

SEQ ID NO: 1567 - DNA, 445 bp, Homo sapiens
  MAP TO Z92540.1; EXPRESSED IN HEART, SIGNAL = 0.98; EXPRESSED IN BONE MARROW, SIGNAL = 1.3; EXPRESSED IN LUNG, SIGNAL = 0.99; EXPRESSED IN BRAIN, SIGNAL = 1.5; EXPRESSED IN ADULT LIVER, SIGNAL = 0.99; EXPRESSED IN FETAL LIVER, SIGNAL = 1.8; EXPRESSED IN PLACENTA, SIGNAL =   1; EXPRESSED IN HBL100, SIGNAL = 1.1; EXPRESSED IN HELA, SIGNAL = 3.8
gctaaggtcatccaggttgggcatgtggcctgttgagcttcactggttcctggaattctgaagtagtctcctgtaattaatttttaacttatctaggtctgtttgttacaataaaattttcttcttgcggaggaaaaaaatgaagggataggagattatttcatcctgaaaggttgagggagtttaatatcattaagaatgcaaagtgttttatataacttagaaccagagaagaaacaagttcactagctcatgagggatttgggctctaaagaatgaaacacttccagaagctgagggttgtgacacatcaagaactgctgccaagagaagagcattgccatctcctcatgcaggggaatttggaagacaaatggactatcaactgtcttgcaattctcttgggttttctcatccaggactatggttttcaccatcccctaca

SEQ ID NO: 1568 - DNA, 446 bp, Homo sapiens
  MAP TO Z97055.1; EXPRESSED IN BT474, SIGNAL = 1.3; EXPRESSED IN FETAL LIVER, SIGNAL = 1.1; EXPRESSED IN ADULT LIVER, SIGNAL = 1.3; EXPRESSED IN HELA, SIGNAL = 0.95; EXPRESSED IN HBL100, SIGNAL = 1.3; EXPRESSED IN HEART, SIGNAL = 1.3; EXPRESSED IN BONE MARROW, SIGNAL = 1.6; EXPRESSED IN LUNG, SIGNAL = 0.95; EXPRESSED IN BRAIN, SIGNAL = 1.5
gtagcttgcctgtgcctgaggttcagccaaaggcccatgcctgtcacacttagctccagtctccactccaggccctatcactaacagtagtgatacctgggcctccatttttactgttttcattctctccctgtttgaaacccaggtaggaaggatggatgttttaactggggaacttctcagacaccccgacagtgtggtagaagagaagggctctgggttcagatggacctgctctgacacacaccagctctaggatctcggccacgttcacgaccctcggcctcagtgtcttcatctgtaaagtgaccgcgggcctgacctacatggtcactgtcagaactggagaccgtgtcggggaagcacccagcacctgccaggccgtccacgacaacagacggctccggttctaacatgccgccaggctgcaacactcacgcttatca

SEQ ID NO: 1569 - DNA, 386 bp, Homo sapiens
  MAP TO Z99716.4; EXPRESSED IN BONE MARROW, SIGNAL = 1.1; EXPRESSED IN BRAIN, SIGNAL = 1.3; EXPRESSED IN ADULT LIVER, SIGNAL = 0.99; EXPRESSED IN BT474, SIGNAL = 1.4; EXPRESSED IN FETAL LIVER, SIGNAL = 1.2; EXPRESSED IN HELA, SIGNAL = 1.2; EXPRESSED IN HBL100, SIGNAL = 1.4; EXPRESSED IN HEART, SIGNAL = 0.93
ggtggtcccttaaagaacgggtacaacaccttattgtggccactttataggtaaggaaactgaggcacacgttggaatgactatcttgggtggcttcttagcagcagacgtgatggtgaagcctgtgtctctgacttccagcattgaatgaaggtgctaaagggtggggcgctaaccctagctcagggctggcatttcagatctggagctggtggcatggtgccatagtggcagcattggagtcaacagatgcacatgtcatatcagtgtggggcgtggcagtcactggcttgggcccctctgcctgtcacgcaggtgacacatagtgacctgcctctcgactccctgtcactgctgcaggagccccctggtgaaggccatcttcc

SEQ ID NO: 1570 - DNA, 964 bp, Homo sapiens
  MAP TO AL109912.4; EXPRESSED IN BT474, SIGNAL = 1.6; EXPRESSED IN FETAL LIVER, SIGNAL =   1; EXPRESSED IN ADULT LIVER, SIGNAL = 1.3; EXPRESSED IN HELA, SIGNAL = 1.4; EXPRESSED IN PLACENTA, SIGNAL = 1.9; EXPRESSED IN HBL100, SIGNAL = 2.8; EXPRESSED IN HEART, SIGNAL = 0.98; EXPRESSED IN LUNG, SIGNAL =   1; EXPRESSED IN BONE MARROW, SIGNAL = 1.2; EXPRESSED IN BRAIN, SIGNAL = 1.6
atgtgggagacctgggtatgtataaaagccaacaggaaagtcaagttgagaagataagccttttgagagggctcctgcatttcacccacaagacaggatggaagcaaatataagtagatttcacagcagaaagacagttgccatgtgacgactttctaagacatgacgaaaaatatttgctgagctataccttcatttaaaaagctctgattttcattacagtctaatgttatcttcatttctatttctgaagaacaattatggagacttcctgttatttgtacacttacctgttgataatgggctaaggccaggtgcttcaggaagcctttccagaagttttctctgtatgattggtgtactatgaaagcaaagtgattcacatttcccagttcttgccctagtattaattggagatatcactagaggctcttgaggctcactgcaggggcttttttgtataccatcttttattggctttaagaagttctcaaaagccaatgaaggcagctcctctactggtgatgagggtctatcatctccatttaatgctttggaatctggggatattggttgttgccaagggggaattactggagaatcaggggagctataactaatgtaatagttatcatcatcatcttcatctttttcgggatcacttgcagaggcaactggtggcagcatctgactttcacttgcagtttgactacatcccgtggttggtgcttgtaaagcaatctgagaattatcaacatcctccttggtatgtgctgtagtggggagtatacatggacttacatccatttttggaggcactacaggtttgtcatctgggttaactgaagagctaaagttctcagcagattttacaactccagttggcttggttttaggcagtttcttggaacgttcgtattcttctttggcttgaagccacacttgaaccagttgtcgacttggg

SEQ ID NO: 1571 - DNA, 974 bp, Homo sapiens
  MAP TO AC009487.1; EXPRESSED IN BONE MARROW, SIGNAL = 1.6; EXPRESSED IN LUNG, SIGNAL = 1.2; EXPRESSED IN BRAIN, SIGNAL = 1.2; EXPRESSED IN ADULT LIVER, SIGNAL = 1.6; EXPRESSED IN BT474, SIGNAL = 5.3; EXPRESSED IN FETAL LIVER, SIGNAL = 1.2; EXPRESSED IN HELA, SIGNAL = 2.5; EXPRESSED IN PLACENTA, SIGNAL = 1.7; EXPRESSED IN HBL100, SIGNAL = 3.2; EXPRESSED IN HEART, SIGNAL = 0.89
aaatggacttgcttgcttggcttgtggtccacaacttgaggtagtaaactctataacaggagagcgattgtctgcttacagattcagtggagtcaatgaacagcctcctgtagttttagctgtgaaagaattctcttggcagaagagaactggattattaataggattggaagaaacagaagggagtgttctctgtctttatgaccttggaatatcaaaagtagttaaagcagttgttcttcctggaagggtaacagctattgaacctataattaatcatggaggagccagtgcaagcactcagcatttacatccaagtctgcgatggctttttggagtggcagctgtggtcactgatgttggacagatccttcttattgacctatgtttggatgacttgtcatgcaatcaaaatgaagttgaagcatcagatcttgaagttctaactggtatcccagctgaagtaccacacattagagaaagtgtgatgagagaagggcgccatctgtgtttccagttagtaagtccaacaggaacagccgtttcaactcttagttacataagcaggacaaatcagcttgctgcaggtttttctgatggctatctagcactttggaacatgaaaagcatgaaaagagaatattacatacaattggaaagtggacaagttcctgtatatgctgtcacttttcaagaacctgagaatgatcgtcggaattgctgctacttgtgggctgttcagtctacacaagatagtgaaggggatgttttgagtttgcatctactgcagctggcctttggtaatagaaagtgtttggcatcaggacaaatcttatatgagtggttagaatactgtgaagaaagatacactctggacctgacaggtggcatgttccctttgaggggacagacgagtaataccaaattgttgggatgccagagtatagagaaatttcgatctcatggtgacaggg

SEQ ID NO: 1572 - DNA, 968 bp, Homo sapiens
  MAP TO AC010130.2; EXPRESSED IN BONE MARROW, SIGNAL = 4.8; EXPRESSED IN LUNG, SIGNAL = 4.1; EXPRESSED IN BT474, SIGNAL = 6.1; EXPRESSED IN PLACENTA, SIGNAL = 6.8; EXPRESSED IN HBL100, SIGNAL = 6.4; EXPRESSED IN HEART, SIGNAL = 2.5; EXPRESSED IN BRAIN, SIGNAL = 9.8; EXPRESSED IN ADULT LIVER, SIGNAL = 3.2; EXPRESSED IN FETAL LIVER, SIGNAL = 3.2; EXPRESSED IN HELA, SIGNAL = 3.7
tgtcttgttgaatagaacatttttccaagttttaaaatgagacaattagcaatggaaagcttcctgtctgagaattttcctccagcagctttctaagttcttcttgtttattaactacattgcatcagcaagcattagaaaaccaaattgtgggatggaaatgcatcttcctaactctccatcgattagaccggggtgtgttgatctttcaggcataagtacacacgcttatgcctgagtctggactcgcgtacagaattagtggaaagagacttcatgcaaagacactaatcaccctgtcatcttgttctttctcccaggaaaaagaccacatcagtgtcagatttgtaagaaagcgtttaaacacaagcaccaccttatcgagcactcaaggcttcactcgggcgagaagccctatcagtgtgataaatgtggcaagcgcttctcacactcgggctcgtactcgcagcacatgaatcacaggtattcctactgcaagcgggaggcggaggagcgggaagcggcggagcgcgaggcgcgcgagaaagggcacttggaacccaccgagctgctgatgaaccgggcttacttgcagagcattacccctcaggggtactctgactcggaggagagggagagtatgccgagggatggcgagagcgagaaggagcacgagaaagaaggcgaggatggctacgggaagctgggcagacaggatggcgacgaggagttcgaggaggaagaggaagaaagtgaaaataaaagtatggatacggatcccgaaacgatacgagatgaagaagagactggagatcactccatggacgatagttcggaggatgggaaaatggaaaccaaatcagaccacgaggaagacaatatggaagatggcatgtaataaactactgcattttaagcttcctatttttttttccagtagtattgttacctgcttgaaaacactgctg

SEQ ID NO: 1573 - DNA, 383 bp, Homo sapiens
  MAP TO Z95114.19; EXPRESSED IN BT474, SIGNAL = 5.1; EXPRESSED IN FETAL LIVER, SIGNAL = 5.6; EXPRESSED IN ADULT LIVER, SIGNAL = 6.8; EXPRESSED IN HELA, SIGNAL = 6.8; EXPRESSED IN PLACENTA, SIGNAL = 6.2; EXPRESSED IN HBL100, SIGNAL = 4.4; EXPRESSED IN HEART, SIGNAL = 4.9; EXPRESSED IN LUNG, SIGNAL = 5.7; EXPRESSED IN BONE MARROW, SIGNAL = 8.7; EXPRESSED IN BRAIN, SIGNAL = 6.3
aggtactccctcttctcgggaggtttcccaccagatctccttttcctcgactcagtccagagaagccaggatttcccggcttccactccaccccaaggcactaaggaaggatttgaaaaaatggaatccatctcaaccttgttcgatttccccccaaaacctatccactcgtcgtgcctcctggcccctcaggaatcaggaccctctcgggcacaccaggttcagtcctgcaaccttcgttcctagcccgagctcgccccaccttccaaccaggccccgaatggccccccatcccacctccaacccaggactcccggaggccctccctctctccaagccggggagcccggtgtcgaccctcacgcccacccccgcaataactg

SEQ ID NO: 1574 - DNA, 928 bp, Homo sapiens
  MAP TO AC009945.1; EXPRESSED IN LUNG, SIGNAL =  43; EXPRESSED IN BONE MARROW, SIGNAL =  26; EXPRESSED IN BRAIN, SIGNAL =  43; EXPRESSED IN FETAL LIVER, SIGNAL =  37; EXPRESSED IN BT474, SIGNAL = 1.1e+02; EXPRESSED IN ADULT LIVER, SIGNAL =  19; EXPRESSED IN HELA, SIGNAL =  44; EXPRESSED IN PLACENTA, SIGNAL =  57; EXPRESSED IN HBL100, SIGNAL =  85; EXPRESSED IN HEART, SIGNAL =  14
cctagctcattgaactcgcctgcagctctcgggttcctgtggctttcttctttatcggagccagggctacatgccagcaaccatgtccaagggacctgcagttggtattgatcttagcaccacctactcttacgtgggtgttttccagcacggaaaagtagagataattgccaatgatcagggaaactgaaccactccaagctatgtcgcctttatggacactaaacagttgattggtgatgccgcaaagcatcaagttgcaatgaaccccaccaacacagtttttgatgccaaacgtctgattggacgcagatttgatgatgctgttgtccagtctgatatgaagcattggcccttcatggtagtgaatgatgctgacaggccccaggtccaagtagaatacaagggagagaccaaaagcttctatccagaggaggtatcctctattgttctgacaaagatgaaggaaattgcagaagcctaccttgggaagactgttaccagtgctgtggtcacagtgccagcttactttaatgactctcagtttcaggttaccaaagatgctggaactattgctggtctcaatgtacttagaattattaatgagccaactgttgctgctattgtttacaaaagttcagacaaaaaggttggagcacaaagaaacgtgcttatctttgacctggggggtggcactttcggtgtgtcaatcctcactattgaggatggaatctttgaggtcaagtctacagccagagacaaccacttgggtggagaagattttgacaaccgaatggtcaaccattttattgctgagctcaagcgcaagcataagaaggacatcagtgagagcaagagagctgtaagatgcctccgtactgcttgtgaacatgctaagcgtactctctcttccagcacccaagtcagt

SEQ ID NO: 1575 - DNA, 479 bp, Homo sapiens
  MAP TO Z98745.1; EXPRESSED IN BONE MARROW, SIGNAL = 2.2; EXPRESSED IN LUNG, SIGNAL = 1.4; EXPRESSED IN BT474, SIGNAL = 3.5; EXPRESSED IN PLACENTA, SIGNAL = 1.6; EXPRESSED IN HEART, SIGNAL = 1.2; EXPRESSED IN HBL100, SIGNAL =   2; EXPRESSED IN BRAIN, SIGNAL = 1.7; EXPRESSED IN ADULT LIVER, SIGNAL = 1.4; EXPRESSED IN FETAL LIVER, SIGNAL = 1.1; EXPRESSED IN HELA, SIGNAL = 1.8
tttgatgactcctgagctgctcctggagttgccttctcctttacaaactcttcctgttcatgagcatggctcaggacctggtggaaatcaaggacagttgggaacccaatatcagagagaacatggcaaggaggcctcctcagggccgctggatagaaaagaaggaccaagaagctggcaaagaaaaaacagaggcagagagactaaaagcctacagaagatcaagtctggcataaaaaaaaaatcctcctcctctaccttttcttgttgcactgaaaccccatacttgttcttataggtacaaatccctgttctcccatcttctcacctgctctcctgggtcatccagctctctctccaaatcctccagcacagtcactgcctcctctccactcacaggacggtgctgtctgacccaggcctggagctcctcaggcaggatagtcaggaactgctccagcaccagcagctctaggatc

SEQ ID NO: 1576 - DNA, 969 bp, Homo sapiens
  MAP TO AC010127.2; EXPRESSED IN BT474, SIGNAL = 2.1; EXPRESSED IN FETAL LIVER, SIGNAL = 0.87; EXPRESSED IN ADULT LIVER, SIGNAL = 2.3; EXPRESSED IN PLACENTA, SIGNAL = 1.5; EXPRESSED IN BRAIN, SIGNAL = 7.9; EXPRESSED IN BONE MARROW, SIGNAL = 1.6; EXPRESSED IN HELA, SIGNAL = 1.3; EXPRESSED IN HBL100, SIGNAL = 2.3; EXPRESSED IN HEART, SIGNAL = 0.94; EXPRESSED IN LUNG, SIGNAL = 1.2
tccacaattggctttgtcacccggtcataggaaggtggacaagctgcagtggacatggtcagatcagttttttctgtaatagagttttcatttattctgtcaattatcatgtcttcttttataagaagattagccccacctttgattttgtttttattgtacgtaaaggaagcttgttttacagttcgctttaaaaggtggcgtctgtaagcacgctgaataatgacagcagatacttcctcttgttttcgttttaaagtagtagtgattggctgataggagaccttggaaggattggaagccatgaatcgctcttccatctgtattcgtagagcatccatctctccactctctcctagaacccgctttgtaaaagcaaataagatatcaagacagtggatccggtcaccactcaccatgggcaaatccatggcaatgagctggagtttgtttggttgtggcagattgagaggcggttcaagcgcagctgcaaactgagataatttttcaaattccatgaactgagttgcatcgggatcaaacttctcccaaacctcatagaacatctcaaagtcatcctcactcagaggctctgcactttcttcagtagcaacactgaagttctccaggatgaccgcgatgtacatgttcaccacaaccaggaaggatatgatgatgtaactgacaaaaaagaaaattccaacagatgggttcccacagtctcccttaactgagcttccagggttaactttattagggtcacagtcgggtggcttactgttgagaatgggtgctagcaatccatcccagccagcagaggttgtaatttggaataggcagatcatgctgttgccaaaggtctcaaagttgaacatgtcatcgatcccaacttccctcttaacataggcaaagttggacatcccaaagatggcgtagatgaacatgactaggaagagtaggaggccgatg

SEQ ID NO: 1577 - DNA, 452 bp, Homo sapiens
  MAP TO AC006977.3; EXPRESSED IN LUNG, SIGNAL = 3.3; EXPRESSED IN BT474, SIGNAL = 3.8; EXPRESSED IN ADULT LIVER, SIGNAL = 2.7; EXPRESSED IN PLACENTA, SIGNAL =  10; EXPRESSED IN BRAIN, SIGNAL = 3.8; EXPRESSED IN BONE MARROW, SIGNAL = 3.5; EXPRESSED IN FETAL LIVER, SIGNAL = 4.2; EXPRESSED IN HEART, SIGNAL = 2.9; EXPRESSED IN HELA, SIGNAL = 1.8; EXPRESSED IN HBL100, SIGNAL = 3.3
atgaggaaaagtgtgcctggtaggggactggggagagcttgagaaagttggaaacgttgccttagaagcctgttttttctccttttagaagctacatagtgtctcactttccaagatcattctacaagatgtcagtgcactgaaacatgcaggggcgtgttgagtgccaaggccatggaatctgtcagcaacctcacccttccttgttcctccacctcattccaggcctaagatcccgtccatcgccactgggatggtgggggccctcctcttgctgctggtggtggccctggggatcggcctcttcatgcgaaggcgccacatcgttcggaagcgcacgctgcggaggctgctgcaggagagggaggtgagtgccagtcctgggtgggctcaggagccctcgcaccccgacaggaacaagggccagccccgagaacgggccattagcagtt

SEQ ID NO: 1578 - DNA, 439 bp, Homo sapiens
  MAP TO AC007308.13; EXPRESSED IN HBL100, SIGNAL = 3.1; EXPRESSED IN HELA, SIGNAL = 2.4; EXPRESSED IN HEART, SIGNAL = 2.3; EXPRESSED IN LUNG, SIGNAL = 1.7; EXPRESSED IN BRAIN, SIGNAL = 3.8; EXPRESSED IN BT474, SIGNAL = 3.3; EXPRESSED IN PLACENTA, SIGNAL = 3.5; EXPRESSED IN BONE MARROW, SIGNAL = 2.4; EXPRESSED IN ADULT LIVER, SIGNAL = 2.3; EXPRESSED IN FETAL LIVER, SIGNAL = 2.3
catcctcccaggtccagtgccctccatgcaggacaggacaccagacgtgcagagcacagcaggggctaatgctccactctgcacgtgcccaggaggcctactgcaactgcctgtgctggtaacagagccaagtgttctagaagtagtttggggaaacttgtggcaagaaagcctctgggtcatgcctggagctcacatgagaggcaaggcagtctgtctcaccctgctcgtccttcacagcccacaccatgaggtccacacaggcagcattcgcctgacagcgcagtttgagggggctcagctcattgtggatccggtctgcgtcatgtagaatcttctggagctccccctggctcgtgttgaactgctccagcacaaaatcatggatctccttcacaaaagaggtcgggaggtctgtaggaaagagtgtggcatcaca

SEQ ID NO: 1579 - DNA, 462 bp, Homo sapiens
  MAP TO AC007383.2; EXPRESSED IN HBL100, SIGNAL = 2.1; EXPRESSED IN HELA, SIGNAL = 2.8; EXPRESSED IN HEART, SIGNAL = 3.1; EXPRESSED IN BONE MARROW, SIGNAL = 1.3; EXPRESSED IN LUNG, SIGNAL = 0.88; EXPRESSED IN BRAIN, SIGNAL = 2.3; EXPRESSED IN ADULT LIVER, SIGNAL = 1.8; EXPRESSED IN PLACENTA, SIGNAL = 2.1; EXPRESSED IN FETAL LIVER, SIGNAL = 1.3; EXPRESSED IN BT474, SIGNAL = 2.8
tgtcaacactattaaactctttggaagaacacatgaaaaaaataattttgtggttgagtactttagaattaatttccaagaaaactacagttaatttgcacaggttcaatccattctaactacttaccttctatttaaagggttttacataaacaaacaaagtcaacagaccaaaacaactgaaacccaggaagaaaatgaaccttaatatttttttgaatagtaatgaattaaggacaaaaaaacaaattgtcataaaataaaagataccttgtttcccaaggccgggcagtaaaggcatagggcttagaggttagggcacctacagggcagatatcaatgatattcccagacagttcagacatgaacatcttttcaatgtatgtgccaacttgcatatcatttcctctgcctgttgttcccaaatcatctactcctgcaatctcacttgcaaacctacaa

SEQ ID NO: 1580 - DNA, 462 bp, Homo sapiens
  MAP TO AC007649.12; EXPRESSED IN BRAIN, SIGNAL = 1.7; EXPRESSED IN ADULT LIVER, SIGNAL = 1.4; EXPRESSED IN BT474, SIGNAL = 1.9; EXPRESSED IN FETAL LIVER, SIGNAL = 2.1; EXPRESSED IN PLACENTA, SIGNAL = 1.9; EXPRESSED IN HBL100, SIGNAL = 1.9; EXPRESSED IN HELA, SIGNAL = 1.8; EXPRESSED IN HEART, SIGNAL = 1.9; EXPRESSED IN BONE MARROW, SIGNAL = 2.2; EXPRESSED IN LUNG, SIGNAL = 1.5
tcatgaggtgcacaagaagcacaccagacttaaattacctttctttctctggatgcttctgagcatttcaagtactgggaacgtggcacagcctttttctctctctgactcctccctcagcccctttcagccttctctatactgactttgaggtttaggggctgggctcaccctcgtgagcaaagccacaggtgcttcccgccctcatggagcttgcaggcttgaggcgggtttagtttactcacagatagtcacacagatgtcaaactgcacccatgacagttgctccgcgggagaggttcacggggacaggagtgtttgatggggacaaagcctccttagactgcggggtgaggtccagggcggtgcctgcaaggaggggagctgccccttccttgggcttccggggggaccggggacaccaggcattcagaggtggaaggctccttgtcagcctcctcc

SEQ ID NO: 1581 - DNA, 456 bp, Homo sapiens
  MAP TO AC007695.12; EXPRESSED IN HBL100, SIGNAL =  21; EXPRESSED IN HELA, SIGNAL =  11; EXPRESSED IN PLACENTA, SIGNAL =   8; EXPRESSED IN HEART, SIGNAL = 2.8; EXPRESSED IN BONE MARROW, SIGNAL = 9.4; EXPRESSED IN LUNG, SIGNAL = 4.4; EXPRESSED IN BRAIN, SIGNAL = 3.3; EXPRESSED IN BT474, SIGNAL =  11; EXPRESSED IN ADULT LIVER, SIGNAL =   4; EXPRESSED IN FETAL LIVER, SIGNAL = 7.4
tccatgcaacatactttatggggatttccagaagcactttggggattgttgtaactagggtcctgctgtagcaagtgggagcaagagtcagtcaaagacgggttctaggtctacagatgaaacaaggttacttatttttctgctggagagtggaagcttgggtgataaaatgttagaggaataaaaaaaagaacgtagcttcttcctctctcagcgcagggtgcccataacttgcgctctttctgctgctcccagctcttggatacagccgatgacgccatgggtttcagagatctgaaaagcccggctagcctccaggtgctcaacgattacctggtggacaagagctacatcgagggtatgtgccatcacaagcacgtgtggcagtctatgaagcagtgtccggcccaccgcctgctgacttgtgtcatgccctatgttggtataatcagatca

SEQ ID NO: 1582 - DNA, 390 bp, Homo sapiens
  MAP TO AC007375.4; EXPRESSED IN BONE MARROW, SIGNAL = 2.4; EXPRESSED IN LUNG, SIGNAL = 1.7; EXPRESSED IN BRAIN, SIGNAL =   3; EXPRESSED IN ADULT LIVER, SIGNAL = 2.2; EXPRESSED IN BT474, SIGNAL = 2.4; EXPRESSED IN FETAL LIVER, SIGNAL = 1.9; EXPRESSED IN PLACENTA, SIGNAL = 2.1; EXPRESSED IN HELA, SIGNAL = 1.8; EXPRESSED IN HBL100, SIGNAL = 2.1; EXPRESSED IN HEART, SIGNAL = 1.8
taatttagcgggacggtctgtatttttatttgctaaatctggcaacttttggggttggggtttggggcccggcaacctttggggtgggaggtctttgtgtagagcccaacctgcccgccaaggcccactcaccggagaagaactggctgatggaggtgggcaggagcgtgaggaaggccaaggggtgggcgaaggagatggaaaggacagcggagatgtaggccacgccggccaccatggagtagaggcaggccagggaggtgtagaggcagaacaggacgaagttgcgcatgttcctgctgccgatgcagttgccggtgaagaaacagtgatggtcgtgcctcagggtgactctggcgcacactcggcagaagtgggtgctaggtgagg

SEQ ID NO: 1583 - DNA, 462 bp, Homo sapiens
  MAP TO AC007378.2; EXPRESSED IN FETAL LIVER, SIGNAL = 2.5; EXPRESSED IN HELA, SIGNAL = 4.3; EXPRESSED IN PLACENTA, SIGNAL =  11; EXPRESSED IN HBL100, SIGNAL = 4.7; EXPRESSED IN HEART, SIGNAL = 3.9; EXPRESSED IN BONE MARROW, SIGNAL = 2.5; EXPRESSED IN LUNG, SIGNAL = 3.6; EXPRESSED IN BRAIN, SIGNAL = 3.1; EXPRESSED IN BT474, SIGNAL = 2.6; EXPRESSED IN ADULT LIVER, SIGNAL = 3.6
aagtgggtagggagacggagaagaagggaatttcaggctcatattttggtgtcatgggcagatcttgggtgaggttttcattgttagttaaactaagtttgaaggtttacactgaatttctttccctaccgtcctctttggctacttaaatagatcatcaggactgtttgttcttctgttgaaagtgccccacactgccctgggcataagctaaattctttctctcccttttagaagagaagccagattgctccaaggcccgctgtgaagtccagttctctccacgttgtcctgaagattctgttctgatcgagggttatgctcctcctggggagtgctgtcccttacccagccgctgcgtgtgcaaccccgcaggctgtctgcgcaaagtctgccagccgggaaacctgaacatactagtgtcaaaagcctcagggaagccgggagagtgctgtgacctct

SEQ ID NO: 1584 - DNA, 420 bp, Homo sapiens
  MAP TO AC007599.1; EXPRESSED IN BONE MARROW, SIGNAL =   1; EXPRESSED IN BT474, SIGNAL = 1.3; EXPRESSED IN FETAL LIVER, SIGNAL =   1; EXPRESSED IN PLACENTA, SIGNAL =   2; EXPRESSED IN HBL100, SIGNAL = 1.2; EXPRESSED IN HEART, SIGNAL = 0.91; EXPRESSED IN BRAIN, SIGNAL = 1.4; EXPRESSED IN LUNG, SIGNAL = 0.97; EXPRESSED IN ADULT LIVER, SIGNAL = 1.2; EXPRESSED IN HELA, SIGNAL = 1.6
caggcaacatgtgctgaaattatcatgaattcataaaaagtagagaattcaaattctgaggcagttattaatgaacaacaaaaacaacaatagctaaagacttatttattacagtcagtactttttccatgtttccaaatcactgactttctaacatcctttaaacattaatttcaacatttacttcattagcaattaaatacaaagtgtacagtaaataaaatcccatacttctttggtaactcaaaacaattccagatttatgtgcaactcacctgctgtaaaatcttcagtcagatcaataaatgcatgagaatgtggaattcgcattttacttgtagtggtcaatgctggatgccatgataaattcctaaaaaataaaataaaaatacttttcttaaggcaaacatcaaatgagca

SEQ ID NO: 1585 - DNA, 403 bp, Homo sapiens
  MAP TO AC007718.1; EXPRESSED IN BONE MARROW, SIGNAL = 0.96; EXPRESSED IN BT474, SIGNAL =   1; EXPRESSED IN ADULT LIVER, SIGNAL = 1.3; EXPRESSED IN HELA, SIGNAL = 0.92; EXPRESSED IN PLACENTA, SIGNAL = 1.1; EXPRESSED IN HEART, SIGNAL = 1.1; EXPRESSED IN LUNG, SIGNAL = 0.92
  unsure 75
  unsure 120
  unsure 205
  unsure 219
gggaatgcttgaatattgctcatgttgtttaagagaaagatgttttatttagactgctggtagctgtcacactantgcaaactggaaccaactgtttcggttacatgacagctaaggcantgaaacaaatcaacaggtgaagtttgagttggggaggatgtgactgtcttgaggctttctttgtactttaaagttgctctttgtntaactcacctttanaagcaggatctgtatgcctttagtgtgctttaattcatcgactaatttcctaagatggaaactacaacaagtaataattttcaaagaaaaagattttctggttgcatgtttgtcgtccagtgagttagtcttgtctttactttcaaacacagcattattgatcaattctttcgttgtttcagga

SEQ ID NO: 1586 - DNA, 457 bp, Homo sapiens
  MAP TO AC008644.1; EXPRESSED IN BONE MARROW, SIGNAL = 1.2; EXPRESSED IN BRAIN, SIGNAL = 1.2; EXPRESSED IN FETAL LIVER, SIGNAL = 1.2; EXPRESSED IN PLACENTA, SIGNAL = 1.1; EXPRESSED IN HEART, SIGNAL = 1.4
gggaattgaaggaaaaatgcaaataaagtgatctcatggtttgaatgtttgttccctttgaaattcatgtttaaacttaatccccaatgtgacagtattgacagcacccagtctaacttttttttttttttttttttttaacagaagagtcatgatcctaagaacagaagggagatccctgttgctttgacttcttgctgtcctcctgctatttggctcaaaatgcaaactcagttatgagaagtacatagaagaacaggtaaactaaagcctgggctttttcaccagaggatgtggaaaagaggcttcaggaaattgagaagtattatggagattgcaaaaatgagggagctgaagaaagagttagaatgacagtgaatgtgagaagagagagagatgaataccacgaagttgcgtatgtactgctggactataccctgaactgagcatgtaaaca

SEQ ID NO: 1587 - DNA, 387 bp, Homo sapiens
  MAP TO AC009302.1; EXPRESSED IN LUNG, SIGNAL =   7; EXPRESSED IN BT474, SIGNAL =  10; EXPRESSED IN ADULT LIVER, SIGNAL =  17; EXPRESSED IN PLACENTA, SIGNAL =  28; EXPRESSED IN BRAIN, SIGNAL =  23; EXPRESSED IN BONE MARROW, SIGNAL =  23; EXPRESSED IN FETAL LIVER, SIGNAL =  29; EXPRESSED IN HEART, SIGNAL =  66; EXPRESSED IN HELA, SIGNAL =  25; EXPRESSED IN HBL100, SIGNAL =  14
gtgagtttccctgtgttccccaaactttgactatttatttgtgtatctatatatgtctctctctgtctctcttcgtgtgtgtgtgtgtgtgtgtgtgtgtgtgtgtgtgtgtgtgtatgaaaccctatttcttctaacctgctaggaataggtgggccagatatactgagggagagaaaagcagtccttgacctctgggagctggcctggcacttacagctgggcacaggtgtggttaggagctggcctggcacttacagctgggcacaggtgtggttaggagctggcctagcacacactggtgggccatggtgtctcctgcctcctgttggtcatgaacaatctcacagacacaaacatcagacatggtcactctgaggccatcat

SEQ ID NO: 1588 - DNA, 457 bp, Homo sapiens
  MAP TO AC008072.2; EXPRESSED IN FETAL LIVER, SIGNAL = 1.4; EXPRESSED IN ADULT LIVER, SIGNAL =   1; EXPRESSED IN HEART, SIGNAL = 1.1; EXPRESSED IN PLACENTA, SIGNAL = 1.3; EXPRESSED IN HBL100, SIGNAL = 1.2; EXPRESSED IN HELA, SIGNAL =   1; EXPRESSED IN BONE MARROW, SIGNAL = 1.6; EXPRESSED IN BT474, SIGNAL = 1.7; EXPRESSED IN LUNG, SIGNAL = 0.93; EXPRESSED IN BRAIN, SIGNAL = 1.5
gccatttgattcccaaagtcttacccttgtcaaaaacttaatttagggagtcccaaagagaggtatttggggctgggtctgattagatatctcataattatattgtacttatcacttctattcaattcaaccaaatttactgaaagtctgctatgggcatggcatggcagagggtgaataaggcatagtcagctcttggcacttagttaatggaaattatgtttcatatgttcctcctttcctttcctgtaggttcagctgaatccagaacttggtgttaagaatggcatcttgggagctggcatgcttcccctgggctccaggctgacttctgtctctgcaaagaggacctcagaacccaggagccagaggaaccagggcaagaggtcccaggggcattctctggagcttcctgagcccagtgggagccccacatcagacaggtgtgctggcactt

SEQ ID NO: 1589 - DNA, 457 bp, Homo sapiens
  MAP TO AC009478.1; EXPRESSED IN BONE MARROW, SIGNAL = 3.3; EXPRESSED IN BRAIN, SIGNAL = 3.2; EXPRESSED IN FETAL LIVER, SIGNAL = 2.4; EXPRESSED IN ADULT LIVER, SIGNAL = 3.2; EXPRESSED IN BT474, SIGNAL = 2.7; EXPRESSED IN HEART, SIGNAL = 3.1; EXPRESSED IN HBL100, SIGNAL = 2.2; EXPRESSED IN PLACENTA, SIGNAL = 3.4; EXPRESSED IN HELA, SIGNAL = 2.7; EXPRESSED IN LUNG, SIGNAL = 2.5
cagacccatgccaagctgccctcagcctccccttggcctctctcccatgctcactggtgcccaaagtctggagggggacaaggtggcaggggctggcatgtcagcactgctccaagtgtgtgcacacctggcccagccatgacaatgccagggcttggcctcgactttgtcacaaaattggagaaggtgcagggagcagagagaggcccagcaacaggagcaggcacttccgagcctgcagggtcaggggagcttcccaggcccccaagaatgcagagatgcctgggtgcatagtcacagctgggcagctgctcctatgctcaggagggcagggctcctgcctgttcctggctccctctggcttcctggagcttgcagccccagccacacctcccctgctgcagccagcatctttgcagtggcagcaccacgtgagtcactgttgccatcattttgg

SEQ ID NO: 1590 - DNA, 487 bp, Homo sapiens
  MAP TO AC009487.1; EXPRESSED IN BRAIN, SIGNAL = 0.99; EXPRESSED IN FETAL LIVER, SIGNAL = 0.99; EXPRESSED IN ADULT LIVER, SIGNAL = 1.1; EXPRESSED IN BT474, SIGNAL = 2.2; EXPRESSED IN HEART, SIGNAL = 0.84; EXPRESSED IN PLACENTA, SIGNAL = 1.1; EXPRESSED IN HBL100, SIGNAL = 1.4; EXPRESSED IN HELA, SIGNAL = 1.7; EXPRESSED IN BONE MARROW, SIGNAL =   1
ttgttgttagggaagacatctatctgtaaggaagagaggaaggtaagttatgcaaagatgagaatagccttctaggtagaaggacagcaaatgcaaaggccttggtgttggagtactccttaagttatattaatacaaatataggagcattctaattggagttcatttgaattaataaagttaaatccattaagtcgaaatgtttttttttttttgaagttttttttctctagacaatgaagggggtatcctcaaggcagaaaaagaattactttttcttttattttttagatgttgctaaatttgcataagaagagttggatggaaggtttgacacttcaggactacagtgaacattgtaaacacaatgaatcagtggtaaaagagatgttggaattagccaagaattacaataaggtaaaagttacttctgccatttcttctttataatctttggaatatgtatgattagatgccaagcattgtg

SEQ ID NO: 1591 - DNA, 447 bp, Homo sapiens
  MAP TO AC008248.1; EXPRESSED IN BONE MARROW, SIGNAL =   7; EXPRESSED IN LUNG, SIGNAL = 3.7; EXPRESSED IN FETAL LIVER, SIGNAL = 7.4; EXPRESSED IN ADULT LIVER, SIGNAL = 3.8; EXPRESSED IN BT474, SIGNAL = 9.7; EXPRESSED IN HEART, SIGNAL = 4.7; EXPRESSED IN HBL100, SIGNAL = 9.9; EXPRESSED IN BRAIN, SIGNAL = 5.9; EXPRESSED IN PLACENTA, SIGNAL = 6.3; EXPRESSED IN HELA, SIGNAL = 8.9
  unsure 73
  unsure 78
  unsure 191
  unsure 203
tgccacttccacctaccacaaagacaatcaaggaaatccaagagtcaaatccaatggctttgccttggttgcnaccgntcacccatggggtgtgctgtgtgagtgacaggggctctcctcaccccttccagcttccatgacactgtaccacttcacttccatcatttttctccaattgccccttgtttaancgtggttcctgntcctcttctttctctttcccctccaacatacagacatccctcaaggatcctatccttacttttgcttcttctttcttcattttctttatcagtgattcctgggatatgaaaatcgctcctaagcagatgacctacaaatctcctggtagctctaacctccctctgtattctagtcccttaacttggacaagcctgtcatgctcaaaaagaaacttctctcctcttccttatcctctgttatatc

SEQ ID NO: 1592 - DNA, 462 bp, Homo sapiens
  MAP TO AC009492.1; EXPRESSED IN PLACENTA, SIGNAL = 1.8; EXPRESSED IN ADULT LIVER, SIGNAL =   1; EXPRESSED IN HEART, SIGNAL =   1; EXPRESSED IN HBL100, SIGNAL = 0.94
catttgaggccaattttgatacttagaatatactatgcttctaaataacatactgccttcttaaattaacaaatactgtaaaaatttcagagaataataaagtcatgttctatgaatccaccacccaggtagcacttgttgttattttcagcaagaaaaatcaaaagaatgcatgcacatggttaaaaagtaaaaacatgagagcagagggaagaaaataaaaagtaaaagctccttctcaccccaatttcatcttcagatcctctctccaaagacaactgccaataaagcatttcttctgtcttttgtacaaacaagtttacactccgagaactatgccacttgtgtctccctttgttattggtatatactatttcatggatacctaaacccctatagtgcatctggacctgattcaaaggttttgatggacaaccagtgctattattaatgaaatattga

SEQ ID NO: 1593 - DNA, 492 bp, Homo sapiens
  MAP TO AC009189.1; EXPRESSED IN HBL100, SIGNAL =   2; EXPRESSED IN HELA, SIGNAL = 1.9; EXPRESSED IN BONE MARROW, SIGNAL = 2.6; EXPRESSED IN LUNG, SIGNAL = 2.2; EXPRESSED IN BT474, SIGNAL = 2.1; EXPRESSED IN ADULT LIVER, SIGNAL = 2.4; EXPRESSED IN BRAIN, SIGNAL = 2.3; EXPRESSED IN PLACENTA, SIGNAL = 2.4; EXPRESSED IN FETAL LIVER, SIGNAL = 2.3; EXPRESSED IN HEART, SIGNAL = 2.1
accacctctcagacccacagtgggtgggcagccagcaagctgctggctccatgggcttgtcctgaaatagtaggctgttgtaagttttgtggcctccgaagttctgcatgcgaagtaccctgttgtccaggtcatgttaagtgtcctgctgtgtgcttagcagccatctgagcaaagggcaggatctagaactcttcagattctgaaaagtaccagccttaagcatgtgatctcatttcctcaggttactttggcctttttatcccccatctcctgctcatggtcggggtctcctttgtgatgggttggtggtagaagagctgattccagaaagttatttggaaccagagggccctttttagtctcctactcagcattctcattccccacctggtcaacgtgactcagccactgaacagctccaccctgaaggaagagatgtgaaagtcaatgtgtatctttcaccatttaagaagaaaaccacttcatgcc

SEQ ID NO: 1594 - DNA, 471 bp, Homo sapiens
  MAP TO AC009297.2; EXPRESSED IN HELA, SIGNAL = 0.95; EXPRESSED IN BRAIN, SIGNAL = 0.91; EXPRESSED IN PLACENTA, SIGNAL = 1.1; EXPRESSED IN BONE MARROW, SIGNAL =   1; EXPRESSED IN BT474, SIGNAL = 1.1; EXPRESSED IN ADULT LIVER, SIGNAL = 1.2; EXPRESSED IN HEART, SIGNAL =   1
tcaaatttagtttttgacaatggcatgtaacatgtacagattcattaatagcagatttgggtaccaaatctactaactagcaattaggttaactactagaaactagaaattaggtattctaataaagagacatacattaaatgtgtcttacctccataattccaatgctacaagtatttaaatatatcaagatcttccaaattcgcatcctttgccaaaagtaagtatagtgtaccagttctaaattttgcatcagatatttgcttgaaacatgtaaaatacgaagatttggcctaagcttcagttgcttcatctcatacaatattattgcattatttacaatgattgttccttttcccagatttggcaatgtggaggctccttggagattgttacttgctcccatgttggtcatgtttttcggaaggcaactccatacacttttcctggtggcactggtcatgtcatcaa

SEQ ID NO: 1595 - DNA, 482 bp, Homo sapiens
  MAP TO AC009303.1; EXPRESSED IN BT474, SIGNAL = 2.4; EXPRESSED IN FETAL LIVER, SIGNAL = 2.4; EXPRESSED IN HEART, SIGNAL = 2.3; EXPRESSED IN HBL100, SIGNAL = 3.9; EXPRESSED IN HELA, SIGNAL = 4.1; EXPRESSED IN ADULT LIVER, SIGNAL = 4.4; EXPRESSED IN LUNG, SIGNAL = 2.9; EXPRESSED IN BRAIN, SIGNAL =   3; EXPRESSED IN PLACENTA, SIGNAL = 3.8; EXPRESSED IN BONE MARROW, SIGNAL = 3.8
ggctcatgcctgtgtaaaccagagtatctaagacaagtctcaatcaatttaggaagtttattttgccaaagttaaggatgcacccatgatacagcctcagaaggtcctaacaacaggtgtccaaggtggtcggggcgcagcttggttttatacattttagggcgacatgagacatcaatcaatatatgtaagatgtacattggttcagtctggaaaggtgggacaactcaaagtggggagggggcttccaggtcacaggtagacaaagaacaaatggttgcattattttgggtttctgattagccttccactgaatcaaaggaagcaatcagctgtgcatttgtctcctgggagcagagggatgactttgagttctgtctgtcctttgtccacaaggaattattttgtggacaaattgtgagggaggtatgtaggtttttatctttgtagccatcctatttaggaatagaatgggaggcagg

SEQ ID NO: 1596 - DNA, 448 bp, Homo sapiens
  MAP TO AC009758.1; EXPRESSED IN PLACENTA, SIGNAL = 4.4; EXPRESSED IN HELA, SIGNAL =  10; EXPRESSED IN BONE MARROW, SIGNAL = 5.9; EXPRESSED IN LUNG, SIGNAL = 5.4; EXPRESSED IN ADULT LIVER, SIGNAL =   3; EXPRESSED IN BT474, SIGNAL = 3.4; EXPRESSED IN FETAL LIVER, SIGNAL =   6; EXPRESSED IN HEART, SIGNAL = 3.9; EXPRESSED IN HBL100, SIGNAL =   4; EXPRESSED IN BRAIN, SIGNAL = 4.9
  unsure 177
  unsure 188
  unsure 205
  unsure 220
  unsure 231
  unsure 243
  unsure 267
  unsure 369
  unsure 389
  unsure 423
gacaggataacaaggagcaggtccaacaccacaataaacatggccacagcgatgccatagatattgttgaagctagtgtccccacacgccagcctcaccacagccatgtgttcacagtagcagtgagcgatcactgggcctcggcagtagtggaaacatctcagcaggaaggggagntggagtcattnagtgtcacagcccgggnccacagcagccatgnccaatcttggntgatgagggacnccagtcaggaccttggtgtagtgncagtggcttgcagatagccacatagcggtcaaaggccatggccagcagcactgctgactccatgatggagaaggagtgaaggaagaacatctgggccagacnaggcaaagaagtttatctcnccgatccctgaaccagaatatggcaagcattttngggcagtgctgaggaggaaaggacc

SEQ ID NO: 1597 - DNA, 487 bp, Homo sapiens
  MAP TO AC010133.1; EXPRESSED IN HBL100, SIGNAL = 3.1; EXPRESSED IN HELA, SIGNAL = 2.8; EXPRESSED IN BONE MARROW, SIGNAL = 4.2; EXPRESSED IN LUNG, SIGNAL = 1.4; EXPRESSED IN FETAL LIVER, SIGNAL = 2.6; EXPRESSED IN HEART, SIGNAL = 1.9; EXPRESSED IN BRAIN, SIGNAL = 3.2; EXPRESSED IN PLACENTA, SIGNAL = 1.9; EXPRESSED IN ADULT LIVER, SIGNAL = 1.6; EXPRESSED IN BT474, SIGNAL = 2.2
gactcagctggatcattttggtctgagctgaataccttcaggcatgcataatcagctgctgattaactagacagctgtaatcctgagagtgacctggctattaacatgggtgccttgcaggatttccacattatatctcatgccccagctggtaaaatgagttttctctcagaacaatggcagtattctgaaaagaagagggagaaagaaaagaagaagatggaggaggaggaagaagaagaggaggaagaggaggaggaggaagaagaagaagaagaacaagaagaacaagaagaagaagaacaagaagaagaacaagaacaacaagaagaagaagaacaagaacaacaagaagaagaacaagaagaaaaaaacaagaagaaaagaaggagaagaagaagaagaagaatgagaaggagaagaaaagaagaagaaagaagaagaagaagaagaagaagaagaagaagaagaagaagaagaagaacaa

SEQ ID NO: 1598 - DNA, 482 bp, Homo sapiens
  MAP TO AC010136.1; EXPRESSED IN LUNG, SIGNAL = 2.6; EXPRESSED IN FETAL LIVER, SIGNAL = 7.6; EXPRESSED IN HEART, SIGNAL = 1.5; EXPRESSED IN BRAIN, SIGNAL = 1.3; EXPRESSED IN PLACENTA, SIGNAL = 3.9; EXPRESSED IN ADULT LIVER, SIGNAL = 2.4
ctgcaaaggttaagtgcgtggaaagcagttggaacagggcctggctagtagcaagcgctcaataacctgaactcttattggtactctcttctcctggccagcacacacatgcacacacagagttccagatgctacattccagctgcagcacactccttagaggagagctgggctggagagtgattgaagactcaggcacgagagctgcctgaggggaaaggcagataaacaaagagaagagggcatgctggcacaggggctggtggcagggataccagtcatgtagaggtggtgagcagatggaagcatagagggcacaggacagtgggcacgaggatccatcctcaccaggtagttgcctccatgtttggacttgagcatctgcgccacctcacggaggttgctccggaagttctcctcattggctgtgctggggaaggagacagcgatgatcctctctgtgacgtacaccaggtccagct

SEQ ID NO: 1599 - DNA, 459 bp, Homo sapiens
  MAP TO AC009813.2; EXPRESSED IN BONE MARROW, SIGNAL =   1; EXPRESSED IN ADULT LIVER, SIGNAL = 1.1; EXPRESSED IN BT474, SIGNAL = 0.95; EXPRESSED IN FETAL LIVER, SIGNAL = 0.96; EXPRESSED IN HEART, SIGNAL = 0.84; EXPRESSED IN BRAIN, SIGNAL = 1.2
  unsure 236
  unsure 427
agctgtgtgggagcctaatgactgacttggagctgcctggggctgtagagatcatctgggccaaccactgaatattcggacaaggaaactgaggtccagagagagaaggtaagtttcccaaggcaacacagcacctggcattaccagaaaaccaaggcagctgttaggtcacttggctgaggcttggtgaatttcggtccctgagacttcataatgcttggtaagcaccgtgggcntctgcagccaagtcaggtgagggttggaaaggcctgggactgctgccccctctgtacctgcctcttctctgggcagggccttggggaccaagagaccatctgggagcaaacagtgctgccctatcatgagcatgtggaaagctggggaaatgttcagctggtggtgcatagaggtgggaaggcgggcttangggcatgaggtgggtagggggatgaggaaaaa

SEQ ID NO: 1600 - DNA, 449 bp, Homo sapiens
  MAP TO AC009945.1; EXPRESSED IN HEART, SIGNAL =   1; EXPRESSED IN BRAIN, SIGNAL = 1.2; EXPRESSED IN BONE MARROW, SIGNAL = 1.2; EXPRESSED IN FETAL LIVER, SIGNAL = 1.1; EXPRESSED IN HELA, SIGNAL = 0.95
agctagctgtgcattggaggattggttatctcacctttaatgttaaaatgtctcttgccaataatgacaggagcaaaaggtacagaataaggcagtaattactcaccttttatgtctcacctaataagaaaagggtactatacaaacttagaacattctgtagaagccaattttattgcatttctaatataaataaataatttctatttaaattatcacaggtctttttttctatcatagttattttgatgttttatagataattattttagtcagcatgagttgctacaacaagtgccatatagagtgggtagcttaccacaacaggcatttatttctcacagttctaggagcttggaagtccaacatcaaggtgccaaccgattcggttcttggtgagggccctcttcctggcctacagagggtaaccatcttgctgtatcctcaca

SEQ ID NO: 1601 - DNA, 480 bp, Homo sapiens
  MAP TO AC009955.1; EXPRESSED IN BONE MARROW, SIGNAL =   6; EXPRESSED IN LUNG, SIGNAL = 1.1; EXPRESSED IN ADULT LIVER, SIGNAL = 1.9; EXPRESSED IN BT474, SIGNAL = 2.3; EXPRESSED IN FETAL LIVER, SIGNAL = 4.6; EXPRESSED IN HELA, SIGNAL = 1.4; EXPRESSED IN HEART, SIGNAL = 5.1; EXPRESSED IN PLACENTA, SIGNAL = 2.2; EXPRESSED IN HBL100, SIGNAL = 1.9; EXPRESSED IN BRAIN, SIGNAL = 3.1
gaagggaaaggcgagtgaggccgccgtggacttgaccacccagagcagtgcatgcagcccagctggatgcaggtgaacagatgcatccgccacgtcttcacctaggggagcagccagtgggccccagtgcacagcgtcccggcctgctcccacccacccacatcgtggggaatttggctcccaggtcacagcttctccttcatattcatcccatccatcaatgctcccagatccctctggatccccttcccgtcaccccactgccctacccccatgcttcccggccctaccttggtcacatagggctgctcaggatggtgttttgccggcatgaggatgagcaacaaacgctgggacagctggataccagacagggacgtgacccccatgtacaggaagatcccaaagagcacagccaatgggatccgacgcagcacagcccccatgacgatggacaggcctggaggaggtgacacagac

SEQ ID NO: 1602 - DNA, 413 bp, Homo sapiens
  MAP TO AC010732.1; EXPRESSED IN BT474, SIGNAL = 2.1; EXPRESSED IN FETAL LIVER, SIGNAL = 1.5; EXPRESSED IN HELA, SIGNAL = 9.5; EXPRESSED IN HEART, SIGNAL = 1.4; EXPRESSED IN PLACENTA, SIGNAL = 1.9; EXPRESSED IN HBL100, SIGNAL =   2; EXPRESSED IN LUNG, SIGNAL = 1.5; EXPRESSED IN BRAIN, SIGNAL =   2; EXPRESSED IN BONE MARROW, SIGNAL = 2.3; EXPRESSED IN ADULT LIVER, SIGNAL = 1.6
tctgtggcttgacttctcccacgccccatagacccggcaccgtgtaataactgggcccgtgtcctcacctgaaaactgggggtcacacggcctgtcctgaagaactctgatgtgataaacaccacagagcagcatcacattttcctatcgccccgactgcgtctagagaaacacttggagaagatgggagagccctatttagcacccccaccctctccctttctccagagctctttgcccgtgctgtgccactcgtcaaggttcaggtcaccaagtcttaccttgaaactgaggcttcacctcccaagagcaagaggcaaacccaccgaacacatgcttgtcatggtcctcgaggacagccacacagggcccccggtgagtgatgtggccacagagctgggagaagctgtgtc

SEQ ID NO: 1603 - DNA, 474 bp, Homo sapiens
  MAP TO AC009811.2; EXPRESSED IN HBL100, SIGNAL = 0.92; EXPRESSED IN BRAIN, SIGNAL = 1.1; EXPRESSED IN BONE MARROW, SIGNAL = 0.96; EXPRESSED IN ADULT LIVER, SIGNAL = 1.1; EXPRESSED IN BT474, SIGNAL = 1.1; EXPRESSED IN HEART, SIGNAL = 1.2
  unsure 183
ttggcaccacatttccttagaagctcttgctttttcttgattttctttctgttcttagagtctaatattctagtgtctcaccaaattgttgttgtctctttccaaaactcctttaaccaaactatctgtatcttcatgtaaaaggcaccacagacctcccatcactcactctcccttaacccncaaaatatctatgtgttatcccttacagatgtcacttcctgcaaggccttccatattagttgctacaacatcactaaagaattttattacctgtggctctggacctacttctaatatctctggagatatccaccttcaaacacctgccacatccagctatgagggtctagtacctgggctccagagacatgttcaggttagttctgattataagaacatttctcttttttgccagaattgttggaaagttatctctattcaacagtctgtgtaggatttcagaagattgaa

SEQ ID NO: 1604 - DNA, 457 bp, Homo sapiens
  MAP TO AC009884.2; EXPRESSED IN BT474, SIGNAL = 1.9; EXPRESSED IN FETAL LIVER, SIGNAL = 2.2; EXPRESSED IN HELA, SIGNAL = 1.8; EXPRESSED IN HEART, SIGNAL = 1.7; EXPRESSED IN PLACENTA, SIGNAL = 1.6; EXPRESSED IN HBL100, SIGNAL = 1.3; EXPRESSED IN LUNG, SIGNAL = 1.7; EXPRESSED IN BRAIN, SIGNAL = 1.6; EXPRESSED IN BONE MARROW, SIGNAL = 2.2; EXPRESSED IN ADULT LIVER, SIGNAL = 1.9
  unsure 119
  unsure 131
gtggctctcggcatcttgcaagcagacctttctcaggtcagattcttcagcacagaaagttctatcattgatttgccatagggcctgaaattgccattttcaatcattcctcaggcttnaagcgatcaaanatatccctttaaaccacaaatacgttacctggcaatagagtaaggactgtaagagagtcctttggcagtcacatgggatgatcccaaggataggtaaattctaattagtggtgggagtaggggctaggacacaggggatgctgaagacaataagacacggctgaaagggtcaatcctggggagttgcaacatggatacacaggatattcagaggaagattaatgttgaagtcaaattcatccttcttcacatctttggcctcttctggccctagatgagtattgaggtgaactagtgtctaaagaagagccctggtctgattcatt

SEQ ID NO: 1605 - DNA, 450 bp, Homo sapiens
  MAP TO AC010149.1; EXPRESSED IN BONE MARROW, SIGNAL = 2.5; EXPRESSED IN ADULT LIVER, SIGNAL = 2.3; EXPRESSED IN BT474, SIGNAL = 1.9; EXPRESSED IN HELA, SIGNAL = 3.1; EXPRESSED IN FETAL LIVER, SIGNAL = 2.1; EXPRESSED IN HEART, SIGNAL = 1.9; EXPRESSED IN PLACENTA, SIGNAL = 2.6; EXPRESSED IN HBL100, SIGNAL = 1.7; EXPRESSED IN LUNG, SIGNAL = 2.1; EXPRESSED IN BRAIN, SIGNAL = 2.2
ggtgtcagagacgacacagggttgctccctgtgttcttgagtggcagaaagagaaggagagaactctccagagtctcttttataagagccctaatcctattcatgagggctccacccttcttacctcatgacctcccaaaggtcccacctcctagtaccttcacaggggggttaggattttgacctatggattgggggaactccacaaacctttattccataatagtgggagtctatggcactgggctgatagcctcattttggtcttttactcaacagaacagagaggggtctcagggcccacagaagcccatgtggttaaacaaagtcaagacaagtttgaatgagcagatgtacacccgagtagaagggtttgtgcaggacatgcgtctcatctttcataaccacaaggaattttacagggtgagtggctctccctgcttccttttc

SEQ ID NO: 1606 - DNA, 472 bp, Homo sapiens
  MAP TO AC010683.1; EXPRESSED IN BT474, SIGNAL = 2.1; EXPRESSED IN HELA, SIGNAL = 1.7; EXPRESSED IN HEART, SIGNAL = 2.8; EXPRESSED IN PLACENTA, SIGNAL = 2.4; EXPRESSED IN HBL100, SIGNAL =  11; EXPRESSED IN LUNG, SIGNAL = 1.8; EXPRESSED IN BRAIN, SIGNAL =   2; EXPRESSED IN BONE MARROW, SIGNAL = 2.2; EXPRESSED IN FETAL LIVER, SIGNAL = 2.3; EXPRESSED IN ADULT LIVER, SIGNAL = 1.7
tattatcgctgagcagtggcatttcagataactccaattttctgctgaatattttcaagcacctgggacaattcccattgaaatcagttgatactaagaggcatcaagggttagcaggagttcaaggtcaggatctctggaccaattcttggtctgggcagctactgtgcatttgcatcacagcacactgaaggccagcgtagatacagctgccgagggaagttctgctaagtatgattagaaccacagtagagttgaaggacttgtacccctaaaattctctagaagagggtctcatgaaggtgtagatacttcagggaagtcagatacacactgagtccccagtcagagcacacgaaagtctttttcagcttcttcggcatgtagattcttttggaattggacctattaaagaacatcaaccacagtgtctgcaaccaatatgtgtttgtataaaacatctggggccaga

SEQ ID NO: 1607 - DNA, 462 bp, Homo sapiens
  MAP TO AC009953.2; EXPRESSED IN BONE MARROW, SIGNAL = 1.7; EXPRESSED IN FETAL LIVER, SIGNAL = 1.6; EXPRESSED IN ADULT LIVER, SIGNAL = 2.2; EXPRESSED IN BT474, SIGNAL = 1.9; EXPRESSED IN HELA, SIGNAL = 1.6; EXPRESSED IN HEART, SIGNAL = 0.93; EXPRESSED IN PLACENTA, SIGNAL = 4.2; EXPRESSED IN HBL100, SIGNAL = 1.9; EXPRESSED IN LUNG, SIGNAL =   1; EXPRESSED IN BRAIN, SIGNAL = 1.4
cacagaagggtgaattctggtaacctcttagctacctaggtctctgttttaaaagagaattgttaaatctctgcttaaaacggtagaattcagatatttggggctattaatttagagctaaattttcaatactgccttccttcctggtcttaatcatttttgctatctaagtattaattataaataacatccattagtaacattcacgctcactggcaacaattttaaaaaagaaaaattttaaatggaggcttacagttgtggtaaatttggtctaacaaagggatcattctctgctccattgactgctttgtttttcctttgttttggttcagaattggtagagggtgcctgagaattattagctgtgggaggtttgcgtttggctagaagtttcctttgcctttcaatatcttccctttgctgattcacccattcttgttgcctgtgtaaaaataaaca

SEQ ID NO: 1608 - DNA, 474 bp, Homo sapiens
  MAP TO AC009958.1; EXPRESSED IN HEART, SIGNAL = 2.2; EXPRESSED IN PLACENTA, SIGNAL = 3.6; EXPRESSED IN HBL100, SIGNAL = 1.8; EXPRESSED IN LUNG, SIGNAL =   2; EXPRESSED IN BRAIN, SIGNAL =   2; EXPRESSED IN BONE MARROW, SIGNAL = 2.5; EXPRESSED IN FETAL LIVER, SIGNAL =   2; EXPRESSED IN ADULT LIVER, SIGNAL = 2.1; EXPRESSED IN BT474, SIGNAL = 1.5; EXPRESSED IN HELA, SIGNAL = 3.1
ctacatcagcatcagtgggctggagccgggtactccaggcagtattactcattcatgatcacgcatggtcccaccacagtggtgcagtctgtgcacaaaccttctgctgcttttccgggggcttggatttcaagagaactggccagtaaacagcctactaatatccaggttcaagacatagggctctagattgaaatacacatcttttttttctgaatgtagccgtctctcttgctacccttggcctttccccttcactgtacttctgctgactccatggtcatgctgctgtctctgagctgggcagactccatggtcatgctgctgctctctctgagatgggcagactccatggtcatgctgctgctctctctgagctggggaaggcagctctgcctgcatgcatgccagaccacagtgtctggaatagcatcccctaggacagccctcaatcggtaaggacaggggaggtgt

SEQ ID NO: 1609 - DNA, 473 bp, Homo sapiens
  MAP TO AC010731.1; EXPRESSED IN HELA, SIGNAL = 1.1; EXPRESSED IN HEART, SIGNAL =   1; EXPRESSED IN PLACENTA, SIGNAL =   1; EXPRESSED IN HBL100, SIGNAL = 0.92; EXPRESSED IN BONE MARROW, SIGNAL =   1; EXPRESSED IN FETAL LIVER, SIGNAL = 0.9; EXPRESSED IN ADULT LIVER, SIGNAL = 0.98
gaaaagccatgcagacagacaaaaagaatacagacagggttcaaaagagaaagactgcattagcctctggatgtcagataaatacagatggcagaattgttagaacttggatagtcgctcagtcaatccttctagagggagtgtttcagtcctctttggagaagaattccgagaaatttaattccatcattatcattaaaaatcctatactatgtctgtcattttctacaatgcttaacagaaaaggtgcatgtttctaagttctgctgcattgctttgctttgtgtttgctcactgcaggccagtttggtattccgaaagggatcgtcttttctatgcctgtgaaatttgagaatggaacttgggtggttcttacagatctcaaagatgttgaaataagtgaacaaataatgacccgaatgacaagtgatctaattcaggtaatgtcagaatagatgcaaggggactgacct

SEQ ID NO: 1610 - DNA, 415 bp, Homo sapiens
  MAP TO AC009962.1; EXPRESSED IN BONE MARROW, SIGNAL = 3.2; EXPRESSED IN FETAL LIVER, SIGNAL = 2.6; EXPRESSED IN ADULT LIVER, SIGNAL = 2.6; EXPRESSED IN HBL100, SIGNAL =   4; EXPRESSED IN BT474, SIGNAL = 2.6; EXPRESSED IN HELA, SIGNAL = 3.5; EXPRESSED IN HEART, SIGNAL = 3.2; EXPRESSED IN PLACENTA, SIGNAL = 4.2; EXPRESSED IN LUNG, SIGNAL = 2.6; EXPRESSED IN BRAIN, SIGNAL = 3.3
aaatgcagcctaagcgacacgtctcagtgtcccttggcagggaaatcggatggcacccagttgtctgtgttgacgctgggggcgcctcgttcagcgcgcgcgtttgaaggtcggaagtgtcccctctcccctcggcctaccgtgcccgaggctctcccagaactcgtggcaggcgcccagggcgcacgagactctccccagcccaccagcctccccccggagcccggccgggagcaccgacctcttccccccgctgccggcagctgcgcgccgggaaggtcctccccctcgtcctcctcctcgtcctgcgtcgtcgcttctgtggacagatcctccgtctccgacgcttgccaggagctgcggcacttggcccaggccttcctcctgcgactcgccacttgccactccagttcct

SEQ ID NO: 1611 - DNA, 467 bp, Homo sapiens
  MAP TO AC010974.2; EXPRESSED IN BT474, SIGNAL = 3.4; EXPRESSED IN HBL100, SIGNAL =   3; EXPRESSED IN HELA, SIGNAL = 4.1; EXPRESSED IN HEART, SIGNAL = 3.1; EXPRESSED IN PLACENTA, SIGNAL = 4.8; EXPRESSED IN LUNG, SIGNAL = 3.3; EXPRESSED IN BRAIN, SIGNAL = 4.8; EXPRESSED IN BONE MARROW, SIGNAL =   4; EXPRESSED IN FETAL LIVER, SIGNAL = 2.8; EXPRESSED IN ADULT LIVER, SIGNAL = 5.7
tgagctttgtttatggcacctattgccaaaatgaaaaaggctgtcaagattcttacttcggtttttgaatcatcatttgaggagactggattaagtgctctatgtgccttataatacatagaagagggagacaaagccagaaaaacattgcccttggaagtctgcctatcaccaagctagaggtgtattaggccattgttacattgctataaagaaatacctgacgctaggtaatttataagaaaagaggtgtaactggttcatggttctgcaggctgtataggaagcatggtgctggcattagctgctggtgagggcctcaggaagcttccaatcatgatggaaggtgaaggaggagcaggtgtctcaaatgcaagagcaggagcaagagagaaggtgggaggtgccacacacttttaaacaaccagatttcatgtgaactcacttgtcactaaggggatggcact

SEQ ID NO: 1612 - DNA, 442 bp, Homo sapiens
  MAP TO AC011092.1; EXPRESSED IN BT474, SIGNAL = 1.2; EXPRESSED IN HELA, SIGNAL = 0.91; EXPRESSED IN HEART, SIGNAL = 0.95; EXPRESSED IN BRAIN, SIGNAL = 0.97; EXPRESSED IN PLACENTA, SIGNAL =   1; EXPRESSED IN BONE MARROW, SIGNAL = 0.9; EXPRESSED IN FETAL LIVER, SIGNAL = 0.91; EXPRESSED IN ADULT LIVER, SIGNAL = 1.1
gcagggaaaatcacaggttcaccaagagaagaaattaatattcttaataaaccaattcaaggatgcactatttttagaaatattcagattatgatcaatgttttgaaaaaggacaattaaatctggaaagtaattttaacatgttgctctcctctccaaccttaaacataaaaatttcttcatgcttcttatgctagcccataaaactcaaacttgcagttgtaacaaaaatatggcatataaaaaacattcctaaatgttgtaccttcgactgtactttagctagtaaaggtttttgtacctgaagattgatctctgcctcatagaaggttaggcatgagcagtaatgtcgatctgagtcaatgtctgtcaggacaaccacaaagaacgttggctgcttcctctctctggacagctgccacccgccaggctgacaaaacta

SEQ ID NO: 1613 - DNA, 478 bp, Homo sapiens
  MAP TO AC011480.1; EXPRESSED IN BT474, SIGNAL = 1.4; EXPRESSED IN HBL100, SIGNAL = 1.2; EXPRESSED IN HELA, SIGNAL = 5.4; EXPRESSED IN HEART, SIGNAL = 1.2; EXPRESSED IN BONE MARROW, SIGNAL = 1.6; EXPRESSED IN BRAIN, SIGNAL = 1.3; EXPRESSED IN PLACENTA, SIGNAL = 1.1; EXPRESSED IN LUNG, SIGNAL = 0.95; EXPRESSED IN FETAL LIVER, SIGNAL = 1.5; EXPRESSED IN ADULT LIVER, SIGNAL = 1.2
gttctgggaaagtggcccagcgctgcggaagcggccctttcatcgggcatccgggtgctctttcgacccctcgtggccagtcttggacctgcatggaaaaatgtgccaagaaagttctgctggaaaagtgctggtgattctccacgtgaccctcctccgcgcccccagggtcactctcagccttccttccccagctcggggccctgggagaccgccgtgtgcaaattctatcggcagggtcggtggagagaggtcagggtatttgcttcctgggcccctccctgcatcccgcactcacagtggctgtggttcccctcctctgagccgcagttcctctgggaactcgagctgtccctggagacgggtaacagactccctccctgtcccttctgccctaggctggcgatggcttcgtgcccacttcggatggtcccctggggccgccccatcctttgtggctttctccactctgcccatc

SEQ ID NO: 1614 - DNA, 499 bp, Homo sapiens
  MAP TO AL050325.20; EXPRESSED IN PLACENTA, SIGNAL = 1.7; EXPRESSED IN BONE MARROW, SIGNAL = 2.5; EXPRESSED IN LUNG, SIGNAL = 2.8; EXPRESSED IN FETAL LIVER, SIGNAL = 2.8; EXPRESSED IN ADULT LIVER, SIGNAL = 2.1; EXPRESSED IN HBL100, SIGNAL = 2.1; EXPRESSED IN BT474, SIGNAL = 2.2; EXPRESSED IN HELA, SIGNAL = 3.7; EXPRESSED IN HEART, SIGNAL = 2.8; EXPRESSED IN BRAIN, SIGNAL = 2.7
gaccacagtggctcgtgtccgccgtcccagctacttggaagactgaggcgggaggatcgcttgagctcaggagttcaaggctgcagtgagctgtgattgcaccattgcaccccagtgtggttgagagagtcagaccttgtctttaggagagagacagagagagggagagagggacagagagagggagagagagacagagagagggagaaagagacagagacagacagagatagacagggagataggcagagagagggctgccatggaccccaggccagcagctgctggctgctccctaaaggtgagaaagtagttctcacctgcagtttccaggtggggtcagccctgcctctgggagctcagagactggggaagatgtgctgccctcaggtggtgggggtgggccagagaggctggggcttgtgtctggccctggttttcctcattctcctcatctgtataatggatcattctgtggggccatgaagagaaggcagag

SEQ ID NO: 1615 - DNA, 475 bp, Homo sapiens
  MAP TO AC011201.1; EXPRESSED IN BONE MARROW, SIGNAL = 2.6; EXPRESSED IN LUNG, SIGNAL = 1.5; EXPRESSED IN FETAL LIVER, SIGNAL = 3.5; EXPRESSED IN ADULT LIVER, SIGNAL = 2.3; EXPRESSED IN HEART, SIGNAL = 3.1; EXPRESSED IN BRAIN, SIGNAL = 2.7; EXPRESSED IN PLACENTA, SIGNAL = 3.1; EXPRESSED IN BT474, SIGNAL = 1.5; EXPRESSED IN HELA, SIGNAL =   2; EXPRESSED IN HBL100, SIGNAL = 1.6
attttgggaagcagatgcccctggaaatgaagaccattcctccattgtcttctcctttctcccttccccagggttaactgcttgctgtccaggactgagaatcctggcagatgatactttctctgtaaagacagaaagaggggctcaatgttttggcatggctttcttaggaagagtgacatgggtttgataagtaacatgctcatgggagaggctgaggcagagggtcccaagtatagaccaggccatgcagatgtttgtcagcaaccacccatggcaccacccaatcagccagacacattaagcccttccttgaccccagacaccatcctacacaccagggataaaaatggtgagaaaaactgtagtttcacctggcaaagtggtgccaattcacttattcaaagtaagaggcgagaccagaagtggacaaggagttacaaaattagaagtgagcagcttgttgtgagatgga

SEQ ID NO: 1616 - DNA, 485 bp, Homo sapiens
  MAP TO AC010985.1; EXPRESSED IN BRAIN, SIGNAL = 1.2; EXPRESSED IN BONE MARROW, SIGNAL = 0.91; EXPRESSED IN ADULT LIVER, SIGNAL = 0.91; EXPRESSED IN BT474, SIGNAL = 0.95; EXPRESSED IN HEART, SIGNAL = 0.95
aagtgtctatatgtgttgcggcttttttccaatacagtattttgacccatcctgaaaatagacatacaataactaaaaaatattcaaatccaatagagggtggatgtaatggttaattttatgtgtaaacatgattgagataagaggtgcccagataggcagtaaaacattttagggtgtatctatgatggtgtttttagaaaatattaacatttaaatcagtagactgaagaaagaagatctgccctgaccaaagtgggtgggcatcatccaatctgttaaggacatgaccaaagacaatgaagaggcagaagaagaatacacttgctttctcttcttgagctgggacatccatctcctcctgagctgggacatccatctcctcctgcctttggacaacagggcttctggttcttgggcctttgaacttcaggactttcaccaacagatctcctgattctcagccctttggcctggaaattaca

SEQ ID NO: 1617 - DNA, 497 bp, Homo sapiens
  MAP TO AL109830.7; EXPRESSED IN FETAL LIVER, SIGNAL = 6.3; EXPRESSED IN HELA, SIGNAL = 6.8; EXPRESSED IN PLACENTA, SIGNAL = 7.3; EXPRESSED IN HBL100, SIGNAL = 5.3; EXPRESSED IN HEART, SIGNAL = 6.4; EXPRESSED IN BRAIN, SIGNAL = 5.3; EXPRESSED IN BONE MARROW, SIGNAL = 6.7; EXPRESSED IN LUNG, SIGNAL = 5.8; EXPRESSED IN BT474, SIGNAL = 4.3; EXPRESSED IN ADULT LIVER, SIGNAL = 5.4
gaagggaagactgaggaggggaccagttttcctctgggatgcttgttttaaggcaaggaatgtgtctgctgatgtaaatatttcctttaactacccagttgggccctcatccaagagtctcttgggctctcatttgcctcctactcttagagaaggggagggctaggcagtggacagcttggtccccaaatttgtgagtggctggatgtattctactcgtttacttccttttctctatctctaggaaacaaatgaattccagacttcaacttccatgtggtacaagttctcaaccaaactgaccaccaatactatcgaaaagacagcagcccccaagcaatttggcccaaagcccacgaacctcctaccctcctcccatccctctattttccctattattcagaaagaaatcactgttattcattgcacagaccaggtaacagttaaacagatggccgtatacataaagacagtttcacagtccataaggcagagga

SEQ ID NO: 1618 - DNA, 486 bp, Homo sapiens
  MAP TO AL079337.3; EXPRESSED IN HBL100, SIGNAL = 4.4; EXPRESSED IN HEART, SIGNAL = 8.5; EXPRESSED IN LUNG, SIGNAL = 5.5; EXPRESSED IN BONE MARROW, SIGNAL = 6.9; EXPRESSED IN BRAIN, SIGNAL = 6.1; EXPRESSED IN ADULT LIVER, SIGNAL = 6.9; EXPRESSED IN BT474, SIGNAL = 4.2; EXPRESSED IN FETAL LIVER, SIGNAL = 8.4; EXPRESSED IN PLACENTA, SIGNAL = 7.7; EXPRESSED IN HELA, SIGNAL = 5.8
  unsure 28
  unsure 80
  unsure 180
  unsure 383
gaagtgcacatggaacattctccaggantagaccatgttaggctacaaaacaagtcttaataaatgttaatgtatggaanatcatatgaagttttttctcatcacaatggaataaaactacaaattaataccagaaggaaaactttaaaaatcagaaatgagtgaaaattaagcaacacnactcttaaacaggccatgggtcaaagaagaaatcacaaggtgtattagtttgtttacatgatgctgatgaagacatacccgagactggaaagaaaaagaggtttaattggacttacagttccacatggctggggaggcctcagaatcatggcgggagtcaaaaagcacttcttacatggaggcgtcaagagaaaatgaggaangaagcaaacccagtaatccctgataaaccaatcagacctcatgagactattcactatcataagaatagcacaggaaagactggccccccatgattcaattacc

SEQ ID NO: 1619 - DNA, 475 bp, Homo sapiens
  MAP TO AF187000.1; EXPRESSED IN PLACENTA, SIGNAL = 4.9; EXPRESSED IN HELA, SIGNAL =  12; EXPRESSED IN HBL100, SIGNAL = 4.7; EXPRESSED IN HEART, SIGNAL =   5; EXPRESSED IN LUNG, SIGNAL = 3.6; EXPRESSED IN BONE MARROW, SIGNAL =   6; EXPRESSED IN BRAIN, SIGNAL = 6.1; EXPRESSED IN ADULT LIVER, SIGNAL = 3.8; EXPRESSED IN BT474, SIGNAL = 4.2; EXPRESSED IN FETAL LIVER, SIGNAL =   5
tccccgtagagtttgtttggtttgtgtgtgccacaaaaaagtccagttgggccaacaagaccccaaactagcgagcacccctttgccaagacaagtgctctggttggggttgcattgcctttttcatctagcaaacggaatgaaagtacctgatgtttgatggccttgatcataaagctagagagagctacaaaggaaaatagagagcactgaacacaatattttcattttagggatgttaaggcactgagggccagagcacttgttctcatcagcatcatcatcagcctcagcatcattgtcaccgtaatcagcatcattggcatcagcatcatcagcatcaccaccctcatcatcatcagtagcatcaatatcactatcatcagcattagcatcagcatcatcagcagcatcagcaccatcagcatcatcgtcatcaggatcatcagcatcatcagcagcatcaccaccatta

SEQ ID NO: 1620 - DNA, 484 bp, Homo sapiens
  MAP TO AL050341.18; EXPRESSED IN LUNG, SIGNAL = 3.4; EXPRESSED IN BRAIN, SIGNAL = 3.9; EXPRESSED IN BT474, SIGNAL = 5.9; EXPRESSED IN ADULT LIVER, SIGNAL =   5; EXPRESSED IN PLACENTA, SIGNAL = 5.4; EXPRESSED IN HBL100, SIGNAL = 5.7; EXPRESSED IN HEART, SIGNAL = 3.5; EXPRESSED IN BONE MARROW, SIGNAL = 4.5; EXPRESSED IN FETAL LIVER, SIGNAL = 3.5; EXPRESSED IN HELA, SIGNAL = 4.7
atggttttgccaggattcagaaagctatagtggatcagactggcagcagaccaccaaacagtgaccatgacctttttttggtgcaagtttggctttgggaagtgctttggagcttcttctgtgtccacccactgagctggtcatcgcccgttgttctataaaatccatgtttcgtctcacgtcacagtctgatagagaaatggtttgttgtgtaaaataagagaagacgacacttcaaaacaatgattttttttaatttttattttcgcttagctcatgaagcacccacttatcaggctttttcacctttccagtttgcttcaaatgccaaacgaccgtagaatggtcgacattgagttcttcggcaacttcttgtgtagttgtaaggggatcagctccgatgattgctctccattggtcattgtcaacttccgatggcctgccactacgctcctcatcttcaaggctctcatctcctttgcaa

SEQ ID NO: 1621 - DNA, 483 bp, Homo sapiens
  MAP TO AL033380.10; EXPRESSED IN PLACENTA, SIGNAL = 1.2; EXPRESSED IN HELA, SIGNAL =   1; EXPRESSED IN BONE MARROW, SIGNAL = 1.7; EXPRESSED IN BRAIN, SIGNAL = 1.5; EXPRESSED IN BT474, SIGNAL = 1.5; EXPRESSED IN HEART, SIGNAL = 1.1; EXPRESSED IN HBL100, SIGNAL = 1.3; EXPRESSED IN LUNG, SIGNAL = 0.88; EXPRESSED IN ADULT LIVER, SIGNAL = 1.1; EXPRESSED IN FETAL LIVER, SIGNAL = 1.3
acctgcatgacgttctctcccctgccctggagctctgggggttccaccatggcagcattctccatatctgactcccactctctgtccactgtgagggctaggccagctcttccccaagagctcagcaatgtgcccagcactctgcagacctgtgtggccagtgggtggcttccttttggatgtggccatccggtccctccccactcaaactcctcctgcatctcttgtccctgcacacccaccacctcattaacccaagcctcaggaaccacccttagcccacattttaagatgaaaagtttgagatctggggaagtgaagccaagctcacagcatcacatacctgggagacggtgcagccagattcaaagccaggtctgcctggctcctgggatcattcctttgggcaggactgatcattgcctgaactgggtgacctcaaagggactgagtaggactaaaaggttgcactgagggcataaa

SEQ ID NO: 1622 - DNA, 474 bp, Homo sapiens
  MAP TO AL049541.19; EXPRESSED IN FETAL LIVER, SIGNAL = 1.9; EXPRESSED IN ADULT LIVER, SIGNAL = 0.95; EXPRESSED IN PLACENTA, SIGNAL = 1.3; EXPRESSED IN HBL100, SIGNAL =   2; EXPRESSED IN HELA, SIGNAL = 1.8; EXPRESSED IN BONE MARROW, SIGNAL = 2.6; EXPRESSED IN BT474, SIGNAL = 2.3; EXPRESSED IN HEART, SIGNAL = 1.1; EXPRESSED IN BRAIN, SIGNAL =   2
tccttgattgcatcccttgggaagatctgacttcctataactgagacttacttctcttaacaagttctcaatgtcaatgagagaagcaaccctggcctgaggctttaagtcaaagtgtctgagcgcagctgggaacgggcaacacagacccggttatcgtggtcctgatggtagatttcagccctgtttggcacaggtgggtcatcactgtctctcctgtagctggtttacggaaggtctgaactaaatacaagtgggaaacggcttcacttttctccagcagctgccttccagtagcttctgtgaggcagggctgggttagggtgagcaagtgaggccaaattgtgcaagtgctgccttgaatcctgtctcctttcctcctcatccccctcctcctccttccccctgctcctcctcctcttcctccgtctttcttcttcctcctcctcctccttcctcacaaaggatcctgtc

SEQ ID NO: 1623 - DNA, 482 bp, Homo sapiens
  MAP TO AF165124.1; EXPRESSED IN BT474, SIGNAL =   3; EXPRESSED IN FETAL LIVER, SIGNAL = 2.2; EXPRESSED IN ADULT LIVER, SIGNAL = 6.3; EXPRESSED IN PLACENTA, SIGNAL = 5.6; EXPRESSED IN HBL100, SIGNAL = 2.5; EXPRESSED IN BONE MARROW, SIGNAL = 4.4; EXPRESSED IN HELA, SIGNAL = 4.3; EXPRESSED IN HEART, SIGNAL = 2.4; EXPRESSED IN BRAIN, SIGNAL = 3.4; EXPRESSED IN LUNG, SIGNAL = 2.9
tggtgtccagacttcacaggcggggaaacaaagaaagccatatatgcttttgctgctggtaggcaagtagtctggggtaagttctcagccctgcttgcccactgcctggaaacagactcggtgctatttcagggggtatggtgggagtaagactggtgccttgggttgagtgggaactgggtgaggcctgtgactaccgactttccccacttccctgacaacctaaatgacacagtagaaacagtcataatcctcctacgtacccagttccattgacctggggatctcatccctatcccccacagcagctgcagcgaaacccacccaaggagtcagctcagacacgcctagccctgccaccacccaatggtccttccctacccaccctggtaactgaagacaaagggcatatactctcgggagttctagggctctgcccaccacttgttcctccacacactactgatgctctctggaaagca

SEQ ID NO: 1624 - DNA, 462 bp, Homo sapiens
  MAP TO AL050343.14; EXPRESSED IN BONE MARROW, SIGNAL = 2.2; EXPRESSED IN LUNG, SIGNAL = 1.7; EXPRESSED IN BRAIN, SIGNAL = 2.2; EXPRESSED IN ADULT LIVER, SIGNAL = 1.4; EXPRESSED IN BT474, SIGNAL = 2.6; EXPRESSED IN FETAL LIVER, SIGNAL = 2.3; EXPRESSED IN PLACENTA, SIGNAL = 2.4; EXPRESSED IN HBL100, SIGNAL =   2; EXPRESSED IN HELA, SIGNAL = 3.7; EXPRESSED IN HEART, SIGNAL =   2
cttggagggtagacagagccttcaggccagtgctgctgatgcctattccatttacctcattgtacaatataaatattatcattttgcatgtgtacatgacatgaaaaagattgggaaacactgctgaaggtaggaattctgtaatacacctctgaaactgaatcctgagtaagctgtattaccttttacattctggagtagagaatttatactttctaaaaatgaagctgcttactctaaattgaagcaaatctatttcatgtgtctttcttaccaattaaagatgccatttgcattttgtacttcttagtgtggtcctctttgatatctttgtcaatatccttacgcataaccttgcggaaccagcttatgaagcagatgtggcacagctggagtataaactggtagctggagaacatggtttaattattcgagtgaaaggatttaaccacaaactacctg

SEQ ID NO: 1625 - DNA, 461 bp, Homo sapiens
  MAP TO AL049539.16; EXPRESSED IN BT474, SIGNAL = 4.1; EXPRESSED IN FETAL LIVER, SIGNAL = 1.5; EXPRESSED IN HBL100, SIGNAL = 3.1; EXPRESSED IN HELA, SIGNAL = 3.3; EXPRESSED IN HEART, SIGNAL = 1.6; EXPRESSED IN LUNG, SIGNAL =   2; EXPRESSED IN ADULT LIVER, SIGNAL = 1.8; EXPRESSED IN PLACENTA, SIGNAL = 3.5; EXPRESSED IN BRAIN, SIGNAL = 2.3; EXPRESSED IN BONE MARROW, SIGNAL = 2.2
cagagaggtggggtgacttgcccaaggtccaagtgatggtcttaacctgtctcactatacccttccatccttccccttccttgtcctggttcctaggatgacaccaagtctgcctacaacctggtcaccttgatcttggagtgaagttaagctttcataaactctattagagccggctgaagcggcaggaactctggttgccgcacccttctggtggcggaggggggcgtaccctcttccacgttcccctgctcttgcctctgctggaggactcaccccacaaatcggttcatgtaccaccgctgctcggggatctgccggggaatctggttggtgcgcacagggttgtcatatggctgctttcggaagccgaagtagtagcccaagtagacgaggggcagggagatcccgaaccacatgcacagcagagccaccatggtgggaaagggcacctgtagaca

SEQ ID NO: 1626 - DNA, 468 bp, Homo sapiens
  MAP TO AL078645.18; EXPRESSED IN BONE MARROW, SIGNAL = 1.6; EXPRESSED IN LUNG, SIGNAL = 1.2; EXPRESSED IN BRAIN, SIGNAL = 1.6; EXPRESSED IN BT474, SIGNAL = 1.7; EXPRESSED IN FETAL LIVER, SIGNAL = 1.3; EXPRESSED IN HBL100, SIGNAL = 1.8; EXPRESSED IN HELA, SIGNAL = 1.1; EXPRESSED IN HEART, SIGNAL = 1.6; EXPRESSED IN ADULT LIVER, SIGNAL = 1.6; EXPRESSED IN PLACENTA, SIGNAL = 1.4
attggttccatgacctccctgcagatagataacaaaatctgcagattctcaaatccctgatataaaatggtatagaatttgcataacccccacacatcctctcatatactctaaatcatctctagattacttataatacctaatgaagtgcctacacatcacttcattcacatgaattcaacatagtacttggtgtgcggcaagttcaaattttgttttttggaactttgtagaattattattttttgaatatttttgatccatgggtagttgaatccacagatgcagaatccatggatatggaaggccgactatataaggaaaacagaaactagaacttactttgctctgggttgatgaactaatcccggaacctctttattagttttaagtcttacatttgagctggcacttttttcctgaaacacataaacacagacatgtgaaagacaggattagaatccacaa

SEQ ID NO: 1627 - DNA, 467 bp, Homo sapiens
  MAP TO AL020996.3; EXPRESSED IN BONE MARROW, SIGNAL = 2.1; EXPRESSED IN BRAIN, SIGNAL = 2.2; EXPRESSED IN LUNG, SIGNAL = 1.6; EXPRESSED IN ADULT LIVER, SIGNAL = 2.3; EXPRESSED IN BT474, SIGNAL = 1.9; EXPRESSED IN FETAL LIVER, SIGNAL =   2; EXPRESSED IN HELA, SIGNAL = 1.6; EXPRESSED IN PLACENTA, SIGNAL =  14; EXPRESSED IN HBL100, SIGNAL = 1.7; EXPRESSED IN HEART, SIGNAL = 1.7
cattttacacacgaggacgcggttcccagaacggaagcaacctggggagataagcgagaaactgaaggaacctgcggtatcacacggtgcgtccctagggaacttggattctagcccagtctcactctccgagaaagcggcctggcccaaggctcacacctggggtgcagccctctggatcccaagcccttcaccccttttgggctcccgtcctgtgaccacagaacctgactgtggaggggagggactgcggacccctaccctcaacctcccacctgtccatccctaggaagagcccacactgctcactttagtgtctccgctagaaagaagctctgctgcttgttgtcgtggttgggggtgctactgtacacgtcttggatcccagagaaaccggcttctgtccgacagtatttctccaaggcctgaggaaggggaagaggaggaggaaaacagccttaacacgg

SEQ ID NO: 1628 - DNA, 467 bp, Homo sapiens
  MAP TO AL079303.2; EXPRESSED IN PLACENTA, SIGNAL = 2.9; EXPRESSED IN HBL100, SIGNAL = 2.8; EXPRESSED IN HELA, SIGNAL = 3.3; EXPRESSED IN HEART, SIGNAL = 2.1; EXPRESSED IN BRAIN, SIGNAL = 2.6; EXPRESSED IN BONE MARROW, SIGNAL = 2.3; EXPRESSED IN LUNG, SIGNAL = 2.6; EXPRESSED IN ADULT LIVER, SIGNAL = 2.4; EXPRESSED IN BT474, SIGNAL = 3.3; EXPRESSED IN FETAL LIVER, SIGNAL = 2.2
aagcccccaagttggtagtctatacaaaatttcttgatgatcttggaaatcaaacaaaacaatctacaggccggttgtggcccacgcctgccggtatgtgacttctgggcaagagggtatgcatcggaagaggacccggaaaaacacggagggggcagcagggtaaagagctacatttaaaagaatcctaaactgggagggaattaggagcagccagtagtaaagaggattttgagagtggccgaaattgggagaggtttttaagatgctttgcgatacactgagaatgaattctgcatttggatattacctcgagaaactgaataaagatttatattctctgttattctttggttggcagactctgatgcttggagttgagcctgtgtcacacagagccatgtggctgccaggcctctctgcggatgctcacattcgcaggattatggtctgtgtcctcccatcat

SEQ ID NO: 1629 - DNA, 469 bp, Homo sapiens
  MAP TO AL050348.19; EXPRESSED IN HEART, SIGNAL = 1.5; EXPRESSED IN BONE MARROW, SIGNAL = 1.1; EXPRESSED IN BRAIN, SIGNAL = 1.1; EXPRESSED IN ADULT LIVER, SIGNAL = 1.1; EXPRESSED IN BT474, SIGNAL = 1.5
acctgcagaggtgtcaatccctgagttacctcttgggaactccctttggggcaccatttgaaaactctgggctcagaggtctcttgggttcctaaagattctgagatcctccagcgccatggtttcccagccagtttagttgggtctagtgagggtcaggggttgattgacctagagcctctgtgtgtaagttcacgatgggaacatggagatggcagagctgatgccctgtcccttttcctgtgcctgttgttcccacagggcggggcggtgattgtccaaaagttctggtgggcctgtgcattgttggctgtgtgatggatgagaattgtcaagctggagaaaaatgttgcaagtcaggctgtggccgcttctgtgtcccaccagtcctgcccccaaaactgaccatgaaccccaactggactgtgaggtctgattccgaattaggtgagtacagtccattgtcatc

SEQ ID NO: 1630 - DNA, 462 bp, Homo sapiens
  MAP TO AP000402.1; EXPRESSED IN PLACENTA, SIGNAL =   3; EXPRESSED IN HBL100, SIGNAL = 2.1; EXPRESSED IN HELA, SIGNAL = 4.6; EXPRESSED IN BONE MARROW, SIGNAL = 4.1; EXPRESSED IN BT474, SIGNAL = 2.8; EXPRESSED IN FETAL LIVER, SIGNAL = 2.5; EXPRESSED IN HEART, SIGNAL = 2.9; EXPRESSED IN BRAIN, SIGNAL = 2.9; EXPRESSED IN LUNG, SIGNAL = 5.5; EXPRESSED IN ADULT LIVER, SIGNAL = 3.4
catcacatttatgtcaattgtctcctaatttgtctccccgttctgcccttgctctctattcagtatattttctccaagtaacaagaaatcttcagttaaggcagaagtcatgtctctcaaaaccatccattggtttcctgtttcagtcaccataacagtcaaagtccttagaattgtatatgaagcactctgtgcttacctctttattacacttttttttgtttcttttttaaaaattttttttaacttctttatttcaataggtgattggggaacaggtggtgtttgtttacatgaataagttctttagtgctgatttccgagatttcagtgcacccatcacccaagcagtgtacactgtactcaatgtgtggtcttctatccctcagccctactcccaccctttcccccaagtccccaacgtccatcgtatcattcttatgcctttgcatcctcatagct

SEQ ID NO: 1631 - DNA, 469 bp, Homo sapiens
  MAP TO AP000494.1; EXPRESSED IN BT474, SIGNAL =   3; EXPRESSED IN ADULT LIVER, SIGNAL = 3.1; EXPRESSED IN PLACENTA, SIGNAL = 2.9; EXPRESSED IN HBL100, SIGNAL = 2.2; EXPRESSED IN BONE MARROW, SIGNAL =   3; EXPRESSED IN FETAL LIVER, SIGNAL = 2.8; EXPRESSED IN HELA, SIGNAL = 2.8; EXPRESSED IN HEART, SIGNAL = 2.6; EXPRESSED IN BRAIN, SIGNAL = 2.8; EXPRESSED IN LUNG, SIGNAL = 2.4
aggtctgaggtcacactgggagagcaggtccatatcgggattggggctccagcaggatcagaatgacttcacccagacttctggacctggaactcattctcagaaccttccagaagaccctgccctggaattgctttcaagggtctttttcatctgtgtacagagtatatttccttggaggcagctttgctgaaggccccttgagtcaagggtaatagggtgggagcagctatacacagttgcatttcagtgtttgatgataaaatggtgtccgttggtgagcatcttggtggtgaggaagtttatacgaccacagatgcttctcaccccaaggtacccgtgccctgtgctgctggtgccactcatcctagggcattcctgcttggcagtagcagattctagattgtcctgtttgctggtttgggggctgcaggggtctgcagagtgccgcaaggaggaggagtcccag

SEQ ID NO: 1632 - DNA, 468 bp, Homo sapiens
  MAP TO AL035665.22; EXPRESSED IN PLACENTA, SIGNAL =   1; EXPRESSED IN HEART, SIGNAL = 1.1; EXPRESSED IN BONE MARROW, SIGNAL = 1.3; EXPRESSED IN BRAIN, SIGNAL = 1.1; EXPRESSED IN ADULT LIVER, SIGNAL = 1.1; EXPRESSED IN BT474, SIGNAL =   1; EXPRESSED IN FETAL LIVER, SIGNAL = 0.88
caagctccatgaacaagaacctcatctgacttgctcattgctgtaaatccaggctagcccagggcctggcacatagtaggtggtcagcaaatatttgtcaaatgatgaatttaggagtggccaaactcatcatccagtcagttacaaaaagtagcttgtgtcaagagtcactggggacatcatgtcactagacagcccagtataactgcctctgtgcctccaggctgagctgcctcagacagagcaagagaacgctagggaagtcaagcttcttctatcctgtagggtcattcccatggtgcttagtgggaagtctgggcttggtgacattatgtgtgggctcttgtcttcctatgtgagccctgcagggaaggcagtgtttccaggacagagcctgggtctgggagttgggaatcagagccttgctgacatagcttcaggacctaaggtggaaatgcagacatctct

SEQ ID NO: 1633 - DNA, 459 bp, Homo sapiens
  MAP TO AL031662.24; EXPRESSED IN HELA, SIGNAL = 2.8; EXPRESSED IN BONE MARROW, SIGNAL =   3; EXPRESSED IN LUNG, SIGNAL = 1.9; EXPRESSED IN BRAIN, SIGNAL = 3.1; EXPRESSED IN BT474, SIGNAL = 1.9; EXPRESSED IN PLACENTA, SIGNAL = 2.9; EXPRESSED IN HEART, SIGNAL = 2.1; EXPRESSED IN HBL100, SIGNAL = 2.3; EXPRESSED IN ADULT LIVER, SIGNAL = 2.2; EXPRESSED IN FETAL LIVER, SIGNAL = 2.1
cagggttcagagtgacgaggtgacctaagttccacagctagtacttgaatccataataggtcttttgctgccctcatctgacacagaatatagcactgaaccagtctgatgcaaataatcagtcattcagcctaccagtacatcagtagtccccaggctctgccccagttcccatcatgagccgcacgatttggcttgtggtaatgaaaatgcaaaccaaacaagatggacttattctggagctcagaagcttacccatgtcttctttcaattgttctaggaagagttacaggccaacctggacctgatccaaacctacagaatgcatattgcccaagacatcaaccaagacaacctgcagctcttcttgaattcctacaatgggtatagttttttcctgtttcttcacttaaatgtaaacaggttctaaaaagaggagggtgggagaaggagagagga

SEQ ID NO: 1634 - DNA, 391 bp, Homo sapiens
  MAP TO AL035078.32; EXPRESSED IN HEART, SIGNAL = 1.4; EXPRESSED IN LUNG, SIGNAL = 0.96; EXPRESSED IN BRAIN, SIGNAL = 1.2; EXPRESSED IN BT474, SIGNAL = 0.99; EXPRESSED IN FETAL LIVER, SIGNAL = 1.1; EXPRESSED IN ADULT LIVER, SIGNAL = 0.97; EXPRESSED IN PLACENTA, SIGNAL = 1.1; EXPRESSED IN BONE MARROW, SIGNAL = 1.3; EXPRESSED IN HELA, SIGNAL =   1
atgcattaggctcaagcagccctgctgtggggacccctagtaggatttaacacaaaagagggataggagctttctctcctatcttgaacagaactctgtaactctggtctgtgcctcaactgagctagaatgcctatggggagggagcagtacccagtggaaggagttgggagcaggagggtcaggaacaaatagcagatagagagatagcatgtagtcactgacaggtgagctgacccatcttgtttgtacacacatgtgatgcttctggaaaatcttgaagatattgttggccacagtcctacagtagcaagtggaggcaaaagtcatttaggcatcattcacaatgaaattattttggtactcctagacttgggagggatggagaaat

SEQ ID NO: 1635 - DNA, 448 bp, Homo sapiens
  MAP TO AF165140.1; EXPRESSED IN PLACENTA, SIGNAL = 1.4; EXPRESSED IN HEART, SIGNAL = 1.1; EXPRESSED IN LUNG, SIGNAL = 1.2; EXPRESSED IN BRAIN, SIGNAL =   1; EXPRESSED IN BONE MARROW, SIGNAL = 0.91; EXPRESSED IN BT474, SIGNAL = 0.98; EXPRESSED IN FETAL LIVER, SIGNAL =   1; EXPRESSED IN ADULT LIVER, SIGNAL = 3.5; EXPRESSED IN HBL100, SIGNAL = 1.1
tcggtgaattcagctattgttcttaatgtcttgtttgtaccccagaattatttgcatttgaaagtcttcagaactccatacccactccagctctatcacatgtgatcacttcaggaggtaactataaaggggaccctgctttattggccattcttagccaaatgggcattgatgttgaaaggggtccaggtagctagcctgtcaaatcttcacagtgctgtcccctccctgtctctccctactgccacactgaattccctcacctcacactgagttcactcacctttacgtatttcagcacatcttgttctttacctggaatgcccttccattcttcctccactacaggaatgcctgctcgtctttcagtacccagatcaaatggaagcctcgctgaactcccctggcaaactctctctcttcctgtctttccatggcaatttttaaa

SEQ ID NO: 1636 - DNA, 447 bp, Homo sapiens
  MAP TO AL049543.14; EXPRESSED IN FETAL LIVER, SIGNAL = 1.4; EXPRESSED IN ADULT LIVER, SIGNAL = 1.7; EXPRESSED IN HBL100, SIGNAL = 1.2; EXPRESSED IN HELA, SIGNAL = 1.6; EXPRESSED IN HEART, SIGNAL = 1.2; EXPRESSED IN LUNG, SIGNAL = 1.2; EXPRESSED IN BRAIN, SIGNAL = 1.4; EXPRESSED IN BT474, SIGNAL = 1.2; EXPRESSED IN PLACENTA, SIGNAL = 1.4; EXPRESSED IN BONE MARROW, SIGNAL = 1.7
ccagcctctggtaaccatccttctactctctatctccgtgagttcaattgttttgatttttagatcccacaaataagtgagaacatgcaatgcttgtctttctctgcctggcttatgagacttgattttttatttccaagttacaagaaccaagtttcagtcttgtcattgacactttagacaactcttatttgttttctagatcttggttagaacataactattctttgacttctttgaaagattacacagatgccaggaattattgttaccagtattatcacttaaaaaaaatcttccagatggattgccacaaagacgagaaaggcaccatctatgactatgaggccatcgcacttaataagaatgaatatgtttccttcaagcagtatgtgggcaagcacatcctcttcgtcaacgtggccacctactgtggtctgacagcgc

SEQ ID NO: 1637 - DNA, 446 bp, Homo sapiens
  MAP TO AL078602.10; EXPRESSED IN BONE MARROW, SIGNAL = 9.5; EXPRESSED IN LUNG, SIGNAL = 8.8; EXPRESSED IN FETAL LIVER, SIGNAL =  10; EXPRESSED IN ADULT LIVER, SIGNAL = 9.1; EXPRESSED IN PLACENTA, SIGNAL =  11; EXPRESSED IN HELA, SIGNAL =  12; EXPRESSED IN HEART, SIGNAL =  11; EXPRESSED IN BRAIN, SIGNAL = 7.5; EXPRESSED IN BT474, SIGNAL = 7.8; EXPRESSED IN HBL100, SIGNAL =  15
cctaaaggtgtcaagtatttttggggggctgtgacaagtcctaaaatcttaatgtttatgttaccacaagtgtcttattccatctgaatgggccctttggttaaatcttttaccaaatttgagaaattttcagtcattattcttcagttattttcttctgcctcactctcttttctctccttctgagactccaattgtacataaatatgtatatgattgtccaacagatctttcaggctctgattatgtttcttcaattaattttctctcagttctttagattgaataatttcgtctttttctgctgctgtctcttcttcctctttgtcttctttttcctcttcctgttcctcctcccctttttctccttcttcctcttcttccttctttcttcctcttcttccttctttcttcatcttcatcttcgtctcactctgccatccagg

SEQ ID NO: 1638 - DNA, 499 bp, Homo sapiens
  MAP TO AF165140.1; EXPRESSED IN FETAL LIVER, SIGNAL = 2.8; EXPRESSED IN ADULT LIVER, SIGNAL = 4.8; EXPRESSED IN HBL100, SIGNAL = 2.7; EXPRESSED IN HELA, SIGNAL = 3.1; EXPRESSED IN HEART, SIGNAL = 1.8; EXPRESSED IN LUNG, SIGNAL = 2.5; EXPRESSED IN BT474, SIGNAL = 3.3; EXPRESSED IN PLACENTA, SIGNAL = 3.7; EXPRESSED IN BRAIN, SIGNAL = 3.4; EXPRESSED IN BONE MARROW, SIGNAL = 5.5
gagatctattgtacattatggtgactgtagttaataacaatgtattgtatatttgaaaattgctaagagagtagattttaagtgttcttatcagaaaaacctaagtgtgtgaagtaatgcttatgttaattaacttgatttaaccattccacagtgtacacgtattccaaacgtcacattgagtcagggccagtggcacaggcctatagtcacagctacttgggaggttgagttaggaagatccctggagcctaggagttctagtccagcttgggcaacatagtgagaccccatctctatttaaaaaaaaaaaaaaaatccagcctgggcaacaagaaagaaactccacctcaaaacaacaacaacaacaacaacaacaacaaaccatgtggctgggtggaggggatcatgccagtgatctcaacatttggagacgccaaggtgggcagattgcttgagcccaggaggtcaagactgcagtaagccatgatggagccac

SEQ ID NO: 1639 - DNA, 378 bp, Homo sapiens
  MAP TO AL049597.17; EXPRESSED IN FETAL LIVER, SIGNAL = 1.3; EXPRESSED IN HBL100, SIGNAL = 1.3; EXPRESSED IN HELA, SIGNAL = 1.6; EXPRESSED IN PLACENTA, SIGNAL = 1.7; EXPRESSED IN HEART, SIGNAL = 0.93; EXPRESSED IN BONE MARROW, SIGNAL = 1.2; EXPRESSED IN LUNG, SIGNAL = 1.1; EXPRESSED IN BT474, SIGNAL = 1.2; EXPRESSED IN ADULT LIVER, SIGNAL = 1.1
ttcaaagtcactgcctaaaattgagattttttacaaggattctataaaagactgaaaaatatcattttaaaattggttaggtacatagctgtttatcacttcctcttcacaaaagcacacacaaaaaaacccactgaccttgaagctacaataaaaaaatcctatgttttcagatggccattaaaacttttttttttaacatttaaaaacccactaatagtacttaaggtacacaagaggtagagtttcttacttggatttggctgcaataacacttcagtttgtttcattattttttctgtccatattttggtacattcagctttgctaaggaggttctctaagtgagcatccaattctgtcttctcagcctggcca

SEQ ID NO: 1640 - DNA, 366 bp, Homo sapiens
  MAP TO AL096770.14; EXPRESSED IN PLACENTA, SIGNAL = 2.7; EXPRESSED IN HBL100, SIGNAL =   9; EXPRESSED IN HELA, SIGNAL = 6.6; EXPRESSED IN HEART, SIGNAL =   2; EXPRESSED IN BRAIN, SIGNAL = 1.4; EXPRESSED IN BONE MARROW, SIGNAL = 3.3; EXPRESSED IN LUNG, SIGNAL =   2; EXPRESSED IN ADULT LIVER, SIGNAL = 1.3; EXPRESSED IN BT474, SIGNAL = 7.7; EXPRESSED IN FETAL LIVER, SIGNAL = 3.3
tgttgctcacccctaggttcctccaaatagtaaacttgctttatttaatcctcacagtgtaaaattaaaaattcagaaaaattaattctgttattgttaaatttgcttcccagagcaatggagaatgtcactacaatgaatgagtttcttctacttggcctgactggtgttcaggagctgcagcctttcttctttgggattttcttaatcatttacctgataaacttgattggaaatggatctatattggtgatggttgttttggaaccacaactccactcccctatgtatttttttctgggaaacctttcttgtctggatatttcttattcttcagtgacactgcccaagctgctcgtaaacctc

SEQ ID NO: 1641 - DNA, 350 bp, Homo sapiens
  MAP TO AL023583.13; EXPRESSED IN BONE MARROW, SIGNAL = 0.95; EXPRESSED IN BT474, SIGNAL = 1.3; EXPRESSED IN FETAL LIVER, SIGNAL = 0.9; EXPRESSED IN HELA, SIGNAL = 1.8; EXPRESSED IN PLACENTA, SIGNAL = 1.3; EXPRESSED IN HBL100, SIGNAL = 1.5; EXPRESSED IN HEART, SIGNAL =   2
ggcttggttgtttcgttttgttctgttttcattttttcaaatagaagaaaactaaggcctagagaggttaagggtcctgaccaatgcagcgtagaattagggttttagaactgagactaaagcccaggcctccatagtcttacccaggtttccctgtgactgcaccccgttgggaaggagctataggatggtgagcagaggggacgtgctgtggtctaacgctgtgactctcttcattttaaaagcatgcccagcaagatcgggcccttacccagacagacaggaagatcgaaactgaggttgctggcctcaaaaccatgcttgagtcacacaagcttgataatattaaa

SEQ ID NO: 1642 - DNA, 497 bp, Homo sapiens
  MAP TO Z98044.10; EXPRESSED IN PLACENTA, SIGNAL = 1.4; EXPRESSED IN HELA, SIGNAL = 1.6; EXPRESSED IN HBL100, SIGNAL = 1.8; EXPRESSED IN HEART, SIGNAL = 1.3; EXPRESSED IN BONE MARROW, SIGNAL = 1.3; EXPRESSED IN LUNG, SIGNAL = 0.96; EXPRESSED IN BRAIN, SIGNAL =   1; EXPRESSED IN ADULT LIVER, SIGNAL = 1.6; EXPRESSED IN BT474, SIGNAL = 1.5; EXPRESSED IN FETAL LIVER, SIGNAL = 1.2
aaaccacacaccgtatgatcctatatgtacaaaatatccagaacaggcaaccccgcagagagaatgcatttctgtggttgccaggagctggggagagggggaaattgtgggatgacaacgaaggggtacagggcttcctttgccgtgatgaacatgtcctaaaattgattgtggtactgacacacaactctgtgaatacacgaaagctcactggcctgtccaccttaactgggtaaagtgtagtaggatttgtgagttacagctcaataaaactttttaaaaaaggttttagaacagggaagcagaagcacgaaagaggtacttcaggaagatgaagctgtctgcgacctccaagatgaacaggatgggactggtggtagtgaaatcagtgaggcagcctttgctgccatcaaaggaagtaacaaaggtaggagggaacgaagtcacagtgaactgcaaagaagttattatagcagatgaatacaaactacttggtg

SEQ ID NO: 1643 - DNA, 474 bp, Homo sapiens
  MAP TO AL078621.19; EXPRESSED IN BT474, SIGNAL =  36; EXPRESSED IN ADULT LIVER, SIGNAL = 6.9; EXPRESSED IN FETAL LIVER, SIGNAL = 8.5; EXPRESSED IN HELA, SIGNAL =  37; EXPRESSED IN PLACENTA, SIGNAL =  23; EXPRESSED IN HBL100, SIGNAL =  32; EXPRESSED IN HEART, SIGNAL = 6.8; EXPRESSED IN BRAIN, SIGNAL =  11; EXPRESSED IN BONE MARROW, SIGNAL =  13; EXPRESSED IN LUNG, SIGNAL =  20
gcataaattcctattctgcttgagttctagtcaaataagctaatattatacttactagaaacgtaaaatcttaaagcttatagatttgattctaattaagttgtcattcttatgaaaaacattatttttttatgctgaaaagatacacatatatttagagttagccagctggactcagtttaggtgatcccaattttgttacaacatcgaaagcatcataatcaggagcaagtcgaacatatgccttcttctctttatcaggacaaatcagggtggtgaccttggccacatcactgtcatagagcttcttcacagcctgtctgatctggtgcttgttggctttaacatccacagtgaacacaagcgtgttgttttcttctatcttcttcacggccgactcagtggtcagcggaaacttgatgatagcatagtggccaagcttgtttctcctgggggtgctcttctgaggctatc

SEQ ID NO: 1644 - DNA, 472 bp, Homo sapiens
  MAP TO AL117258.1; EXPRESSED IN LUNG, SIGNAL = 1.5; EXPRESSED IN BRAIN, SIGNAL = 1.2; EXPRESSED IN BT474, SIGNAL = 5.6; EXPRESSED IN FETAL LIVER, SIGNAL = 1.4; EXPRESSED IN ADULT LIVER, SIGNAL =   1; EXPRESSED IN PLACENTA, SIGNAL = 2.6; EXPRESSED IN HBL100, SIGNAL = 4.6; EXPRESSED IN HEART, SIGNAL =   4; EXPRESSED IN BONE MARROW, SIGNAL = 1.8; EXPRESSED IN HELA, SIGNAL = 3.1
aaataggagtccagttgacatgctattaatgttgaaataaccatgcctgtactggtcagtgagttcggtcagctggttggaataccagttccagagctttaggcgacacatttgaattgagttatcattgtagagagtcatggctccatcagctatggttatcttctttggtctgaatgcctatcagtccttaccagctgtagcagccactgcttggtaaaactttgccacgaagtctggctcactgaactccagctgtctgacaaattcattgcgctcctgctcagcccagcctcgaaaccactgatcccaaagatgtagctggcactcaaagatagaaggtggtcggtctgccccagacacactaagctgctccagactatccagcagtggttgtaatttttctggcactgccttagctaccaggtcctctaggaaacgttcacgctggggacctgaccaattggcaaac

SEQ ID NO: 1645 - DNA, 474 bp, Homo sapiens
  MAP TO AC011506.1; EXPRESSED IN HELA, SIGNAL =  13; EXPRESSED IN LUNG, SIGNAL = 0.97; EXPRESSED IN BRAIN, SIGNAL = 1.7; EXPRESSED IN BT474, SIGNAL = 2.6; EXPRESSED IN ADULT LIVER, SIGNAL = 1.1; EXPRESSED IN PLACENTA, SIGNAL = 1.3; EXPRESSED IN HEART, SIGNAL = 1.3; EXPRESSED IN HBL100, SIGNAL = 3.3; EXPRESSED IN BONE MARROW, SIGNAL = 1.8; EXPRESSED IN FETAL LIVER, SIGNAL = 0.91
cctctgtgtgtcagacgcccttgcatgtgtcaaatgtcatctgataacattgatgaaaaatatcattcacttcttcttggtgcagaaggcatagaccggattatgcaatcactgagaagtagcttctggatgtgttttctggtggcgtcttaacaatttcagccgactgaaggctcttggacacttggaacatttgtagggtttctctccggagtggatgcgctggtgctccttcaggctccccctgtaggtgaaaactttcttgcagtctttacattcgaagggcttctcccctgtgtggcttctcttgtgacacttcaagtaggacttctgggtgaactgcttctggcagacgtcacacgtgtagggcctctcgccagtgtgggttcgctggtgaaattggaggctaataagctgcatgaagcgcttcccacagagattacattgaaagagtctctcgcctgtgtgtgatct

SEQ ID NO: 1646 - DNA, 471 bp, Homo sapiens
  MAP TO AF159056.1; EXPRESSED IN BONE MARROW, SIGNAL = 3.6; EXPRESSED IN LUNG, SIGNAL =   3; EXPRESSED IN FETAL LIVER, SIGNAL = 2.5; EXPRESSED IN ADULT LIVER, SIGNAL = 2.4; EXPRESSED IN PLACENTA, SIGNAL = 2.8; EXPRESSED IN HBL100, SIGNAL = 2.4; EXPRESSED IN HELA, SIGNAL = 3.2; EXPRESSED IN HEART, SIGNAL = 3.3; EXPRESSED IN BRAIN, SIGNAL = 2.6; EXPRESSED IN BT474, SIGNAL = 2.2
gaggatcatgggttttgttttctttattttcttcttttgcaaggattgccatactaaggaattcctcattatattttgtgttgttcccattgcagccagtcagaaatcttccaacttggaagggagaacgaagtcagtcatcaggcagactgggtcatctgctgaaatcacttgtgatcttgctgaaggaagtaccggctacatccactggtacctacaccaggaggggaaggccccacagcgtcttctgtactatgactcctacacctccagcgttgtgttggaatcaggaatcagcccagggaagtatgatacttatggaagcacaaggaagaacttgagaatgatactgcgaaatcttattgaaaatgactctggagtctattactgtgccacctgggatgggcacagtgattcagatccgccctacaccacactgaaaacctgccttgtggctgcttctggtacaca

SEQ ID NO: 1647 - DNA, 466 bp, Homo sapiens
  MAP TO AP000459.2; EXPRESSED IN FETAL LIVER, SIGNAL =  20; EXPRESSED IN HBL100, SIGNAL = 1e+02; EXPRESSED IN HELA, SIGNAL =  60; EXPRESSED IN HEART, SIGNAL = 6.5; EXPRESSED IN BONE MARROW, SIGNAL =  25; EXPRESSED IN LUNG, SIGNAL =  14; EXPRESSED IN ADULT LIVER, SIGNAL = 4.2; EXPRESSED IN BT474, SIGNAL =  61; EXPRESSED IN PLACENTA, SIGNAL =  23; EXPRESSED IN BRAIN, SIGNAL =  50
tccatttactcagcaaccccccatcctccaagtttccacagcagtagttgagctctacgactccattctcaccacccacaccaccctggagcactcagattgtgccttcatagtagacagtgaggccatctatgacatctaccatttggttatccaatgatatagttcatataggaaaggttgaaaaatcaccttgaccctttctatcatttaatcagttttccaaaagtgatttggatgacttttggaaagctcaatattgagtgtccaaactacactaaccttaaccatctcattggccatattgtgtcctctatcactgcttccctcagatttgatggagccctgaatattgatctgacagaattccagaccaatctagtgccatatacccacatccacttccctctggccatgtgtgcccctgtcatctctgctgaaaaagcctaccatgaacggttttctg

SEQ ID NO: 1648 - DNA, 457 bp, Homo sapiens
  MAP TO AC005082.2; EXPRESSED IN FETAL LIVER, SIGNAL = 7.1; EXPRESSED IN ADULT LIVER, SIGNAL = 2.1; EXPRESSED IN HBL100, SIGNAL =  11; EXPRESSED IN HELA, SIGNAL = 8.4; EXPRESSED IN HEART, SIGNAL = 5.5; EXPRESSED IN LUNG, SIGNAL = 5.1; EXPRESSED IN BT474, SIGNAL =  11; EXPRESSED IN PLACENTA, SIGNAL = 5.1; EXPRESSED IN BRAIN, SIGNAL = 4.3; EXPRESSED IN BONE MARROW, SIGNAL = 5.9
tctagggtaatacacagcaaaagagtggctatctatgagtgatagaattgtgggtgatttttcttctttttgctactctgatttaaaaataatgcattatttctttttttaaagaaaatattgtattgtgaaaagatgttacaaaaaaagagaaacaacaaagattgtaggtgaaaaaacataagcaaatggatagtaattttcctgaaaactttcacttacagaagtttcttttcatctttctgctcatcaggactaagtgaagcaaatgggttctcagacaatccaaagccttccttcctgttagttgaagctccagaatcaaaagaactgaaatatggcttttcttgatctctgctgcccccccatggtgtggatttggagaaactggatggctggatgacattggaatatctctggctagttgtattccatccacgtctattattacctaaaa

SEQ ID NO: 1649 - DNA, 466 bp, Homo sapiens
  MAP TO AC009961.2; EXPRESSED IN BONE MARROW, SIGNAL =   2; EXPRESSED IN LUNG, SIGNAL = 2.3; EXPRESSED IN BRAIN, SIGNAL = 0.99; EXPRESSED IN FETAL LIVER, SIGNAL = 1.6; EXPRESSED IN ADULT LIVER, SIGNAL =   2; EXPRESSED IN PLACENTA, SIGNAL = 1.4; EXPRESSED IN HEART, SIGNAL = 1.1
tgcgtgatttccactatggggtcttcagtagagtggagaagtgcacaacttcctagaaaatttgagtactattcttcaggctaagaaatataaatcttgttagtaacaaatgcgaaatttttggttttctcatcagtgtgggaaattctcaacacagagaaatgtttacacaaaactacagttgtgctcatcaaaatatacttgcaacttgtgtaccctaatttcccaaatactcttttgtcttttccttttcagataaccacattttaatatcagcattggtgattgctagcacggtaattttgacagttttgggagcaatcatttggttcctgtacaaaaaacattctgattctcgtttcaccacagttttttcaaccgcaccccaatcaccttataatgaagactgtgttttggtagttggagaagaaaatgaatatcctgttcaatttgactaagtttttgg

SEQ ID NO: 1650 - DNA, 456 bp, Homo sapiens
  MAP TO AF146367.1; EXPRESSED IN HBL100, SIGNAL = 2.1; EXPRESSED IN BONE MARROW, SIGNAL = 1.7; EXPRESSED IN LUNG, SIGNAL = 1.2; EXPRESSED IN FETAL LIVER, SIGNAL = 1.4; EXPRESSED IN ADULT LIVER, SIGNAL = 1.2; EXPRESSED IN PLACENTA, SIGNAL = 2.1; EXPRESSED IN HEART, SIGNAL = 1.6; EXPRESSED IN HELA, SIGNAL = 2.2; EXPRESSED IN BRAIN, SIGNAL = 1.8; EXPRESSED IN BT474, SIGNAL = 3.3
ttcccacactctgcacattcgtacggcttctctccatggcagttatttgtatgtttcccctgcaagcagtcagataactttttttggcattcttgacatctgctaattttctgtgtattaatttcccaatgcagagcgatatctgaagtggctctgatgcctttgccacactcctcgcatctctgggacatcccttccgcactctctctctgactttcaagaggctgacaatccaggccgctgcttcccagctccttacatccctggggtgcgtccttggtgaaggtcttgggaaccacagtctcctcattcaaacagttattttggaaggtaaagcctgtcactttcagcccgggactgcccagatgactgtctaaccagacctcagaatcagaaacgtctccaaagccaggattctgaggaaagtcctgtggggagattctgaccactgtccca

SEQ ID NO: 1651 - DNA, 465 bp, Homo sapiens
  MAP TO AP000354.1; EXPRESSED IN HBL100, SIGNAL = 2.1; EXPRESSED IN HELA, SIGNAL = 2.3; EXPRESSED IN BONE MARROW, SIGNAL = 2.9; EXPRESSED IN LUNG, SIGNAL = 2.5; EXPRESSED IN ADULT LIVER, SIGNAL = 2.3; EXPRESSED IN FETAL LIVER, SIGNAL = 2.4; EXPRESSED IN PLACENTA, SIGNAL = 3.6; EXPRESSED IN HEART, SIGNAL = 4.9; EXPRESSED IN BRAIN, SIGNAL = 3.6; EXPRESSED IN BT474, SIGNAL = 2.6
caggaaggaggacagcagactttaggaccccacagcatggcagtgctgaccatttcacccacttggcctccttgaggaatagggatggggagccctctggggatgagcaaggccttccaggacaggctcggttctggtcccctgctttttgaggttgggttaaaatgccgaccatggcagaggggtcacagctcaggttcccacacctcacttttcacagcctccaagggcagcagtgcacatggaggagacgtctcccacgaggccaaggcctccaatgctcaccgatgccctctgcgaagctggggtagaactcgtcagtgaagaggggctcaggcagctcacggaagtacagcttcagcgtgcctgcgatggcgttcatgtccgtctcgctcatcatcaccgacatgtccttcttatctggaaagagcacggaaatgcagcggcctccttgaagatcctgag

SEQ ID NO: 1652 - DNA, 465 bp, Homo sapiens
  MAP TO AC011019.1; EXPRESSED IN BONE MARROW, SIGNAL = 1.5; EXPRESSED IN BRAIN, SIGNAL = 1.4; EXPRESSED IN BT474, SIGNAL =  46; EXPRESSED IN FETAL LIVER, SIGNAL = 6.8; EXPRESSED IN HBL100, SIGNAL =  27; EXPRESSED IN HELA, SIGNAL =  39; EXPRESSED IN HEART, SIGNAL = 1.2; EXPRESSED IN LUNG, SIGNAL =  11; EXPRESSED IN ADULT LIVER, SIGNAL =  12; EXPRESSED IN PLACENTA, SIGNAL =  64
tgaagaagcacgaagaggaagtaaaaggtctacaagcccagattgccagctctgggttgaccatggaggtagatgcccccaaatctcaggacctcgccaagatcatggcagacatccgggaccaatatgatgagctggctcggaagaaccgagaggacctggacaagtactggtctcagtagattgaggagagcaccacagtggtcaccacgcagtctgtcgaggttgcagctgctgagatgatgctcatggagctgagacgtacagtccagtccttggagactgacctggactccatgagaaatctgaaggccagcttggagaacagcctgagggacctggaggcccgctacaccctgcagatggagcagctcaacgggatcctgctgcacctggagtcagagctggcacagacccaggcagagagacagcgtcaggcccaggagtaagaggccctgctgaaca

SEQ ID NO: 1653 - DNA, 454 bp, Homo sapiens
  MAP TO AP000163.1; EXPRESSED IN PLACENTA, SIGNAL = 2.4; EXPRESSED IN HBL100, SIGNAL = 1.4; EXPRESSED IN HELA, SIGNAL = 1.7; EXPRESSED IN HEART, SIGNAL = 0.92; EXPRESSED IN BONE MARROW, SIGNAL = 2.1; EXPRESSED IN LUNG, SIGNAL = 1.8; EXPRESSED IN BRAIN, SIGNAL = 1.5; EXPRESSED IN ADULT LIVER, SIGNAL = 1.5; EXPRESSED IN BT474, SIGNAL =   1; EXPRESSED IN FETAL LIVER, SIGNAL = 0.95
ttcctcttgaggcacttttgattcatgttctccgatagagtttgtggcgatgggctggtgaatgcacgctgatgggaaaagcctccgccaggtctttagtagtaagtgcccagatgagaaggcatatggctggtggggagcctagtgttggggtatatacccccagttggtgaattccagtatgggtttggggcagcaaaaaaactggaagatgtcacggggagggctggagggtggggcgccacaaagttcatcttctgtgggtgggcgtgataggagcccatgtacgggaggtctgaggggtacttgtacagagatgactccggggggtggggctggagggcctgggcgatcccgtggaagtcgaacttgtaggcgtagcgcttcccatggaccttggtcatgatgttcttgtcatagtagtaacggagggcgcggctgagcttatcgtagt

SEQ ID NO: 1654 - DNA, 464 bp, Homo sapiens
  MAP TO AL109615.8; EXPRESSED IN HBL100, SIGNAL = 3.8; EXPRESSED IN PLACENTA, SIGNAL = 4.5; EXPRESSED IN HELA, SIGNAL = 4.3; EXPRESSED IN HEART, SIGNAL = 4.4; EXPRESSED IN BRAIN, SIGNAL = 3.4; EXPRESSED IN BONE MARROW, SIGNAL = 3.9; EXPRESSED IN LUNG, SIGNAL = 3.4; EXPRESSED IN ADULT LIVER, SIGNAL = 3.6; EXPRESSED IN BT474, SIGNAL = 3.4; EXPRESSED IN FETAL LIVER, SIGNAL = 3.8
gacatataataggtgctccagaaacatagttctaatttccctgctctttaatgtttatgggtaaacacatgttttccatttaaaaaactgaaattttggagtccttttgaccccaaagcacgactagcttcttgctgtccaggtttccactcaaatgtcaccacctcaccaagatatttttggaccaccccatataaaacagcgcccccaccccaccccatcgctctccactctaatacttgccacaccatgacctgagctttatgattttttcacttgttgatcatctgtctttctctgcctagaatgtgagcaccatgaaggcagagaacttggctgattttttcattgctgtagcctcagtgcccagagccgtgcctggcaacatagcggctgtctaggggtttccagggccaaggctgtgaagtctctaggcactctctggggacaaatgccagaaagag

SEQ ID NO: 1655 - DNA, 453 bp, Homo sapiens
  MAP TO AP000513.1; EXPRESSED IN BT474, SIGNAL =   3; EXPRESSED IN ADULT LIVER, SIGNAL = 2.4; EXPRESSED IN FETAL LIVER, SIGNAL = 2.4; EXPRESSED IN HBL100, SIGNAL = 3.5; EXPRESSED IN HELA, SIGNAL = 2.8; EXPRESSED IN PLACENTA, SIGNAL = 2.8; EXPRESSED IN HEART, SIGNAL = 1.8; EXPRESSED IN BRAIN, SIGNAL = 2.2; EXPRESSED IN BONE MARROW, SIGNAL = 3.2; EXPRESSED IN LUNG, SIGNAL = 2.1
caagccagtggagagtcctggagatcctaaccaactgacccggaaaggcaggaagaggaaaagtgtgacatggcctgaggaaggcaaactgagagaatatttctattttgaattggatgaaactgaacgaggtaagaggtcatttcctacgtaataggtgtgtttaagggattttgaaaggacttggttgtgcttactttccctcttgcttttcttcccctgccgacagtaaatgtgaataagatcaaggactttggtgaggccgctaagcgagagatactgtcagaccgacatgcatttgagacagcgcggcgtctgagccatgataacatggaggagaaggtgccctgggtgtgcccccggcccctggttctgccctcacctcttgtcacccctggaagcaatagtcaggagcgatatatccaggctgagcgggagaagggaatccttcag

SEQ ID NO: 1656 - DNA, 451 bp, Homo sapiens
  MAP TO AC008134.3; EXPRESSED IN BT474, SIGNAL = 2.2; EXPRESSED IN FETAL LIVER, SIGNAL = 2.5; EXPRESSED IN PLACENTA, SIGNAL =  11; EXPRESSED IN HBL100, SIGNAL = 4.3; EXPRESSED IN HELA, SIGNAL =  10; EXPRESSED IN HEART, SIGNAL =   2; EXPRESSED IN BRAIN, SIGNAL = 5.6; EXPRESSED IN BONE MARROW, SIGNAL = 4.1; EXPRESSED IN LUNG, SIGNAL = 4.9; EXPRESSED IN ADULT LIVER, SIGNAL = 9.5
gcattttcttctgcaatgccgcttgaccccaatacaaactcgacagtagttccaaatagccagaaaatggcactttaaatttttccatcctgcaaaatctaaataattcttgtcgtaaaataggcaaacggtctgaggtgcctgacgtccaggcattcttttacacatcagtcccttcctggtctctgtgcccagtgcaactcatcccaaatcttccctctttccctcccgcctgtcccctcagtaccaaccccaagcatcactgagtctttctaatcttccttttttacagacccatctgacctctcccctcctccccaggctgctcctcgccaggccgagctaggtcccaattcttcctcagcctctgctcctccaccctataatctttttatcacctcccctcctcacacctggtccggcttacagtttcgttccgagactagccctc

SEQ ID NO: 1657 - DNA, 449 bp, Homo sapiens
  MAP TO AF165124.1; EXPRESSED IN BRAIN, SIGNAL = 3.2; EXPRESSED IN LUNG, SIGNAL = 1.2; EXPRESSED IN BT474, SIGNAL = 1.8; EXPRESSED IN HELA, SIGNAL = 1.6; EXPRESSED IN PLACENTA, SIGNAL = 3.2; EXPRESSED IN HBL100, SIGNAL = 1.3; EXPRESSED IN HEART, SIGNAL = 1.1
tttggtttgaatgttcttgctctaattttactttgccttgcaggtttgaaacacagcaaacatcgaagttcaaagtacactaaccaaaggagggctgggcacaaacaatatgacattataaaatttaccaggtttggacatagaaacagattcagatcattatcaaccacatagaggattatttaagtggacttagaacagacatctctccatgagactcagtgaataagaaccatatcagtaaaacccatacctcctcacaggtagaggtaggagacccaatagaccagattaaacaggcagaaggcagtggggaagaagatccgagcataggagtccattttggcaatgcggatatgtatcctcccatgtctccaagctcctgttcgacaatcttcaaaacagcagaaaaaactggcacagtccttgccgtccagacactcatagcc

SEQ ID NO: 1658 - DNA, 466 bp, Homo sapiens
  MAP TO AC004900.2; EXPRESSED IN ADULT LIVER, SIGNAL = 3.7; EXPRESSED IN BT474, SIGNAL = 4.1; EXPRESSED IN FETAL LIVER, SIGNAL = 4.4; EXPRESSED IN PLACENTA, SIGNAL = 7.1; EXPRESSED IN HBL100, SIGNAL = 3.1; EXPRESSED IN HELA, SIGNAL = 4.4; EXPRESSED IN HEART, SIGNAL = 5.9; EXPRESSED IN BRAIN, SIGNAL = 4.4; EXPRESSED IN BONE MARROW, SIGNAL = 3.1; EXPRESSED IN LUNG, SIGNAL = 2.5
actcaggaggtcttgggtccagtgtgggaatctgttatttctagcaagcaacccaggtgactatggtggtctgggattacaggagagagagggcaaatgaggaaggggcgggtgagctgagaccatctgagcatggatacaggacccctctctgagcacatgagtggcagccacgtctggggacactgaccatcatcaacagggccatccaggctgcagctgaaagaccacttaccatgcagcgatttcattcctaaggtgtaagaaggcctcctcaacgggagcgacttggggagagaagggtacgtgctactgaagaggacgtcgttgggcagggcttggtccagaagtgacgccctggaggtgaaaaagtgctccctctggctattgtaaatgctctcgtccgacagtgttctgtgcaaggcccgccgtgaggtgggggtgctggggaaaggagactgaggag

SEQ ID NO: 1659 - DNA, 455 bp, Homo sapiens
  MAP TO AP000353.1; EXPRESSED IN BONE MARROW, SIGNAL = 5.2; EXPRESSED IN LUNG, SIGNAL = 2.9; EXPRESSED IN BT474, SIGNAL =   5; EXPRESSED IN ADULT LIVER, SIGNAL = 3.7; EXPRESSED IN FETAL LIVER, SIGNAL = 3.7; EXPRESSED IN HELA, SIGNAL = 4.6; EXPRESSED IN PLACENTA, SIGNAL = 4.3; EXPRESSED IN HBL100, SIGNAL = 8.7; EXPRESSED IN HEART, SIGNAL =   3; EXPRESSED IN BRAIN, SIGNAL = 3.2
atagaggggccggttcaggaccaccaggggctctgggaaagggggttagggatgaggctcagcctctcatctgcccagctggtccccgccacctcttccactctcagctggactcccctgccaggggtccagatcctgccagagtagttggtcccccagccatgtccggcctggacacaggactcatggtggggccagacttcagctctgggcagagcagtgtcttagtagcctgcggcctccccactcttcctcaggtccgagacggcgtacacacaggccccctcctgggacacagcctggaccacgttcaggaagaagggcctctgggtctggttctggccacggtcttggagtcccctctgcacctcctggagaggagagaaagcaggttcacaggggagggcagctcagcccatctccaggagggagaggcctctgcaagaaatgagaaa

SEQ ID NO: 1660 - DNA, 465 bp, Homo sapiens
  MAP TO AL096819.2; EXPRESSED IN BRAIN, SIGNAL = 1.2; EXPRESSED IN BONE MARROW, SIGNAL = 2.1; EXPRESSED IN LUNG, SIGNAL = 1.2; EXPRESSED IN BT474, SIGNAL = 2.1; EXPRESSED IN FETAL LIVER, SIGNAL = 1.5; EXPRESSED IN ADULT LIVER, SIGNAL = 1.5; EXPRESSED IN HELA, SIGNAL = 1.4; EXPRESSED IN PLACENTA, SIGNAL = 2.2; EXPRESSED IN HBL100, SIGNAL = 1.8; EXPRESSED IN HEART, SIGNAL = 1.8
ttgagcattcgctagaagtccagttctcaatctgaatcaaaagtggtttatagaatagcgaaagtgacattgataaaaaatacggataagttattttcagaaatactatttctgaaagtattatttttgagtacaaataaggtcataaatacttggtggtgacctaaagtgaaagaagaagttgtagagtagaatactacagtacagtgtctttaggaaatcaaaaaattggtggaagtttccagaaaggaaggataaaatgaatttgtttttttcataggctgctagttcaatcgacgctgaagatgggttgaggttcatgcaggagatgattgaattgtcaagtcagcaacaaaaagaacagcagctgcctccacgagctgtacaaattgtttcccacccattttttggcagggtagtattgactgctggaccagctcagtttgggctggatctgtctaaaca

SEQ ID NO: 1661 - DNA, 454 bp, Homo sapiens
  MAP TO AL021807.1; EXPRESSED IN ADULT LIVER, SIGNAL = 2.2; EXPRESSED IN PLACENTA, SIGNAL =  10; EXPRESSED IN HBL100, SIGNAL =  19; EXPRESSED IN HELA, SIGNAL = 5.5; EXPRESSED IN BONE MARROW, SIGNAL = 7.3; EXPRESSED IN BT474, SIGNAL =  11; EXPRESSED IN FETAL LIVER, SIGNAL = 6.6; EXPRESSED IN HEART, SIGNAL = 1.2; EXPRESSED IN BRAIN, SIGNAL = 1.3; EXPRESSED IN LUNG, SIGNAL = 3.1
ggcgcgaaaaagaagatatgtcattggttagggttgtagcttagttttaaccaatggaagtacgtcttttggatttgcagattgggttgattgggtataactaacctctgacgtcaccctaataaccaccaatcagatacaggactttcactcttcaccttatttgcatgagaggtcctatataaaaacgactcctggtaccttgctcccattacttcccgttttctcgatctgctgctcgtctcaggctcgtagttcgccttcaacatgccggaaccagcgaagtccgctcccgcgcccaagaagggctcgaagaaagccgtgactaaggcgcagaagaaggacggcaagaagcgcaagcgcagccgcaaggagagctactccgtatacgtgtacaaggtgctgaagcaggtccaccccgacaccggcatctcctctaaggccatgggaatca

SEQ ID NO: 1662 - DNA, 453 bp, Homo sapiens
  MAP TO AC008072.2; EXPRESSED IN LUNG, SIGNAL = 5.1; EXPRESSED IN BRAIN, SIGNAL = 5.2; EXPRESSED IN BT474, SIGNAL = 4.2; EXPRESSED IN FETAL LIVER, SIGNAL = 5.6; EXPRESSED IN ADULT LIVER, SIGNAL = 9.1; EXPRESSED IN PLACENTA, SIGNAL =  17; EXPRESSED IN HEART, SIGNAL = 2.2; EXPRESSED IN HBL100, SIGNAL = 6.4; EXPRESSED IN BONE MARROW, SIGNAL =   5; EXPRESSED IN HELA, SIGNAL =  11
tgacacctctgaaacctgggtgaataatcagagaggtgtccctgcaatgattaaacaccaagggaaggctgccttctcagtccgtgactggtgccggagttttgggtccacagataaaacgtgtctcctttgtctctaccagaaaatgaaaggaattgaaattaaaagaaaggagagattgaagtgtggtgccaagattgaaaggagaaagaagttgagggatagtgagggaggttggagaagagagtaaaaagaggccgcttactggatttgaaattggtgagatgtttcttgggctggtcggtctgaggaccaaggtcgtaggtggatctttctcttggaacaaagaacaggaggacaggggattgatctcccaagggtggtcccccgatccgagtcacagcaccaaatttcatgcgtgtctgtgtgaagagaccaccaaacaggctttgt

SEQ ID NO: 1663 - DNA, 463 bp, Homo sapiens
  MAP TO AP000511.1; EXPRESSED IN HELA, SIGNAL = 8.8; EXPRESSED IN PLACENTA, SIGNAL =  13; EXPRESSED IN HBL100, SIGNAL = 9.2; EXPRESSED IN HEART, SIGNAL = 9.2; EXPRESSED IN BONE MARROW, SIGNAL = 8.8; EXPRESSED IN LUNG, SIGNAL = 8.5; EXPRESSED IN BRAIN, SIGNAL = 8.1; EXPRESSED IN ADULT LIVER, SIGNAL = 6.9; EXPRESSED IN BT474, SIGNAL = 8.7; EXPRESSED IN FETAL LIVER, SIGNAL = 8.6
cagaggtgccattgtgtcctcttgttttagtgtcactggcttcccctggatcgctccctgagggaggggcagctggatgtgtgattcacaccgtgttgagtgcatcctctgccaggaaccgatgcagctgggaaaagggtggtcgctgctcagactcccggctccagcaccgaagcatcagctcatataggccctgcgggcaggcaggcggccgggacaggtacacctgcattgtggcagtgtggatgagagtcagggaacaaatattctttagtctccaagatgacaactctgccccttctgtcccccgcctcggacccatcttccctctcctccactctgacctgccggccctggtcccggaagaactcccccgcgttctcgatgacctgctcgtcggtgagctgcccaaagggctgggccctacagagcatcagcacctcccacagggtcacaccaaagg

SEQ ID NO: 1664 - DNA, 451 bp, Homo sapiens
  MAP TO Z83840.7; EXPRESSED IN ADULT LIVER, SIGNAL = 9.5; EXPRESSED IN BT474, SIGNAL =  38; EXPRESSED IN FETAL LIVER, SIGNAL =  20; EXPRESSED IN PLACENTA, SIGNAL =  21; EXPRESSED IN HELA, SIGNAL =  18; EXPRESSED IN HBL100, SIGNAL =  65; EXPRESSED IN HEART, SIGNAL = 7.9; EXPRESSED IN LUNG, SIGNAL = 9.1; EXPRESSED IN BONE MARROW, SIGNAL =  28; EXPRESSED IN BRAIN, SIGNAL =  14
aaggcttttgtgccaaagtggccacgtgtgtcaaagtcagggaatccctcctcctgggagccaagaggaagtctctcacaactagaagggaaagatgtttccccacatcagtccagctgtgaagacattctattagtgacatatgccccttccccaaaatataacagtgaagtgttctgtgtgctaacaacatagcttaaaaaaattctgcatttttataaaacttgataaaaaatagtatttcaaactgtacagtcaccagaagtacacagttaccaaaaatgtacacacttcacttggcatctccagcaccttcagctttctgtgcctggtctgtcttggcatctccattttctgcagggttattcccttccttgccagcatccacttttccctttttccctttgggtaccttctcttctttgcaggggcctttttaggcttgggctct

SEQ ID NO: 1665 - DNA, 462 bp, Homo sapiens
  MAP TO AP000508.1; EXPRESSED IN HELA, SIGNAL =   2; EXPRESSED IN LUNG, SIGNAL =   1; EXPRESSED IN BRAIN, SIGNAL = 1.1; EXPRESSED IN BT474, SIGNAL = 1.6; EXPRESSED IN ADULT LIVER, SIGNAL = 0.96; EXPRESSED IN PLACENTA, SIGNAL = 2.2; EXPRESSED IN HEART, SIGNAL = 0.98; EXPRESSED IN HBL100, SIGNAL = 1.9; EXPRESSED IN BONE MARROW, SIGNAL = 1.2; EXPRESSED IN FETAL LIVER, SIGNAL = 1.3
acgggaagtccacagatgtctgtaatttttgtttccacctgccattgtaggaaaaatgtttcagatgcactaaaagcacaggtggtaacttccagatttcttttttaagaatcccgtcgagctctgcaaagattgcagtaaaatctgttattatctatgagtttttcttctttagaaaataatctaaggcaatcctataatgtacatttacttgtggatgctatcagtagagacaaatacatgaaggcctcaagtgtcctagactttttgtgacgggtgaggcactgtactgtagatttgaattgaccctgaaaaagtgcaacaataatagactcatagagccgcttgtgtttctgccaggcatgttctgcagctttaaagtcattgagatgatcattattttcttctttatatgtcttccgattatcagttttatttagatcttcacggagaccatccatt

SEQ ID NO: 1666 - DNA, 448 bp, Homo sapiens
  MAP TO AL121755.1; EXPRESSED IN HELA, SIGNAL = 1.8; EXPRESSED IN BONE MARROW, SIGNAL =   2; EXPRESSED IN LUNG, SIGNAL = 1.3; EXPRESSED IN BRAIN, SIGNAL = 1.8; EXPRESSED IN BT474, SIGNAL = 1.4; EXPRESSED IN PLACENTA, SIGNAL = 2.7; EXPRESSED IN HEART, SIGNAL = 2.3; EXPRESSED IN HBL100, SIGNAL = 1.8; EXPRESSED IN ADULT LIVER, SIGNAL = 3.1; EXPRESSED IN FETAL LIVER, SIGNAL = 1.6
ttctttaatgttggttatttcctttcttctgctgggtttgggtttggtttgttcttgtttctctagttccttgaggtgtaaccttagaatgtcagtttgtgctgtcagtctttttgatgtagatattttagggctatgaactttcctcttagcaccaccgttgctctatcccaggggttttgataggttgtgtcactattgtcattcagtctgaagaattttttaatttccatcttgattttgtttttgacccagtgatcattcaggagcagattatttaatttccatatattcgcatggttttgaaggttccttttggagttaatttttagttttattccactgtggtctaagagagtacttgatataattttaattttcttaaatttattgaggctcgttttgtggcctatcatatggtccatcttggagaaaattccatgcactg

SEQ ID NO: 1667 - DNA, 386 bp, Homo sapiens
  MAP TO AC007378.2; EXPRESSED IN FETAL LIVER, SIGNAL = 1.1; EXPRESSED IN ADULT LIVER, SIGNAL = 1.6; EXPRESSED IN PLACENTA, SIGNAL =  19; EXPRESSED IN HELA, SIGNAL = 3.8; EXPRESSED IN HBL100, SIGNAL = 3.5; EXPRESSED IN HEART, SIGNAL = 1.3; EXPRESSED IN LUNG, SIGNAL = 2.8; EXPRESSED IN BONE MARROW, SIGNAL =   1; EXPRESSED IN BRAIN, SIGNAL = 1.3
aaaaatttaagacccttcccgaatcatactttctgatttgttactgcgtcatgtatttaaggaggcaccgaaagccatcatgactgggtgtgctttgaaacacactatgttgcatagttgctggccaacagcatcttctttgctgacctatatgttcatttttccagatcaaccttttcggccttccttgtcccgcaataacagcgtacctaattactgcaaaaatgatgaaggggatatattcctggcagctgagtcctggaagcctgacgtttgtaccagctgcatctgcattgatagcgtaattagctgtttctctgagtcctgcccttctgtatcctgtgaaagacctgtcttgagaaaaggccagtgttgtccctactgca

SEQ ID NO: 1668 - DNA, 370 bp, Homo sapiens
  MAP TO AP000365.1; EXPRESSED IN HEART, SIGNAL = 2.2; EXPRESSED IN LUNG, SIGNAL = 4.2; EXPRESSED IN BRAIN, SIGNAL = 4.3; EXPRESSED IN BT474, SIGNAL = 2.1; EXPRESSED IN FETAL LIVER, SIGNAL = 2.6; EXPRESSED IN ADULT LIVER, SIGNAL =   6; EXPRESSED IN PLACENTA, SIGNAL = 7.1; EXPRESSED IN HBL100, SIGNAL = 3.4; EXPRESSED IN BONE MARROW, SIGNAL = 3.4; EXPRESSED IN HELA, SIGNAL = 7.1
atggtctgaggtgccttacgtccaggcatttttcacacttcgttccctccctagtctctgttcccaatgcgattcctcccagatcctcctcctttccctcccgcctgtcccctcggtcccaaccccaagcgtcgctgagtcttcccagtcttccttttctacagacccatctgacctttcccctcctccccaagctgcttgtcgccagaccgagctaagtcccaatacttcctcagcctccactcctccaccctataatccttctatcacctcccctcctcacacctggtccggcttacagtttagttccgcgactagcgcttccccacctgcccaacaatttcctcttagagaagtggctggagctgaa

SEQ ID NO: 1669 - DNA, 347 bp, Homo sapiens
  MAP TO AC009967.1; EXPRESSED IN FETAL LIVER, SIGNAL = 1.8; EXPRESSED IN ADULT LIVER, SIGNAL = 0.96; EXPRESSED IN HELA, SIGNAL = 4.5; EXPRESSED IN BONE MARROW, SIGNAL = 1.6; EXPRESSED IN LUNG, SIGNAL = 1.7; EXPRESSED IN BRAIN, SIGNAL = 2.1; EXPRESSED IN BT474, SIGNAL = 4.4; EXPRESSED IN PLACENTA, SIGNAL = 2.5; EXPRESSED IN HEART, SIGNAL = 1.5; EXPRESSED IN HBL100, SIGNAL = 4.4
cattctcatattacaaaggcaatttaatggaagaatcttccttttgatatttgaatcatctgaaataacacaaacagaacaatacattcaaagaaatctcatttgcataacaaaaagacaagttaaacaacaaaaaaatttttcctttctcacaggtggacattgaagtggacctaattcggttttccttttaaaagccccgcaaacaaaagtcgtttaaaacctatttaaaatgaataaaaaattggtttactaaactactggtctccagcaccattttctgttttctgttgtttggatgcaggttcttctttgtctgtttcttctcttgctcttttcacaggtcc

SEQ ID NO: 1670 - DNA, 449 bp, Homo sapiens
  MAP TO AC007298.17; EXPRESSED IN LUNG, SIGNAL = 2.4; EXPRESSED IN BRAIN, SIGNAL = 2.7; EXPRESSED IN FETAL LIVER, SIGNAL = 3.2; EXPRESSED IN ADULT LIVER, SIGNAL =   2; EXPRESSED IN PLACENTA, SIGNAL = 4.8; EXPRESSED IN HEART, SIGNAL = 2.2; EXPRESSED IN HELA, SIGNAL = 2.1; EXPRESSED IN BONE MARROW, SIGNAL = 2.6; EXPRESSED IN BT474, SIGNAL = 3.4; EXPRESSED IN HBL100, SIGNAL = 2.5
caattcctgcacccactcacctgcactccccctcctgtgaggggtcagggaaaatttcctgcttcagtatgaattctggttttaattaactgtcaagaatcctggggccttcatcccaggcgaggagatctggcagccatggatctcatcgccactcagagattttagaacttcagctataaaaatgggcagaattttccttgatcatatcggtggtacctgtctgtgttcctgtgcaaactgacatgatcctgaccaaccgcccagaactcatctccactcagttcacaggcgccctggccttttaacaaggtcgttaacctgctgtgcagtgaactttaagatctggtcatgctcactggcagccacagggttcaagatgtgagctgcaaaagttgcaatagcaaaccggggtggatttatgaatttgccactggagatagccatgt

SEQ ID NO: 1671 - DNA, 362 bp, Homo sapiens
  MAP TO AP000507.1; EXPRESSED IN FETAL LIVER, SIGNAL =  11; EXPRESSED IN HBL100, SIGNAL = 9.3; EXPRESSED IN HELA, SIGNAL =  12; EXPRESSED IN HEART, SIGNAL =  11; EXPRESSED IN BONE MARROW, SIGNAL =  14; EXPRESSED IN LUNG, SIGNAL =  12; EXPRESSED IN ADULT LIVER, SIGNAL =  11; EXPRESSED IN BT474, SIGNAL = 8.4; EXPRESSED IN PLACENTA, SIGNAL =  12; EXPRESSED IN BRAIN, SIGNAL = 9.9
aaatgaggccagacatggtggcatgcacctgtagtcccagctactcaggaggccgaggctggaacattgctggagcccagaagttcaaggacgtagtccactatgatcacagctgtgaatagtcactgcactccagcctgggcaacatagcaagaccttatctctattataatactagtaatagtcataatcttctttctccctcaggctaaagctactttctcatttgaacccaaagggcagaaatgtctaccgagtgctccaccagagaaaagaaatgagttcttccttcacaatccatgatccaatttttggttatagagttcagctgagcaataaaggcaacactaagaacaccatca

SEQ ID NO: 1672 - DNA, 485 bp, Homo sapiens
  MAP TO AC006511.5; EXPRESSED IN BONE MARROW, SIGNAL = 5.4; EXPRESSED IN BRAIN, SIGNAL = 3.5; EXPRESSED IN FETAL LIVER, SIGNAL = 4.4; EXPRESSED IN ADULT LIVER, SIGNAL = 4.6; EXPRESSED IN HBL100, SIGNAL = 5.2; EXPRESSED IN HELA, SIGNAL = 5.6; EXPRESSED IN HEART, SIGNAL = 4.5; EXPRESSED IN LUNG, SIGNAL = 4.5; EXPRESSED IN BT474, SIGNAL = 4.8; EXPRESSED IN PLACENTA, SIGNAL = 6.1
aaaacaatctcaattgatccaggaattctataagacagagctctaagtagtaactttgttcagattagctcacatgaaggagcgaagcctaaaagacccatcattaacttcctaactaactgcacctccatgccggtgttaggacaaggacatcaccccaccctcctctagatcactgtgcaccctccttactcaccaaagccagtgttgttgatgggagcctggccttgtgcctgtggctgtggaggtggtggctgctgggcagggtgggagtggggatggtgctgatgagggtggtagcctccatgctgcagcgggggtggatgcatggccattacagggggaggcccatagccttccgccccagcttgctttccccctggtggggtacaaccatctgtgcttggggtgtgcagtggaggagcaccccctacagctgaggggccctgggcaggtgcctgctgctgctgtggctgggactgctg

SEQ ID NO: 1673 - DNA, 476 bp, Homo sapiens
  MAP TO AB020860.1; EXPRESSED IN BONE MARROW, SIGNAL = 2.1; EXPRESSED IN LUNG, SIGNAL =   1; EXPRESSED IN BRAIN, SIGNAL = 1.1; EXPRESSED IN FETAL LIVER, SIGNAL = 1.9; EXPRESSED IN ADULT LIVER, SIGNAL = 0.95; EXPRESSED IN PLACENTA, SIGNAL = 1.2; EXPRESSED IN HEART, SIGNAL = 1.5; EXPRESSED IN HELA, SIGNAL = 1.1; EXPRESSED IN HBL100, SIGNAL = 1.1; EXPRESSED IN BT474, SIGNAL = 0.95
tgcgacatgtttttggtgacgcgaagcagtactggttgctacccattttttcacggtacatctttgtgaatcatttcaggctttaagctaatgaaagggctacaggaccagatagtttcaggaaaggcctctatattccacaaggcttgtaaatctgtgtaggaactcttatttttaaccaatattagtctatgcatcaccataatatcagtgaggtagtcagtcaattcatcatcttcctgaacactaagttgagctcaatgtctaatacacagtttatttgcatatactagagcatgttctgctctcggacatcagcattttggcagggtttcactccgttgtcttttgtatggttcaggtctcactctttatattaattctagtctaggtgatggctgctcctttccagcttgccttgttaaccaggatcctgaacaagcatctactcctgcagggctgaattccacagctaa

SEQ ID NO: 1674 - DNA, 486 bp, Homo sapiens
  MAP TO AC006977.3; EXPRESSED IN BT474, SIGNAL = 3.3; EXPRESSED IN HBL100, SIGNAL = 3.2; EXPRESSED IN BONE MARROW, SIGNAL = 4.6; EXPRESSED IN LUNG, SIGNAL = 4.2; EXPRESSED IN FETAL LIVER, SIGNAL = 4.7; EXPRESSED IN ADULT LIVER, SIGNAL = 5.3; EXPRESSED IN PLACENTA, SIGNAL = 7.8; EXPRESSED IN HEART, SIGNAL = 4.5; EXPRESSED IN HELA, SIGNAL = 4.5; EXPRESSED IN BRAIN, SIGNAL = 3.5
cattctcttccttcctccccatatttctaaatttctaatcattgctcaaagcccaattcagagaaaaccctagctcctccatggcaccatcattaacaattttatctggccgccccccgggaagttcactgggctaattgcgggactcttgttcgcaccatggcatctctttagcagaacataaatgcgaagagcacatgcatccttcatgggaatttaaaggagctggaaagagtgctcaccgcagttccattctcccgcagaaatcctgcatggcgccgtgcggttcagcaacaaccctgccctgtgcaacgtggagagcatccagtggcgggacatagtcagcagtgactttctcagcaacatgtcgatggacttccagaaccacctgggcagctgtaagtgtcgcatacacactatctctgcctccagctcctatgggggacagctctacagcactggggcaggggagagaagccatgttta

SEQ ID NO: 1675 - DNA, 412 bp, Homo sapiens
  MAP TO AC007568.1; EXPRESSED IN ADULT LIVER, SIGNAL = 1.9; EXPRESSED IN BT474, SIGNAL = 1.6; EXPRESSED IN FETAL LIVER, SIGNAL = 1.9; EXPRESSED IN PLACENTA, SIGNAL = 2.4; EXPRESSED IN HBL100, SIGNAL = 1.7; EXPRESSED IN HELA, SIGNAL = 2.1; EXPRESSED IN HEART, SIGNAL = 2.4; EXPRESSED IN BRAIN, SIGNAL =   2; EXPRESSED IN BONE MARROW, SIGNAL = 2.7; EXPRESSED IN LUNG, SIGNAL =   2
cactttaaacactaggttacattggcttaaagaatctgtcagcctcttgcacttctaagtacttattgcaatcctgtctgaaaatataatactgaagaacaaacaactttggaggtgatctcctcattggacaccatgttgtggggaaaatgaccatttgaacgcctcaataccttcttttgtctgctctcagcagcagccagctgtgcggacatcctttcttgcattttcttgcagtgggccatgactgcttcaaggatggagagggggttggtacaaactggcttcttctctttgtcaccagcacctgcttcatagtctctctggagtgccaggaacgggtcatttagattaaatctcccataccgttcctggataaatacctccttcctgcgagcctggaacaaaatta

SEQ ID NO: 1676 - DNA, 454 bp, Homo sapiens
  MAP TO AC011457.1; EXPRESSED IN BRAIN, SIGNAL = 6.9; EXPRESSED IN BONE MARROW, SIGNAL = 7.9; EXPRESSED IN LUNG, SIGNAL = 2.5; EXPRESSED IN BT474, SIGNAL = 8.2; EXPRESSED IN FETAL LIVER, SIGNAL =   4; EXPRESSED IN ADULT LIVER, SIGNAL = 2.7; EXPRESSED IN HELA, SIGNAL = 8.2; EXPRESSED IN PLACENTA, SIGNAL =   3; EXPRESSED IN HBL100, SIGNAL =   8; EXPRESSED IN HEART, SIGNAL = 3.6
tgtttgatagcctcattcgttgattttatagatttaaaacaaccttaggctttttcttcagaatgtgtattctgatgtcgaatcagggatgaactccgactatatgccttcccacatttactacattcatagggtttctctgaagaatgacttctctgatgtcgaataaggtctgagccactgctaaatgccttcccacattcattacattcatagggtttctctccagtatgacttctttcatgtagaataagagatgtgcgctgactaaaggccttaccacatgttttgcatgtatatggcttctctccagtgtgaattctttcatgttgggcgaggtgtgcactctggctgaaggccttcccacactgatcacattcatagggtctatcttcagtatgaattctcttatgtcgtgtgagagatattcggtggctgaaggcttttccacatt

SEQ ID NO: 1677 - DNA, 475 bp, Homo sapiens
  MAP TO AC009493.1; EXPRESSED IN PLACENTA, SIGNAL =   2; EXPRESSED IN HEART, SIGNAL =   1; EXPRESSED IN BONE MARROW, SIGNAL = 0.96; EXPRESSED IN LUNG, SIGNAL = 1.3; EXPRESSED IN FETAL LIVER, SIGNAL = 0.92
tgacttctagcaagcataagcaagtttctaaaatagtcatttagaatctcagcaatttaaagcctctttctgcttatgtatgtttgtagtattcagaatctgccataacaaatgtgttgttctttattatactatgaatcaaattttaaatttaggttatgtgccttaatagtctaaaataacaatagataggaataatactacagaatttggaattattatgttttacatttaaatttttttccttcaaaacagagacttgaaagattatgaagcttggcttggaattcatgatgtccacggaagaggagatgagaaatgcaaacaggttctcaatgtttcccagctggtatatggccctgaaggatcagatctggttttaatgaagcttgccaggttagttactttagaagattttgtatttttcacctggacaagaattgttggagcattttcttcagctgtgtggcagttc

SEQ ID NO: 1678 - DNA, 448 bp, Homo sapiens
  MAP TO AC009507.1; EXPRESSED IN ADULT LIVER, SIGNAL = 3.3; EXPRESSED IN BT474, SIGNAL =   1; EXPRESSED IN FETAL LIVER, SIGNAL = 1.6; EXPRESSED IN PLACENTA, SIGNAL = 4.1; EXPRESSED IN HBL100, SIGNAL = 1.7; EXPRESSED IN HELA, SIGNAL = 2.9; EXPRESSED IN HEART, SIGNAL = 3.4; EXPRESSED IN BRAIN, SIGNAL = 1.6; EXPRESSED IN BONE MARROW, SIGNAL = 2.1; EXPRESSED IN LUNG, SIGNAL = 1.9
ctttgccttcaacaagctccttagcaggtcgtggtttttttcctgatggagtgacctaaacctccattcctgaagggtctgggccatttgtagtccttcctggactgggctgttgtagtttcccattcgccttaatcagagtgcatggtaataataagagacaccctattgtacctcctgtattccatgtatactcttccttacctctgttatggagtaatagactgatttcatcttgatagtctgggtcaatcaccccatccaacactgtaactcccttcttagtcttttgtcttaaatgtaggaggagcccaaagtgtccaggtggcaatcttaacttccagtttaatggattcgttgttgtgtctcctggtggcagtgttcctccctctggaactaatacctctaggccagcagaatgcaatgttgcaggaacaggtagcaaaaa

SEQ ID NO: 1679 - DNA, 462 bp, Homo sapiens
  MAP TO AF181898.1; EXPRESSED IN ADULT LIVER, SIGNAL = 1.2; EXPRESSED IN BT474, SIGNAL = 1.3; EXPRESSED IN FETAL LIVER, SIGNAL = 1.9; EXPRESSED IN PLACENTA, SIGNAL = 1.5; EXPRESSED IN HELA, SIGNAL = 1.3; EXPRESSED IN HBL100, SIGNAL = 1.4; EXPRESSED IN HEART, SIGNAL =   2; EXPRESSED IN LUNG, SIGNAL = 1.6; EXPRESSED IN BONE MARROW, SIGNAL = 1.8; EXPRESSED IN BRAIN, SIGNAL = 1.3
atccttcacgtcaggggtcacgcttggcatggtccaccctgtgggtttggacgagtgtttaatggtgtggactccccactgccacctcacacagagcagtttccttgccctaaaaatcctgcgtgctccccctattcatccctccctgcccccaacccctggcaaacactgactctttcgctacctttgtagttctgccttttccagaatgacccatggattcaaagagtgtgaaggctttttcatggcttgggagctcatttcattttagcactgaataatattccactgcctgatgtaacggtttactcacctcctgaaggacatcttccaagtttgggcaattgtgaacaatgttgctatacacatctgtgtgcgggttgatgtgtggatgtaagttttgagcttctttgggtgaatacctgggggcgtgattgctggactgcatggtgagtgcctagt

SEQ ID NO: 1680 - DNA, 467 bp, Homo sapiens
  MAP TO AC010133.1; EXPRESSED IN LUNG, SIGNAL = 0.93; EXPRESSED IN BRAIN, SIGNAL = 1.1; EXPRESSED IN ADULT LIVER, SIGNAL = 1.2; EXPRESSED IN PLACENTA, SIGNAL = 1.1; EXPRESSED IN HBL100, SIGNAL = 1.1; EXPRESSED IN HELA, SIGNAL = 2.5; EXPRESSED IN BONE MARROW, SIGNAL = 1.4; EXPRESSED IN BT474, SIGNAL = 1.4; EXPRESSED IN FETAL LIVER, SIGNAL = 1.2; EXPRESSED IN HEART, SIGNAL = 1.4
aacgttaagaaaatgtgactgagcatttactttagaattaagtttgttaagctgcaaaatactactcttacacttctcttaaataaaaccttctgactattaaagccttgattaatatcctgtcaacaaaggcggaggaaagcagatatttccaaatagtactttaactaattcatgctttaatgatagcagtaaaaatgtttaaatgtagtcccacatattattttaccaaccctgcagggacctctcatggtgcaccacctgcaagagggcctcggatgtcttatggtggaagcacctgccacgcatatagtaatacacgagatagatatggcagaagttgggagagttactcgagctgtggtgattttcattattgtgatcgtgagcatgtttgcagaaaagaccaaaggaatccgccttctctgggtagggtgctccctgatcctcgtgaagcatgtggtagc

SEQ ID NO: 1681 - DNA, 468 bp, Homo sapiens
  MAP TO AC009958.1; EXPRESSED IN HEART, SIGNAL = 2.3; EXPRESSED IN LUNG, SIGNAL =  18; EXPRESSED IN BRAIN, SIGNAL = 1.4; EXPRESSED IN FETAL LIVER, SIGNAL = 1.3; EXPRESSED IN ADULT LIVER, SIGNAL = 5.1; EXPRESSED IN PLACENTA, SIGNAL = 2.3; EXPRESSED IN HELA, SIGNAL = 1.7; EXPRESSED IN BONE MARROW, SIGNAL =  62; EXPRESSED IN BT474, SIGNAL = 1.4; EXPRESSED IN HBL100, SIGNAL = 1.5
ttactgagatgagccagccctgcagctgcgcccagcctgccccatcccctgctcatttgcatgttcccagagcatagcctcctgccctgaagccttattaataggctggacacacttcatggaggaatcagtcccactcaggacacagcatggacatgagggtccctgctcagctcctggggctcctgctgctctggttcccaggtaaggatggagaacactaacagtttactcagcccagagtgctcagtactgctttactgttcagggaaattctcttacaacatgattaattgtgtggacatttgtttttatgtttccaatctcaggtgccagatgtaacatccagatgacccagtctccatctgccatgtctgcatctgtaggagacagagtcaccatcacttgtcgggcgaggcagggcattagcaattatttagcctggtttcagcagaaaccagggaaagt

SEQ ID NO: 1682 - DNA, 474 bp, Homo sapiens
  MAP TO AF186995.1; EXPRESSED IN HBL100, SIGNAL = 8.3; EXPRESSED IN LUNG, SIGNAL = 9.8; EXPRESSED IN BRAIN, SIGNAL = 8.2; EXPRESSED IN FETAL LIVER, SIGNAL = 8.2; EXPRESSED IN ADULT LIVER, SIGNAL = 8.9; EXPRESSED IN PLACENTA, SIGNAL =  11; EXPRESSED IN HEART, SIGNAL = 9.9; EXPRESSED IN HELA, SIGNAL =  11; EXPRESSED IN BONE MARROW, SIGNAL =  11; EXPRESSED IN BT474, SIGNAL = 6.8
cacactcactcagactgggcccacgtagatacatcctcagttggcttaatgtgcaagctttgggatgtggaaggaaaccggggtacctggacaaaacccaggcagacagtgtccccagacaggaattgatttttgttttcctcatcaaagttataatgaaatgacactgaatggaatattattgaagggcctgctgtattttgaagattacgatgttcatgctacacatactgactttctccagatagtctgctttttttgcaaacgccaaacctgctatctcctttgcagggcgattcgggaggccccctggtgtgtctgaacgatggccgcatgactttggtgggcatcatcagctggggcctgggctgtggacagaaggatgtcccgggtgtgtacaccaaggttaccaactacctagactggattcgtgacaacatgcgaccgtgaccaggaacacccgactcctcaaaa

SEQ ID NO: 1683 - DNA, 470 bp, Homo sapiens
  MAP TO AL031681.13; EXPRESSED IN BONE MARROW, SIGNAL = 1.7; EXPRESSED IN FETAL LIVER, SIGNAL = 1.5; EXPRESSED IN ADULT LIVER, SIGNAL = 1.4; EXPRESSED IN HBL100, SIGNAL = 1.5; EXPRESSED IN HELA, SIGNAL = 1.7; EXPRESSED IN HEART, SIGNAL = 1.7; EXPRESSED IN BRAIN, SIGNAL = 1.4; EXPRESSED IN LUNG, SIGNAL = 1.1; EXPRESSED IN BT474, SIGNAL = 1.4; EXPRESSED IN PLACENTA, SIGNAL = 1.5
tgcacatgtactttgggtgctagttcacctgactatgtcttaaccttgacactaaactgagatgggagctctggaaaatcaagagagtgattaattcatttccctttaaccaggtataggacctaactcaggatgggaccccaaaatatgatgagtgagtcattatgcgtgtcttctctggcccagctccataatctggattgatggaggggacagtgggaattgaggcataggctatagcttccccctcccttccccactgccctcttcctaccatggcctctggctccgactcctcctctgatgggctctggtattccctgcgcttcctcttcttcatgggtttgaggagctcagaagcgctggtagagcctgaggagttctccactatgactgacctgaggaagggccagccttagggaaagaaccacccgccctgcaccacccagcccctctcctaacccctgaac

SEQ ID NO: 1684 - DNA, 465 bp, Homo sapiens
  MAP TO AL080250.11; EXPRESSED IN BT474, SIGNAL = 2.3; EXPRESSED IN HBL100, SIGNAL = 5.8; EXPRESSED IN BONE MARROW, SIGNAL = 1.7; EXPRESSED IN LUNG, SIGNAL = 2.7; EXPRESSED IN ADULT LIVER, SIGNAL = 2.1; EXPRESSED IN FETAL LIVER, SIGNAL = 1.8; EXPRESSED IN PLACENTA, SIGNAL = 1.6; EXPRESSED IN HEART, SIGNAL =   2; EXPRESSED IN HELA, SIGNAL = 2.5; EXPRESSED IN BRAIN, SIGNAL = 1.3
taggaaagccaactcttgccccagcagattccgtgaaagtatttttaactaaataatcaatggcatcccctaaagggaaaagaaacatgttcatttactctgtactacacaatttttccaaagtcaaaaactatgtgaacaatgtcaaaaatatttaatatgtaataggcaatgcatcatttctttctgaaacagacatttcatttatttttaactttaaaaaaatctgtagaacatacctgtcattgtgttgccacctttatatggaattttttttattgcagcaagaagttcatccctttggtagtactgatttaagttaaattcagtcctggtatcagagctgtattgaacaactccaactcttgtcttctcttccccaatgtcaaaagcagacacaagagcagcaatgaagtctaaaatgtacttgaaattatttcttcccacactccaagagccatccac

SEQ ID NO: 1685 - DNA, 474 bp, Homo sapiens
  MAP TO AL096774.7; EXPRESSED IN BONE MARROW, SIGNAL =  20; EXPRESSED IN LUNG, SIGNAL = 9.7; EXPRESSED IN BT474, SIGNAL =   7; EXPRESSED IN ADULT LIVER, SIGNAL = 4.4; EXPRESSED IN FETAL LIVER, SIGNAL = 3.8; EXPRESSED IN HBL100, SIGNAL = 7.6; EXPRESSED IN HELA, SIGNAL = 5.9; EXPRESSED IN PLACENTA, SIGNAL = 6.6; EXPRESSED IN HEART, SIGNAL = 2.6; EXPRESSED IN BRAIN, SIGNAL = 4.1
aatgaaagccgtttcctgggaagggcacagggaccccctcacccatcccccaatcagtcatcccagcttcagaaagacaaggctccacagtcccaaacccaccattgaaatttaccttgacggatggctgaaagcaggtcgctacgggcatcgctcacggcaggcaaggaggacttgggcttggtggtatcagaaagcggtggtggtatagcaggctggccatctgcaccagtgaaagggggaggagggggccccggaggaggaggaggagggggaggaggaggtgctcctcctgttggctgggacaagggaggtggtggcagagttgggtagtcagctgctggtggtggaggaggaggtggaggggcagcaaaatcagggtgaggtgggaaagatgggggtgagggtggtggaggcgtccctggagacccaaatcctacaggcggtggtggaggtgggatgcctatcattgga

SEQ ID NO: 1686 - DNA, 481 bp, Homo sapiens
  MAP TO AL035542.7; EXPRESSED IN PLACENTA, SIGNAL = 1.6; EXPRESSED IN BRAIN, SIGNAL = 2.2; EXPRESSED IN BT474, SIGNAL = 1.9; EXPRESSED IN FETAL LIVER, SIGNAL = 1.4; EXPRESSED IN ADULT LIVER, SIGNAL = 1.6; EXPRESSED IN HBL100, SIGNAL = 1.4; EXPRESSED IN HELA, SIGNAL = 1.5; EXPRESSED IN HEART, SIGNAL = 2.7; EXPRESSED IN LUNG, SIGNAL = 1.1; EXPRESSED IN BONE MARROW, SIGNAL = 1.4
gggttcttacaggtgactctgctaacttatcatggagtcgtgttttttatccctgatttcctggccatattgtctcccttctcctttgaggtgtgtctctgtctcctggtggccatcagcacagagcggtgtgtgtgtgtcctcttccccatctggtacagatgccaccgcccaaaatacacatctaatgttgtctgcaccctcatctggggcctgcctttttgcatcaacatagtaaaatcacttttcctaacttactggaaacatgtaaaggcatgtgtcatatttctaaagctttctgggctcttccatgctatcctttcacttgtgatgtgtgtgtcgagtctgactctactcattagattcctgtgctgctcccagcagcaaaaggccaccagggtctatgcggtggtgcagatctcggcccccatgttcctactctgggccctacccctgagcgtggcacccctcataacagatt

SEQ ID NO: 1687 - DNA, 480 bp, Homo sapiens
  MAP TO AL031733.3; EXPRESSED IN BRAIN, SIGNAL = 2.2; EXPRESSED IN BONE MARROW, SIGNAL = 2.6; EXPRESSED IN LUNG, SIGNAL = 1.6; EXPRESSED IN BT474, SIGNAL = 1.9; EXPRESSED IN ADULT LIVER, SIGNAL = 2.2; EXPRESSED IN FETAL LIVER, SIGNAL = 3.2; EXPRESSED IN HELA, SIGNAL = 2.2; EXPRESSED IN PLACENTA, SIGNAL = 2.6; EXPRESSED IN HBL100, SIGNAL = 1.8; EXPRESSED IN HEART, SIGNAL = 2.6
actgactcaacgccacacagcaagtaggtggtaggcagagatgtcactaaagcccaaggaatctgtctctacatttgtcctggactctaatccagggttctgtcattttgccagccaccataaaatatttgacagtctaggaaaacagcaaatgttcttacatccatcgagaacttgtatttgcctagagatggactttaccaatcaagataggaattagataagaattattttttttaaaaaaaggagcattaaaacaatggtcaaatgagagaaaaagcaaaattcagacagacagatacatacacacaccccaaaccctcaaacctccagggcttcctgcctgtgaaccgaaagggggagtgcgaatttcttggccctgtcggcaggtgctttctcaaaggccccacagtcctccacttcctggggaggtagctgcagaataaaaccagcagagactccttttctcctaaccgtccc

SEQ ID NO: 1688 - DNA, 467 bp, Homo sapiens
  MAP TO AL080312.4; EXPRESSED IN HEART, SIGNAL = 1.8; EXPRESSED IN BRAIN, SIGNAL = 1.7; EXPRESSED IN BONE MARROW, SIGNAL = 2.1; EXPRESSED IN LUNG, SIGNAL = 1.3; EXPRESSED IN BT474, SIGNAL = 1.5; EXPRESSED IN ADULT LIVER, SIGNAL = 1.7; EXPRESSED IN FETAL LIVER, SIGNAL = 1.8; EXPRESSED IN HELA, SIGNAL = 2.1; EXPRESSED IN PLACENTA, SIGNAL = 2.6; EXPRESSED IN HBL100, SIGNAL = 1.5
tcttctggaggagaatcaatctgattttcaaatttaatggccaaaaagatggcattcgtacttggcctcacatctaaattagttagaacttcaaaaatgctaactttcctagttccaagaagcaagcattcattttcctctttgactgtctcatactggttaaaattcagtgtttctagagacttcaatcatcagttctgctaaacaaggtaacgttatcattgtatccagggctgaacactccaagttctctagtaaaacaggactgctctcattgccattcagagagatgacttctttcttagcagtggatgtcagcttactccaggtaatgtcagtatttttaaaagcatgtagaagaaagatgccaaggataatagtgaagaatccattcagggtctcgatgatatctccagttttcatgccataccactcttggagtaagatggcagagcaagtcactacca

SEQ ID NO: 1689 - DNA, 452 bp, Homo sapiens
  MAP TO AL096702.3; EXPRESSED IN BT474, SIGNAL = 5.3; EXPRESSED IN FETAL LIVER, SIGNAL = 2.5; EXPRESSED IN HELA, SIGNAL = 3.3; EXPRESSED IN PLACENTA, SIGNAL = 3.7; EXPRESSED IN HBL100, SIGNAL = 3.3; EXPRESSED IN HEART, SIGNAL = 2.9; EXPRESSED IN BONE MARROW, SIGNAL = 3.1; EXPRESSED IN BRAIN, SIGNAL = 2.7; EXPRESSED IN LUNG, SIGNAL = 2.5; EXPRESSED IN ADULT LIVER, SIGNAL = 2.7
gaacccaaacatcacttccctccgcattcacagcatttcccagcagtccccagatggttgtttccgtggggacacagcagctgcctcatttcccttcaggccccatgggctgctggtcaacctcaggatctactaaagatgacgcaaatgccgactgaacaatctgaaacccaaaggactcgaggagagacatgttctgctgaggagagaaaggtgagccaagggcagggcccaggtcccccagggggcctccgagagcccggacatgcaccttctggatgtgtttgttcaagtaggacttagagcggaagaagctcccacattcagggcatgggtacttcttctccccatcagactccattttgtttttggggactgccatgtcgcaggagaaagagccattggcactctgcttctctggcgtcttcaggtcgctggcatctgagaggtca

SEQ ID NO: 1690 - DNA, 474 bp, Homo sapiens
  MAP TO AL096818.2; EXPRESSED IN HELA, SIGNAL = 1.5; EXPRESSED IN LUNG, SIGNAL =   1; EXPRESSED IN BRAIN, SIGNAL =   1; EXPRESSED IN BT474, SIGNAL = 2.4; EXPRESSED IN FETAL LIVER, SIGNAL = 1.3; EXPRESSED IN ADULT LIVER, SIGNAL = 1.2; EXPRESSED IN PLACENTA, SIGNAL = 1.4; EXPRESSED IN HEART, SIGNAL = 1.2; EXPRESSED IN HBL100, SIGNAL = 2.4; EXPRESSED IN BONE MARROW, SIGNAL = 1.5
taaaatccattcctgggaggcttatatatcggtcatgcacatgattgtattaatgattttacttacatgggtttcctcccaatagctatctgagagagaaatgtgtcatcttctttgggaagatgtggggaagaagaaaagcaatgtggagccagggccactaggcagaggattctgggggaagcagggtggggctttcagtaccagagagtatcatggtttcttggggggcagaaacaaggaagatgtcaattgccaagaagaggttaaagactgtttttccacttttgacttttctaaggtcattgttggtggcaactctcactaccatgaccactgctgaagatcttgcatgtgatgctgccctggggaatgagttctttcttgaagccagccttgctaggttgacttatgtcaagaataggcattgtgcttaaaggcagatggaccacaggcttaactgagggttcccct

SEQ ID NO: 1691 - DNA, 471 bp, Homo sapiens
  MAP TO AP000343.1; EXPRESSED IN HEART, SIGNAL = 1.3; EXPRESSED IN LUNG, SIGNAL = 1.4; EXPRESSED IN BRAIN, SIGNAL = 1.3; EXPRESSED IN ADULT LIVER, SIGNAL = 1.2; EXPRESSED IN PLACENTA, SIGNAL = 2.2; EXPRESSED IN HBL100, SIGNAL = 1.5; EXPRESSED IN HELA, SIGNAL = 1.4; EXPRESSED IN BONE MARROW, SIGNAL = 1.3; EXPRESSED IN BT474, SIGNAL = 1.2; EXPRESSED IN FETAL LIVER, SIGNAL = 1.2
gcggtcacatgttcagagtgtctgttcccaggaatcctggcacctgccagtggcctcatcccagtctgtcccatggaacacgtgctgggttttaggtcaggtaaaccatgtatggccgagaacactggctcttgggctcttgacagcagtgacatcagccatagaaggcagtcggtgcatgtgaacgttcttctctccccatccccagcaaaacgcagcagtatgactgcaaatggtacattccgctcacggatctcagcttccagatggtggatgaactggaggcagtgcccaacatccccctggtgcccgatgaggagctggacgctttgaagatcaagatctcccagatcaagagtgacatccagagagagaaggtgcacaccaggggagcaagggccgggtttggtgtggtcagagtggcagcagcccccgcacacggccagtgggtgctttctccgtcaggcctct

SEQ ID NO: 1692 - DNA, 484 bp, Homo sapiens
  MAP TO AP000347.1; EXPRESSED IN HELA, SIGNAL = 3.9; EXPRESSED IN LUNG, SIGNAL = 2.8; EXPRESSED IN BRAIN, SIGNAL = 1.6; EXPRESSED IN BT474, SIGNAL = 2.7; EXPRESSED IN ADULT LIVER, SIGNAL = 2.6; EXPRESSED IN PLACENTA, SIGNAL = 5.7; EXPRESSED IN HEART, SIGNAL = 1.7; EXPRESSED IN HBL100, SIGNAL = 5.5; EXPRESSED IN BONE MARROW, SIGNAL = 3.9; EXPRESSED IN FETAL LIVER, SIGNAL = 2.4
tcaccactgtctcgcttcacgccggtggtgacggtgacgtcatcgatgtaggtggggggtgtcgtgtatagaagcagagaccacagcagtcctgcgtagctgaagaagtcaaagtctgtgttctggacaaagtaacccttgggatacctagggcgggagaattgtggttcgctgggcccttgccatgggtcttttgacctcagctcacatgcctccccagatccagggcctcctctctgcgaaggccaccctgtccctggcaggaagaccacagggtggggcgggaaggtgggtgcgtgcagtggaggcaggatggtccccacttggaggtgtcggtcatgtacagatggtccctggtggcagggttggggggtgagcgtgttgttgatggcgatagtgatgcagaggtgggagggcaggggctccacctggaacaggctgctgatgtcggcctcaaaggggaggtagcccccttcatgctcta

SEQ ID NO: 1693 - DNA, 454 bp, Homo sapiens
  MAP TO AP000350.1; EXPRESSED IN PLACENTA, SIGNAL = 1.7; EXPRESSED IN BONE MARROW, SIGNAL = 2.5; EXPRESSED IN FETAL LIVER, SIGNAL = 1.6; EXPRESSED IN ADULT LIVER, SIGNAL = 1.5; EXPRESSED IN HBL100, SIGNAL = 1.6; EXPRESSED IN HELA, SIGNAL = 1.5; EXPRESSED IN HEART, SIGNAL = 2.3; EXPRESSED IN BRAIN, SIGNAL = 1.6; EXPRESSED IN LUNG, SIGNAL = 1.3; EXPRESSED IN BT474, SIGNAL = 1.7
agatcgcaggctggagaagtgggaggtgcctgggccaggagccctctcagcatggttcagaaggcttggagcaagaagaccggtgactaaggactctgagggattctggatcctccatccccacctacatctattacatagtctgtgaccccttgctcaggccttgggggtcagcagcctaattctttgcataggtacatgttgggcgcatgggcctgaggctgtgggagaggacacgggtgaggctggtccccagactgaccacgtctttgtcttcgtctatccacagcccatggcagccaactataatgtcttcctcaacagctccaagctagctgagtggcgtatgcgggtggagctcaatatcagctctggcctctttagggaggcccatgatcgactaatgcagttggccgactgggacttttcaacactggattcaatggtcaaggag

SEQ ID NO: 1694 - DNA, 465 bp, Homo sapiens
  MAP TO AB020862.1; EXPRESSED IN PLACENTA, SIGNAL =   1; EXPRESSED IN BRAIN, SIGNAL = 3.3; EXPRESSED IN BT474, SIGNAL = 1.9; EXPRESSED IN FETAL LIVER, SIGNAL = 1.7; EXPRESSED IN ADULT LIVER, SIGNAL = 1.7; EXPRESSED IN HEART, SIGNAL =   1; EXPRESSED IN HELA, SIGNAL = 1.7; EXPRESSED IN HBL100, SIGNAL = 2.2; EXPRESSED IN LUNG, SIGNAL = 0.89; EXPRESSED IN BONE MARROW, SIGNAL = 2.9
tgcttggctttcctctgtaagaaagagatggcccttctcattcattcattcattcattcattcatttataccagtatggactcatcagtacttattttattctttgtgttataatccaatgctatcattatttatttggttgctcaaattgttccaggtttgtcaatagggagccctttcaggttggctttttggtccttttaatatggctctttcttttcctctttctcctcttcctcttcctcctcttcttcttccttctagtccttctagtcctcctcctcttaatacttcccctcatgttcctgcccctcactcctcctcctttccctctttacccttcttcctcctccttctcctcctcttcctcctgattcttcccctcctcctcctccttctgatccttccatccctcgttttcccccttcctcctcttcctcccgcccctccactcctccttctcct

SEQ ID NO: 1695 - DNA, 497 bp, Homo sapiens
  MAP TO AC005488.2; EXPRESSED IN BT474, SIGNAL = 5.9; EXPRESSED IN FETAL LIVER, SIGNAL = 1.6; EXPRESSED IN HELA, SIGNAL = 3.4; EXPRESSED IN PLACENTA, SIGNAL = 2.8; EXPRESSED IN HBL100, SIGNAL = 3.3; EXPRESSED IN HEART, SIGNAL = 0.98; EXPRESSED IN BONE MARROW, SIGNAL = 2.7; EXPRESSED IN BRAIN, SIGNAL = 2.7; EXPRESSED IN LUNG, SIGNAL = 2.6; EXPRESSED IN ADULT LIVER, SIGNAL = 4.4
tggttttgcaattcaacctgaaaaatgaagtcaaagcttttatcaaaacaaagcatgtttagtgctctctgtctcactgtcttttagatgccagaccttagattttgtgatgactcctcaaccgtttagatctcggttatctcagagggatcatcagctttttaagaaaattttgagagaaaagcaagtgaagaaaagagtagtcagtgcccaacatcatggatctctcactgaacacaccatgcctggtattctctcacagtgatgtcaccatttctacctgccacgtatcggcgaaggttgggactcgactggtgtttgatcacgatgggaaaatcatccagaaaaccccctacccccaccccagagggaccacagtcagcgtgaagcagttattttctacgctacctgtgcgccataaggaatttcaaaggaatattaagaaggtacagtaaattaatcctggttttcaagagtattggttaatgcacgtgagc

SEQ ID NO: 1696 - DNA, 474 bp, Homo sapiens
  MAP TO AC007898.1; EXPRESSED IN ADULT LIVER, SIGNAL = 1.7; EXPRESSED IN BT474, SIGNAL = 2.5; EXPRESSED IN FETAL LIVER, SIGNAL =   2; EXPRESSED IN PLACENTA, SIGNAL = 1.9; EXPRESSED IN HELA, SIGNAL = 1.4; EXPRESSED IN HBL100, SIGNAL =   2; EXPRESSED IN HEART, SIGNAL = 1.5; EXPRESSED IN BONE MARROW, SIGNAL = 2.2; EXPRESSED IN LUNG, SIGNAL = 1.1; EXPRESSED IN BRAIN, SIGNAL =   2
  unsure 63
  unsure 335
  unsure 441
actcccagtgccaacttcaccctcatcggctcctcgaacctcagctaaactaccacctggccnccaaaaatgtcactcgatctcaaatctcagcaccacctcctgctctgtactcaacagcacttcctggcctctcctggatggcagctgcctagaccacacacacgggtaccatcttccttccacctccctacagactgggagcgacttacagagtgagattgggtgcccctcacccctctatctccacacagcccagcccaactcccacaagcgttggagaaatgcttgctgagtgggaggtgtgggtggggaaggaggggccctgtgccccnctccagaaaccgcacggccaggtggaatggggcacagacaagttcaagcccctggtccacacagagcaggtgcaggtaggatggggagagagagagcagcggccanggtgggaccccaggagaagccaggaagagcaga

SEQ ID NO: 1697 - DNA, 456 bp, Homo sapiens
  MAP TO AC008000.7; EXPRESSED IN ADULT LIVER, SIGNAL = 4.1; EXPRESSED IN BT474, SIGNAL = 3.1; EXPRESSED IN FETAL LIVER, SIGNAL = 6.1; EXPRESSED IN HELA, SIGNAL = 5.2; EXPRESSED IN PLACENTA, SIGNAL = 4.5; EXPRESSED IN HBL100, SIGNAL = 3.6; EXPRESSED IN HEART, SIGNAL = 5.4; EXPRESSED IN BONE MARROW, SIGNAL = 5.1; EXPRESSED IN BRAIN, SIGNAL = 4.8; EXPRESSED IN LUNG, SIGNAL = 4.5
aacaggctttgagcatcagcactaaaatatggggtcagctccccatgcttgctcacagaactcatggaaaaggcccagtgccttccccagcgcctacacccagcaccctaggtgttggaagggggttgcacctttctcttggctttcccaaccccactcttcattggtcagcattgctgtcctggagagttcctaggggcacttaataacatcctgctctgtgtcagcacctcagtgtgtggacagctccttcacatgttgtccttaacacccacctccacctccctaatcagcactgtgcccttgaggacagctcccagggaagccagttccccactgccagctttgtcctccccaggggtactgtctttcagcaccaggaccacgtgggcagttctcactcccagcctaggttagtcaacctgctggggagagagggggcctgtagttatcagg

SEQ ID NO: 1698 - DNA, 484 bp, Homo sapiens
  MAP TO AC008015.4; EXPRESSED IN HEART, SIGNAL =   3; EXPRESSED IN LUNG, SIGNAL = 2.5; EXPRESSED IN BRAIN, SIGNAL = 3.5; EXPRESSED IN ADULT LIVER, SIGNAL = 2.8; EXPRESSED IN PLACENTA, SIGNAL = 3.2; EXPRESSED IN HBL100, SIGNAL = 2.2; EXPRESSED IN HELA, SIGNAL = 3.8; EXPRESSED IN BONE MARROW, SIGNAL = 2.9; EXPRESSED IN BT474, SIGNAL = 2.3; EXPRESSED IN FETAL LIVER, SIGNAL = 3.3
atcaccagaaccctccactgtgttgtcctgccagtaattacagcagataaactgctccagttgagggctgctgtccccggctggctgccagccatgcggccccaggctgcgccgtgggagtccattcattttaataagaggtacaccctgtgttattaagaagagtgtttattactgtcgccacacactgacagcaacttccatcatcgttaaacggcagatgcggggagggtaggggggctgtgcactgcagctttgcagaggcacaggcccagctggtgaggctgaggagggaggggttgtctgtctccctctcttaccgcagaactgcatggcaccccctttcccagacagaattgagcttctgctgagcctgaccctgttcgaggtgggggttggggccagcaaagggatgcaggaggggactctgctcgacatctgagtgctgtcccggagagggcgagggagtccagggttggagctt

SEQ ID NO: 1699 - DNA, 467 bp, Homo sapiens
  MAP TO AC007728.1; EXPRESSED IN LUNG, SIGNAL = 0.93; EXPRESSED IN BONE MARROW, SIGNAL = 1.2; EXPRESSED IN BRAIN, SIGNAL = 1.2; EXPRESSED IN ADULT LIVER, SIGNAL = 0.92; EXPRESSED IN BT474, SIGNAL = 1.2; EXPRESSED IN HBL100, SIGNAL =   1; EXPRESSED IN HEART, SIGNAL = 0.87
cctggctacctttttaggggaaatcccatggaccaagttaccccacaggctgacttcatgaggacaaatcagtcttggtgactaagcacccctttcctgagaactctgtgatgcacaccaggagtgcctcaccctctgggacggtgtgaagatcggcaacctgatttcatcacattcatactggctgacgaaaccccgctcccatgccaggtccagcatgttctccacatggctgtggagcctcctgacaatggctggccggtgactctgcaggtctcgggctgggtggagcgagtgggggtcccagcagccatgcagcttgggggactggctgtcggcctgggcttcttgggcagccgcgatgagcttctgacaggcccaagtacccttattccagacggtgtccagaaggcgcctggccaagtgggagagaggctggcccaggaggtggaagccctcgtagtcct

SEQ ID NO: 1700 - DNA, 471 bp, Homo sapiens
  MAP TO AC007878.2; EXPRESSED IN FETAL LIVER, SIGNAL = 0.95; EXPRESSED IN ADULT LIVER, SIGNAL = 7.1; EXPRESSED IN HELA, SIGNAL = 1.1; EXPRESSED IN BRAIN, SIGNAL =   1; EXPRESSED IN BONE MARROW, SIGNAL = 1.3; EXPRESSED IN BT474, SIGNAL = 1.1; EXPRESSED IN PLACENTA, SIGNAL = 1.2; EXPRESSED IN HEART, SIGNAL = 1.1; EXPRESSED IN HBL100, SIGNAL =   1
tcaaaaccatgcctcataactgaaataatctgagtcctttaattgaaggaattcatcaagtgtccaacactttgaataaaaagggcccacaccagtaataagtaacacttgttaagttttaactgtgtgccaggtatcactttaagcacttaacatgtattaaccccatttaattttcaaaacaacagtgtgagtactgctattattcccattttacaaatggataaactgaggcagatcagctagtaagtggtggtgttctgtgttcctgtagaggaggaatgcattcagatgtccaacctgatgacaccacacaagtaccaagaaggcaccaaaagatgtatcgtgcatatcatgagattttccatgcttcaggcttccaagcaggtcaacaaatgagagaggcaggaggggtgactggttttgggtttaattgtggctagcaggtagggctggggtaagggtgttcat

SEQ ID NO: 1701 - DNA, 464 bp, Homo sapiens
  MAP TO AC006369.3; EXPRESSED IN FETAL LIVER, SIGNAL = 1.2; EXPRESSED IN ADULT LIVER, SIGNAL = 2.1; EXPRESSED IN HELA, SIGNAL = 1.5; EXPRESSED IN BRAIN, SIGNAL = 1.8; EXPRESSED IN LUNG, SIGNAL = 1.1; EXPRESSED IN BONE MARROW, SIGNAL =   2; EXPRESSED IN BT474, SIGNAL = 1.2; EXPRESSED IN PLACENTA, SIGNAL = 1.9; EXPRESSED IN HEART, SIGNAL = 1.2; EXPRESSED IN HBL100, SIGNAL = 1.7
tgattgtgtacactcccttcctttaaagaaaatattgactttgagttttcacaggtgctttcgatttaatcactgggtcctttatgcaaccacctgtccttgtttttcttttccatggtgaagaagtaatgctaactcctgcaaacctgagtttagctccagaaatccaacccaggagagaaaggacgtgaattgcccttcgatgcacgtattattccattctcacactgctataaagaactgcccgagactgggaaattttataaaggaaagaagtttaattgactcaccgttcagcatggctggggagccttcaggaaacttacaatcatggtagaaagcgaagagaaagcaagacaccttcttcacaaggtggcaagaaggagaagtgcctagcaaaggaggaagagtcccttacaaaaccatcagatctcgtaagaactcactcaccatcacgagaaccg

SEQ ID NO: 1702 - DNA, 453 bp, Homo sapiens
  MAP TO AC006967.2; EXPRESSED IN BONE MARROW, SIGNAL = 2.1; EXPRESSED IN FETAL LIVER, SIGNAL = 1.4; EXPRESSED IN HBL100, SIGNAL = 1.6; EXPRESSED IN HELA, SIGNAL = 1.9; EXPRESSED IN HEART, SIGNAL = 2.2; EXPRESSED IN BRAIN, SIGNAL = 1.8; EXPRESSED IN LUNG, SIGNAL = 1.2; EXPRESSED IN BT474, SIGNAL = 1.2; EXPRESSED IN ADULT LIVER, SIGNAL =   2; EXPRESSED IN PLACENTA, SIGNAL =   2
ttcctccttcactttctgccataactgtgaggcctccccagccacgtgtaactgtgagtctattaaatctctttttcattacaaattacccagtctcgggtatttcttcatagcagtatgaaaatggactaatacaggaagtcatttggcaattctaagaatcagaattacagtgggaattctaagatctacaaattttacaaaacagggcagttttattcctgagtccctcctggttttccccctttctctctggtggctcctgctccctctccatcctgcccagcagggccctcccacaatctgcacgccccacccatcaccgacctgcatagaaccttcccccagaatagttcctgaacctgttgctcttcgtcctcacctctctagtctcagccctcatcagcacctgcctgagcttttataatagtctgtgggtctccctgcacttat

SEQ ID NO: 1703 - DNA, 480 bp, Homo sapiens
  MAP TO AC009401.1; EXPRESSED IN BONE MARROW, SIGNAL = 4.5; EXPRESSED IN HBL100, SIGNAL = 2.3; EXPRESSED IN HELA, SIGNAL = 3.1; EXPRESSED IN LUNG, SIGNAL = 2.4; EXPRESSED IN BRAIN, SIGNAL = 3.4; EXPRESSED IN BT474, SIGNAL = 2.1; EXPRESSED IN ADULT LIVER, SIGNAL = 4.7; EXPRESSED IN FETAL LIVER, SIGNAL =   2; EXPRESSED IN PLACENTA, SIGNAL = 3.6; EXPRESSED IN HEART, SIGNAL = 3.3
caagacaaagcaaataagaacccaaaatattacctttattactgataaatcttatgttggaaattgtggtgtctattgtggagacttctagaatgatgcagtccacaggttgacattacatgtggttcactaaatctcctcaattgatatgatttggctgtgtctccatcctaatctcaccttggattgtagttctcataatccccacatgtcgtgggagggacctggtgtgaggtaagagaatcatgggggcagttaccccaatgctgttcttgtgatagtgagtgagttctcatgagatctgatggttttaaaaggggcttttccccttttgctcagcaggtctccttcctgccacctagtgaagaagttgcctttcttccctttgccttccagcatgattgtaaagcttcctgaggcctccccagccatgctgaactgtgagtcaattaaacctcattataaattatccagtctcaa

SEQ ID NO: 1704 - DNA, 458 bp, Homo sapiens
  MAP TO AC009411.1; EXPRESSED IN FETAL LIVER, SIGNAL = 1.4; EXPRESSED IN BT474, SIGNAL = 2.2; EXPRESSED IN HBL100, SIGNAL =   2; EXPRESSED IN PLACENTA, SIGNAL =   1; EXPRESSED IN HELA, SIGNAL = 1.4; EXPRESSED IN HEART, SIGNAL =   1; EXPRESSED IN BRAIN, SIGNAL =   1; EXPRESSED IN BONE MARROW, SIGNAL = 1.1
ccctcagctacaagagacagcagtccctttcttattcccttagattatttattaattcaataaaatttaggagttcactatgagccagtaccactaagaaaacaaaaaataagtaaattccaacgtgatagagtcaggatgcaggttaacaaatctccttcccaatcagcaaccatgaaggtgtacaaaacattaaaagaaacaactttagcactctggaaattggccaaaaattgagaagtatttatttatcaagctactgaactttaacaacaatgagggtctgtgatgttcttgcccaggactgtttccatccctgctgcctcaagtttgatagttcaaccggggtgaagcaggccatgaaaaccagcagcctcattgtcactgctgggaagagggagagagcttacatgatttagagcattgttgattaaagttgtgatgttgctggaaaccaa

SEQ ID NO: 1705 - DNA, 467 bp, Homo sapiens
  MAP TO AC009722.1; EXPRESSED IN ADULT LIVER, SIGNAL = 0.97; EXPRESSED IN FETAL LIVER, SIGNAL = 1.3; EXPRESSED IN PLACENTA, SIGNAL = 1.4; EXPRESSED IN HELA, SIGNAL = 1.2; EXPRESSED IN HEART, SIGNAL = 1.3; EXPRESSED IN BONE MARROW, SIGNAL = 1.3; EXPRESSED IN LUNG, SIGNAL = 0.91; EXPRESSED IN BRAIN, SIGNAL = 1.3
  unsure 136
tcagatgttacttagtcctacctggaaatcattttacttgttgagaatcagcttcatctcccagttccttcaataactattctaaatttttactaaactaactttgtcatttttatagcatattaattatcattgnaaagtagaacaaaaatagacagtatgaagcattactacccttcactttttccctaagcctacaaatgtatctcatctacacaaatcgtatactttagcctctgcattaggtaaggtcttcatcctcctatgcaaagccttccctctccctatgctctcggccatcaccatggtctctgcttcgtttctcttctgcactttcagcttctttctgtcaacgggctccatcctttttgcctctaaaactgctaaaggctctttcattctaacaaacaaacaaacaaaatctccaagaacctctggtctttcaaaagtagcactctcagtgtttt

SEQ ID NO: 1706 - DNA, 455 bp, Homo sapiens
  MAP TO AC009414.2; EXPRESSED IN PLACENTA, SIGNAL =  13; EXPRESSED IN HBL100, SIGNAL = 3.6; EXPRESSED IN HEART, SIGNAL =   1; EXPRESSED IN BRAIN, SIGNAL = 1.2; EXPRESSED IN BONE MARROW, SIGNAL = 1.1; EXPRESSED IN LUNG, SIGNAL = 1.8; EXPRESSED IN BT474, SIGNAL = 1.3; EXPRESSED IN ADULT LIVER, SIGNAL =   2; EXPRESSED IN FETAL LIVER, SIGNAL = 1.2; EXPRESSED IN HELA, SIGNAL = 2.4
atccattatgcagaggtggcctaggagggctggcacagagggccctgctcacaccaccacagcaccgccattccatagcgtctcggaaacacacccaccacataagcacctggtaaactttatgcatcttagttgggattatacaaactaccactctctgtaaacttgtctttgccttttcaagctcaaatactattactactcagggttacataatgctaaggcttacgactggatggttaacaaaaattaatgcttaccttcaattctctttaaagctgaaaggcacatatcctgacttggaaactcaaagggattgctgcaggttcgaatggtgttacattcacatttcccattgattatattgcagccagcaataaggttttcattgcatggtttaaaaccaagcagttggtcatcagtccagttctcatctgtaaaacaattaacaacca

SEQ ID NO: 1707 - DNA, 455 bp, Homo sapiens
  MAP TO AC009430.1; EXPRESSED IN ADULT LIVER, SIGNAL = 2.4; EXPRESSED IN BT474, SIGNAL = 1.4; EXPRESSED IN FETAL LIVER, SIGNAL = 1.3; EXPRESSED IN HELA, SIGNAL = 1.5; EXPRESSED IN PLACENTA, SIGNAL = 2.1; EXPRESSED IN HBL100, SIGNAL = 1.8; EXPRESSED IN HEART, SIGNAL =   1; EXPRESSED IN BONE MARROW, SIGNAL = 1.9; EXPRESSED IN BRAIN, SIGNAL =  12; EXPRESSED IN LUNG, SIGNAL = 1.2
  unsure 22
  unsure 33
ttcctgcagagttcaggtccanatatttccccntagggctaaagtcttctatgggatcaagttgagcctatggggatgggcattcctcgccgtgctctgctacagatgctcccacaccaaaccctctgggctccacattggctggtgtgcttttcctactatttttctaagaagctctccctgccaactcaagtttccatggtggtcaaagcgtctcttcctgctggaattccagaggcctgtggcaagagcaagttgctcctttccagttcaactcacctgttcccccagagttgtcaggggccaggaaaaactctctgtgtgtggtagcctcgtgcaaggttcccagttttcctttctcttcagcccagcttctgtgtctttcctccatccactctcagtggcttctctctgaagatctgttgggagtgtgccagttgtcccagttcctcggt

SEQ ID NO: 1708 - DNA, 492 bp, Homo sapiens
  MAP TO AC009706.2; EXPRESSED IN LUNG, SIGNAL = 1.9; EXPRESSED IN ADULT LIVER, SIGNAL = 4.3; EXPRESSED IN BT474, SIGNAL = 1.4; EXPRESSED IN FETAL LIVER, SIGNAL = 1.5; EXPRESSED IN HELA, SIGNAL = 1.4; EXPRESSED IN PLACENTA, SIGNAL = 4.9; EXPRESSED IN HBL100, SIGNAL = 1.8; EXPRESSED IN HEART, SIGNAL = 2.1; EXPRESSED IN BONE MARROW, SIGNAL = 1.7; EXPRESSED IN BRAIN, SIGNAL = 1.7
  unsure 109
tggagtcctgtgtgagggacaaacattcagaacctcttagcagtgttctggaatcctaagtgagagacaaacactcagaacacagcagcagtgttctggtaccctatgntgaggaacaaacattcagatcacagcaggattgttatggaatcctatgtgagggacaaacactcagaacacagctggagtgttttgcaatgttatgtgagacacaaatattcagaccctcgtagcagtgttctggaatcctatgtgagggacaaacattcagaccccagcagcagtgttctggaatcctatgtgagggaaaaacattcaaaccctcgtagcagtgttggggaatcctatgtgagggaaaaactttcaaagagtcgtagcagtgttctggaatcctatgttacggacaaacgttcagactctcgttgcagtgttctggaattctatgtgagggacaaacactcagaatccagcagaagtgttctggaatccggt

SEQ ID NO: 1709 - DNA, 489 bp, Homo sapiens
  MAP TO AC010881.1; EXPRESSED IN BT474, SIGNAL = 2.2; EXPRESSED IN HEART, SIGNAL = 2.2; EXPRESSED IN LUNG, SIGNAL = 1.2; EXPRESSED IN BRAIN, SIGNAL = 2.2; EXPRESSED IN FETAL LIVER, SIGNAL = 2.7; EXPRESSED IN ADULT LIVER, SIGNAL =   2; EXPRESSED IN PLACENTA, SIGNAL = 2.7; EXPRESSED IN HELA, SIGNAL = 2.3; EXPRESSED IN HBL100, SIGNAL =   2; EXPRESSED IN BONE MARROW, SIGNAL = 2.4
gaaaaggggaggtttttctcctttctctgccttttgttctatttaggccctcaacagattggataatgcgcacccatattggggagtgacaccatcttcactgagtcaaccgattcaaatactaatttcaccactgggcatcccatggcattaaccatcatatttgttttgtcagctttcatccgtataatctttttatttcaatcaacttcctctttttacttaaagaagttcagtttcatcctcagcaataatctccaggatgttatgggtttcatttgctgcttacgctatttttttttcgaatacagtaccacttgccagcttctcagaatagcagcagacattccatactggctctatgaaaactggcagatgctggggcctgctgagtgctggccgttggactctcttgctgtacagcctgctctgatgctagccccaggtgagggaacccttatcaatgaggggctgtgttcctttccaatc

SEQ ID NO: 1710 - DNA, 462 bp, Homo sapiens
  MAP TO AC010889.1; EXPRESSED IN BONE MARROW, SIGNAL = 2.6; EXPRESSED IN FETAL LIVER, SIGNAL = 2.3; EXPRESSED IN HELA, SIGNAL = 2.9; EXPRESSED IN BRAIN, SIGNAL = 1.9; EXPRESSED IN LUNG, SIGNAL = 2.1; EXPRESSED IN BT474, SIGNAL = 2.8; EXPRESSED IN ADULT LIVER, SIGNAL = 2.1; EXPRESSED IN PLACENTA, SIGNAL = 3.3; EXPRESSED IN HEART, SIGNAL = 1.8; EXPRESSED IN HBL100, SIGNAL = 2.6
ctctggcaaatctctgacccaacaggagtatgcgaccagtggttggaacctgaatgtgatgccagtgctagatcagtctgttctctgtcacatcaatgcagacatctcaggcatgaaggtgccctggctgtacgtgggcatggttttctcagcattttgttggcatattgaggatcactggagttactctattaactatctgcattggtgagcatgaccccaatggctcagttggatatcaagactgccctcatatgcaacgatgtatatagacttgacgtgtcttctgtctacgtgagcaggggtgagccgaagacctggtatggtgtaccctccctggcagcagagcatttggaggaggtgatgaagatgctgacacctgagctgtttgatagccagcctgatctcctacaccagcttgtcactctcatgaatcccaacactttgatgtcccatggtgtg

SEQ ID NO: 1711 - DNA, 473 bp, Homo sapiens
  MAP TO AC010104.1; EXPRESSED IN HEART, SIGNAL = 1.5
agattcggccatctcttggccattttttgtctgtgcacatgtttgtgcagagttaatctaaagaccttatttagcttttgtaggcatgtgattatgcagataaattggtatgtgagggggattaaagctatgtttgcatatgttgcattgcctccagggttagcagtgggatttaggggttgggtggggtggaagaggtggtggtgtgtgttccttacttgaatctggaatttatgccattgttccatttttacatctttcagaaatcagctggtgtcactgtacatatgtttagagtcgttgctaaggtgaaaagcccagcagcccacacagggtttctggaaggctgggaagctgcgtggcggggtctgttcacattggggccccatccctccaatctgtgggaatctcctgttccaacttaaattgtctgcttccttttgtttgattgcctgattacctaataattaaaa

SEQ ID NO: 1712 - DNA, 399 bp, Homo sapiens
  MAP TO AC010130.2; EXPRESSED IN BT474, SIGNAL = 1.2; EXPRESSED IN HBL100, SIGNAL =   1; EXPRESSED IN HEART, SIGNAL = 0.87; EXPRESSED IN LUNG, SIGNAL = 1.2; EXPRESSED IN BRAIN, SIGNAL = 1.5; EXPRESSED IN FETAL LIVER, SIGNAL = 0.9; EXPRESSED IN PLACENTA, SIGNAL = 1.6; EXPRESSED IN BONE MARROW, SIGNAL = 1.1
acttgaaggaaagtgcccgccttcttgcatatattgcaagaataagcattcagtcaataatcggtcatcttcaacacttcttacaaataaactaggttttgtagtctattgcaagtcagcatttctcactggctatgatggagatggacttgggatcctaggaagaaggcccggaaacaacatttcttctccttttatgatttcagtgaagaatgcaaattgcacatcagattttgaggaatactttgccaaaagaaaactggaggaacgcgatggtcatgcagtcagcatcgaggagtaccttcagcgcagtgacacagccattatttacccagaagcccctgaggagctgtctcgccttggcacgccagaggccaatgggcaagaagaaaatggtga

SEQ ID NO: 1713 - DNA, 410 bp, Homo sapiens
  MAP TO AC010798.1; EXPRESSED IN BT474, SIGNAL = 1.4; EXPRESSED IN HBL100, SIGNAL = 1.2; EXPRESSED IN LUNG, SIGNAL = 1.4; EXPRESSED IN BRAIN, SIGNAL = 1.4; EXPRESSED IN ADULT LIVER, SIGNAL = 1.2; EXPRESSED IN FETAL LIVER, SIGNAL =   1; EXPRESSED IN PLACENTA, SIGNAL = 1.8; EXPRESSED IN HEART, SIGNAL = 1.5; EXPRESSED IN HELA, SIGNAL = 1.5; EXPRESSED IN BONE MARROW, SIGNAL = 1.6
tttggctcacatcttttcccaaagcttcagaatcatttatttaatttcctactacaattacaattttgatgtctcactagcatatcaaagtcaatatatcacaaattgagttttacagagttttactaatggtattctctttctttgcttgctaacttagatattggtattgttatacacccaacattgaaaactagggttatcctaattttacccccgtcatttatctattccctccctgctacacacaccttaaggggattcccaaatcctgtttattcttgctcttatacatctccaaaatccatcttctatcatccctgcccttatggatcagattctcaacatctctttcttgacctactgcaatagtctcctcacaaatacctctgtctgtctggctttccttg

SEQ ID NO: 1714 - DNA, 472 bp, Homo sapiens
  MAP TO AC010087.2; EXPRESSED IN PLACENTA, SIGNAL = 1.5; EXPRESSED IN BONE MARROW, SIGNAL = 1.6; EXPRESSED IN FETAL LIVER, SIGNAL = 1.4; EXPRESSED IN ADULT LIVER, SIGNAL = 1.4; EXPRESSED IN HEART, SIGNAL = 1.4; EXPRESSED IN HELA, SIGNAL = 1.4; EXPRESSED IN HBL100, SIGNAL = 1.2; EXPRESSED IN BRAIN, SIGNAL = 1.5; EXPRESSED IN LUNG, SIGNAL = 0.89; EXPRESSED IN BT474, SIGNAL = 1.4
atgcatttttctcctgtggctttcccatatctgttctgcccacagggcccctacaggaggtcagggaatgtgctgtcactgtgagtgagggccaggctggccagcagggagtggtgcaggctttgggtgatgtttggaatttagaaggtggagcaggatgtcagagggaggtcaccctgtgtatctgacgctgcctctgtagagaggctggtagagaggggggctctgctgaagagaagagattttgggaaatgggcaggggatcttacataaatgacatgattaaaaaaaaagatgacagagtagaagatgaaggctgtcgatttgaaaatgaaagaatatcatttcgaggccgtcgcaaaaggagatctgttatccataagatggaagttaatgctgtcacagagtctgaggactttggaaagctttttgagaggctactggaagcagcagcagcaggcagggtagatac

SEQ ID NO: 1715 - DNA, 471 bp, Homo sapiens
  MAP TO AC010879.1; EXPRESSED IN FETAL LIVER, SIGNAL = 0.99; EXPRESSED IN BT474, SIGNAL = 1.3; EXPRESSED IN PLACENTA, SIGNAL = 1.7; EXPRESSED IN HBL100, SIGNAL = 1.2; EXPRESSED IN HELA, SIGNAL = 1.1; EXPRESSED IN HEART, SIGNAL = 0.95; EXPRESSED IN BONE MARROW, SIGNAL = 1.3; EXPRESSED IN BRAIN, SIGNAL = 1.4
aaagacattcagtatttgctccagatagttgctggaggctattatccttacaatcttctatattaattacaatggggcatctcctgaatttcagaggaatacttgtttcctgattcctgatgtatatactatcagcatatacataaatacataaatacatggctgtgaaatcacataaagcctttacttccatacttgacttcctgcagaacctccacatttcttatgagcttccatttttctttcttcttggcatttatcattacttaatgagaggtttccaaagtttagagtagtacattaattaccatttctcctcttcctcctcctgctcctcctcctcttcctcctcctcttccctttccccttactctctttctcccccaccttctcctctttcttcctcttcttccttcattatttatttatttatttatttatttctgagacagcattttgctctttcaccca

SEQ ID NO: 1716 - DNA, 473 bp, Homo sapiens
  MAP TO AC010092.1; EXPRESSED IN BT474, SIGNAL = 4.8; EXPRESSED IN HBL100, SIGNAL = 4.8; EXPRESSED IN BONE MARROW, SIGNAL = 4.1; EXPRESSED IN LUNG, SIGNAL = 3.9; EXPRESSED IN ADULT LIVER, SIGNAL = 3.8; EXPRESSED IN FETAL LIVER, SIGNAL = 4.6; EXPRESSED IN PLACENTA, SIGNAL = 6.8; EXPRESSED IN HEART, SIGNAL = 4.2; EXPRESSED IN HELA, SIGNAL = 5.7; EXPRESSED IN BRAIN, SIGNAL = 3.1
agaaagagtgaggtggggagatagaagatcccatgaaattatatatggcaacacatctttccctaatctaggggtttagagaatacctcacttaaaaaaattctttcaaatgagacctgaaggataagtacaaattggttcacaagagtggaaccaaaaggttacgaatgtatattttatggtttttcatgttttttatgcattttttccaagtttagccttgaaaagtaatggaaggttaatatggttttatttgtttatttttacacaggcaacaagaatgggtgaatcagcaaagggaagatattgaaaggcaaaggaaacttctagccaaacgcaaacctcccacagctaataattctcaggcaccctctaccaattctgaaccaaaacaaaggaaaaacaaagcagtcaatggagcagagaatgatccctttgttagaccaaatttaccacaactgtaagcctccatt

SEQ ID NO: 1717 - DNA, 477 bp, Homo sapiens
  MAP TO AC010885.1; EXPRESSED IN BRAIN, SIGNAL = 1.7; EXPRESSED IN BONE MARROW, SIGNAL = 1.8; EXPRESSED IN LUNG, SIGNAL = 1.2; EXPRESSED IN BT474, SIGNAL = 1.8; EXPRESSED IN FETAL LIVER, SIGNAL = 1.4; EXPRESSED IN ADULT LIVER, SIGNAL = 1.3; EXPRESSED IN HBL100, SIGNAL = 1.6; EXPRESSED IN HELA, SIGNAL = 1.6; EXPRESSED IN PLACENTA, SIGNAL = 1.8; EXPRESSED IN HEART, SIGNAL = 1.5
atgactcccacatcagcaccccaattaaatagactttttcctgtttatcacctttcctttaatttcctcattcaaagcattattcagttgtcctctcctcttgctgcttaagcctctcaccagctctcagtcaatgctcccagatgcagctttcattgcatgtgatgttgtttaatttcacttgtcttatctataatcacatcaagccatttatttgttaataggctgtttggtggcttcacagttggaattgctgtacatcacatttcatttccacaaggacatcctttatgccggtctgccttatgtggcattcgtctcttcctcttgccaggctgggccagcttctcccgctgtaccttccacatcagctgttcattttccccctgctgctgtcactgataatttccaggttaaatcttataagtggaaattggatccacagctggagttgaaacgcagctccttggagttatt

SEQ ID NO: 1718 - DNA, 449 bp, Homo sapiens
  MAP TO AC010102.1; EXPRESSED IN PLACENTA, SIGNAL = 5.4; EXPRESSED IN BRAIN, SIGNAL = 1.6; EXPRESSED IN FETAL LIVER, SIGNAL = 2.7; EXPRESSED IN HEART, SIGNAL = 1.5; EXPRESSED IN HELA, SIGNAL = 5.7; EXPRESSED IN HBL100, SIGNAL = 4.6; EXPRESSED IN LUNG, SIGNAL = 6.1; EXPRESSED IN BONE MARROW, SIGNAL = 2.5; EXPRESSED IN ADULT LIVER, SIGNAL = 2.9; EXPRESSED IN BT474, SIGNAL = 2.3
ctctcatggcatttgtagcgggaggtgtggcagacaggacagtgcccaaagaaggccaggagaggcctctctgcagagcgacgtctgagcggagacctccatgaagaggtcagcagggagaaggagacactgcctagctgggcagagctgaaggcaggccaggctgggcagcgcctgcatcccgcctgaggcgtccaggtccgttcggggaagtgggtggagagtgggtgagtgctgactggcaggtgctgactgttgcagatcggatcaacatcaagaggaagggagcgtggccctccaccctcctgtccgtgcagaacgtcatcgactgcggtaacgctggctcctgtgaagggggtaatgacctgtccgtgtgggactacgcccaccagcacggcatccctgacgagacctgcaacaactaccaggccaaggaccagggtaggctg

SEQ ID NO: 1719 - DNA, 465 bp, Homo sapiens
  MAP TO AC010925.1; EXPRESSED IN PLACENTA, SIGNAL = 3.7; EXPRESSED IN BRAIN, SIGNAL =   1; EXPRESSED IN FETAL LIVER, SIGNAL = 1.3; EXPRESSED IN HEART, SIGNAL = 6.3; EXPRESSED IN HELA, SIGNAL = 1.7; EXPRESSED IN HBL100, SIGNAL = 3.1; EXPRESSED IN LUNG, SIGNAL = 0.89; EXPRESSED IN ADULT LIVER, SIGNAL = 1.2
tggtgacttgtcaaagagatggcagtgatgaaacagttgtcactgccttcatgtgcagtttgttttccttttcatgtatatacagagtgatatatgatacttacatgtgtcatttcaaacatagcatacttttttaatgacacacacattgacagtgtgttttataactgatggcaccttaaattcaatgagataacaacataagaagagcctctttgttctaagcataatggcacatgtcttatttatcatttcatatattctttttgcagactttatgcagttggtggtcgtgatggaagttcttgtctcaaatcagtagaatgttttgatcctcatactaataagtggacactgtgtgcacagatgtcaaaaaggagaggtggcgtaggagtgacgacctggaatggactgctgtatgctataggggggcacgatgctcccgcatccaacttgacttccaga

SEQ ID NO: 1720 - DNA, 491 bp, Homo sapiens
  MAP TO AL049553.14; EXPRESSED IN HELA, SIGNAL = 2.3; EXPRESSED IN HEART, SIGNAL = 2.4; EXPRESSED IN BRAIN, SIGNAL = 2.6; EXPRESSED IN BONE MARROW, SIGNAL = 2.8; EXPRESSED IN LUNG, SIGNAL = 1.2; EXPRESSED IN ADULT LIVER, SIGNAL = 1.9; EXPRESSED IN BT474, SIGNAL = 2.4; EXPRESSED IN FETAL LIVER, SIGNAL =   3; EXPRESSED IN PLACENTA, SIGNAL = 2.5; EXPRESSED IN HBL100, SIGNAL = 2.4
caaggaggcctcatcagaagcacaagtgggttctctcttcccacctgcatctatggagcccctgctgcgtgttcaacatccttctgggccccagggcactgagacctggctgcccagctcctcctgcctggtggggcacacacagctgggccggggatagatgtgcacacctgcaccaaactgcaatagggtgtctatctataggagacaggaggtcctatgtcagatcctggccctgcctctttatggctaggagcctgggcaagcccctgaggccatgggagggaggatttctttctccctcggttgctgtgggaatcaccaagcactgaggtcagagcctggagggattctgtaggtcttccttccatcatcatcatcattgtcatcgtcgtcatcatcatcatcatcatcgtcgtcgtcgtcatcatcatcatccaaggacatagaggctagtggttaagaacacgagctctggagtcagactgcct

SEQ ID NO: 1721 - DNA, 467 bp, Homo sapiens
  MAP TO AC011302.1; EXPRESSED IN HELA, SIGNAL = 9.2; EXPRESSED IN PLACENTA, SIGNAL = 8.5; EXPRESSED IN HBL100, SIGNAL = 7.1; EXPRESSED IN HEART, SIGNAL = 7.4; EXPRESSED IN BRAIN, SIGNAL = 6.8; EXPRESSED IN BONE MARROW, SIGNAL =   9; EXPRESSED IN LUNG, SIGNAL = 5.5; EXPRESSED IN BT474, SIGNAL = 6.4; EXPRESSED IN ADULT LIVER, SIGNAL = 7.3; EXPRESSED IN FETAL LIVER, SIGNAL = 9.2
tgtctatcactgccctggtgctgataccaaatttgagatctcacttggattattgctgattttgtctactaaactcttcaccttaatgcattcaacacacaataccactaagctagtcttctgctgtagaattccagctatgctacttcagtgaaaaatcctcagattggatcttcaaatttacacaattaactccacactttggattagtaatcaagggctttgactacttttcaagtcttccatttcattttttactccatgttttaacacaaggattcttattgtcaaccaacaatttgcaaccctctatcaaagacttttctcaccatcactatcatcttcatcatcatcacaaccatcaccatcatcaccatcatcattgatatcatcatcatcatcctgtttatcaactgcaaggtcactcctcttactcctctctccctttcaccaccacactttcaggc

SEQ ID NO: 1722 - DNA, 489 bp, Homo sapiens
  MAP TO AL049823.13; EXPRESSED IN BONE MARROW, SIGNAL = 0.97; EXPRESSED IN BRAIN, SIGNAL = 0.93; EXPRESSED IN FETAL LIVER, SIGNAL = 0.91; EXPRESSED IN PLACENTA, SIGNAL = 1.3; EXPRESSED IN HELA, SIGNAL = 1.1; EXPRESSED IN HBL100, SIGNAL = 1.4; EXPRESSED IN HEART, SIGNAL = 1.3
gttgctttctggccactctgtgggcagtaattattggcaaaacccccaagtcagaaagtccatctaggttgtgaattgaaataaataaaagactggtcttaggctatatccttgctgcctgaaataagacctactggccccctctaagacttatttatgtttggtcgagtctgtgattctgggaggcccagtttcagtcaataatacaaattggttttatcctaatgcctggattctggttactagtagtcttaattaaaaatttcataaaaattaaactgatttgttctcaccctctgctggtaagattattccaaatggccaaccaattggcatactcataaggaaatttgacttcagccaagaatgtgttagcagcagagtagattggtgggagaggcaactcaccaaagccctgagtatccatccctgtactttcttgctagaatcccaagaaaagaaggtctcggctgctctttattcgggcta

SEQ ID NO: 1723 - DNA, 495 bp, Homo sapiens
  MAP TO AC011347.1; EXPRESSED IN PLACENTA, SIGNAL = 3.9; EXPRESSED IN HBL100, SIGNAL =   4; EXPRESSED IN HELA, SIGNAL = 3.2; EXPRESSED IN HEART, SIGNAL = 1.6; EXPRESSED IN BRAIN, SIGNAL = 4.3; EXPRESSED IN BONE MARROW, SIGNAL = 3.8; EXPRESSED IN LUNG, SIGNAL = 2.7; EXPRESSED IN ADULT LIVER, SIGNAL = 2.7; EXPRESSED IN BT474, SIGNAL = 2.1; EXPRESSED IN FETAL LIVER, SIGNAL =   2
agtggaagatgaggacggtggtaagagagatgcatcaaatatcaagcaggatctttatggccattgcaacaactttaactttgagtctgagtgaggtggaaggttttgagcaggggagtgtcattctcttacatgggtctggtggagagtaccagccctagtctgagagagcctgctgtgcaaccttgtagatctttaatgatgtcttgcaccagcatggtagtaaaagatgtggtaaaaaaaaaaaaaaaaaaaaaaaaaaaaaaaaaaaaaaaaaggtcagctgctggatttattctgaagatagtgccaccagaatgtgctgatgaaatggacaatgtgaggtatataggcaagacaggaatcaaggtttacttggagggtttaggcctgaccaactgggtgaataaaattgccattgactgagaaggcataaacttagaagaaggagggctttagtattttccaggtggaagctggtggtgctgatgacta

SEQ ID NO: 1724 - DNA, 488 bp, Homo sapiens
  MAP TO Z97832.10; EXPRESSED IN BRAIN, SIGNAL = 0.97; EXPRESSED IN BONE MARROW, SIGNAL = 1.1; EXPRESSED IN FETAL LIVER, SIGNAL = 1.5; EXPRESSED IN BT474, SIGNAL = 1.1; EXPRESSED IN ADULT LIVER, SIGNAL = 1.2; EXPRESSED IN HELA, SIGNAL = 0.92; EXPRESSED IN PLACENTA, SIGNAL =   1; EXPRESSED IN HBL100, SIGNAL = 1.2; EXPRESSED IN HEART, SIGNAL = 1.1
agctcttctcaggccagtagtcatcttacagtgcctagaatgcctttttaacttttttaaattgtaagaatatttaacaagagatctaccctcttaagtttttaagtgtacactacagtatttatgtgcctataggcacactgttgtacagtagatctctcgaacttattcatcttgcgtaatgcagggtacctgaaactctaaccaaaggccctcactcactgcctactctccggctcctcctccaactccatcgttgtttttctgtctccctactccttcccccagatgtggatgaatgcagcatcaaccggggaggttgccgctttggctgcatcaacactcctggcagctaccagtgtacctgcccagcaggccagggtcggctgcactggaatggcaaagattgcacaggtgggcagtgccctctgctggccaaagatgacactgccatttcagggagcagttggggttctggaaagcataga

SEQ ID NO: 1725 - DNA, 486 bp, Homo sapiens
  MAP TO AL031772.4; EXPRESSED IN PLACENTA, SIGNAL = 1.2; EXPRESSED IN HELA, SIGNAL = 1.1; EXPRESSED IN HBL100, SIGNAL = 1.2; EXPRESSED IN HEART, SIGNAL = 1.4; EXPRESSED IN BONE MARROW, SIGNAL = 1.2; EXPRESSED IN BRAIN, SIGNAL = 1.1; EXPRESSED IN FETAL LIVER, SIGNAL = 0.94; EXPRESSED IN ADULT LIVER, SIGNAL = 1.2
gactctgcaaccagactgcctgagttggaatccaggcaggaccatttatgagctgcatgctcttggacaacttacttaacttctctttgtgtcagtttcctctgtataaaatgcagaaaacaacagaatgtaccttaaatggttcagaagaatgaaatgaaaaaaactatacacatgaaatgctgagaaagcacctggcatctagtaaacttcctccccactcctactgcttcaaggcccacctctctacataccaattttaccaggattgcccccctatcctgactccaacccttctcctcccctccctgatggtctggccccaatcttacttgagtccctcatcatggggactcttcataatccccaccagctgacgactcaggagaggaagcctcttactcatcttagtgtttccggcaccactgggcccaggctttgtaaaactccagtgctgaaaaaagtcgcattaaagatactggctca

SEQ ID NO: 1726 - DNA, 472 bp, Homo sapiens
  MAP TO AL078590.5; EXPRESSED IN BONE MARROW, SIGNAL =   2; EXPRESSED IN BT474, SIGNAL = 1.2; EXPRESSED IN HBL100, SIGNAL = 1.4; EXPRESSED IN HEART, SIGNAL = 1.4; EXPRESSED IN LUNG, SIGNAL =   1; EXPRESSED IN BRAIN, SIGNAL = 1.3; EXPRESSED IN ADULT LIVER, SIGNAL = 1.2; EXPRESSED IN FETAL LIVER, SIGNAL = 1.5; EXPRESSED IN PLACENTA, SIGNAL = 1.2; EXPRESSED IN HELA, SIGNAL = 2.2
aagggaccctcacttcaaggaaactctcttcacctttagtgtttctcctgtgttaagatacttgtgttaccgataatgtgctgtgtccacttagcatttgttaaacttggctgcacatcccatccaccttggcccctttccactttcaaatgcacctgggactataatcacaaaatatcaggctagacgcactgttctccttggtccagatggaaggctgtgaaagtccatggactttgagtcagataaatgtggttccactactaactacatagtggttttgatgtggagcttggtaataaggagcagagagttcagatcaagagagtttacgtagagattcacatgaaggcaaatctcagggaaaaccaggaacagaaaacaaagtgcttctgggtcttggtgagcctgggactggagctatactggattcaggacaacactagaggcccctggggcttgtgaaactacc

SEQ ID NO: 1727 - DNA, 472 bp, Homo sapiens
  MAP TO AL117694.1; EXPRESSED IN PLACENTA, SIGNAL = 4.3; EXPRESSED IN BONE MARROW, SIGNAL =   4; EXPRESSED IN FETAL LIVER, SIGNAL = 2.8; EXPRESSED IN HELA, SIGNAL = 3.9; EXPRESSED IN HBL100, SIGNAL =  14; EXPRESSED IN BRAIN, SIGNAL = 2.8; EXPRESSED IN LUNG, SIGNAL = 3.2; EXPRESSED IN BT474, SIGNAL = 3.8; EXPRESSED IN ADULT LIVER, SIGNAL = 2.7; EXPRESSED IN HEART, SIGNAL = 2.5
gcaacaccgtgcagtcaggcctctggatgggggaggtggcatgccacacacacaggactccacagagcaaggacgtggctaagcaggtgcaggcatgggaacaggggtctaagtccttggttttgggcagggctgagactagaagaaaagcgctgttgcaatacaaagcctccacaggcgaccagatggaggtgctggggacccactgcccaatgcccccaagtgatgcatgggcccaggaggcagcacaaaaaaggccaagagaaccagggggacaaagaaaatcaggctccttggggccaccagaggtaggccttaccttcggctccgatggacaccagtttgacgcctttgctggctatgaaatccagggccttgttgacgttggagatcttgtgcactctcatcttgcctcgctctggcttggccaagcgttcacctgtttggatcaagagggaggaagaggaaggtg

SEQ ID NO: 1728 - DNA, 477 bp, Homo sapiens
  MAP TO AL035685.13; EXPRESSED IN BT474, SIGNAL = 1.1; EXPRESSED IN HEART, SIGNAL = 1.5; EXPRESSED IN BONE MARROW, SIGNAL = 1.7; EXPRESSED IN LUNG, SIGNAL = 0.91; EXPRESSED IN ADULT LIVER, SIGNAL = 1.3; EXPRESSED IN FETAL LIVER, SIGNAL = 1.4; EXPRESSED IN PLACENTA, SIGNAL = 1.1; EXPRESSED IN HELA, SIGNAL = 1.2; EXPRESSED IN HBL100, SIGNAL = 1.3; EXPRESSED IN BRAIN, SIGNAL = 1.5
tgaaatgagacagataagagccagataaacctataagataacacgtggcaaaagggctatgaaaaaaataaaggaaggccgagaaatggagcataaaggcagggacgggaggtgtgttacaatttccttgcgaacatgaccaagccaatccttcctgcccgcccttgttccactgagcactcattacttgcaccatcataaatacagtttaaagattattttttagctccctccaccccatgagcaataaacctccctctccagttggcaccaacagtacacttgtggtgaccgcagtgaccaacaaactgttgcacttccccacgttctgctgccagcccatctcccgggctggaaagccgcaagcccttggcactttcttctgccccttgcctgacagtgtttgcctttctttggatgatggagcagtgagatcatccaggtgccccccaggggcttggcagagctgcttacttg

SEQ ID NO: 1729 - DNA, 472 bp, Homo sapiens
  MAP TO AL109897.6; EXPRESSED IN PLACENTA, SIGNAL = 4.8; EXPRESSED IN BT474, SIGNAL = 2.8; EXPRESSED IN HEART, SIGNAL = 2.5; EXPRESSED IN HELA, SIGNAL =   6; EXPRESSED IN HBL100, SIGNAL = 4.3; EXPRESSED IN BRAIN, SIGNAL = 2.7; EXPRESSED IN LUNG, SIGNAL =   3; EXPRESSED IN BONE MARROW, SIGNAL = 4.5; EXPRESSED IN ADULT LIVER, SIGNAL = 4.8; EXPRESSED IN FETAL LIVER, SIGNAL = 2.9
tctgaagctgagctggcacccaagccacagatcaagttcttcccactcttttctcctctttcctcaagcaaagagtctctctgcatggccaccaccatcccaagcccatggcaagtacagcctggctactgccgatgttcactcaaggcccaagagttctccagtcagttcgtggtggatgctgccagtgctgaatctcctgctttagaacagtgggctcccctttggcccagggcacatccagaaatgccatccaagagtcaaggccggggatcagggaccccaggagcccgcttggtgctcgttaacccactctggctgagctggtacccaggctgccagacaaagtcccccttactcttccctttcctttccttattcagaggcagtctctccccatggccaccacagctgggaatgtgctgggtcatacctgaagccagcatagctctcagtctcacctgtgacccgt

SEQ ID NO: 1730 - DNA, 471 bp, Homo sapiens
  MAP TO AJ239329.2; EXPRESSED IN LUNG, SIGNAL =  11; EXPRESSED IN HEART, SIGNAL =  29; EXPRESSED IN PLACENTA, SIGNAL =  26; EXPRESSED IN BONE MARROW, SIGNAL =  19; EXPRESSED IN ADULT LIVER, SIGNAL =  14; EXPRESSED IN BT474, SIGNAL = 6.4; EXPRESSED IN FETAL LIVER, SIGNAL =  21; EXPRESSED IN HELA, SIGNAL =  21; EXPRESSED IN HBL100, SIGNAL = 9.9; EXPRESSED IN BRAIN, SIGNAL =  20
acggaattctccctccagactgaaacacagtaatccgtttgagtttccagccattagaatcaagactgcaacatcaacttttgcctgaatttctaacccgcaaccagctctgcagactttggatttgccaacccccacagttgcataaaccaattccctaaaatttctctatctatctacctacctatctacaaacatatatgtatctatcctattatttctatatatataaatcttatatcctattatcctatataaccccctctctctcatatatacacacacacacacacacacacacacacacacacacacacatatacacacacacatacattttctcatctttctagagaaccttgattaatacactattcgttttgatcatttttctaccagtaacaatgttcatatcttgtcttatgatgagatacactgcagcgattttaccactgctacacccactgagaa

SEQ ID NO: 1731 - DNA, 471 bp, Homo sapiens
  MAP TO AL121578.1; EXPRESSED IN ADULT LIVER, SIGNAL = 1.1; EXPRESSED IN HEART, SIGNAL = 0.97; EXPRESSED IN PLACENTA, SIGNAL =   1; EXPRESSED IN HBL100, SIGNAL = 0.96; EXPRESSED IN BONE MARROW, SIGNAL = 0.95
caactccctgaccaatgaggggctggagcatagggatacagtgggtggcaataagcactggtaccttgagaggctcaggccagcaggaaaatcaagctgtgccaattggggcaaaacccagcaattcctcatggctggaaacaaaatgttctgtaggcctaggagacaacgcctttcccattccagaagagcagagctgcagtttcctgtcagccacttggaacgctgcctgcgagaaagtcagcatgcccggcacctgagctcaaccacacctgttttcctggctggtgttctcgagtatctgacagccaacatcctggaaaaggtgggcaaggaggtcaagaacagctgcaggctgtgcatcaccccagaacacgtgaagagggcactgcaaaaggatgagcagctcagatggatcttggagttggaagatgacacccactctcaagtagaagaaatgccccaatctga

SEQ ID NO: 1732 - DNA, 470 bp, Homo sapiens
  MAP TO AL035415.20; EXPRESSED IN HBL100, SIGNAL = 2.5; EXPRESSED IN BRAIN, SIGNAL = 1.2; EXPRESSED IN BONE MARROW, SIGNAL = 1.3; EXPRESSED IN ADULT LIVER, SIGNAL = 1.5; EXPRESSED IN BT474, SIGNAL = 1.4; EXPRESSED IN FETAL LIVER, SIGNAL = 1.1; EXPRESSED IN HELA, SIGNAL = 1.3; EXPRESSED IN PLACENTA, SIGNAL = 1.2; EXPRESSED IN HEART, SIGNAL = 1.1
ctgggttttgaatcctctggattttaaaggatttgggttgtgactggtggcttggactcccatgtgaattctagtctccactttgtcatttcttggctggaaatcgtcagggatcctcatttcctggccgggagcctcagttttcccatctgtagaatgggggaatgctgattcctttgcatagtggttgtgagggttaagtaatatagtacagtcatccgtcaatatccagggaggattgattctaaacccccccaccgcccgtccctgctgtcatgtctcacccctgcaccccctcaaggggcagagctggcagtcctgtcacagactggtactgataaatggcgtctctgagatgtctgtgcaccttatctgtattgggcagaatggtcctgtcccactcctgcatatggccactgcatggctaaatggtaaggcccagagggcatgcagcttggcatcagtaggaa

SEQ ID NO: 1733 - DNA, 477 bp, Homo sapiens
  MAP TO AL050349.8; EXPRESSED IN HELA, SIGNAL = 1.1; EXPRESSED IN PLACENTA, SIGNAL = 1.3; EXPRESSED IN HBL100, SIGNAL = 1.2; EXPRESSED IN HEART, SIGNAL = 1.4; EXPRESSED IN BRAIN, SIGNAL = 1.1; EXPRESSED IN BONE MARROW, SIGNAL = 1.3; EXPRESSED IN ADULT LIVER, SIGNAL = 1.3; EXPRESSED IN BT474, SIGNAL = 1.1; EXPRESSED IN FETAL LIVER, SIGNAL =   1
tactcagcaccacaccttgcacaggtgggtgtttaatgaactgagtgtttaatgaacatggtgatggtcatgatgacacccttagtcatcatgggagtaaacaacacaagatgcccacagtcaacagaactggtctttgagttgagttcgtcccgtcgtgagcctcattttcctctcttgtacaatgggaataacagaacttacccacaagattgtttttttcatttaacaaatgctgaccattaaccatgtgcaaagcactgtgctaggtggtggggacacagtgatgaatgtgaccatcacatcttacttcatggacctcacagtttcaggggatgctgagcggttttccaaacctaccaggactatacaattatcaagtacacgctccttctcctgtttcccaacttcattactgccatcaccatccaaccagctgcccaagctatgaactggggaatcatcctccactcccct

SEQ ID NO: 1734 - DNA, 466 bp, Homo sapiens
  MAP TO AC011499.1; EXPRESSED IN FETAL LIVER, SIGNAL = 1.4; EXPRESSED IN HEART, SIGNAL = 1.1; EXPRESSED IN PLACENTA, SIGNAL = 1.1
attggaggccactggaaagttgtaagtccgaatggcaaggagaggcaacatcatctgttttatgacttaaagctctccctctggctcctgttgggaaggtggaggacccagggcctggtgtggaggtggggagccccatgaggagggtgccgtggtcttgtagggtagagatctcagtgccctggtccagggtgttagcaatgaagatggaatgtggaagttggatttggggagttcaggaagtggagccgtctcaaggggcaggacagggaagatgaggagagggagtaacaacaggtcaggagtgataggtccatgcagccacagtggcctctgtgatgctgggatgattgcaaaggaacaggccagcctgcatgtccagcccccaggccagaatgctggtgttgaaggtgagggtgattctgcaagtctgggtgtattagtcagtgttctctagagggacaga

SEQ ID NO: 1735 - DNA, 458 bp, Homo sapiens
  MAP TO AL096765.4; EXPRESSED IN BRAIN, SIGNAL = 2.6; EXPRESSED IN LUNG, SIGNAL = 2.5; EXPRESSED IN HEART, SIGNAL = 3.4; EXPRESSED IN BONE MARROW, SIGNAL = 4.2; EXPRESSED IN ADULT LIVER, SIGNAL = 2.9; EXPRESSED IN BT474, SIGNAL =   2; EXPRESSED IN FETAL LIVER, SIGNAL = 5.1; EXPRESSED IN HELA, SIGNAL = 3.4; EXPRESSED IN PLACENTA, SIGNAL = 3.2; EXPRESSED IN HBL100, SIGNAL = 6.4
ggtgacagagggagaccttgtctctctcaaaaacaggagtggggtggtgctgagctgttaccagctgtgttctcttttcactagaatataatgaagtagcgacttaactgttgttcacggtagttcagattctctacataagttgaactttctttctaaattggcaccagttcttaatgcagcatataaaatgaaactattctattctcagtttattttttctgttacctggtggtagttccttttttcctcatctcccttattttacttcaacaattcaaaaggcggaatactaccaccttctagctgagaaaatctataagatccagaaagaactagaagaaaaacgaaggaccagactacagaagcagaacatgctaccaaatgctgcaggcatggttccagtttccatgaatccagggcctaacatgggacagccgcaaccaggaatgacttct

SEQ ID NO: 1736 - DNA, 466 bp, Homo sapiens
  MAP TO AP000494.1; EXPRESSED IN ADULT LIVER, SIGNAL = 1.7; EXPRESSED IN FETAL LIVER, SIGNAL = 1.4; EXPRESSED IN BT474, SIGNAL = 1.1; EXPRESSED IN HELA, SIGNAL = 1.4; EXPRESSED IN PLACENTA, SIGNAL = 1.6; EXPRESSED IN HEART, SIGNAL = 1.3; EXPRESSED IN HBL100, SIGNAL = 1.1; EXPRESSED IN BRAIN, SIGNAL = 1.7; EXPRESSED IN LUNG, SIGNAL = 1.1; EXPRESSED IN BONE MARROW, SIGNAL = 1.8
ctgaaaggacatccaccaccacgtacctctcttgaaaaaactgcttggagaagcacttcagtagactagggaatgaatcaaataagtaatgcactgacaaaatcaaaaccacagttgacttaggcttccttggagcttggaagaaccccttcccacgctggagagctggctttttggaggtgggagtagaagccctgaggggctcaggggaggaattcccactgatttgcaagaaaggaattggccactgtgtactcgtttgccactcaatcctgccctaaccttcctctcctgtctttctcacagactgtttttgaaaggaattgccgttcagaggactgtgccgcagacctgcagcttcagggtaaactgctgctctccagtatgtcggtgtttccttcagagcattgttctcaggctcctttttcttgaccccaggtcccaaacctgaatgtgcagatttccc

SEQ ID NO: 1737 - DNA, 456 bp, Homo sapiens
  MAP TO AL079351.1; EXPRESSED IN HELA, SIGNAL = 1.3; EXPRESSED IN PLACENTA, SIGNAL = 1.3; EXPRESSED IN HEART, SIGNAL = 1.2; EXPRESSED IN HBL100, SIGNAL = 1.1; EXPRESSED IN BRAIN, SIGNAL = 1.2; EXPRESSED IN BONE MARROW, SIGNAL = 1.5; EXPRESSED IN ADULT LIVER, SIGNAL = 1.2; EXPRESSED IN BT474, SIGNAL = 1.4; EXPRESSED IN FETAL LIVER, SIGNAL = 0.92
tcacagttacaattatcagttcattccaaagtgggggtctagattttcttaatgaaaatattaaattttttaaagtatgagactgaaaagaaaatcatttcgggtatgattaatgagaggtagctgaacacggtagagctcacaagcatttcagtggctcttttggagatcatacggtgcagacaatgtaaccagtacccagaactgggcctggtcagggctgctgcagatcaggcactgcccctcctgcgagcagagcaccacttctctcctgccttatgcaggtgactgtgtcctctaccccggactccagggaaggtttcttctcactgttaccctcataaaggagttggaagatcctgctcactttcaaggcaagaggcagctcatgaattttcatcacctgcacagatgctgatacggtcaaggggagtttccacacctcctactccctga

SEQ ID NO: 1738 - DNA, 463 bp, Homo sapiens
  MAP TO AL110122.1; EXPRESSED IN BONE MARROW, SIGNAL = 2.5; EXPRESSED IN FETAL LIVER, SIGNAL = 4.1; EXPRESSED IN ADULT LIVER, SIGNAL = 1.3; EXPRESSED IN BT474, SIGNAL = 1.1; EXPRESSED IN HELA, SIGNAL = 1.3; EXPRESSED IN PLACENTA, SIGNAL = 1.5; EXPRESSED IN HEART, SIGNAL = 1.2; EXPRESSED IN HBL100, SIGNAL = 1.2; EXPRESSED IN BRAIN, SIGNAL = 2.6; EXPRESSED IN LUNG, SIGNAL = 0.98
catgcaaacacatatacacacaaacatgaacacatataacacatatacacacacataaacacaaacttgcacatacataaacacatatatacacacatatacgcacatatatacacacaaacacacacataaacatgcatacatatacacatacacacatatacatacacacataaacatatacacacatatacaaacacacacatacagacacatacacagacacatatgcacacatatacacacacacacatacacacacacacctttcatctgatttcactggtacatgggcaaatttatcattattatcgttggcccccaagcccatctttccctgcactgttagctgtgttgtcactggcctctgaaatgcagccttcttctgctcctgcacctgctgagctcctatgcatcccttatccacagcggccatcagtgcaggttcactgtctgccacctg

SEQ ID NO: 1739 - DNA, 456 bp, Homo sapiens
  MAP TO AL031768.9; EXPRESSED IN BT474, SIGNAL = 1.5; EXPRESSED IN HBL100, SIGNAL = 1.4; EXPRESSED IN HELA, SIGNAL = 1.8; EXPRESSED IN HEART, SIGNAL = 1.8; EXPRESSED IN PLACENTA, SIGNAL = 1.9; EXPRESSED IN LUNG, SIGNAL = 1.4; EXPRESSED IN BRAIN, SIGNAL = 1.5; EXPRESSED IN BONE MARROW, SIGNAL = 1.6; EXPRESSED IN ADULT LIVER, SIGNAL = 1.6; EXPRESSED IN FETAL LIVER, SIGNAL = 1.5
aaaagcaggcacagccagtcaggggtgagcagctgaagaaccctgatgggagcaggtagcctggagggacgtggggttaactctttccaaataaggagctttccaaactgccatttccgtattctaaggcttgacagcttttgaaaggatgaaaagagcgtgtattttccagaaatccttcatgtgactatttgcttcatttcaatgcctcagaacaccaccaacaaaaaacccactcacacccttgctggtggttgctacagtgcaattggctgcaggcttttgtttagaagtttgcagcagtccgggaaggaggttttcttcctcccggagctgagaaggcctgtcttcagcaccaacgtgtcttctggccttgccaataaagaagtaagaagccactgtgaaaaaaccatcattctcaacaataggccaataaacggttggcagaaatgccat

SEQ ID NO: 1740 - DNA, 492 bp, Homo sapiens
  MAP TO AC009485.2; EXPRESSED IN HBL100, SIGNAL =  52; EXPRESSED IN HELA, SIGNAL =  27; EXPRESSED IN HEART, SIGNAL = 5.9; EXPRESSED IN PLACENTA, SIGNAL =  24; EXPRESSED IN BRAIN, SIGNAL =  10; EXPRESSED IN BONE MARROW, SIGNAL =  17; EXPRESSED IN LUNG, SIGNAL =  21; EXPRESSED IN BT474, SIGNAL =  66; EXPRESSED IN ADULT LIVER, SIGNAL =  10; EXPRESSED IN FETAL LIVER, SIGNAL = 9.9
gagggagaaaacagtgctaatgattttaggccttaatagtttcaagatcccgattggctgctctgaaaagccatctttgcattgttccttgtccagctccttgctcgccgcggctgcctccaccgcagactctggcagctttatcgccagagtccctgaactctcgttttctttttaatcccctgcatcagatcaccggcgtgccccaccatgtcagatgcagctgtagacaccagctctgaaatcattgccaaggacttaaaggagaagaaggaagttgtgaaagaggcggaaaatggaagagacgcccctgctaacgggaatgctaatgaggaaaatggggagcaggaggctgacaaggaggtagatgaagaaggggaagaaagtggggaggaagaggaggaggaaaaagaaggtgatggtgaggaagaggatggagatgaagaggaagctgagtctgctacaggcaagcgggcagctgaagatgatgag

SEQ ID NO: 1741 - DNA, 490 bp, Homo sapiens
  MAP TO AL031963.11; EXPRESSED IN LUNG, SIGNAL = 3.4; EXPRESSED IN ADULT LIVER, SIGNAL = 3.6; EXPRESSED IN BT474, SIGNAL = 5.5; EXPRESSED IN FETAL LIVER, SIGNAL = 5.1; EXPRESSED IN HBL100, SIGNAL = 6.3; EXPRESSED IN HELA, SIGNAL =  36; EXPRESSED IN HEART, SIGNAL = 3.4; EXPRESSED IN PLACENTA, SIGNAL = 4.8; EXPRESSED IN BONE MARROW, SIGNAL = 3.9; EXPRESSED IN BRAIN, SIGNAL = 3.5
ttgctgctgttcatgtacttttcattcattgattcattcattccttcattgatttacatttttggagcatgcactgccagttactgggcaggagtactgtgaggaagtgagaaaccgctctgccttctaacgcttctggcctgtgcctggaagagatcggtacagacccaagcatgaccccagcacgtgggagtgatgtgttggaggtgtgcaccaggctcttgaggcgctggctctgccagcctcagcatagcacctttcctgcccacaggcacaacgaggccctcttggaggaggcgaagatgatgaacagactgagacacagccgggtggtgaagctcctgggcgtcatcatagaggaagggaagtactccctggtgatggagtacatggagaagggcaacctgatgcacgtgctgaaagccgaggtagagagggcccctccgcacggggatccccagcgcttgggccctggctgtctgttatggct

SEQ ID NO: 1742 - DNA, 487 bp, Homo sapiens
  MAP TO AC007318.2; EXPRESSED IN HBL100, SIGNAL = 4.6; EXPRESSED IN HEART, SIGNAL =   2; EXPRESSED IN BONE MARROW, SIGNAL = 2.3; EXPRESSED IN LUNG, SIGNAL =   4; EXPRESSED IN BRAIN, SIGNAL = 2.6; EXPRESSED IN ADULT LIVER, SIGNAL = 1.9; EXPRESSED IN BT474, SIGNAL = 6.4; EXPRESSED IN FETAL LIVER, SIGNAL = 3.3; EXPRESSED IN PLACENTA, SIGNAL =  10; EXPRESSED IN HELA, SIGNAL = 3.4
ggtatcaggaaagcaacaaggattacacacattattttataaaccagcacacaaaggtttaaaacagttctgaaaatgaagttagctgtcttgagtcaagggaataaaaaaaaagtcagtattgaccatttacaatctctgacctttgtggagacggtaagaatctgttgtagtgcagctacatacagtacaattcaggcaattttgttttttcacttgggttcagattgcaaattcattgctgtgagaaaaggatggaggcaaattttagcagcaacctccacctgactgcttgactggagtgctctgaattttaacattggacttctcagcaccaccagctgttgctccgggacccattcgctttttaatctcagctgccatcgtcatgaaagactgttctacattcgttgcattcttagcactggtttccaaaaacggaattccaagggaatcagcaaattcctaagagaataatgaggcacaa

SEQ ID NO: 1743 - DNA, 492 bp, Homo sapiens
  MAP TO AL096801.15; EXPRESSED IN PLACENTA, SIGNAL = 3.5; EXPRESSED IN HBL100, SIGNAL = 2.6; EXPRESSED IN HELA, SIGNAL = 2.2; EXPRESSED IN BONE MARROW, SIGNAL = 2.8; EXPRESSED IN BT474, SIGNAL = 2.4; EXPRESSED IN FETAL LIVER, SIGNAL = 1.7; EXPRESSED IN HEART, SIGNAL = 1.6; EXPRESSED IN BRAIN, SIGNAL = 1.7; EXPRESSED IN LUNG, SIGNAL = 2.7; EXPRESSED IN ADULT LIVER, SIGNAL = 4.8
tgatttcccacttcacacctctatatttctgtgtgtgtgtctttaattcctctagtgccgctgggttagggtctcccctacggagcttgtcttggcaagtggcatccattgtgggggcttgaatccaggttgaagggtcgctggaatgatggttggaatggaaaactgaaaatggaggatacctgagtactcttaaagcaatccccatggtgagtaagaaggggagctcagaagtgtcagggtaacaatgggacaggtgtggggtctggttcgtttcaccttggaactttttcacactgatgatgaggaggaacgagagtataatgaagtaacagaagaggttacagaccaggtctatgtgccagctaaagctaaagcggcaaaggagggagaggttcaaccctacctttctgcaccccctccttattattttgaagaaaagaccctccagatctttcttttccagaggacactgggcaaaaagtagttgcc

SEQ ID NO: 1744 - DNA, 413 bp, Homo sapiens
  MAP TO AL049821.6; EXPRESSED IN PLACENTA, SIGNAL = 6.4; EXPRESSED IN HBL100, SIGNAL = 4.4; EXPRESSED IN HEART, SIGNAL = 5.5; EXPRESSED IN BONE MARROW, SIGNAL = 5.5; EXPRESSED IN LUNG, SIGNAL = 4.1; EXPRESSED IN BRAIN, SIGNAL = 4.7; EXPRESSED IN ADULT LIVER, SIGNAL = 4.7; EXPRESSED IN BT474, SIGNAL = 3.2; EXPRESSED IN FETAL LIVER, SIGNAL = 6.4; EXPRESSED IN HELA, SIGNAL = 5.4
tgagtgtgtgtgtgtgtgtgcagtacagacagaaaggagagaaacatatctgcatgttatgttagaaagagtagtgttagctaccctaccaaatttacatactggctgaacacagtatgtaaaaaattatttttttagtccattgctggtgttccttgttgttgggtgactctattccacatggtgatgcagggaaccaatctccttccttctgtggctgtgtaatcccttgcaaccttgaagtcctctgcatctaactttaggatgaggaaagtgaaggtggaggatatagccctcttgactgccttgacctggacctggaacatctcttttgctcccattccatggggaagaactagtgacatggtggcccatagctgcagaggggaggctgagaaatgcagcctctggat

SEQ ID NO: 1745 - DNA, 489 bp, Homo sapiens
  MAP TO AL031668.20; EXPRESSED IN PLACENTA, SIGNAL =  42; EXPRESSED IN HELA, SIGNAL =  58; EXPRESSED IN HBL100, SIGNAL = 1.5e+02; EXPRESSED IN HEART, SIGNAL =  14; EXPRESSED IN LUNG, SIGNAL =  32; EXPRESSED IN BONE MARROW, SIGNAL =  36; EXPRESSED IN BRAIN, SIGNAL = 6.9; EXPRESSED IN ADULT LIVER, SIGNAL =  21; EXPRESSED IN BT474, SIGNAL =  97; EXPRESSED IN FETAL LIVER, SIGNAL =  35
tcaggcttaattcagtttgtttttcttgtataaaaaccctatgctgtagccacagctggagcctgggtcctctgcatggagactctggtgtgggtcttgacgaggtggtcagtgaattcctgatagggagacttggtgaatatagtctccttccagaggtcgagggtcaggtagctgtaggtcttagagatggtgtcaaaggtggccttggcgaagttgccagggtggcagtgcagcccctggctgaggtgtggcagtcatcaataccagccatcatgaggagcttcttgggcacaggtgcggagacgatgccagtgcccctgggtgcagggatgaggtgcaccagcacagagccgcagcggcctgtcaccttgcaagggacggtgtgggcttgtccatcttgttcccccgtagcctctgcgcacggggacaatggagtgcttggtcaggatgacggacccgcggatggcagtagccacctccttggag

SEQ ID NO: 1746 - DNA, 404 bp, Homo sapiens
  MAP TO AL049795.20; EXPRESSED IN BONE MARROW, SIGNAL = 0.95; EXPRESSED IN FETAL LIVER, SIGNAL = 1.1; EXPRESSED IN BT474, SIGNAL = 1.2; EXPRESSED IN HELA, SIGNAL = 1.2; EXPRESSED IN PLACENTA, SIGNAL = 1.5; EXPRESSED IN HBL100, SIGNAL =   2; EXPRESSED IN HEART, SIGNAL = 1.1
tgcaggactaaacctgggaccctggaagcccaatgtcttattctcatctatatcacatcactgcatcttcccactctctaaagacgggaggggaaaggcttgtattttatgtgtgtgtgttttaaattcgtgggcaagaggcttgcttgtgttttgtgaggttttgttttggttttttaaattcatgggcaggaggcttactgttctgagccagctgataggcatggctgctcagtctgaaatgacctttcaatcattgcttaatctcactttcagtttgaagctgcctgggctctaacgaatattgcctctggaacctctcagcagaccaaaattgtcattgaagcaggggctgtccccatttttatagagctgcttaattcagactttgaggatgttcagga

SEQ ID NO: 1747 - DNA, 488 bp, Homo sapiens
  MAP TO AC005082.2; EXPRESSED IN HELA, SIGNAL = 2.7; EXPRESSED IN BONE MARROW, SIGNAL = 1.1; EXPRESSED IN BRAIN, SIGNAL = 1.5; EXPRESSED IN BT474, SIGNAL = 2.4; EXPRESSED IN PLACENTA, SIGNAL = 1.8; EXPRESSED IN HEART, SIGNAL = 1.5; EXPRESSED IN HBL100, SIGNAL =   8; EXPRESSED IN ADULT LIVER, SIGNAL = 1.3; EXPRESSED IN FETAL LIVER, SIGNAL = 2.1
caggataaaggcagcgtgtcataagttttgggtagaatgtactgatttttggttgcaggtatagctcacttatcgacagtctctgcatgccagttagcaggagtgcccatgaggtacacaagccttgtcctaagagcagcctaaccaaggagacggactttaggagctgtattttccaataagtgactcaatccaaatctgaaatgactaacgcagtgcataaaatattttattcacattttaactccactggagtcacagatgaagtatcatcttctattccaagaatgaagtcttcaggtactgtctcaggtgctatctgagctaactggtcatcataagaacgtagggtccataatttctctaattcatagatttctctggtttctggaagcatcaaatgaatcaccatgctgcctgtcagggacagataagagatacaatgaaggaatagttcatttgcttttattcttaccttacaacacaca

SEQ ID NO: 1748 - DNA, 399 bp, Homo sapiens
  MAP TO AF165926.1; EXPRESSED IN PLACENTA, SIGNAL = 1.6; EXPRESSED IN HELA, SIGNAL = 1.9; EXPRESSED IN BONE MARROW, SIGNAL = 1.1; EXPRESSED IN BRAIN, SIGNAL =   1; EXPRESSED IN BT474, SIGNAL = 1.2; EXPRESSED IN HEART, SIGNAL = 8.6; EXPRESSED IN HBL100, SIGNAL = 2.1; EXPRESSED IN LUNG, SIGNAL = 1.1; EXPRESSED IN ADULT LIVER, SIGNAL = 1.1; EXPRESSED IN FETAL LIVER, SIGNAL = 1.4
agtgtcacatggactgcctgctgcccaataatgtattgactaggcaagagaattaccagacaaaagttctcttgcttaacatatttgggagaggaattaagaatagctaggaatctttggtcaaaaacttttctgcctaaaattaagaagtaagtttgtagagttgttttcattttaatggtaataaccatatataaatttagacatagactaaaacttagttgacagcatcatctgtctgcttgattttatatatttttaagttcttgttatctcctcttctaggcaaatgagcttctccagcgttcccgacaagttcaaaataagactgaaaaagaaagaatgttaagggaatcattaaaggaatatcaaaaaattagcaatcaagtggacctttcc

SEQ ID NO: 1749 - DNA, 477 bp, Homo sapiens
  MAP TO AL080243.21; EXPRESSED IN FETAL LIVER, SIGNAL = 1.3; EXPRESSED IN ADULT LIVER, SIGNAL = 2.2; EXPRESSED IN PLACENTA, SIGNAL = 3.2; EXPRESSED IN HBL100, SIGNAL = 3.3; EXPRESSED IN HELA, SIGNAL = 1.6; EXPRESSED IN HEART, SIGNAL = 0.9; EXPRESSED IN BONE MARROW, SIGNAL = 2.4; EXPRESSED IN BRAIN, SIGNAL = 3.4; EXPRESSED IN BT474, SIGNAL = 2.6; EXPRESSED IN LUNG, SIGNAL = 1.9
gctgtccaaagatacatgcccagtaatagggtattttacacattttgaaatagacacattgctactctttgtttaatcagtttgtgtcctaaatttatatatcatgcctatgtaagtatttccttaattctgttctgaattgctgtcttgttatgttttttattttaacaggcacaaatgtctagttcttcctgcccggtgaactctcctataatgcctccagggtctcaggggagccacattcactgtccccagcttcctcaaccagctcttcatcagaattcaccctcgcctgtacctagtcgtacccccacccctcaccatactcccccaagcataggggctcagcagccaccagcaacaacaattccagcccctgttcctacacctcctgccatgccacctgggccacagtcccaggctctacatccccctccaaggcagacacctacaccaccaacaacacaacttccccaa

SEQ ID NO: 1750 - DNA, 467 bp, Homo sapiens
  MAP TO AL121757.2; EXPRESSED IN FETAL LIVER, SIGNAL = 1.9; EXPRESSED IN ADULT LIVER, SIGNAL = 2.3; EXPRESSED IN PLACENTA, SIGNAL = 2.1; EXPRESSED IN HBL100, SIGNAL = 2.2; EXPRESSED IN HELA, SIGNAL = 2.2; EXPRESSED IN HEART, SIGNAL = 2.2; EXPRESSED IN BRAIN, SIGNAL = 2.2; EXPRESSED IN BT474, SIGNAL = 1.4; EXPRESSED IN LUNG, SIGNAL = 1.4; EXPRESSED IN BONE MARROW, SIGNAL = 2.2
tggaaactcccagtctcagcttctccatttataagatgagaatgatcataccagactcaggcaaggttgtttgtgcattagtgaaatcagacgtattaaataaagtaccacattgatcgtggagttgttgaataaccaagaacacgcctatctgtctccaaaaaataaatgttgaaaatgatgagggcgtggctctacgttgggaagggaaatagggtgcttggatgagagaatcctgaggcatgggacagtggagggatccaggatagttccataagaaaatgtgcttgcactatcgtttctttgcagaggctcttgtgtgctgggaggctggctgggatggggagttggtggcagagaatagtgtctgttttcttcctggtagctggagagctctgcgacagaggactgaggtcattaggaacaagcgggcaggtagggacaggcgttggagtggactagccctg

SEQ ID NO: 1751 - DNA, 467 bp, Homo sapiens
  MAP TO AC011406.1; EXPRESSED IN HBL100, SIGNAL = 2.7; EXPRESSED IN HELA, SIGNAL =   2; EXPRESSED IN PLACENTA, SIGNAL = 2.5; EXPRESSED IN HEART, SIGNAL = 1.2; EXPRESSED IN BRAIN, SIGNAL = 1.4; EXPRESSED IN BONE MARROW, SIGNAL =   2; EXPRESSED IN LUNG, SIGNAL = 1.9; EXPRESSED IN BT474, SIGNAL =   2; EXPRESSED IN FETAL LIVER, SIGNAL = 1.5; EXPRESSED IN ADULT LIVER, SIGNAL = 1.5
ggttggcctaggagacacagtacatggtgatgttaggattcaaagagggctggctgagcctagagtgttctcgtcaccagatgggttccaccttagtcattccttcttatcaaaatgcattctcatttctcttctagagtgtgtcctgcccagagctcttggaccagcattatactgtggacatgacagaaactgagcactctatccagcacccagtcaccaagactgccacgcggcgcatcgtccatgcaggcctacagcccaatcctggtgaccccagtgctgggcaccactccttggccctgtgccctgaattggcaccttacgcaaccatcctggcctccatcgtggacagcaaaccaaacggtgtccgccagcggcccattgccttcgacaatgccactcactattacctctacaaccgcctcatggacttcctcaccagccgcgaaattgtcaatcgtcag

SEQ ID NO: 1752 - DNA, 478 bp, Homo sapiens
  MAP TO AL049820.14; EXPRESSED IN HBL100, SIGNAL = 1.2; EXPRESSED IN HELA, SIGNAL = 0.98; EXPRESSED IN BONE MARROW, SIGNAL = 1.2; EXPRESSED IN FETAL LIVER, SIGNAL = 0.98; EXPRESSED IN ADULT LIVER, SIGNAL = 1.2; EXPRESSED IN PLACENTA, SIGNAL = 1.3; EXPRESSED IN HEART, SIGNAL = 0.85; EXPRESSED IN BRAIN, SIGNAL = 1.1; EXPRESSED IN BT474, SIGNAL = 1.4
ttgccttcaacttactgcccattttagctcaccaggagtttaaatgggggctgtatatcttcttgtttgcttttaccaaagtcaaagctatactttaaaatggtaaatggagattagaattgagaatattacttttctctgcctgtccccaccctttcgttggaggcattttctgtaccccccacccctcaggcagcggcaggatgcagggtattcaacttgcctccatggtctgtaagccccgcacctatgtgtgggggtgacagatatacagggctcatgcttgtgcatcagaacaaatcccaagaagctgttcttctgttccactttaggccaccatacattaggtcgcctgcttatcccagccagtctggggctggcggacgccccatgttttcttcccagcaccccaactatggcaactctcaggctcccatggtgcaccagcctgaccagtacgggtaggtagcaacacacc

SEQ ID NO: 1753 - DNA, 469 bp, Homo sapiens
  MAP TO AL117327.3; EXPRESSED IN BT474, SIGNAL = 2.2; EXPRESSED IN FETAL LIVER, SIGNAL = 3.2; EXPRESSED IN HBL100, SIGNAL = 3.9; EXPRESSED IN HELA, SIGNAL = 7.1; EXPRESSED IN HEART, SIGNAL = 1.9; EXPRESSED IN BONE MARROW, SIGNAL = 3.4; EXPRESSED IN LUNG, SIGNAL = 4.3; EXPRESSED IN ADULT LIVER, SIGNAL = 6.2; EXPRESSED IN PLACENTA, SIGNAL =  10; EXPRESSED IN BRAIN, SIGNAL = 3.5
acggtgatcagacaccaatgaaatgtaggtgaataatcaggcaggcatccccgtgtgattaaacaccaagggaagaccgtcttcccgagtccgtgaccggtgccagagttttgggtccacagataaaatgtgtctcctttgtctctaccagaaaaggaaaggaactgaaattaagagaagggagagattgaagtgtggtgccaagattgaaaggagaaagaggttgagggatagtgagagaggttggagaagagagtaaaaagaggctgcttacctgatttaaaattggtgagaagttccttgggctggttggtctgaggaccagaggtcgtaggtggatctttctcatggagcaaagagcaggaggacaggggattgatctcccaagggaggtccccccgatccgagtcacggcaccaaatttcatgcgcatccgtgtgaagagaccaccaaacaggctttgtgtgag

SEQ ID NO: 1754 - DNA, 477 bp, Homo sapiens
  MAP TO AP000567.1; EXPRESSED IN ADULT LIVER, SIGNAL = 0.99; EXPRESSED IN BT474, SIGNAL = 1.1; EXPRESSED IN HEART, SIGNAL = 1.1; EXPRESSED IN BONE MARROW, SIGNAL = 1.3; EXPRESSED IN BRAIN, SIGNAL = 1.2
gaggcattgaaggcattagccaacaaaatcagcaatttaacaagatgatcaatagtagaagcctgatccacaagttggtctgtagcaagaagactggcagctcctagaagccaagtaggttgggcggcagaatccaacgccatagcccagggaagggaagccacagcctccataacccagggatctgaagccactggacccacagcccactgagtagcagctcctcgatccatagcccagggagcggcagctgctggatccaaagcctagagacccagagtaagttgtctggcagggactgcagagcaaggaggttctgggacggtagcaggaggtctggcaggggctggactccacataggatgtctggcagctggtgggctcccagcaggtctgctgacagcccctatagagagaggaacccagctggcacgtgctgggagagcagaggtcagtgctgtagacctggttgctggg

SEQ ID NO: 1755 - DNA, 469 bp, Homo sapiens
  MAP TO AF162757.1; EXPRESSED IN BONE MARROW, SIGNAL = 3.9; EXPRESSED IN LUNG, SIGNAL = 3.9; EXPRESSED IN BRAIN, SIGNAL = 2.7; EXPRESSED IN ADULT LIVER, SIGNAL = 3.1; EXPRESSED IN BT474, SIGNAL = 5.4; EXPRESSED IN FETAL LIVER, SIGNAL = 5.5; EXPRESSED IN PLACENTA, SIGNAL = 7.6; EXPRESSED IN HBL100, SIGNAL =   8; EXPRESSED IN HELA, SIGNAL = 5.7; EXPRESSED IN HEART, SIGNAL = 3.9
ttcagcagacgatccttcagcctccttcacctgctcgtttagtacagccattctcttctcaatgacttcaatagatttgctgaactgtgccactgcctcatcatactgaaagttgtacccataagccaagcccagctggtagtgggtctctgcaaggagatggtcgtaggcttccaggtactgttcctacaggtttaggcaggactggaactcctccacagcttgcacatagttttcagattcaacaccaacttctccgagtttaagatgtgcctgggcaacataaagctgggcttttgtttcttgccttttaaaaacgatctttgctaaatccagtgtatcccaggcaagctctaggttcccaatctcctcctcttcattttcttgaagagacttgttttcaaggactgaatcatttggcatttcttcagccttatcattttctttatcatcctcttccaagccttca

SEQ ID NO: 1756 - DNA, 462 bp, Homo sapiens
  MAP TO AL096829.10; EXPRESSED IN BONE MARROW, SIGNAL =  14; EXPRESSED IN BRAIN, SIGNAL =  11; EXPRESSED IN LUNG, SIGNAL =  28; EXPRESSED IN ADULT LIVER, SIGNAL =  17; EXPRESSED IN BT474, SIGNAL =  55; EXPRESSED IN FETAL LIVER, SIGNAL =  13; EXPRESSED IN HELA, SIGNAL =  46; EXPRESSED IN PLACENTA, SIGNAL =  26; EXPRESSED IN HBL100, SIGNAL =  69; EXPRESSED IN HEART, SIGNAL =  17
acttccaggcgcttcaggagccacgggttacagtgcagacatggccaagtccaagaaccacaccacacacaactggtcccgaatatggcacagaaattgcctcaagaaaccccaatcacaaagatacgaatctcttaaggggtggaccccaagttcctgaggaacatgcgctttgccaagaagcacaacaagaagggcctaaagaagatgcaggccaacaatgccaaggccatgagtgcacgtgcaaaggctatcaaggccctggtaaagcccaaggaagttaagcccaagatcccaaagggtgtcagccacaagctccatcgacttgcccacattgcccactccaagcttgggaagcatgatcatgcccacattgccaaagggctcaggctgtgtgggccaaaggccaagaccaaggatcaaaccaaggcccagcctgcagctccagcttcaattccagct

SEQ ID NO: 1757 - DNA, 448 bp, Homo sapiens
  MAP TO AL020995.13; EXPRESSED IN PLACENTA, SIGNAL = 4.8; EXPRESSED IN HELA, SIGNAL = 6.3; EXPRESSED IN HBL100, SIGNAL =   4; EXPRESSED IN HEART, SIGNAL = 6.4; EXPRESSED IN BONE MARROW, SIGNAL = 4.7; EXPRESSED IN LUNG, SIGNAL = 3.2; EXPRESSED IN BRAIN, SIGNAL = 5.1; EXPRESSED IN ADULT LIVER, SIGNAL = 5.8; EXPRESSED IN BT474, SIGNAL = 3.6; EXPRESSED IN FETAL LIVER, SIGNAL = 6.3
tagaaaggagagggtttgggcttaaaaagaacatatctgatttcagttttatgtcctggagagagactgggtttgaataaatactgatcaaaatgaatccaagaatagatcacacactgttttgttcacacttggaaacacaggcaaacattaaaaataaaagcaaataaacctaccctggtctctttttggggaagtagatttgactgctctcagatgatcagcctggatgttcagaagacaatctgaattcaaaaggacctttcacctggtttaattctctggcaacaattcagttttcaaacccaattcccaaataattgctattttcagcatcatgatgcagatcacaaaaatattccaatttggcctggctctttttatgacgatatcctctcccagtaatttctgtaacctgcaaagtaagtgcctttttccttccacctag

SEQ ID NO: 1758 - DNA, 460 bp, Homo sapiens
  MAP TO AL035669.27; EXPRESSED IN PLACENTA, SIGNAL = 1.6; EXPRESSED IN HELA, SIGNAL = 1.6; EXPRESSED IN HBL100, SIGNAL = 1.9; EXPRESSED IN HEART, SIGNAL =   1; EXPRESSED IN LUNG, SIGNAL =   1; EXPRESSED IN BONE MARROW, SIGNAL = 1.2; EXPRESSED IN BRAIN, SIGNAL =   1; EXPRESSED IN BT474, SIGNAL =   2; EXPRESSED IN FETAL LIVER, SIGNAL =   1
cgtcatgttatggacttgcttcctgaagatgaaatcagcagttgatggaaagaatccacaacacgcctacagaacagcaaatcacaaatggctgtgtctccacgaagccaggagctttgcatttgaagtttctatctgggctcatttccagctgttcagggttcggattcctgaaggcttccttagcatttaactcattctttgttgactgaaggcactggcactgtttctccacacgcaaactgatctttgtcataaatcacttttataatgagagagcagcctggacacattgccacaccttccccattctccagctcttccttggtgatggagaagttatctccgcatgggcagggacagaaatatgtctccgagtcctcgtcatattggaagtcctcgatttccacctcgtcatgaaatactgccatggtcagcgggggttgctgaaggggtgacg

SEQ ID NO: 1759 - DNA, 444 bp, Homo sapiens
  MAP TO AL080245.13; EXPRESSED IN ADULT LIVER, SIGNAL = 1.3; EXPRESSED IN PLACENTA, SIGNAL = 1.4; EXPRESSED IN HBL100, SIGNAL = 1.7; EXPRESSED IN HELA, SIGNAL = 1.4; EXPRESSED IN BONE MARROW, SIGNAL = 1.7; EXPRESSED IN BT474, SIGNAL = 2.1; EXPRESSED IN FETAL LIVER, SIGNAL = 1.3; EXPRESSED IN HEART, SIGNAL = 1.9; EXPRESSED IN BRAIN, SIGNAL = 1.9; EXPRESSED IN LUNG, SIGNAL =   1
tttactttgggccagtgggaggcagtttaattcctttagtccttatagctatccctgggataagcctactcacccccatcctcatttaacagttggggaaacccctgctcagagaggttaagtagcttgcctgaggtcacacagcctgtaagaggtgagcttggttttgaaaccagttctgctggaggcttggatcagtgtgctcctagattccatgccatctcagacattccacctctctcttctctccctagatccttttcctcccaccatctctccatggcctccatcatggtggtggactctccaggcttccagaacccccggcaccagggcaaggaccgggcggccacctttgaggagctgtgccacaactacgcccatgagcgcctgcagctgctgttctaccagcggacctttgtctccacgctacagcgatatcaa

SEQ ID NO: 1760 - DNA, 440 bp, Homo sapiens
  MAP TO AL031847.9; EXPRESSED IN LUNG, SIGNAL = 2.1; EXPRESSED IN BRAIN, SIGNAL = 4.8; EXPRESSED IN BT474, SIGNAL = 3.9; EXPRESSED IN FETAL LIVER, SIGNAL = 4.1; EXPRESSED IN ADULT LIVER, SIGNAL = 2.4; EXPRESSED IN PLACENTA, SIGNAL = 2.9; EXPRESSED IN HBL100, SIGNAL = 5.5; EXPRESSED IN HEART, SIGNAL = 2.6; EXPRESSED IN BONE MARROW, SIGNAL = 3.3; EXPRESSED IN HELA, SIGNAL = 4.8
tagtggtgctgggttcttcccataccctacagcgtgctcggaagcattcccgagggtttctgcccaacgcctcccggcgctcgggacaacactgtgtagcattgatactggaatgatataaataaagctttggtgtgtaggtttgcaggagagagtacaggttaacactgtgatacgaaaacttcagacaacaccagctctcaatgtgaattgggtttttggccaaggggggaacttctaagtgactggacactgggcccgttgccatggctactcgaggcaccagtggcaggaggagggagtctagggctgaggctccgcgtggccctgtcgcttcgccttcatctgcaggtaccgccctttgccttcctcaaagcgcttcttctcgtcctcggtctcgggctgtggaccacacacagagacaggcaggttagggtcac

SEQ ID NO: 1761 - DNA, 459 bp, Homo sapiens
  MAP TO AC007028.2; EXPRESSED IN HELA, SIGNAL = 2.5; EXPRESSED IN PLACENTA, SIGNAL = 1.4; EXPRESSED IN HBL100, SIGNAL = 1.6; EXPRESSED IN HEART, SIGNAL = 1.3; EXPRESSED IN BONE MARROW, SIGNAL = 1.8; EXPRESSED IN BRAIN, SIGNAL = 1.1; EXPRESSED IN ADULT LIVER, SIGNAL = 1.1; EXPRESSED IN BT474, SIGNAL = 1.1; EXPRESSED IN FETAL LIVER, SIGNAL = 2.2
agaggcactagggcaacctcttaggaactgagatgggaaaagaggtcttcttctaagttccattgagaactacctcccctctctttcttatttaatcacagccttaatctgcagttcaagtcagcaaatctggaaggtgataacaccaaaagagaacattggagctgtgggagggaacaactggggaaaacaagaggactccacagcagggaaaagagcaagaacacacagaccaacatctcatttggaggaagttcagaaacattggaaaggtcacacccagactcatgttcacaatatgaacccagggaaggtcagataatctccctttattctattgctttccaccaatttcagaattttcagttaaataacattttaatccacctgagggagctgaacatgattctctggaggagggaacaggtgaagagacaaagccaagcaggaaagaaaaac

SEQ ID NO: 1762 - DNA, 380 bp, Homo sapiens
  MAP TO AC007688.15; EXPRESSED IN BT474, SIGNAL = 2.5; EXPRESSED IN FETAL LIVER, SIGNAL = 5.3; EXPRESSED IN PLACENTA, SIGNAL = 5.5; EXPRESSED IN HELA, SIGNAL = 5.8; EXPRESSED IN HBL100, SIGNAL = 3.2; EXPRESSED IN HEART, SIGNAL = 5.1; EXPRESSED IN LUNG, SIGNAL = 3.8; EXPRESSED IN BONE MARROW, SIGNAL = 4.3; EXPRESSED IN BRAIN, SIGNAL = 4.7; EXPRESSED IN ADULT LIVER, SIGNAL = 4.2
aaacaaaccaaacagcctgcttttataaaattttgatatgttgtttatcatgggctttttggtattgattttgttttaaaaaatattgtggtaaggcaggagtgactgaggcaagtattagagcaggaatgaaagtttattaaaaagttttagagcaggaatgaaaggaagtaaagtacacttggaagaggccaagcgggcgacttgagagatcacccactggacagtctgacctttgacttacggttttatacgctggcatgcttccggagtcttgtgttccttctcccctgactcttcccttggtgtaggctgtccacacttgcgcagtggcctgccagcacctgggaggggagcatgcgcagtgtgtggcctgccag

SEQ ID NO: 1763 - DNA, 404 bp, Homo sapiens
  MAP TO Z83844.5; EXPRESSED IN LUNG, SIGNAL = 3.9; EXPRESSED IN BRAIN, SIGNAL = 4.6; EXPRESSED IN BT474, SIGNAL = 3.3; EXPRESSED IN ADULT LIVER, SIGNAL = 4.4; EXPRESSED IN PLACENTA, SIGNAL = 4.9; EXPRESSED IN HBL100, SIGNAL = 4.1; EXPRESSED IN BONE MARROW, SIGNAL = 4.2; EXPRESSED IN FETAL LIVER, SIGNAL = 3.5; EXPRESSED IN HELA, SIGNAL = 5.4; EXPRESSED IN HEART, SIGNAL = 3.5
ctcaagggtaatgccagaggcccatggccccagcgaggggctgtggggcacctagagttctcggtgtgtctccttcattcattggcctctgctggggcctcctatgggtgtcttacgtctgtccatccatctgtccgtggtcagaagtggggtcagtgtgtgagtgagagcaggagtatttatgaaaataaaacgtcgtttttcctggaccagctgctctcgtggccctttggaggttgagggagatgggaggggttgagtccatgttccctagggctgccctgtagacctctccacttccgtctttggaggtcaggccgtgggccccctccccaccaccccccgggccctgcaccggaaaaggccctgcaaaggggcctgtggccagtgctgagtcaccagag

SEQ ID NO: 1764 - DNA, 394 bp, Homo sapiens
  MAP TO AC008068.2; EXPRESSED IN HELA, SIGNAL = 3.5; EXPRESSED IN BONE MARROW, SIGNAL = 2.9; EXPRESSED IN LUNG, SIGNAL = 2.3; EXPRESSED IN BRAIN, SIGNAL = 3.2; EXPRESSED IN BT474, SIGNAL = 2.2; EXPRESSED IN PLACENTA, SIGNAL = 3.3; EXPRESSED IN HEART, SIGNAL = 3.2; EXPRESSED IN HBL100, SIGNAL = 2.6; EXPRESSED IN ADULT LIVER, SIGNAL = 2.4; EXPRESSED IN FETAL LIVER, SIGNAL =   3
gaacacttcgggagaagcagatgcggaggacgtagagggatggtaaagacccgggaagtcccgtaggaaagtggcagggaggacggcttgagtacttcacaggctctgtcacgaccctgggatcaccgctcggggacagctccagcgaggacagagctaagggtccagccctctggacaaagagcaaccatccccgacacctctcactgagcctttccccccggcccggcccgcaggcccgggcacacttacgtggagagtttcctggtccagaagaggcccccgggccacagctcttggagctgcacggcccggcccaggttgcatttgatctgggccagctgcaagtcggactcggcgtctagccgctccgcgtagggcagcagcttgttgt

SEQ ID NO: 1765 - DNA, 461 bp, Homo sapiens
  MAP TO AL031985.10; EXPRESSED IN HEART, SIGNAL = 7.3; EXPRESSED IN LUNG, SIGNAL =  17; EXPRESSED IN BRAIN, SIGNAL = 5.7; EXPRESSED IN BT474, SIGNAL =  21; EXPRESSED IN FETAL LIVER, SIGNAL =  14; EXPRESSED IN ADULT LIVER, SIGNAL =  11; EXPRESSED IN PLACENTA, SIGNAL =  24; EXPRESSED IN HBL100, SIGNAL =  22; EXPRESSED IN BONE MARROW, SIGNAL =  15; EXPRESSED IN HELA, SIGNAL =  20
aagctacctcatgtctttcagcaagaaatacattaaatttgaacagtaaagacattgcataatgaattaggacacaattaaaatttcctttaaatatttctttgggggagaggatactacacttctactcaatgaagagaaacatttttacagtccggaagtcttctatttttttttaacacctattatgccatgaattcatagggaatagtttccagcagctcaggctccttcccattggttctcacacactgtgcttctctgggtggagcaggctggtgcttccgttgaacccaggtaactttctctttggcttctttctttttctgatcattttccttcacacgtttcaggaagctatctcggcttttagagtgcttaatgtgctcaatacacacattaattctcttggcaagaatcttgcccttaacttgtttgtttacaacaatgccaacagcatg

SEQ ID NO: 1766 - DNA, 446 bp, Homo sapiens
  MAP TO AP000508.1; EXPRESSED IN HELA, SIGNAL =  44; EXPRESSED IN LUNG, SIGNAL = 1e+02; EXPRESSED IN BRAIN, SIGNAL = 6.9; EXPRESSED IN BT474, SIGNAL =  12; EXPRESSED IN ADULT LIVER, SIGNAL =  20; EXPRESSED IN PLACENTA, SIGNAL =  32; EXPRESSED IN HEART, SIGNAL =  14; EXPRESSED IN HBL100, SIGNAL =  91; EXPRESSED IN BONE MARROW, SIGNAL =  48; EXPRESSED IN FETAL LIVER, SIGNAL =  16
aggaccagacccaggacaccgagcttgtggagaccaggccagcaggagatggaaccttccagaagtgggcagctgtggtggtgccttctggacaagagcagagatacacgtgccatatgcagcacgaggggctgcaagagcccctcaccctgagctggggtaaggaggggaatggggggtcacatctcttatcagagaaagcagaagtccttctggagcccttcagccgggtcagggctgaggcttgggggtcagggcccctcaccttctcctcctttcccagagccatcttcccagcccaccatccccatcatgggcatcgttgctggcctggctgtcctggttgtcctagctgtccttggagctgtggtcaccgctatgatgtgtaggaggaagagctcaggtagggaaggggtgaagagcggggtctgggttttcttgtccca

SEQ ID NO: 1767 - DNA, 445 bp, Homo sapiens
  MAP TO AL035669.27; EXPRESSED IN FETAL LIVER, SIGNAL = 7.4; EXPRESSED IN ADULT LIVER, SIGNAL = 3.3; EXPRESSED IN PLACENTA, SIGNAL =   9; EXPRESSED IN HELA, SIGNAL =  16; EXPRESSED IN BONE MARROW, SIGNAL = 5.9; EXPRESSED IN BRAIN, SIGNAL = 2.8; EXPRESSED IN BT474, SIGNAL =  16; EXPRESSED IN HEART, SIGNAL = 4.6; EXPRESSED IN HBL100, SIGNAL =  13; EXPRESSED IN LUNG, SIGNAL = 6.4
gtcaccgtcataaatgctgctggcggtcctcccttacactcctctgaacactaacattttacaaatccttttctctatgtgtatcctattcagtaatgccaggtgggcacttacaggtttaagggtaagtctgctttttagagtcaggtgacagcaccctgtggtgtcctcccttactcagcgcctgtgttcttctttgtagccacgaaggaagacaggaggtccgaggagaaagcggcagccatggcagcctcaaagaaaacagcccctccaggctccgcggtgggcaagcagcctgcacctagaaacctcgtgccaaagaagtcttcttttgctaatgtggcagcagccacaccagccattaaaaagccaccctcaggtttcaagggcaccatccccaagaggccatggctctccgctaccccatcgagtggtgcttcagctg

SEQ ID NO: 1768 - DNA, 459 bp, Homo sapiens
  MAP TO AL022312.7; EXPRESSED IN HBL100, SIGNAL =  14; EXPRESSED IN HELA, SIGNAL =  14; EXPRESSED IN HEART, SIGNAL = 4.3; EXPRESSED IN LUNG, SIGNAL =  11; EXPRESSED IN BRAIN, SIGNAL = 4.1; EXPRESSED IN BT474, SIGNAL =  26; EXPRESSED IN ADULT LIVER, SIGNAL =   6; EXPRESSED IN PLACENTA, SIGNAL =  25; EXPRESSED IN BONE MARROW, SIGNAL = 6.6; EXPRESSED IN FETAL LIVER, SIGNAL = 9.6
agatgacctggaaaccatgccagatgaccttctgaccacgttggatgacacttgtgatctctttgcccccctagtccaggagactaataagcagcccccccagacggtgaacccaattggccatctcccagaaagtttaacaaaacccgaccaggttgcccccttcaccttcttacaacctcttcccctttccccaggggtcctgtcctccactccagatcattcctttagtttagagctgggcagtgaagtggatatcactgaaggagataggaagccagactacactgcttacgttgccatgatccctcagtgcataaaggaggaagacaccccttcagataatgatagtggcatctgtatgagcccagagtcctatctggggtctcctcagcacagcccctctaccaggggctctccaaataggagcctcccatctccaggtgttctctgtgggtc

SEQ ID NO: 1769 - DNA, 430 bp, Homo sapiens
  MAP TO AC007283.3; EXPRESSED IN FETAL LIVER, SIGNAL = 2.3; EXPRESSED IN ADULT LIVER, SIGNAL = 3.1; EXPRESSED IN HBL100, SIGNAL = 2.4; EXPRESSED IN HELA, SIGNAL = 2.7; EXPRESSED IN HEART, SIGNAL = 3.8; EXPRESSED IN BONE MARROW, SIGNAL = 2.8; EXPRESSED IN LUNG, SIGNAL = 5.4; EXPRESSED IN BRAIN, SIGNAL = 1.6; EXPRESSED IN BT474, SIGNAL = 3.6; EXPRESSED IN PLACENTA, SIGNAL = 5.9
aatcatgccgggtctatactgtagtcctagggcaagcccaatgcaggagggaaaatctcttttcctcccggaagagatgggcagcaaatgtggcacagtggtaattcccatcctggtggcacgaaaataagcaggtggtccggaactgaccacctcctgggggctcacctttcttgtctcagtttctgggagaggcactgcaggtacagggatggtgagctgtgagactgctccagcagggacatgtccgcagtacacaggctccagaagaagtcagcttctcggtgaactgtgcacagccctcgcttctgagccttgaattccacattcttcatcgctggcccatccacctccaagaggctgctgtcctccagctggccctctgacaccacatagttctgaataaaaaacatctttggcttccctgcta

SEQ ID NO: 1770 - DNA, 458 bp, Homo sapiens
  MAP TO AL096818.2; EXPRESSED IN FETAL LIVER, SIGNAL = 2.6; EXPRESSED IN ADULT LIVER, SIGNAL = 1.7; EXPRESSED IN PLACENTA, SIGNAL = 3.1; EXPRESSED IN HBL100, SIGNAL = 2.3; EXPRESSED IN HELA, SIGNAL = 2.7; EXPRESSED IN HEART, SIGNAL = 4.8; EXPRESSED IN BRAIN, SIGNAL =   2; EXPRESSED IN BONE MARROW, SIGNAL = 1.8; EXPRESSED IN BT474, SIGNAL = 1.8; EXPRESSED IN LUNG, SIGNAL = 1.6
ctaccacaaggattcctgagctagattttcaaattcctgcctttagccagaaaggaggtctgaacactgttgaaggattgatcacccgtgctatctctggccgggagcaggactagcctgcgcgaagggcaacaaagatgccacagctgaaagaattgatgagttcattgtcaaactgaaggagctaaagcaatcagcctcccctttcactctgatcattgatgatccctcagggaacagctttgtggaaaacccacaggctgctcagaaagatgatgccctggtgatcacacactacaaccagacccgacagcaggaagagatgctggggctccaagcagaagcaccaacagagaagccagaagaggaagatctcagaaatgaagtgctccagtttaacacaaacggcccagaatgcaatgcccccactcagaccaacatgaagctagtacaaatcc

SEQ ID NO: 1771 - DNA, 414 bp, Homo sapiens
  MAP TO AC011004.1; EXPRESSED IN LUNG, SIGNAL = 1.4; EXPRESSED IN BRAIN, SIGNAL =   1; EXPRESSED IN FETAL LIVER, SIGNAL = 1.6; EXPRESSED IN ADULT LIVER, SIGNAL = 2.4; EXPRESSED IN PLACENTA, SIGNAL = 2.4; EXPRESSED IN HELA, SIGNAL = 1.7; EXPRESSED IN HEART, SIGNAL = 1.9; EXPRESSED IN BONE MARROW, SIGNAL = 2.3; EXPRESSED IN BT474, SIGNAL = 3.6; EXPRESSED IN HBL100, SIGNAL = 4.6
aggaaggaaatggatcccaggcagactagatcatctttaatgtccagaatcttaaatttgttaccctaaaaagtaggcatgattttaagactgaaaatcaggatagctaggctttattgaatgtgtaccatgggctgggctctgttctgagtggttcatgtgtattaagtctttttgttctcaccacagcctatgtggtaggtacttaccatctttttcttaatttccttaattttccttttcttatttttttaagtagcccagacaaatgcatgccactcagttcaaatatttctcagctcctgtaatagccacgtgctggtccattatggatgtgaaggaagcagagaccctgctccacaaagcctcgggttccaagtctaccagatacctagaaaccaattctttgtgttc

SEQ ID NO: 1772 - DNA, 458 bp, Homo sapiens
  MAP TO AC009363.3; EXPRESSED IN HBL100, SIGNAL = 4.6; EXPRESSED IN HELA, SIGNAL = 6.3; EXPRESSED IN LUNG, SIGNAL = 4.1; EXPRESSED IN BRAIN, SIGNAL = 4.5; EXPRESSED IN BT474, SIGNAL = 3.5; EXPRESSED IN FETAL LIVER, SIGNAL = 6.2; EXPRESSED IN ADULT LIVER, SIGNAL = 6.2; EXPRESSED IN PLACENTA, SIGNAL = 6.9; EXPRESSED IN HEART, SIGNAL = 5.9; EXPRESSED IN BONE MARROW, SIGNAL = 5.1
gattgagggaggggagagaggtgggacgtgagtctggctggccctagaatataacctggacatgacacaggccagtgtcaccgctgtggcaggcactgcctgcagaaagtcagttagccaggggctcagtagcagggtctgtgcttcttcctgcagaaaacaggccagtgccagcccagcgtgccctgtgcctaaccacaggcagagcctctccccagagccagtccccgtgaaactcacagcgtgcttctgtgttggtatacaggaatccgagcggctggaactcatgaacgcagagctgaagacccagattgaggagctgaagcaggagcggcagcagctcatcctgatgctgaaccgacaccgccccacctgcatcgtccggaccgacagtgtcaagacccccgagtcagaaggcaacccactgctcgagcagctcgagaagaagtgaccatggg

SEQ ID NO: 1773 - DNA, 399 bp, Homo sapiens
  MAP TO AC004938.2; EXPRESSED IN HBL100, SIGNAL = 4.4; EXPRESSED IN HELA, SIGNAL = 4.4; EXPRESSED IN HEART, SIGNAL = 2.4; EXPRESSED IN LUNG, SIGNAL = 2.2; EXPRESSED IN BRAIN, SIGNAL = 2.3; EXPRESSED IN BT474, SIGNAL = 3.7; EXPRESSED IN ADULT LIVER, SIGNAL = 3.1; EXPRESSED IN PLACENTA, SIGNAL = 4.1; EXPRESSED IN BONE MARROW, SIGNAL = 2.8; EXPRESSED IN FETAL LIVER, SIGNAL = 3.2
agggcattttggggttttaggttacaaaactggaggagagttagggtgccaggaatccttaaatgcatctctgccctgcactaaaatgttgatgctttggttggtgagtaagtggccatacatctctgtgttcttttcctttctgaccacaggcctgttttctcccccaggttacccttaagttacaggagtcccagctgcctgggccagaccagttacagcagtttcaggtggtctgtgagactgaggaagacaaattcctcctgctgtatgccctgctcaagctgtcattgattcggggcaagtctctgctctttgtcaacactctagaacggagttaccggctacgcctgttcttggaacagttcagcatccccacctgtgtgctcaatggagagc

SEQ ID NO: 1774 - DNA, 457 bp, Homo sapiens
  MAP TO AC009433.1; EXPRESSED IN FETAL LIVER, SIGNAL = 1.5; EXPRESSED IN ADULT LIVER, SIGNAL =   3; EXPRESSED IN HBL100, SIGNAL = 1.7; EXPRESSED IN HELA, SIGNAL = 1.7; EXPRESSED IN HEART, SIGNAL = 1.6; EXPRESSED IN LUNG, SIGNAL = 0.95; EXPRESSED IN BRAIN, SIGNAL = 1.5; EXPRESSED IN BT474, SIGNAL = 1.5; EXPRESSED IN PLACENTA, SIGNAL = 1.5; EXPRESSED IN BONE MARROW, SIGNAL = 2.2
  unsure 102
  unsure 152
  unsure 216
  unsure 242
  unsure 282
tcatgaccctgagactccatcccctttagggatgaaggcacagtgagggctgggggtagtcacatagggactcaggaatcgggccaaagccagaaccagatnctcctaacattagaggggttacacgcatctgaacccaggcccaggagacnctgaagcgcaagaaggccagccccaggctcaggccctccctctgcccgcagctgccctcatgantggaggagctgaatccctacaccaangatcagcccagcactgggtgcagagcggcactcggtgggntgctgtcacaggcatcatgctcctgttattcctcattgtggtgctgctgggcctatttgcctggcatcggcggcggcagaaagagaagggccgagacctggctccccgtgtctcctacacacctgccatgaggatgaccagcaccgactactccctctcaggtaagggccatgct

SEQ ID NO: 1775 - DNA, 469 bp, Homo sapiens
  MAP TO AC004815.2; EXPRESSED IN FETAL LIVER, SIGNAL = 2.4; EXPRESSED IN HBL100, SIGNAL = 1.4; EXPRESSED IN HELA, SIGNAL = 2.5; EXPRESSED IN HEART, SIGNAL = 2.6; EXPRESSED IN BONE MARROW, SIGNAL = 2.1; EXPRESSED IN LUNG, SIGNAL = 1.4; EXPRESSED IN ADULT LIVER, SIGNAL = 2.7; EXPRESSED IN BT474, SIGNAL = 1.3; EXPRESSED IN PLACENTA, SIGNAL = 2.1; EXPRESSED IN BRAIN, SIGNAL = 1.6
tggaactgtgagtccattaaacctctttcctttataaatcacccaatcttgggtatgtttttattagcagcgtgagaacagactaatacagatagtatgccactatatgacatctgcagtccaccagatgctggtgctagtagagacacttggaaaggggaggcaaacctgcttaaaggatacatttaaagcttaaaaggataaatttctaattctccaaggggagaggggtcagacagatgtcctggacctaccacctggtggccatgctgatctctctgaagattggtaccatattgagccctcctgccagcagctggatacttagcaacggcaaacctagagcatccttggtggacccatgttgttggatccacacatggtctccatccctcccgtcatggccactatgttcatggccccacactgcaagctgtgagggcgtcaggcagccagacgcattgaagat

SEQ ID NO: 1776 - DNA, 471 bp, Homo sapiens
  MAP TO AC007778.1; EXPRESSED IN FETAL LIVER, SIGNAL = 4.1; EXPRESSED IN ADULT LIVER, SIGNAL =  12; EXPRESSED IN HBL100, SIGNAL =  20; EXPRESSED IN HELA, SIGNAL = 8.8; EXPRESSED IN HEART, SIGNAL = 5.1; EXPRESSED IN LUNG, SIGNAL = 7.6; EXPRESSED IN BT474, SIGNAL = 8.4; EXPRESSED IN PLACENTA, SIGNAL =  11; EXPRESSED IN BRAIN, SIGNAL = 4.9; EXPRESSED IN BONE MARROW, SIGNAL = 7.5
  unsure 22
  unsure 164
cctaatctagtggggacatggnagaacttttgtgtctaactcagggattgtaaacgcaccaatcagcaccctgtcaaaacagaccaatcagctctctgtaaaacagaccaatcagctctctgtaaaatggaccaatcagcaggatgtgggtggggccagataangagactaaaagcaggctgcccaagccagcagtggcaacctgggtcccggttccacactgtggaagctttgttctttcgcgctttacagtaaatcttgctactgctcactctttgggtacacactgcctttatgaggtgtaacactcaccgcgaaggtctgcagcgtcactcctgaagccagcgagactatgaacctaccgggaggatgcgccaccttaaaagctttaacactcacagcgaaggtttgcagcttcactcctgaagccagcgagaccacgaacccacctggaggaacgaacaactccag

SEQ ID NO: 1777 - DNA, 488 bp, Homo sapiens
  MAP TO AC004897.1; EXPRESSED IN PLACENTA, SIGNAL =  10; EXPRESSED IN HBL100, SIGNAL = 1.8; EXPRESSED IN HEART, SIGNAL = 1.2; EXPRESSED IN BONE MARROW, SIGNAL = 1.5; EXPRESSED IN BRAIN, SIGNAL = 0.91; EXPRESSED IN LUNG, SIGNAL = 1.6; EXPRESSED IN ADULT LIVER, SIGNAL = 2.8; EXPRESSED IN BT474, SIGNAL = 0.99; EXPRESSED IN FETAL LIVER, SIGNAL = 1.4; EXPRESSED IN HELA, SIGNAL = 1.7
gaaaatcctactgcctttctggagagactaagggagtcattgaggaagcatacctctctgtcacctgactctattgaaggccaactaatcttaaaggataaatttatcagtcagtcagttgtagacattagaaaaaaacttcaaaagtctgccttaggcccagagcaaaacttagaaaccctattgaacttggcaacctcggttttttataatagagatcaggaggagcaggtggaacaggacaaacgggataaaaagaaggccaccgctttagtcatggccttcaggcaagcggactttggagactctggaacagggaaaggctgggcaaatcaaatgcctaatagggcttgcttccagtgcagtttgcaaggacactttaaaaaagattgtcagaatagaaataagccgccccctcgtccatgccccttatgtcaagggaatcactggaaggtccactgccccaggggacaaaggtcctctgagtc

SEQ ID NO: 1778 - DNA, 392 bp, Homo sapiens
  MAP TO AC007917.15; EXPRESSED IN PLACENTA, SIGNAL = 1.4; EXPRESSED IN HELA, SIGNAL = 1.1; EXPRESSED IN HEART, SIGNAL = 1.3; EXPRESSED IN BONE MARROW, SIGNAL = 1.1; EXPRESSED IN FETAL LIVER, SIGNAL =   1
ttcagagtatagatgaatttcctgcaaggaaatagactcttaaaggggtcagcatgggatcccttcagagaatatgaactccacaagttggatttctagggccactaatttggtcacatctatgtaaccaaagcttttgaagacacttctacaaaattcttgcctctaccatgaaaaggatggggtaacaaagaggggttaatatttactaaacagaaaatgtccttggatgttttccttttgttcatcgcagaatcaaatatggctgagaagcaagcaccagctgaagaccaagtggctgcgacccccctggaaccccccgtccctcggtcttcaagctcggaatccccagtggtatacctgaaggatgttgtgtgctacctgtccctgct

SEQ ID NO: 1779 - DNA, 454 bp, Homo sapiens
  MAP TO AC007938.1; EXPRESSED IN BONE MARROW, SIGNAL = 1.4; EXPRESSED IN BT474, SIGNAL = 1.7; EXPRESSED IN PLACENTA, SIGNAL = 1.5; EXPRESSED IN HBL100, SIGNAL = 1.6; EXPRESSED IN HEART, SIGNAL = 0.99; EXPRESSED IN BRAIN, SIGNAL = 1.3
tccctctgcaccagtgtatgctgggagctggggtggaagggtttgttggtgaagggggttgttggtgatgtgtagagggaggctactactggactagaaaatggctgatcaattagatgatgaagacagggtgctggccttttaagtaagagatttatgaagtttttttttttttaaaggagttcttctggagtaacaaatatgcctgttaggtgttatactgttatcaggcaatatactgatagcaaaatgggtctcaccttcaagggttttggtagaactgagggcaaaggtttcctctttctcaaaggtatctcccacctcttcccaagcagcagcaaagttaggcttcagtactttctgaatatggtcagacacagtcacttcgagatcttccagctagtgggtaataagcagtcagtaaagaaaagtcctttctgttatagggcaaaga

SEQ ID NO: 1780 - DNA, 457 bp, Homo sapiens
  MAP TO AC007993.2; EXPRESSED IN HELA, SIGNAL = 1.1; EXPRESSED IN PLACENTA, SIGNAL = 1.3; EXPRESSED IN HBL100, SIGNAL = 1.6; EXPRESSED IN HEART, SIGNAL = 1.1; EXPRESSED IN BONE MARROW, SIGNAL = 1.7; EXPRESSED IN BRAIN, SIGNAL = 0.93; EXPRESSED IN LUNG, SIGNAL = 0.98; EXPRESSED IN ADULT LIVER, SIGNAL = 1.5; EXPRESSED IN BT474, SIGNAL = 1.5; EXPRESSED IN FETAL LIVER, SIGNAL =   1
  unsure 26
caggagataccagctcagccatcagnagccacctgagaaggtcgaaccatctccagtcctatagcaggccccaactcagcttttagagccccttaaagaggtagaatcctctccagtccagcaggcagtccctgctcagtcttcagaacccccctatggtgatagaaccctctctgacccagcagatggccccatctttgcctccagagttccctcaggaggtagaaccatctctaactcagcaggagattccagctcagattccagagccccctatggaggcagaaccttctccaacccagcaagaggccacagttcagactccagagccccctaaggaggtagaaccttcaagccagcagatggtcccatctcagcctccagagccacctaaggaggttgcagctcaacctccagctcattatgaggtgacagttccaacacaaggtcaggatca

SEQ ID NO: 1781 - DNA, 494 bp, Homo sapiens
  MAP TO AC009288.8; EXPRESSED IN ADULT LIVER, SIGNAL =   1; EXPRESSED IN BT474, SIGNAL = 2.3; EXPRESSED IN FETAL LIVER, SIGNAL = 1.4; EXPRESSED IN PLACENTA, SIGNAL = 3.1; EXPRESSED IN HBL100, SIGNAL = 1.3; EXPRESSED IN HEART, SIGNAL =   1; EXPRESSED IN LUNG, SIGNAL =   1
cttggcatgatcaaattcccatatatgcaaattagggacagtgctttaccacagagtgttttaattaatatttataaatcacagagtgcctttgaaagggccagtaagctgtttatattattatcatgtcacacaaataacaaaccctttggagattgctgcctactttgcattttggtctgagaagtaagtgagcatgttgcgtgtgtttctctccctcgtaggtgtggtgtcagcacagcggcaggtcaccgttcaggaaggacccttgtaccgcacggagggctcccacatcactatctggtgcaatgtgagtggctaccagggaccttctgaacagaatttccagtggtccatttacctgccttcgtcgccagagcgagaggtgcagatcgtcagcaccatggactcttccttcccctatgccatctacacccagcgcgtccgcggagggaagatcttcatagaaagagtccaggggaacccaaccctat

SEQ ID NO: 1782 - DNA, 499 bp, Homo sapiens
  MAP TO AC009473.2; EXPRESSED IN HEART, SIGNAL = 7.3; EXPRESSED IN LUNG, SIGNAL =  19; EXPRESSED IN BRAIN, SIGNAL = 5.2; EXPRESSED IN BT474, SIGNAL =  30; EXPRESSED IN ADULT LIVER, SIGNAL =  12; EXPRESSED IN PLACENTA, SIGNAL =  31; EXPRESSED IN HBL100, SIGNAL =  49; EXPRESSED IN BONE MARROW, SIGNAL =  15; EXPRESSED IN FETAL LIVER, SIGNAL =  15; EXPRESSED IN HELA, SIGNAL =  29
ggcaatcatgaagaatcacttgaaaattatggttcttttcggcttattactaaacagcattcatcctttaatccttctagaaattgtcctgacccttttcacaagatggcgccgaaagcgaagaaggaagctcctgcccctcctacagctgaagccaaagtgaaggcttcgaaggccaagaaggcagtgttgaaaggtgtccacaaccacaaaaaaagaaaaagaaaaaaagaaagatctgcccgtcacccaccttccagcagcccaagacactgcgactccggaggcagcccagatatcctcggaagagcgcccccaggagaaacaagcttaaccactacactatcaaatttccgctgaccactgagtcggccatgaagaagacagaagacaacagcacgcttgtgttcactgtggatgttaaagccaacaagcaccagatcaaacaggctgtgaagaagctctgtgacatcgatgtggccaaggtcaacacctgatt

SEQ ID NO: 1783 - DNA, 465 bp, Homo sapiens
  MAP TO AC010154.1; EXPRESSED IN HELA, SIGNAL =   2; EXPRESSED IN LUNG, SIGNAL = 1.7; EXPRESSED IN BRAIN, SIGNAL = 0.92; EXPRESSED IN BT474, SIGNAL = 1.1; EXPRESSED IN ADULT LIVER, SIGNAL = 9.1; EXPRESSED IN PLACENTA, SIGNAL = 2.3; EXPRESSED IN HEART, SIGNAL = 1.4; EXPRESSED IN HBL100, SIGNAL = 2.4; EXPRESSED IN BONE MARROW, SIGNAL = 1.8; EXPRESSED IN FETAL LIVER, SIGNAL = 1.4
gttgttggagcatctggttgggggcctctggcctagagaacctttgtcctctggggcagtgagccttccagtgattgttttggcatagtggacatgggcaagaaggcagcttgtttcttgtgggacaatctgttttaaggtgcccttgcaaaccacactggtaagaaaccctaccatgcaattggcctgctccattttctgtcctctctgaaccaccaaggtttgtttatctgagggccatgactaaggctgcagcctttctctgatctcacttttcctttttggccagttcctcttggtccctataatagaacaccaaggttgccaggtttattaaagcctccagattttgttcagggcccagctctgatttttggagcattctcctgatatctgcagctgattgggtaataaacttatctttcaggatcaattgactcttgagggagtcaggtgacaggtaag

SEQ ID NO: 1784 - DNA, 455 bp, Homo sapiens
  MAP TO AJ239326.3; EXPRESSED IN HELA, SIGNAL =   4; EXPRESSED IN BONE MARROW, SIGNAL = 2.2; EXPRESSED IN LUNG, SIGNAL = 2.9; EXPRESSED IN BRAIN, SIGNAL =   2; EXPRESSED IN BT474, SIGNAL = 2.4; EXPRESSED IN PLACENTA, SIGNAL =   2; EXPRESSED IN HEART, SIGNAL =   2; EXPRESSED IN HBL100, SIGNAL = 2.5; EXPRESSED IN ADULT LIVER, SIGNAL = 1.8; EXPRESSED IN FETAL LIVER, SIGNAL = 1.7
aaaaccgcaatctggacaacgtgtcccccaaggatggcagcacacctgggcctggcgagggctctcagctctccaatgggggtggtggtggccccggcagaaagcggcccctggaggagggcagcaatggccactccaagtaccgcctgaagaaaaggaggaaaacaccagggcccgtcctccccaagaacgccctgatgcagctgaatgagatcaagcctggtttgcagtacacactcctgtcccagactgggcccgtgcacgcgcctttgtttgtcatgtctgtggaggtgaatggccaggtttttgagggctctggtcccacaaagaaaaaggcaaaactccatgctgctgagaaggccttgaggtctttcgttcagtttcctaatgcctctgaggcccacctggccatggggaggaccctgtctgtcaacacggacttcacatctgaccag

SEQ ID NO: 1785 - DNA, 459 bp, Homo sapiens
  MAP TO AC010680.2; EXPRESSED IN ADULT LIVER, SIGNAL = 1.8; EXPRESSED IN BT474, SIGNAL = 1.9; EXPRESSED IN HEART, SIGNAL = 3.1
gctctttgccttctagttcccaatctgactcctatactttattagcttattgttgattaagggcagggtatataacatttgaaatcacaattgctaaatatactctatgataccttgactggccaaaaaagaacagtcagggtctcccataatcagtgcatgaaacaaacgcaaaagaataaaatcaaagcacattgttactatcagtcatccttaaaagtgctttaaagtaaagtgctgcctgttgttaatattgtttcagaagtaactataatggaagagaaagaaagggcttataccctagaagaagaagctgtttcagtacaacgggaagaagaatatgaggaatatgaagaatatgattataaagaatttgaggagtatgaaccaacagaagaatatgaccaatatgaagaatacgaggagcgggagtatgaacgatatgaagagcatgaagaa

SEQ ID NO: 1786 - DNA, 459 bp, Homo sapiens
  MAP TO AC010726.2; EXPRESSED IN PLACENTA, SIGNAL = 1.1; EXPRESSED IN HEART, SIGNAL = 1.6; EXPRESSED IN BONE MARROW, SIGNAL = 1.2; EXPRESSED IN BT474, SIGNAL = 1.1; EXPRESSED IN FETAL LIVER, SIGNAL = 0.99; EXPRESSED IN ADULT LIVER, SIGNAL = 1.2; EXPRESSED IN HELA, SIGNAL = 1.5
ttgcttcctttagactggggccttttggcaaaagctgttctaactccatctcagcatttacagttccatacctggtggtcagaagaggctcatctgcagactcagctaaattgggctggtggcattctaattgctccatctcagttcacagactccaataattactctgacactactgcccaattaggctttgatgctctcaccacggaacaagtaacaaagctgtgtatgagagtttgggataaattacacgccccaggccaagctcctgtttcttttactactgttaaacagggacacaataaattctatcctgattttttggccaaattacacaatgcagttccaaattctgtctctgatgagcgcactcaagatattgtcgttcgtatgtcaacttttgagaatgtgaaccatgagtgtaaaatggccatgcgttccgtcaaaacgatgaagttt

SEQ ID NO: 1787 - DNA, 461 bp, Homo sapiens
  MAP TO AL021707.2; EXPRESSED IN HELA, SIGNAL = 3.4; EXPRESSED IN LUNG, SIGNAL = 1.5; EXPRESSED IN BRAIN, SIGNAL =   1; EXPRESSED IN BT474, SIGNAL = 2.3; EXPRESSED IN ADULT LIVER, SIGNAL = 0.93; EXPRESSED IN PLACENTA, SIGNAL = 1.2; EXPRESSED IN HEART, SIGNAL = 1.2; EXPRESSED IN HBL100, SIGNAL =   2; EXPRESSED IN BONE MARROW, SIGNAL = 1.1; EXPRESSED IN FETAL LIVER, SIGNAL = 0.96
aaattcagtgctccctggcctgcatgtttgtcttcctttctatgaactggcaactacactgtctcagttgtcttaaatagagagaacgttacaatgccagccccaccagactagaaggctggtatcccaggctgggcatcttccctaccaaaaggacttaaaagtactgatgcgccattgaagattaaggtcaggtccgagacactatgattctaaggcagggagagaatccaagggcacaggaatttcatttcctttgtcaaataaccagagatgagctcagtgtccccaacctaagaaatgaagcagcctagcaacttagtcacaaaaggtgccgattacctgagctcgctctcgcctccaatccactcgggcatcttgagtttggagtcgaggttgtagtaggcccctcccacctctcgaacacagatccagtgctgccttttgaggggcagtttcag

SEQ ID NO: 1788 - DNA, 447 bp, Homo sapiens
  MAP TO AC010889.1; EXPRESSED IN FETAL LIVER, SIGNAL = 0.88; EXPRESSED IN ADULT LIVER, SIGNAL =   2; EXPRESSED IN HELA, SIGNAL = 2.7; EXPRESSED IN BONE MARROW, SIGNAL = 1.5; EXPRESSED IN LUNG, SIGNAL = 1.6; EXPRESSED IN BRAIN, SIGNAL = 1.3; EXPRESSED IN BT474, SIGNAL =   2; EXPRESSED IN PLACENTA, SIGNAL = 1.8; EXPRESSED IN HEART, SIGNAL = 1.1; EXPRESSED IN HBL100, SIGNAL = 1.4
ggtagagttttccagatgccctaaacttcagctcaaaaagccaagcttgtagctgtaattgaggtattgactactttgatatgcctattaatgtgatttctgattctttatgtgtggttcattccacacaattaattgaaaatgctcagttatgatttcatgtagatgaacaactgatgactttatttattcaattgcaaacagcagttaggagtagaatacaccctttttacatcaatcacattagggctcatacactacttccaggacctttgcagggaatcaaatggctgatcatctagttgctactgcaatgtctaatgctagacactttcacaacttaacccatgtaaatgcctctggtctcaaacgcagatacagcattacctggaaagaagctaaagtgattattcagcgatgcacatcttgccaaatggtacattcttc

SEQ ID NO: 1789 - DNA, 453 bp, Homo sapiens
  MAP TO AC011193.1; EXPRESSED IN HBL100, SIGNAL = 1.4; EXPRESSED IN HELA, SIGNAL = 1.3; EXPRESSED IN HEART, SIGNAL = 1.5; EXPRESSED IN LUNG, SIGNAL = 1.8; EXPRESSED IN BRAIN, SIGNAL = 1.6; EXPRESSED IN BT474, SIGNAL = 1.1; EXPRESSED IN ADULT LIVER, SIGNAL = 1.7; EXPRESSED IN PLACENTA, SIGNAL = 2.2; EXPRESSED IN BONE MARROW, SIGNAL = 1.5; EXPRESSED IN FETAL LIVER, SIGNAL = 2.4
  unsure 24
  unsure 30
  unsure 52
  unsure 105
  unsure 350
  unsure 431
ggcaatagtttctccctctccacntacggncctgaaatgtcctttacacccnacagtgagaaacagttcttcgttctggattatttccccaaacaatgggagggnttgttgctgtagcggctccactgtctcctcccaaaactggggtcaggaaagatcaagggaaccagcctcagtgacctgagcctttagttctggttttgttcctaatgagctgtgacataatggctcttcttaattcctcttttggtctccccttaaaaagggagaggtcttacctggctgagcaagtccctgagggctgaaagtggctgccatgagcagcaggcacagaagcgctgcagaaaccnttcatcttggagggcaagggtgtgagcttcagcatgagaggtgaaggtttctgggttgttctcaacctctctgctcctcgngtggctctgcctgccttttata

SEQ ID NO: 1790 - DNA, 465 bp, Homo sapiens
  MAP TO AC010872.2; EXPRESSED IN FETAL LIVER, SIGNAL = 5.3; EXPRESSED IN HBL100, SIGNAL = 1.8; EXPRESSED IN HELA, SIGNAL = 2.2; EXPRESSED IN HEART, SIGNAL = 2.3; EXPRESSED IN BONE MARROW, SIGNAL =   2; EXPRESSED IN LUNG, SIGNAL = 1.4; EXPRESSED IN ADULT LIVER, SIGNAL =  12; EXPRESSED IN BT474, SIGNAL = 1.4; EXPRESSED IN PLACENTA, SIGNAL = 2.3; EXPRESSED IN BRAIN, SIGNAL = 1.5
gctacagatccacagtcccctcttggaacttttctcgattgggcttcttctgtgggtaatattcctaaggaaagcatcatggttctgagctccaagttgggttttgaagttagatttgaatagtgaatgaggtgattaagggctctcctggcagaggacacaccatgagcaatattttatgtgccctgaaggtggtctgtataactttatccatgtctttcttctcagccccatcactttacaagccttggttcagtgtggacagcctcagtgctccactcacatcctccagtggctgaaacgtgtgcatgccaacccccttctgatagatgtggtcacctacctggtggccctgatccccgagccctcagcacagcagctgcgagagatcttcaacatggcgagggatcagcgcagccgagccaccttgtatgcgctgagccacgcggtcaacaagtgagtttc

SEQ ID NO: 1791 - DNA, 448 bp, Homo sapiens
  MAP TO AL022068.2; EXPRESSED IN BONE MARROW, SIGNAL = 1.2; EXPRESSED IN BRAIN, SIGNAL = 1.1; EXPRESSED IN FETAL LIVER, SIGNAL = 1.1; EXPRESSED IN ADULT LIVER, SIGNAL = 1.2; EXPRESSED IN HBL100, SIGNAL = 0.97; EXPRESSED IN HELA, SIGNAL = 1.4; EXPRESSED IN HEART, SIGNAL = 1.4; EXPRESSED IN BT474, SIGNAL = 0.99; EXPRESSED IN PLACENTA, SIGNAL = 1.7
ccccagtaacactggagaatcaagaaacttgcaaatttagggctagaacccaggtgttttcaaccagtcagccgctcttcccaaacatcattttgcccttcacatatgtgataacatgctctataaagttgcccaagtttgagaggaatttttagaatataactttacaaaggacagatgtgtgttttatatttatatttatgtaaaacacacgtatatgtgtgtgtgagggagagagagaggggggctttatataacgcacagcaagggttttattttctcccttctgcatctgtaagctcatttctaatcagagagccgtttcacaacacaggcagctgaggaagaagattggcccttcagggcgagccggcttgtttccacttgctacagaggtgaggagtagtggtgctgccagctgccctgatagtgactccatctgccctgc

SEQ ID NO: 1792 - DNA, 462 bp, Homo sapiens
  MAP TO AC011191.1; EXPRESSED IN BT474, SIGNAL = 2.3; EXPRESSED IN HBL100, SIGNAL = 2.7; EXPRESSED IN HELA, SIGNAL = 3.6; EXPRESSED IN BONE MARROW, SIGNAL = 4.1; EXPRESSED IN LUNG, SIGNAL = 2.7; EXPRESSED IN ADULT LIVER, SIGNAL = 3.4; EXPRESSED IN FETAL LIVER, SIGNAL = 3.7; EXPRESSED IN PLACENTA, SIGNAL = 3.9; EXPRESSED IN HEART, SIGNAL = 3.9; EXPRESSED IN BRAIN, SIGNAL = 2.8
ttttcacgtttgctcgtttgctcgccagctgcggtgggccagcctcactccaccaccctgaccatctggcttcggctggcctcatgcaaatgtggccaacgcagagcctccccctccttccctccccttctttcccggttggggagttcccaccctggcttctttctcacgcccactcgcccactggggctggaggtgggggtgtgcagggcagggaacctctgcctggaggggcctctgcagaagggcattttgttggggtaagcagagctcccctggccttccctgagagctctcaggaattgaggttgcagcagctggatatgccactggaccagctgcaggtggggaaggggcctccggcgggcccggggatgctcacagcccagggagagcatggatgctaattcacctggagagtagagaagcagcaactggggaggcagcaggagtcagacagag

SEQ ID NO: 1793 - DNA, 492 bp, Homo sapiens
  MAP TO AC011290.1; EXPRESSED IN PLACENTA, SIGNAL = 7.2; EXPRESSED IN BONE MARROW, SIGNAL = 6.6; EXPRESSED IN BRAIN, SIGNAL = 5.8; EXPRESSED IN BT474, SIGNAL = 4.1; EXPRESSED IN FETAL LIVER, SIGNAL = 7.6; EXPRESSED IN HBL100, SIGNAL = 5.6; EXPRESSED IN HELA, SIGNAL = 7.6; EXPRESSED IN HEART, SIGNAL =  10; EXPRESSED IN LUNG, SIGNAL =   5; EXPRESSED IN ADULT LIVER, SIGNAL = 7.2
agtcaggcaggcaggcaggaggcccaccctggcagaggactcagtgtaagactgttctttctcaattttcccccccagacacaccatcctgagaagccactttttcctaccacaggaagcccaagagaacactatagctagcagtctgacagccaaactgaaccctggccttttgtatcctgccaggtttgaaaagctggacatcacccctaaaagtgcccagaagatcaagccggtgcttgagcggtggatggctgaggctgaggcccgccatcgagcaggtatgcagaacctgaccgagtttatcgggagtgaaccatccaaaaagcgcaagcggcgcacctccttcacaccccaggcccttgagatcctcaatgcccactttgagaagaacacacacccttctgggcaggaaatgaccgaaattgctgagaagctgaactatgaccgagaagtagttagagtttggttctgcaataagaggcaagccct

SEQ ID NO: 1794 - DNA, 485 bp, Homo sapiens
  MAP TO AL035691.17; EXPRESSED IN BONE MARROW, SIGNAL = 2.4; EXPRESSED IN LUNG, SIGNAL = 1.4; EXPRESSED IN BT474, SIGNAL = 1.8; EXPRESSED IN ADULT LIVER, SIGNAL = 1.9; EXPRESSED IN FETAL LIVER, SIGNAL = 1.6; EXPRESSED IN HELA, SIGNAL =   2; EXPRESSED IN PLACENTA, SIGNAL = 2.1; EXPRESSED IN HBL100, SIGNAL = 2.7; EXPRESSED IN HEART, SIGNAL = 1.3; EXPRESSED IN BRAIN, SIGNAL = 1.8
gtgtgggtgagaagggagagccatctaggagacagctttcaatatcaaatacacatctacataattcttcataacagctgtctgtatagtatccactagacagaaccaacctagttttagctcatactagacattcaaaccgttagcatttttaactactaacaaatgtgtattatgtattataaacacttatgatttctaaacattcaaaatttttgtatcgctatatacgtatagctatacacagtcatttttgcaaaattggggaatcatattgccaatccagtaatttcaggtagttctacttacccactgaatgataagtgcgtgtcttcaagtcgtgcatacaaacagcacttgatggcccgcactggacaatatccacacttccacagatgttgattttataaagtacattatttttggtatcaacagcttcccatgtataactggaaaggaagaaaaacaacttgtcaatgtcactg

SEQ ID NO: 1795 - DNA, 477 bp, Homo sapiens
  MAP TO AL049593.4; EXPRESSED IN ADULT LIVER, SIGNAL = 2.1; EXPRESSED IN BT474, SIGNAL =   2; EXPRESSED IN FETAL LIVER, SIGNAL = 2.5; EXPRESSED IN PLACENTA, SIGNAL = 2.2; EXPRESSED IN HBL100, SIGNAL = 1.8; EXPRESSED IN HELA, SIGNAL =   2; EXPRESSED IN HEART, SIGNAL =   2; EXPRESSED IN BRAIN, SIGNAL = 2.8; EXPRESSED IN BONE MARROW, SIGNAL = 2.4; EXPRESSED IN LUNG, SIGNAL = 1.4
tattctcaccactgccatgcctagggcccccagcctctttgcttttctttctgcccctgcctctttctagagcaccatgaattccattcagtctctgggattggagacactctattgctaagcttgtccttggggtctcaccctctaccccaagtggcttatgaaaatatgtatttccaaacagagaactttctctaggaggaattctggtgaataaccttccctccaccttgttatggcctgtctgttttgtgagtcaaactctgtgtctttgcagatcggaacccagcagccctgatcatggttcatcaacgattgagcaagacctcgctgctctggatgctgaaatgacccaaaagttaatagacttgaaggacaaacaacagcagcagctgcttaatcttcggcaagaacagtattatagtgaaaaataccagaagcgagaacatattaaactggtgagcctgagaaacatga

SEQ ID NO: 1796 - DNA, 484 bp, Homo sapiens
  MAP TO AL049812.3; EXPRESSED IN HEART, SIGNAL = 1.4; EXPRESSED IN LUNG, SIGNAL = 1.1; EXPRESSED IN BRAIN, SIGNAL = 2.9; EXPRESSED IN BT474, SIGNAL = 2.1; EXPRESSED IN ADULT LIVER, SIGNAL = 3.5; EXPRESSED IN PLACENTA, SIGNAL = 2.7; EXPRESSED IN HBL100, SIGNAL = 2.4; EXPRESSED IN BONE MARROW, SIGNAL = 3.1; EXPRESSED IN FETAL LIVER, SIGNAL = 3.9; EXPRESSED IN HELA, SIGNAL =   2
agaaagcagctcctggtctgtggtagtcctgctgggcatctggcagtgagtaaagatttgatttgaatttgcatgtcagagatttggaattgggactaatcagctgtgactggcgattccaggaagcaggaactagagggaggacagatggtattatgagtgcttgtgagggggtgaggcagcatgtgggagggacaatctgagactcagggattatgcagagtgtccctcaccaggagtattagtttgttttgcattgctgtaaaggaatacttgaggctgggtaatttataaagaaaagaggtttatttggctcatggctctgcaggctgtaaaagcatggtgtcagcatctgctcagcttctggggaaacctcaggaagcttacagtcatggtggaagggaagggatagcagccatgtcacatggtaagagagagaggaggaggttctagactctaactctttagctcttgcatgaactca

SEQ ID NO: 1797 - DNA, 471 bp, Homo sapiens
  MAP TO AL109757.1; EXPRESSED IN PLACENTA, SIGNAL = 1.5; EXPRESSED IN HBL100, SIGNAL = 2.9; EXPRESSED IN HEART, SIGNAL = 0.95; EXPRESSED IN LUNG, SIGNAL =   1; EXPRESSED IN BRAIN, SIGNAL = 0.99; EXPRESSED IN BONE MARROW, SIGNAL = 0.96; EXPRESSED IN BT474, SIGNAL = 2.8; EXPRESSED IN ADULT LIVER, SIGNAL = 0.91; EXPRESSED IN FETAL LIVER, SIGNAL = 0.89
ggccactgttaacctctcagcttttctctgatttttttttttttttttttttgaactggagcacactttacttctgactaacatgtaacatatatcctctgactctggacttaatgggcaaatctgcaggatcctcttctgtgagttggcctgtctgtggcctctctggcacagagattaatagaatggccttaagttatcattccataatcaaggggtttggctttaaatgcttttgcttttgtcctcgtcaggttacaacagcccttgtctttttcactaggtatcattggtggactgaccagtgttataacttcgacagtggaaggtgtgaaaacagaagggggtgtcagcggtttcatatctggccttggaaaagggcttgttggcactgtaaccaagccagtggcaggcgccctggattttgcatcagaaacagcccaggcggtgagagacacagccacactcagc

SEQ ID NO: 1798 - DNA, 470 bp, Homo sapiens
  MAP TO AL109801.5; EXPRESSED IN FETAL LIVER, SIGNAL = 1.2; EXPRESSED IN ADULT LIVER, SIGNAL = 1.1; EXPRESSED IN HELA, SIGNAL = 1.4; EXPRESSED IN PLACENTA, SIGNAL = 1.3; EXPRESSED IN HBL100, SIGNAL = 0.93; EXPRESSED IN HEART, SIGNAL = 1.4; EXPRESSED IN BONE MARROW, SIGNAL = 1.2; EXPRESSED IN BRAIN, SIGNAL =   1
ttagtgtggagggttcctggacagtgtaggagttataaattttgaatcccaaacccatgtgaaagcaggcctcagagggagaccctgttttctaccttcttacagcccaggttgtcttcctatactagtgaatgaatttttgtctagttcaaccttattgaaggtgttgtcctttgaaactcccaacttcctacaggtgtttcagttccaacctcctgccttacttaggcccaaggctctgtctcctgcctctacaggccatcagaacctaagcacgtgtgcttgcttcagcagcacatgtactggaattagaatgatgcagagaagattagcatggtccctgcacaaggatgatgcacaaatccgtgaagtattccatataaaaacaaagaagaagaagaaggtggatcatggcagacgggaggcaagactagattgcagctccaacttcgatgaacagagcagcatgt

SEQ ID NO: 1799 - DNA, 460 bp, Homo sapiens
  MAP TO AL049830.2; EXPRESSED IN FETAL LIVER, SIGNAL = 9.3; EXPRESSED IN HBL100, SIGNAL =  39; EXPRESSED IN HELA, SIGNAL =  17; EXPRESSED IN HEART, SIGNAL = 4.6; EXPRESSED IN LUNG, SIGNAL =  11; EXPRESSED IN BRAIN, SIGNAL = 2.6; EXPRESSED IN BT474, SIGNAL =  21; EXPRESSED IN ADULT LIVER, SIGNAL = 5.8; EXPRESSED IN PLACENTA, SIGNAL =  16; EXPRESSED IN BONE MARROW, SIGNAL = 9.1
aaaatttttgaacaaacgaaaaacattggccaaatgaataaatgtttcctaataatgttggtaaatgttggtaagttctttcactatcaatcgtatcataaaatttttcttaataccaacttaaatgccattttgtgtatagaaaaatccctaaaagatcctagaggttatccactctgggcagaggtgcatttaaaaactaaagtttttccttctttcctttctgctgtaggccccagtggttactgtcaaaatgggcaagttcctgaaacctcggaaagtggtgtttgtcctggctggatgctactccagacacaaagctgtcatcgtgaagaacattgatgatggcacctcagatcgcccctacagccatgccctggtggctggaattgaccactatccctgcaaagtaagagctgccatgggcaagaagaagatcaccaagaggtcaaagatcaag

SEQ ID NO: 1800 - DNA, 473 bp, Homo sapiens
  MAP TO AL050330.9; EXPRESSED IN BONE MARROW, SIGNAL =   1; EXPRESSED IN BRAIN, SIGNAL = 1.2; EXPRESSED IN FETAL LIVER, SIGNAL = 1.2; EXPRESSED IN ADULT LIVER, SIGNAL = 1.3; EXPRESSED IN PLACENTA, SIGNAL = 1.2; EXPRESSED IN HELA, SIGNAL = 1.3; EXPRESSED IN HEART, SIGNAL = 1.2
caacttagtcccttggcctgccctatcttcaagggggaagagcaggatgcagtaccccagaaaattaggccttgtcactaagaagaagggggcatgcacgctgcagaagcaaccagccatctcaagcagataccacacagcctaaattcaaactgttgcaatataatcaaatcccatcagctccagtcacatattagctctaggagatttctggcttgcagcccaaaaaagtgtgttttgaggtcgtaagccacagggagaacaagattgtcccataaactccttacagagatggtgtacaggaaacgagccttacagagaccacagcctatggagtgtctagcttcagagaatatgtactccactggcagcgtgagaaacaaatacccaagaaaatacaatatagcacaaaccaggagctgagggtgaatgaagatgctcagaaagatctgcagtaagaatttcctgggaaa

SEQ ID NO: 1801 - DNA, 453 bp, Homo sapiens
  MAP TO NM_007104.1; EXPRESSED IN BONE MARROW, SIGNAL =  16; EXPRESSED IN FETAL LIVER, SIGNAL =  16; EXPRESSED IN ADULT LIVER, SIGNAL =  17; EXPRESSED IN HBL100, SIGNAL =  12; EXPRESSED IN HELA, SIGNAL =  18; EXPRESSED IN HEART, SIGNAL =  15; EXPRESSED IN BRAIN, SIGNAL =  12; EXPRESSED IN LUNG, SIGNAL =  13; EXPRESSED IN BT474, SIGNAL = 9.7; EXPRESSED IN PLACENTA, SIGNAL =  16
cggaaactgactgatttaagctgacttaactgactttccagaaaagaaatttattagtagaatataagggagtaccttaaataattgggaggtcgagtgagctgtcttggaggctgtgtagtcagaaacagtacccaaatcaagccacacaacagttcttgtgaacacactccagctgccacctgtgggtacagaagctgctgcttccttggctaatcttaccaaatgctggatgctgctcttacaactgctgccctggctgtctctggaaattgggtggaactgctgctgccactcacctgaatcaattatgtgtgcttcctggttcatctttccaccttccaatacatctgattggtgtgccttggtcatgtgactgtgtcctagctgcacaggaggctggaagaaaatgcctgtagttccagctactctggaggctgaggtgggaagatt

SEQ ID NO: 1802 - DNA, 497 bp, Homo sapiens
  MAP TO Z97832.10; EXPRESSED IN BONE MARROW, SIGNAL = 2.9; EXPRESSED IN LUNG, SIGNAL = 2.5; EXPRESSED IN BRAIN, SIGNAL = 2.8; EXPRESSED IN FETAL LIVER, SIGNAL = 2.2; EXPRESSED IN ADULT LIVER, SIGNAL = 2.4; EXPRESSED IN PLACENTA, SIGNAL = 4.1; EXPRESSED IN HEART, SIGNAL = 2.4; EXPRESSED IN HELA, SIGNAL = 2.7; EXPRESSED IN HBL100, SIGNAL = 5.2; EXPRESSED IN BT474, SIGNAL = 3.1
ctaccagccccttcactagccccagccttgccctgtcccccgtttcctttccgccttgtctctggattcagtggttcaacacctgtgtcctctctgtgttccactggccatcttccccaaccctgtccattcagagtctcaggtctcagtccctctccctccctctggctctcccttcaccaaccctgtccctcacccctgtccccttagtttcccccttgccagccccagttcccacccccctcacagcccagtgtccccaggggagaagccatacgtttgcacggtgccaggctgcgggaaacgcttcaccgagtactcgagcttgtataagcaccacgtggtgcacacacactgcaagccctacacctgcagcacctgcggcaagacctaccggcagacctccaccttggccatgcacaagcgcagtgcccacggcgagctggaggccacggaggagagcgagcaggccctctatgagcagcagcaacttgagg

SEQ ID NO: 1803 - DNA, 348 bp, Homo sapiens
  MAP TO Z99716.4; EXPRESSED IN BT474, SIGNAL = 1.1; EXPRESSED IN FETAL LIVER, SIGNAL = 2.8; EXPRESSED IN HBL100, SIGNAL = 1.2; EXPRESSED IN HELA, SIGNAL = 1.7; EXPRESSED IN HEART, SIGNAL = 0.92; EXPRESSED IN BRAIN, SIGNAL = 1.2; EXPRESSED IN BONE MARROW, SIGNAL = 1.4
gtctggcaaactcttcagggatttatgggggaaccaagctccgttagactcccaaagggcaggacagactcctccctcagacggggcccccttcctgcaacctgtctcttcctcacactggggtctgtcagggcagagctgttcctggctccgaccagggtctcaggggcaggactatgtctccctccccagcctgagctcctcagcgcaaactcttttccactctgtctccgtttccccttaaagcccttctctccccctcaggggccatgcatctccccctagaccgtcccgacaccccagcccctgcgccccgctcagactggttcccctacacacggaactcac

SEQ ID NO: 1804 - DNA, 998 bp, Homo sapiens
  MAP TO AL035685.13; EXPRESSED IN BRAIN, SIGNAL = 4.3; EXPRESSED IN BT474, SIGNAL = 3.4; EXPRESSED IN FETAL LIVER, SIGNAL =   5; EXPRESSED IN HBL100, SIGNAL = 3.3; EXPRESSED IN HELA, SIGNAL = 3.2; EXPRESSED IN HEART, SIGNAL = 3.2; EXPRESSED IN LUNG, SIGNAL = 2.8; EXPRESSED IN BONE MARROW, SIGNAL = 3.3; EXPRESSED IN ADULT LIVER, SIGNAL = 4.8; EXPRESSED IN PLACENTA, SIGNAL = 3.6
tgtccatttccatttgttaggagacaagtggttatcttgtactttgtctttcttacccatattctccccatttttctcaaccacaatgtccatcatctcaatgctccgggcaaaagcatccttcatgttcatggatacgatgctgccattcctcttggctctctccagagcctctcgccgtttgattgctttctcctgtctcttctgctccttatagaactcagagaagttattgacgatgatggggatgggaagagcaatcaccaggactcctgcaatgcagcagagtcccccaacaattttccccaggagagtcttggggtagatgtctccatacccaacagtagtcatggtgatggtggcccaccagaaagaggctgggatgcttttgaacttggtgtcgtcctcatccttctcagcaaagaagacaaggctggagaagatcataatgcccatggcaaggaagaggatgagcaagcccaactcattgtagctcctccgcaaagtgaagcccagagactggaggccagtggagtggcgtgcaagcttaaggatgcggagaattcgcatgatgcggaagatctggaccacgcggcggacattctggaattgcagcacgctcttgttggattcggtgaggaaaatggtgacatagtatggcagaatggccaacaagtcaatggcattgagtgggcccttgaagaacttccacttcttgggcgaggagaggaacctcagcaggtactccatggtgaaccatgcgatgcacacggcctccacgtgggccagctgggggttgtctgtggactggccgaactcatcgaggctctgtagctcaggcagcgtgttgagggacagggcaatggtggagaggacgatgaacatgatggaaattatggcaaggatctgtgaggagaagagagtgggatttagttatcaaccaccccacaggatgatcatcataatatcctggatctacagggcactcctcaatgttc

SEQ ID NO: 1805 - DNA, 962 bp, Homo sapiens
  MAP TO AL049843.18; EXPRESSED IN PLACENTA, SIGNAL = 7.4; EXPRESSED IN HBL100, SIGNAL = 8.1; EXPRESSED IN HELA, SIGNAL = 7.4; EXPRESSED IN HEART, SIGNAL = 4.5; EXPRESSED IN BONE MARROW, SIGNAL = 6.9; EXPRESSED IN LUNG, SIGNAL = 4.1; EXPRESSED IN BRAIN, SIGNAL = 5.5; EXPRESSED IN ADULT LIVER, SIGNAL = 5.1; EXPRESSED IN BT474, SIGNAL = 6.4; EXPRESSED IN FETAL LIVER, SIGNAL = 8.6
tgggatgaacctggctaaagagattagcaaaatgtcttgtggatcccacttttaatctgcagcgttcaggctgccccttcttggctgggaagggcgctgaagaaacaacgcccaggaccaggactatcccctgctcaagctgtgattccgagacccctgccaccactactgcattcacggggatcccaggctagtgggactcgacatgggtagcccccagggcagctccctacagcttgggccatctgcacttttcccaaggccctaagtctccgcctctgggctcgttaaggtttggggtgggagctgtgctgtgggaagcaacccggactacacttggcaagcatggcgctactgaaagtcaagtttgaccagaagaagcgggtcaagttggcccaagggctctggctcatgaactggttctccgtgttggctggcatcatcatcttcagcctaggactgttcctgaagattgaactccgaaagaggagcgatgtgatgaataattctgagagccattttgtgcccaactcattgatagggatgggggtgctatcctgtgtcttcaactcgctggctgggaagatctgctacgacgccctggacccagccaagtatgccagatggaagccctggctgaagccgtacctggctatctgtgttctcttcaacatcatcctcttccttgtggctctctgctgctttctgcttcggggctcgctggagaacaccctgggccaagggctcaagaacggcatgaagtactaccgggacacagacacccctggcaggtgtttcatgaagaagaccatcgacatgctgcagatcgagttcaaatgctgcggcaacaacggttttcgggactggtttgagattcagtggatcagcaatcgctacctggacttttcctccaaagaagtcaaagagtgagtggcttccagtcctggggtcagagctatgaa

SEQ ID NO: 1806 - DNA, 482 bp, Homo sapiens
  MAP TO NM_006894.1; EXPRESSED IN LUNG, SIGNAL = 2.9; EXPRESSED IN HEART, SIGNAL = 0.89
taattgtccctgtccccaacctcaccattgccaatattacccctacccctcacagtgagcgtcacaggcaggcaacaaactggtgtcgtcacagaatgattgatggaacacatagactgcattcattacctaaacattgtcgtcacactgcagcaaccaaagacaatcgcattacccaggggttagatgtaggaagagtaaaaaacaaaaaatttttgaatgcgtaattatcactaattattttatttgatccttcaggagaatgtggaagatggccgagcaagtatctatcaatctgtcgttaccaacaccagcaaagaaatgtcctgtttcagtgactttccaatgcctgaagattttccaaacttcctgcataattctaaacttctggaatatttcaggatttttgctaaaaaatttgatctgctaaaatatattcagttccaggtattgtatttttggggaaatgggtttctctgcat

SEQ ID NO: 1807 - DNA, 460 bp, Homo sapiens
  MAP TO Z83844.5; EXPRESSED IN BRAIN, SIGNAL = 1.1; EXPRESSED IN BONE MARROW, SIGNAL = 1.8; EXPRESSED IN LUNG, SIGNAL = 1.3; EXPRESSED IN BT474, SIGNAL = 1.8; EXPRESSED IN ADULT LIVER, SIGNAL = 1.3; EXPRESSED IN FETAL LIVER, SIGNAL = 1.6; EXPRESSED IN HELA, SIGNAL = 1.4; EXPRESSED IN PLACENTA, SIGNAL =   3; EXPRESSED IN HBL100, SIGNAL =   2; EXPRESSED IN HEART, SIGNAL = 1.1
taagtgcacgtgagccagaccgtgtttaccgcacttgaagaacaggtggcgtgaactcacaggaagggcccgagcacccagccaggctgacctggttctcatcccagccactcactgccctgcggtcttggtcaaaatcttctcccccgaaacaggatgaggatgacaatgacgcctgtgtccctgggtggtaccagggaggtgggaggggtaagcccagaacccacggccatcttggggagccacctggagggatgaagcgaggtatctgcggggaggtctggctgctggtgctgcccatgtgcccggttggcagggctggagggagagacttcatgccctcatacctgcctcctgccccccaggacaagcgcttcacctcgggaaagtaccaggacgtctatgtggagctgagccacatcaagacacggtctgagcgggagatcgagcagctgaagga

SEQ ID NO: 1808 - DNA, 448 bp, Homo sapiens
  MAP TO Z98745.1; EXPRESSED IN BONE MARROW, SIGNAL =  27; EXPRESSED IN LUNG, SIGNAL =  10; EXPRESSED IN ADULT LIVER, SIGNAL =  17; EXPRESSED IN BT474, SIGNAL = 7.2; EXPRESSED IN FETAL LIVER, SIGNAL =  27; EXPRESSED IN PLACENTA, SIGNAL =  30; EXPRESSED IN HBL100, SIGNAL =  15; EXPRESSED IN HELA, SIGNAL =  21; EXPRESSED IN HEART, SIGNAL =  24; EXPRESSED IN BRAIN, SIGNAL =  33
aactttcaggaaggggaagggatagatgtcacaacttctcgggattgcttttttagggacacaggatagtctgattcatctaccctaaaatatgattttcctttggaatagatatttcaggatcagagagttggagagataggtgttcttttccttaatcttcaaacacacacacacacacacacacacacaccatacatacacctatgcatataccaacaaatacaattctacatatccatacacacacacacacacacacacacagctacacacacatgctaagcaggtgcttgggtagtacaggatggtttggtcatcaggaggctgggtaggcacgagtgtggagcaaagaaggaggaagatggatgctttgttagacattcctgcaggtgggagacagggtagttatttctgtcagtcgctagcccttcctagtgggtattga

SEQ ID NO: 1809 - DNA, 1966 bp, Homo sapiens
  MAP TO AC011307.1; EXPRESSED IN HEART, SIGNAL = 1.5; EXPRESSED IN BRAIN, SIGNAL = 1.5; EXPRESSED IN BONE MARROW, SIGNAL = 1.5; EXPRESSED IN LUNG, SIGNAL = 1.7; EXPRESSED IN BT474, SIGNAL = 4.2; EXPRESSED IN ADULT LIVER, SIGNAL = 2.5; EXPRESSED IN FETAL LIVER, SIGNAL = 1.3; EXPRESSED IN HELA, SIGNAL = 1.2; EXPRESSED IN PLACENTA, SIGNAL = 2.3; EXPRESSED IN HBL100, SIGNAL = 1.5
tgaccaagaaaggttctggctcgccatccaaaagaggcagatggccaggtccaaaggctctttccagatgagagaagacatcgtggaggatgaaggggtctcaggcacgggagatgaagagaacacttcaaggagacttctacatccaaagcaccaagaggcgttcctcaaaacaaaggatgatgccatcaatggagataagaaagccaagaaagggagaagaaagctgaaactctggaagcattcagaaaaagaaccagagaccagtgttgcagaagatctcagagtgtttgaatcaagacgaaggataaacgtggcaaacaaacagattaatccggagcactgggctgatattttagccaaagtctttgggaaaaatctccctacaggcacagaagtatccccaattattaaaaccacaagttctccattcttgagcctagtagtcacaccacctttgcctgctgtttctccccccttggcatctccaatacagacagcaacaagtgctgaagaatcctcagcagatgtacctctactcagcgaaggaaagcacattttgagtaccatttcctcagccagcatgggactagaacaccacaacaatggagttattcttgttgaacctgaagtaacaagcacacctctggaagaagttgttgatgagtattccaagaagactgaggagatgacttccactgaaggcgacctgaaggggactgcagcctctacacttatatctgagccttatgaacaatctcctactctacacaccttagacacagtctatgaagagcccacccatgaagagacggaaacagagggttggtctgcagcagatgttggatcctcaccagatcccacatccagtgagtatgagcttccattggttgttgtctccttggctgagtctaagcctgtgcaatactttgacccagatttggagactaattcacaaccacatgaggataacataaaagaatacagttttgcacaccttactccaaccgccatcatctggtttaatgactctagtacatcactgtcatttgaggattctactgtaggggaacaaggtgtcccaggcaaatcacatctacaaggaccgacagagaacatccagcttgtgaaaagtagttttagcactcaagacaccttattgattaaaaaaggtatgaaagagatgtctcagacactacagggaggaaatatgctagagggagaccctacacactccagaagttctgagaatgagggccaagagagcaaatccatcactttacctgactccacactgggtataacgagcagtacgtctccagttaagaagcctgcggaaaccacagttgtcaccctgctacacaaagacaccacaacagaaacaactccaaggcaaaaagtggcttcatcatccaccatgagcactcacccttctcgaaggagacccaatgggagaaaattacaccctcacaaattccaccaccggcacaagcaaaccccacccacaacttttgctccattagagactttttctactcaaccaactcaagcaactgacattaagatttcaaatcaaatggagagttctctggttcctacatcttgggagattaacacagttaatacccccaaacagctggaaatggagaagaatgtagagctcatatcaaagggaactccacggagaaaacacgggaagaggccaaacaaacatcgatataccccttctacagtgagttcaagagcatctgcatccaagcccagcccttctccagaaaataaacatagaaacattgttactcccagttcagaaactacacttttgcctagaaatgtttctctgaaaactgagggcgtttatgattccttagattacacgacaaccaccagaaaaatacattcatctcaccataaagtccaagacacacttccagtcatgtataaacccacatcagatggaaaagaa

SEQ ID NO: 1810 - DNA, 480 bp, Homo sapiens
  MAP TO AC007026.3; EXPRESSED IN BONE MARROW, SIGNAL = 1.4; EXPRESSED IN BRAIN, SIGNAL = 1.2; EXPRESSED IN ADULT LIVER, SIGNAL = 0.91; EXPRESSED IN BT474, SIGNAL = 2.6; EXPRESSED IN FETAL LIVER, SIGNAL = 1.1; EXPRESSED IN PLACENTA, SIGNAL = 0.97; EXPRESSED IN HELA, SIGNAL = 1.1; EXPRESSED IN HBL100, SIGNAL =   2; EXPRESSED IN HEART, SIGNAL = 1.2; EXPRESSED IN LUNG, SIGNAL = 0.9
cagactatgagagacaagaaatacaagtatatagaacatatgagaatataatggaaacataattgaactgcataaagttttaaaattgaagagctatcaagcgtagtgacttagagcacaggctttggtatcaagtagctctggattcatgttctggttcttcctttctgcatccttgtgcaagttacttaatctctgtattccttaacatcttcatcagtaaaataatcaatgacagccattgcatacacttggtggaaagattgagtgaaataagatatttaaaaggcacttacactcggagccaagatagccaactagacacagccatttggaacatgtgatgctgagggactggaacatcaggtagactggcagattccaagcagatcttcagagggaaggcactgggagtggacagagggaggatacagacactgggctgaaggggaagggagctgggaaacctgcacaggacta

SEQ ID NO: 1811 - DNA, 465 bp, Homo sapiens
  MAP TO AC007218.2; EXPRESSED IN HELA, SIGNAL = 4.1; EXPRESSED IN HEART, SIGNAL =   4; EXPRESSED IN LUNG, SIGNAL = 2.6; EXPRESSED IN BRAIN, SIGNAL = 4.1; EXPRESSED IN BT474, SIGNAL = 3.1; EXPRESSED IN ADULT LIVER, SIGNAL = 3.3; EXPRESSED IN PLACENTA, SIGNAL = 6.7; EXPRESSED IN HBL100, SIGNAL = 3.3; EXPRESSED IN BONE MARROW, SIGNAL = 3.6; EXPRESSED IN FETAL LIVER, SIGNAL = 4.7
ctgactacaccactgcctgcttgaaccctccatggctcctcattgcccgtttaataaagaccaaggtccttcccatgcctccagggcctgcctgtctgtctctctagcttcctgtcctgcatccaccctactgcccaccctccagctgctcacatctgctttcagtttcctgacactgccaaactctctcttacagtggacctaggctcattttttccactggtctagggctgccatacaaaacactgcagactgggaggcttaaacaatagaagttagctcctcacagttctggagggtagaagtccaaggttgtgttgttagtaggtttggtttcttctgagtcctgtgtacttggcttgcagatggcggccttctcaatgtggccccacatggtctttatgtgtgtgcacgtgcctgtgttcaaatatcctgcttcagttatactggtttagggtccaccct

SEQ ID NO: 1812 - DNA, 473 bp, Homo sapiens
  MAP TO AC007308.13; EXPRESSED IN HEART, SIGNAL = 3.3; EXPRESSED IN LUNG, SIGNAL = 3.7; EXPRESSED IN BRAIN, SIGNAL = 3.2; EXPRESSED IN FETAL LIVER, SIGNAL = 4.4; EXPRESSED IN ADULT LIVER, SIGNAL = 2.1; EXPRESSED IN PLACENTA, SIGNAL = 3.2; EXPRESSED IN HELA, SIGNAL =  17; EXPRESSED IN HBL100, SIGNAL = 3.1; EXPRESSED IN BONE MARROW, SIGNAL = 3.4; EXPRESSED IN BT474, SIGNAL = 2.3
tgtggcacataataacaaacaaacaaaaatacactttttttacaacataatatatgcacacaattctaaaaaactcaaattttctaagaaggtttacattaggaagtttcattcccaccttgtcctaccctctccactaaccactttgattaggttcaaatgtattcttctactattgctttaggtaaatataagcagatacaaacttaaacgctcactacacccccttttacaatgaagaaacttttaatttcatgaagacttacctgaagatcagattcaatcagaaaaatgcccaatgcaatcactgcatctctccgtctttcatctaactggaagatcccatggaaatccactggacacatgcaaagaagcttttggacctagaaaatgagacccccccaaaaacagctctacaaaatagaaaaccacattcaaaataaagcaagctgagtgcagtgtcatatgcctgc

SEQ ID NO: 1813 - DNA, 461 bp, Homo sapiens
  MAP TO AC007375.4; EXPRESSED IN FETAL LIVER, SIGNAL = 2.8; EXPRESSED IN HELA, SIGNAL = 2.3; EXPRESSED IN LUNG, SIGNAL = 4.2; EXPRESSED IN BRAIN, SIGNAL = 2.4; EXPRESSED IN BT474, SIGNAL = 1.5; EXPRESSED IN ADULT LIVER, SIGNAL = 2.1; EXPRESSED IN PLACENTA, SIGNAL = 2.4; EXPRESSED IN HEART, SIGNAL = 2.2; EXPRESSED IN HBL100, SIGNAL = 1.7; EXPRESSED IN BONE MARROW, SIGNAL =   2
caagtaccaaagagacggcgggaagtaagcatgcacagttcaatatgagaaggtttaccacgtaggcatgtggaaggtgccaccaagcctctcatcagaggggcaccccacccagcaccatggagaggtgggacatggttgtcactaaagaacacctatgctgatgcctagagaagctggggttagccagagaaaacagaagggtgcagggctaggaagaatgtttcaagcagggcgaacaggatgagcaaaggataggaggcaagagagtgaactgtcatggcgaacagcattgctgccgtacaagtgcacaaaaggctcactgacctgctgctgacgggcaccaatgccctcggggtagaggtgcctgtgggagtgcagatagccgatggccatccggaggttcttcacagtgatcacagagccgtaggccaggtctgggaggaagggagacagcagag

SEQ ID NO: 1814 - DNA, 448 bp, Homo sapiens
  MAP TO AC007078.2; EXPRESSED IN BT474, SIGNAL = 3.3; EXPRESSED IN HBL100, SIGNAL = 4.2; EXPRESSED IN LUNG, SIGNAL = 2.8; EXPRESSED IN BRAIN, SIGNAL = 3.7; EXPRESSED IN FETAL LIVER, SIGNAL = 3.9; EXPRESSED IN ADULT LIVER, SIGNAL = 3.4; EXPRESSED IN PLACENTA, SIGNAL = 4.4; EXPRESSED IN HEART, SIGNAL = 4.5; EXPRESSED IN HELA, SIGNAL = 4.2; EXPRESSED IN BONE MARROW, SIGNAL = 4.7
tacctgtcctgcctctttcctgaccagtggcagagcctgtgttctcttttgtagagatggggtcttgctatgtttcccaggccagtctcaaactcctggcctcaagcaatccttggcctcccaaagtgctggggttacaggcatgagtcactgcacctggccttgaccctgtggtctttctgtccccttgtgggctgccctccctgagcactcatgtatggcttgggagtacccgggcaggtgatggccggcagcattaacttctcacctttcctccaggtaactgacgatgccctggtgtacagcaccttcctgctccatgacccccgccccgtgggaaacctgtccatcgtgaggactaaccgcgcagagattcccatcgagtgccgctaccccaggtcggtgtgggactgactcatggcccctggtgcaaaagccccttgggtgt

SEQ ID NO: 1815 - DNA, 446 bp, Homo sapiens
  MAP TO AC007242.3; EXPRESSED IN BONE MARROW, SIGNAL = 4.4; EXPRESSED IN FETAL LIVER, SIGNAL = 5.3; EXPRESSED IN HBL100, SIGNAL = 3.3; EXPRESSED IN HELA, SIGNAL = 4.8; EXPRESSED IN HEART, SIGNAL = 4.8; EXPRESSED IN BRAIN, SIGNAL = 4.4; EXPRESSED IN LUNG, SIGNAL = 3.1; EXPRESSED IN BT474, SIGNAL = 3.4; EXPRESSED IN ADULT LIVER, SIGNAL = 4.2; EXPRESSED IN PLACENTA, SIGNAL =   5
tatcaaaactggcagtggggcagcaagggtgcccagcttttggccatctgactaaactgggacttggtggaatcctagaaagctaccaatccctccctgtttcgtgcctcacacttcctttgtggtagtttgatatcctcacaaagcatcatgttcttgggcctccagttttcaaaggccaggcccagtcaacgcttaaacaagtgcacacaaaagcatcattgttcacagcccagaatgagacccgaggggcgacttaccaaaatcagccagtttgagctctcccaggtgactgatgagtaagttctgaggtttcaggtccctgtgaagaacgtgttggtggtggatgtacgccaggccccgcaaaagttgaaacatgaaaagctggaaggaagaaacactatccataaggagatttgagccaccacgtgctgatttcgcctcta

SEQ ID NO: 1816 - DNA, 398 bp, Homo sapiens
  MAP TO AC007279.3; EXPRESSED IN BONE MARROW, SIGNAL = 1.5; EXPRESSED IN LUNG, SIGNAL = 0.9; EXPRESSED IN FETAL LIVER, SIGNAL = 1.4; EXPRESSED IN ADULT LIVER, SIGNAL =   1; EXPRESSED IN PLACENTA, SIGNAL = 1.6; EXPRESSED IN HEART, SIGNAL = 1.9; EXPRESSED IN HELA, SIGNAL = 1.5; EXPRESSED IN HBL100, SIGNAL = 1.5; EXPRESSED IN BRAIN, SIGNAL = 1.2; EXPRESSED IN BT474, SIGNAL =   4
cacattatttcaataacagagggcaaaaaaattactattttctagtttgctggttttgtagaattttgaaaaaatatttttgaaactttattgaaaatcatctgtgcaaaattttcggaccttactgtttttatacatagtttcacaactgaatgtgacagcataacaaactgtattttttccatttgtccaattaagtctgtactatccatatttttctatttctcctaaaggatgaagacctacaagagatggaaaatttagcccaaagaatggaaactcagtttggccaattttttgatcatgtgattgtgaatgacagcttgcacgatgcatgtgcccagttgttgtctgccatacagaaggctcaggaggagcctcagtgggtaccagcaaca

SEQ ID NO: 1817 - DNA, 408 bp, Homo sapiens
  MAP TO AC007375.4; EXPRESSED IN BT474, SIGNAL = 1.7; EXPRESSED IN FETAL LIVER, SIGNAL = 2.4; EXPRESSED IN ADULT LIVER, SIGNAL = 1.2; EXPRESSED IN HBL100, SIGNAL = 1.7; EXPRESSED IN HELA, SIGNAL = 1.8; EXPRESSED IN PLACENTA, SIGNAL =   2; EXPRESSED IN HEART, SIGNAL = 1.7; EXPRESSED IN BRAIN, SIGNAL = 2.1; EXPRESSED IN BONE MARROW, SIGNAL = 2.4; EXPRESSED IN LUNG, SIGNAL = 1.3
acgtgggtgtgcgtatctgtcagaactgcatgtgaatgaatggctggcccaatgacttggcctctcatccctcacgttctcagtttgtggatgacaacagtcagagcgctggcttcacggggtgaggatgaatgaagtcctaccgtagtgcctggtacacgggaacccccatcagtgttagctggggaggggaaaagcagctggaatggggagggggagaataaggggcctgtgcagccaggggaggctggtcagccccctcctcaaggccaccaaggagagatcacaggggcctcagcccaagaagtccccggctcttgcagttgggaccagccagtgtggctgccaccaggaggggaagcaggggacagggagcgggcggcagctgcatcacagccagagtgagga

SEQ ID NO: 1818 - DNA, 452 bp, Homo sapiens
  MAP TO AC007688.15; EXPRESSED IN PLACENTA, SIGNAL = 1.3; EXPRESSED IN BT474, SIGNAL = 1.5; EXPRESSED IN FETAL LIVER, SIGNAL = 1.8; EXPRESSED IN HBL100, SIGNAL = 1.1; EXPRESSED IN HELA, SIGNAL = 1.2; EXPRESSED IN HEART, SIGNAL = 0.99; EXPRESSED IN LUNG, SIGNAL = 1.2; EXPRESSED IN BONE MARROW, SIGNAL = 1.3; EXPRESSED IN ADULT LIVER, SIGNAL = 1.1
tgagagctcttttgctctctgaatgttccatttttgtagcattctggttttcaggatgcaatatcttctcttatctccccaagaatataatgtataagattttcctgctttggatattgtctctacaagaatcccagaatctatttctcatggcccttcatactcaggcctgtcccttctgctctatggccatacccaccaaggaaagttttttagccctctgttactacttctagagacatcacaagttgctactttgtacctcttaaacactgtaccttctctctctctaggaagaagttgcctatgaagaaagggcctgtgaaggcggcaaatttgccacagtagaagtgacagataagcctgtggatgaggctctacgggaagcaatgcccaaggtcgcaaagtatgcggggggcaccaatgacaagggtgagtacccctgcaggatg

SEQ ID NO: 1819 - DNA, 460 bp, Homo sapiens
  MAP TO AC007718.1; EXPRESSED IN BT474, SIGNAL = 1.4; EXPRESSED IN FETAL LIVER, SIGNAL = 1.7; EXPRESSED IN PLACENTA, SIGNAL = 1.1; EXPRESSED IN HBL100, SIGNAL = 2.4; EXPRESSED IN HELA, SIGNAL = 1.3; EXPRESSED IN HEART, SIGNAL = 1.6; EXPRESSED IN BONE MARROW, SIGNAL = 1.2; EXPRESSED IN BRAIN, SIGNAL = 1.2; EXPRESSED IN ADULT LIVER, SIGNAL = 3.1
  unsure 60
  unsure 184
  unsure 216
  unsure 250
gcagcaccatcggaagttagctactgcctttttaaaagacaaggttctgacaccaggagnatttctatttctccatccatcattttcatgatttagagtcaatgaagtcctgactgggctggttctgctctcccagtgggtgggtgagacccccctagacccctgtccacagtgcaccagatgnttctcccagctgtcttcacttccccagggagngccagacaggcatcccagaacagagccgccaggntgccaaagagcaccaggaactgcggaaggatgtagttgacgctgatgaactgtgctggcgtccgcaccctctagttcatcctcagtacccaccagaagcacccccaacaaatttgcggcaaaagctgaagtgtctttcccctccagaaatttcatgatgaggaagaacaacaagaggaagtctggtgcaaagatgaggtgacccaggagg

SEQ ID NO: 1820 - DNA, 453 bp, Homo sapiens
  MAP TO AC009496.1; EXPRESSED IN FETAL LIVER, SIGNAL = 1.4; EXPRESSED IN HEART, SIGNAL = 0.86; EXPRESSED IN BRAIN, SIGNAL = 0.99
cagagcaagatgacgcagaggttcaaggtgatgtgagagcaagctgaagagcaaggagtcttcaggagtctttgagaagaagttctagctgggtcacataaaggccgcatttttcactgccccacctcaatccctcacctcccctcccccaccccgccattgaactcctctcctgttagtaaccacaggtctcaaagcagcttctgaaagccttattctaatttttggctgcaggctcctgtgctgaatgtaaggcagggcagaagaagtcggctgtgcacagagccatccctatctgcatatcccaggcactcccaagggagaagcacaaagtgttttggaaatgtaaacatgttaagggaacagtcgtctatcaaggccacaagaagcattgtggatccacgaaggcacaattagcagctgcagagattactgccctggaaatgtaagaga

SEQ ID NO: 1821 - DNA, 413 bp, Homo sapiens
  MAP TO AC009248.6; EXPRESSED IN PLACENTA, SIGNAL = 1.2; EXPRESSED IN HBL100, SIGNAL = 1.4; EXPRESSED IN HEART, SIGNAL = 0.86; EXPRESSED IN LUNG, SIGNAL = 0.9; EXPRESSED IN BT474, SIGNAL = 0.98; EXPRESSED IN FETAL LIVER, SIGNAL = 1.2
ccaggcatgcttaaggtaaatctcttctgtacaatagaaagtccaattccttgaaagaaagtctgctttcagctgtgaaaccaaatgaggttaagagcctgaggaagtttctgattcatatttaaaaaacgttttgttaatatgctttgagaaaacatgagcagagaaaatatgaaactgttttgtgtatgatatttcaacatcagtttcactttattacttatacaaaatagcagttttttcatgttacaatataagaaataaaaagaaaggaaaatagcataaaaacttaccctttgtttttcatttgtaccctttttattggtctcttttctgctttcatcctcatatactagaacaaagtcaattcttcgctggccatcattaaaaaagagggagtcaggttttccatt

SEQ ID NO: 1822 - DNA, 343 bp, Homo sapiens
  MAP TO AC009503.2; EXPRESSED IN FETAL LIVER, SIGNAL = 1.1; EXPRESSED IN PLACENTA, SIGNAL = 0.97; EXPRESSED IN HEART, SIGNAL = 0.94; EXPRESSED IN BRAIN, SIGNAL = 0.91
gcaaacacaaaaacgagtgctctatggcaatgctctccaatagaaaacaatgcaaaccacaaatgtgagccacctgtgtaattgtacattttccagtagccaaattggaaaaaaaagtaatagagaaactagttttaataagatgtttaactcaatatatccaaaacattatccttccaacatataatcaatattttttaaattactgaaatattttatattccctttttgtagtttttgaaattgagtgtgtattccatacttatagcaaatctcaattcaaactagccacatttcaaatgcttaatggctattggcaactacattggatggcacagctcta

SEQ ID NO: 1823 - DNA, 472 bp, Homo sapiens
  MAP TO AC009302.1; EXPRESSED IN BONE MARROW, SIGNAL = 1.5; EXPRESSED IN BRAIN, SIGNAL = 1.6; EXPRESSED IN ADULT LIVER, SIGNAL = 1.2; EXPRESSED IN BT474, SIGNAL = 1.2; EXPRESSED IN FETAL LIVER, SIGNAL = 2.2; EXPRESSED IN PLACENTA, SIGNAL = 1.9; EXPRESSED IN HELA, SIGNAL = 1.8; EXPRESSED IN HBL100, SIGNAL = 1.3; EXPRESSED IN HEART, SIGNAL = 1.9; EXPRESSED IN LUNG, SIGNAL =   1
ttagcctttagtggagggggcataaaggcaaatcaacaattgtgagatggttggatgagtgcaatcacagagaaaaatataggcttcctgatgatccaggagctgatttagataaaggaggagacagtgtgtaatatctagtgattaaataaaccaactataatcagcatttgttgtttctgtgtcattttttcctcctggtatcaaaagaattgttttcctttttggaattgactgtccctggtttaatgaaatcttgtcaacatctgttgtcaatcacatggtcccactgctctgtgactgggtgagcatgtgacccaggctgcccaatttgagttcttttcttgggattgacaataacactgggaaagaaagtctttctctttctgagatctccagcaataaggatgatgtatgcctggagcttctgctgaccatctttgccatcatgtgcatagagccaggctgagaa

SEQ ID NO: 1824 - DNA, 472 bp, Homo sapiens
  MAP TO AC008072.2; EXPRESSED IN HELA, SIGNAL = 8.5; EXPRESSED IN HEART, SIGNAL =   3; EXPRESSED IN LUNG, SIGNAL = 1.9; EXPRESSED IN BRAIN, SIGNAL = 2.2; EXPRESSED IN BT474, SIGNAL = 8.7; EXPRESSED IN ADULT LIVER, SIGNAL = 2.1; EXPRESSED IN PLACENTA, SIGNAL = 4.9; EXPRESSED IN HBL100, SIGNAL = 9.4; EXPRESSED IN BONE MARROW, SIGNAL =   6; EXPRESSED IN FETAL LIVER, SIGNAL = 3.7
aagtgcagattgcagtgggagattgagaagcaagaaaatgaggactattgttgccttgatagtttattcttgctccctacattgttggctttgtcagttgaaagatgtatacttagttttctttttgttattgttgttagttcatgttttttattaactcatacacaatcacttgtcttctggtttgttgaagcgataagtcagacaccctgtgccacaataatgtgtcaaagtggctggccataaaaactctaggaccacattcatctgaaggacactcctgacggaggctactaattttgccattgtcatccatcctatagtatttcaggacagtcagcttcaccttcttattgtttttgggaggggtgtaagacttcttccttttcttagagccactacaaagtctcagcatgagacaaagagtagactccttgtgaatgttgtagttagacaaaggatgcccattttt

SEQ ID NO: 1825 - DNA, 351 bp, Homo sapiens
  MAP TO AC009484.1; EXPRESSED IN LUNG, SIGNAL = 2.5; EXPRESSED IN BONE MARROW, SIGNAL = 3.6; EXPRESSED IN BRAIN, SIGNAL = 3.1; EXPRESSED IN ADULT LIVER, SIGNAL = 3.4; EXPRESSED IN BT474, SIGNAL = 1.7; EXPRESSED IN FETAL LIVER, SIGNAL = 2.4; EXPRESSED IN PLACENTA, SIGNAL = 3.1; EXPRESSED IN HELA, SIGNAL = 3.5; EXPRESSED IN HBL100, SIGNAL = 2.3; EXPRESSED IN HEART, SIGNAL = 3.4
ataggtttttggggaatgggtggcatttggttacatgaataagttttttagtggtgacttctgagattttcgtgcatccatcacctgagtagtgtactctgtacccaatggtagtcttttatccttcacccctctctcccctttcccccaagtccccaaagtccattgtgtcattcttacgcctttgcatcctcatagcttagctcgcacgtatgagtgagaacatatgatgtttggttttctattcctgagttacttcacttaggataatggtctccaattccacccagattgccgtgaatgccatgattttgttcctttttatggctgagtagtattccatggtgtgtg

SEQ ID NO: 1826 - DNA, 464 bp, Homo sapiens
  MAP TO AC009297.2; EXPRESSED IN FETAL LIVER, SIGNAL = 2.4; EXPRESSED IN ADULT LIVER, SIGNAL =   2; EXPRESSED IN HELA, SIGNAL =   5; EXPRESSED IN BRAIN, SIGNAL = 1.9; EXPRESSED IN LUNG, SIGNAL = 1.9; EXPRESSED IN BONE MARROW, SIGNAL = 1.9; EXPRESSED IN BT474, SIGNAL =  22; EXPRESSED IN PLACENTA, SIGNAL = 2.8; EXPRESSED IN HEART, SIGNAL = 2.2; EXPRESSED IN HBL100, SIGNAL = 9.8
aacaagcagaagaaggattgatgaactagaaaacaggtcatttggaaatcatccaatctggggtgggggcaaaaggaagcattgttaagaatcactgggctgtggcctagttggccctcagaggtgaaggcagggtgggccctcactggggcagctggaggagcatggactgccccacaggcaggtaggtgacgttcccagagtatgagagctggaatgcaatgtctcgctgcttccaacttacacagctcaatcagactgtccccgccatggccagtgagttggggatcagctctgctgtcttggagttgccgtcggcaaagatgatggctgccttcttctgatgctcagccttttccaccacaaatctggccctctctgcttcctgctgagccaattgtttggcttccaccgcttctgtgaactccttctcaaaggtcagatgtgtcaaggacatgccatcc

SEQ ID NO: 1827 - DNA, 464 bp, Homo sapiens
  MAP TO AC009303.1; EXPRESSED IN PLACENTA, SIGNAL = 1.4; EXPRESSED IN HELA, SIGNAL = 1.3; EXPRESSED IN HEART, SIGNAL = 1.2; EXPRESSED IN LUNG, SIGNAL = 0.91; EXPRESSED IN BRAIN, SIGNAL =   1; EXPRESSED IN BONE MARROW, SIGNAL = 1.2; EXPRESSED IN FETAL LIVER, SIGNAL = 0.99; EXPRESSED IN ADULT LIVER, SIGNAL = 1.1
cattgttgatgggagcacagtgtaaacaaaagctacatgttctaggaaggctccatgtagtgattagctggagtaaaaatggaaaaagtgggcctctccgtgaaagccacccaagaaggaagggcattccacttctgttagacaactgcccagaaattatgtgtgtaagtcaggtcctcagctgtattttcctaaaaccatggtgccctggttaggtccttttgcctttccacctggctgtttttctagcctatctctttctgcagcattggcatttccggctccagaatatagagatgccagcccacaggagggatgacttaaagttttatgagtatttgggagtgtttctttgtgatgttttctccatattgtcaggagcttggtcaccaatccaagtgatcaaggtaattctgaatgtctgtgtctctgatgacaagagctcccagtttaagccaaaccct

SEQ ID NO: 1828 - DNA, 424 bp, Homo sapiens
  MAP TO AC010133.1; EXPRESSED IN PLACENTA, SIGNAL = 2.9; EXPRESSED IN FETAL LIVER, SIGNAL = 3.3; EXPRESSED IN ADULT LIVER, SIGNAL = 2.8; EXPRESSED IN HBL100, SIGNAL = 2.2; EXPRESSED IN HELA, SIGNAL = 3.2; EXPRESSED IN HEART, SIGNAL = 3.1; EXPRESSED IN BRAIN, SIGNAL = 3.4; EXPRESSED IN LUNG, SIGNAL = 1.9; EXPRESSED IN BONE MARROW, SIGNAL = 4.2; EXPRESSED IN BT474, SIGNAL = 1.4
catgctctctgtatggcctgtagaacactaagctaaaaaatcctccctttaaaaaaattacccggtgttagttatttctttatagtaatacaagaacagcctaatacaaaaaatttgtacaaaggagtacgaatttgctataaaggtacctgataatgtcaaagtagctttagaactggataataggttggagttggaagaggtaagagagttcagaaaggcagaaagataagtcaaggtttggaacttcttagagactaagtggttgtgaccaaaatgctgacagtgatgacagtgaagtccaggtttataaggtatctggtgaaaatgaggaacttattagagattggaagaaggttgcacacgttatattctagcaagaaacttggctgcattatttttatgccctagccatctgtgaaaa

SEQ ID NO: 1829 - DNA, 466 bp, Homo sapiens
  MAP TO AC009808.2; EXPRESSED IN LUNG, SIGNAL = 3.7; EXPRESSED IN FETAL LIVER, SIGNAL = 5.5; EXPRESSED IN ADULT LIVER, SIGNAL = 3.6; EXPRESSED IN PLACENTA, SIGNAL = 5.3; EXPRESSED IN HEART, SIGNAL = 5.8; EXPRESSED IN HELA, SIGNAL = 6.3; EXPRESSED IN HBL100, SIGNAL = 3.7; EXPRESSED IN BRAIN, SIGNAL = 4.3; EXPRESSED IN BONE MARROW, SIGNAL = 5.3; EXPRESSED IN BT474, SIGNAL = 2.4
  unsure 93
aattaaccttgcatggtggtgcgcacctgtggtccccctactcagcaggctaaggggaaaggattgcttgagcccatgaggtcaaggcagccntcacagagactgagctcacagggatcatgtgagccatgatcacatcacttttctccagcctgggcagcagagcgagagccgtcttaaaaaaataaatacataaaaataaaacaatttgggtctctgctaattattaacattgctcatatattcatgttttcttcattgtcaaagataggataattactgtgccttgttgagtgagtttccggataaactctgtaagaataaattatgttatgacatcatttggattaagaatgggaagaaagtgatagaatggaactggatactattcagacacaccaaagaggtggaaggtaccttgcagaggagtgacaaaaaaagcaatactggtaagcaaaataagtaa

SEQ ID NO: 1830 - DNA, 432 bp, Homo sapiens
  MAP TO AC009896.2; EXPRESSED IN BT474, SIGNAL = 1.3; EXPRESSED IN HBL100, SIGNAL = 1.7; EXPRESSED IN BONE MARROW, SIGNAL = 2.1; EXPRESSED IN LUNG, SIGNAL = 1.5; EXPRESSED IN ADULT LIVER, SIGNAL = 1.4; EXPRESSED IN FETAL LIVER, SIGNAL = 2.3; EXPRESSED IN PLACENTA, SIGNAL = 1.8; EXPRESSED IN HEART, SIGNAL = 2.3; EXPRESSED IN HELA, SIGNAL = 1.9; EXPRESSED IN BRAIN, SIGNAL = 2.4
  unsure 101
tgggctatttgggaagactgtggagctttctgctttgagaaattagcaagaagaaaatgtggttgggggtgtaacagctataaaaatgaaaaagacagccnttgcccttgaagtgctcatatcttggggtgagggacaagaaaggaggtcacaacagtgggacttggggttgtgagagaggcaagcacaagcttgagatgcacataggaaggcacccctgctgtgccctgcagtgttggggaaagcttcctgggaagagatgacatgtattacaagcagagagaccaagtatgaattaaagttaccttggaaagtcctgtaccaagaagaaaaggtaagcacctaccaccgggcctgtggcaaggagaaaagaacattggaggaagccaaggggggccccaatgtgggcctgggcccaaagcgcaaatgaga

SEQ ID NO: 1831 - DNA, 470 bp, Homo sapiens
  MAP TO AC009946.1; EXPRESSED IN PLACENTA, SIGNAL = 2.3; EXPRESSED IN BRAIN, SIGNAL = 3.3; EXPRESSED IN FETAL LIVER, SIGNAL = 3.3; EXPRESSED IN HBL100, SIGNAL = 5.5; EXPRESSED IN HELA, SIGNAL =   5; EXPRESSED IN HEART, SIGNAL = 1.5; EXPRESSED IN LUNG, SIGNAL = 7.2; EXPRESSED IN BONE MARROW, SIGNAL = 1.6; EXPRESSED IN ADULT LIVER, SIGNAL = 5.8; EXPRESSED IN BT474, SIGNAL =   9
gctgagaacaccctgactccaccaccttggaggacacaatcggagcaggtcatgggagtgctcgatgccagaccctatgactcctctcccaggggggccatcactgagtgggttgaggcctcagcagacatagggacaaggacctcatcttaaagttgggaaaacacccagagggcagtgtgcccaaggtcggtcacacggttcaggggaggagaccatggattccaagggaatgcacctggtgcgccctccctgccctgccccactcacgtggatgtcgttttggaaggtgtgcagggcctgctgcaggcacttcatgggcaccagcatgtcctgcaccacgtggtgctgctcgtacagcttgcgcagggtctcaccctgggtcagcttcaggagggagatcttgggaggcaccatccagccaaagaggtagcggaagatggggttgttgccaaaggggataatgtcct

SEQ ID NO: 1832 - DNA, 486 bp, Homo sapiens
  MAP TO AC009955.1; EXPRESSED IN BT474, SIGNAL = 3.1; EXPRESSED IN BONE MARROW, SIGNAL = 3.5; EXPRESSED IN LUNG, SIGNAL = 1.9; EXPRESSED IN BRAIN, SIGNAL = 3.5; EXPRESSED IN ADULT LIVER, SIGNAL = 2.4; EXPRESSED IN FETAL LIVER, SIGNAL = 3.4; EXPRESSED IN PLACENTA, SIGNAL = 3.2; EXPRESSED IN HEART, SIGNAL = 2.1; EXPRESSED IN HELA, SIGNAL = 2.7; EXPRESSED IN HBL100, SIGNAL = 2.9
acagggttccataggacacgctttagtacatgccgcggaggggacgcctgtagcctcccttgcccgtgtccccatacacagcccatcgccccctcatcgctgaggagcaccgttgaaggatttggggccatctgtgtggggcaggcttgctcagttctgggttcccctcctgcctaggatggttcgtgcagcagcacccggagctggagctcatgagcagcttccgggaacggttcggccgcaactggctgcagtacaggagtcacctggagccctccggaaaccctctgccggccacccccactacttctgcacccagtgcacctccagccagctcccagggccccgacactgcacccagaccttcacccccgcaggaggaagccagaggcccccaggagtcaccacagaaaatgtcagaggaggtcagggcggagccacaggaggaggaagaggagaaggaggggaaggaggagaaggaggagg

SEQ ID NO: 1833 - DNA, 388 bp, Homo sapiens
  MAP TO AC009961.2; EXPRESSED IN FETAL LIVER, SIGNAL = 1.4; EXPRESSED IN HEART, SIGNAL = 0.87
tagaacattttcgccatccccaaaagaaactccatactctttaggcactattctcaatccttccatcccccgtagcctctagcaatcactaacctacttactatcttagatgtgcctattctggacatttcatacaaatggaataatacagtggggttttgcttagtccaaaaatgtatgaaagactcaagtatttcacagaggtatgaagagtattggtttttaaaaaaacttacattttctggtattctcagcctcccactaaccaataatgggtgaaagttactgtacgtcagctctctgttatctgtccatttgtttatcttttcataggcagtccagcgcaaaccaatccataaagtagcttccatatccggaagcaaggatg

SEQ ID NO: 1834 - DNA, 477 bp, Homo sapiens
  MAP TO AC010135.1; EXPRESSED IN ADULT LIVER, SIGNAL =   4; EXPRESSED IN BT474, SIGNAL = 1.7; EXPRESSED IN FETAL LIVER, SIGNAL = 1.4; EXPRESSED IN PLACENTA, SIGNAL = 3.8; EXPRESSED IN HBL100, SIGNAL = 1.8; EXPRESSED IN HELA, SIGNAL = 2.1; EXPRESSED IN HEART, SIGNAL = 1.4; EXPRESSED IN BONE MARROW, SIGNAL = 3.2; EXPRESSED IN LUNG, SIGNAL = 1.7; EXPRESSED IN BRAIN, SIGNAL = 1.8
aaccatcaaaaaggggaaggagaggggagaactgcaggataagcatctgtcagaggcagggaaagatcagcagaaaggaaagagagaagagaaagaacatcagagggaaagagaggaagagacagagaaaaagagggagtcagagagagagagagaaagagagagacagaaagtcaaagagagagagcaagagacagaaaaagagggagtcagaaagagagagacaaagaagaattcaaagagaaagaaagagatatggaagtagtaaatcaaaaacagggtaccctgttcctttaaaagccagggtaaatttaaaacctataattcataatgacggtcttctccataaccctataactgcactccaataccaccttgttctcagcataaacaagggcatagccccaaagcactgaggccacggacaacccatagccttcctatcaaaaatccttaacccagcaggtttcctaacag

SEQ ID NO: 1835 - DNA, 495 bp, Homo sapiens
  MAP TO AC009813.2; EXPRESSED IN BONE MARROW, SIGNAL =   7; EXPRESSED IN LUNG, SIGNAL = 6.5; EXPRESSED IN ADULT LIVER, SIGNAL = 8.3; EXPRESSED IN BT474, SIGNAL = 4.5; EXPRESSED IN FETAL LIVER, SIGNAL = 3.9; EXPRESSED IN HBL100, SIGNAL = 5.3; EXPRESSED IN PLACENTA, SIGNAL =  10; EXPRESSED IN HELA, SIGNAL = 5.7; EXPRESSED IN HEART, SIGNAL = 6.5; EXPRESSED IN BRAIN, SIGNAL = 5.9
  unsure 422
ctagggacttggtgccctgtgtcccagccactccagccatggctaaaaggggccaaggtacagcttgagctgttgcttcagagggcacaagccccaagccttggcagcttgcacaaagtcaagaattaaggtttgggaacctctgcctagatttcagaggatgcatggaaatgcctggatgcccaggcagaaatctgctgcaggagtggggccctcacgggggccctcataaagaacctctgctaggacagtgtggaagggaaatgtggggtcagagcctccacacagaactcctgctggggcactgcctagtggagctgtgagaagacggcccccatcctccagaccctagaatggtagatccaccaactgcttgtgccatgaacctggaaaagccacagatactcaatgccagccagtgnaaagcagccaggtggggtgctataccctgcaaagccacagacgcagagctgcccaagtccatgggagcctatc

SEQ ID NO: 1836 - DNA, 479 bp, Homo sapiens
  MAP TO AC009884.2; EXPRESSED IN PLACENTA, SIGNAL =   2; EXPRESSED IN BRAIN, SIGNAL = 1.8; EXPRESSED IN BT474, SIGNAL = 1.1; EXPRESSED IN FETAL LIVER, SIGNAL = 1.6; EXPRESSED IN ADULT LIVER, SIGNAL = 3.3; EXPRESSED IN HEART, SIGNAL = 1.8; EXPRESSED IN HELA, SIGNAL = 1.6; EXPRESSED IN HBL100, SIGNAL = 1.4; EXPRESSED IN LUNG, SIGNAL =   1; EXPRESSED IN BONE MARROW, SIGNAL = 1.8
agagtgggaagtccagtggctttcctaagaatgtggtggcttccagggtagacagacagggaaggagatggaggtagcttatcttatggtcacctcttgtcatttctcatctcctggaggtattccctctctgtcaagtgaaagtagcacctagttgggttggttggttggttcgttggttggttggttggttgggttttatcagtctgacaatcttttatcttttaattggtacatttagaacatacacatttaatataattacaaatacattagggtttacatctaccatcttatttgtgctattcatctcatctattttacccttctctcctttcttgcctctttttgacttagttttgtttttatctttccctctctccctccacacacgctcaagtttagatgctatatgctgcttttgggctttcattatcctagaaattacaataaacatatccaactgatcaaagtgtaaa

SEQ ID NO: 1837 - DNA, 448 bp, Homo sapiens
  MAP TO AC010684.1; EXPRESSED IN HELA, SIGNAL = 3.3; EXPRESSED IN PLACENTA, SIGNAL = 3.2; EXPRESSED IN HBL100, SIGNAL = 2.5; EXPRESSED IN HEART, SIGNAL = 2.2; EXPRESSED IN BRAIN, SIGNAL = 2.9; EXPRESSED IN BONE MARROW, SIGNAL = 2.4; EXPRESSED IN LUNG, SIGNAL = 1.6; EXPRESSED IN BT474, SIGNAL = 2.6; EXPRESSED IN FETAL LIVER, SIGNAL = 2.5; EXPRESSED IN ADULT LIVER, SIGNAL = 1.9
aggcattcctgagaccacctggaatgccaggcctctgagggcttttaccccaacatttacctccaggaccaccagtaggctgactcccggcccctctcccaggccctctcccacctccaggtctttctcctgggaacaaccaccaaagcgacctccccctgcaccttcaggtatccctctttctcatcctggcaggatgatccacctttggtgcctccacatagacttgcccctatccacccttggttttttccaccagctcccttgctaaaccctgcgattttcagtgcaccacccaccttgattcggcaacccaaggtggatgatatgagtgtggccaccattgagaagaaagccacaacaaccaccagtgccaagccacagatcactgctaattccaaggcagagcttacttgatttgtgcccatggcattgagagtagatcggg

SEQ ID NO: 1838 - DNA, 455 bp, Homo sapiens
  MAP TO AC009963.2; EXPRESSED IN FETAL LIVER, SIGNAL = 1.2; EXPRESSED IN ADULT LIVER, SIGNAL = 1.1; EXPRESSED IN HELA, SIGNAL = 1.2; EXPRESSED IN PLACENTA, SIGNAL = 1.3; EXPRESSED IN HBL100, SIGNAL = 0.97; EXPRESSED IN HEART, SIGNAL = 1.2; EXPRESSED IN BRAIN, SIGNAL = 1.2; EXPRESSED IN BONE MARROW, SIGNAL = 1.3
tcatgggctaatcatctcccaaagttgccaacttgatacctaataccatcaccttggggatcaaaatttcaatgtatgaatttagggggaacataaacatcagatcatagcaaacataatgatactaattgatatttgtggctacatgccacattttttttactacttctaagttgtacttaggcctattctaaatgtgattgcaataaaactctttaaaaaaatgaatagatgtttgcctctccatccttgtgtttcccgcacagatgctgggtggaatcccatggcaagcatactttcagagggttctctcttcttcctcagccacctatgctcaagtgctgtccttcctggcagctttcgggtgcctggtgatggccatcccagccatactcattggggccattggagcatcaacaggtaaatctcttgcagcttcaccacatgtgccagtt

SEQ ID NO: 1839 - DNA, 474 bp, Homo sapiens
  MAP TO AC010734.1; EXPRESSED IN FETAL LIVER, SIGNAL = 1.8; EXPRESSED IN HELA, SIGNAL = 1.1; EXPRESSED IN PLACENTA, SIGNAL = 1.2; EXPRESSED IN HBL100, SIGNAL = 1.1; EXPRESSED IN HEART, SIGNAL = 1.1; EXPRESSED IN BONE MARROW, SIGNAL = 1.2; EXPRESSED IN BRAIN, SIGNAL = 1.6
gaagcaggtacttggaaagggagataaatgggatctggagttatttggaccagggtagagaccatttcattgattttctcccttgggacttgaccctaaaaaaagtttgctgacagccatgacactaagaggataaagtagattggggtgatcacatcccctatactctgtcaacctcattcacctagaagtcatcaactacatggttttgaagaagcaaatttaacattgcaagaggcacctctaataaataacaggggtaaataacttacctggttaaaaaaaaaatccaaaagaatcaggtaggctataccccaggtggacttagatgccaagagggtaaggcatttagggggatcttcctctccatccccacagaactcaccaatagcttcagagagctcagtttttgggtctataggtcaatagaaaacaatgtgcaaatagttattgcaccatttcacaaatcacagc

SEQ ID NO: 1840 - DNA, 469 bp, Homo sapiens
  MAP TO AC011415.1; EXPRESSED IN BT474, SIGNAL = 1.2; EXPRESSED IN FETAL LIVER, SIGNAL = 1.3; EXPRESSED IN HELA, SIGNAL =   1; EXPRESSED IN HBL100, SIGNAL = 1.3; EXPRESSED IN HEART, SIGNAL = 0.88; EXPRESSED IN BRAIN, SIGNAL = 1.6; EXPRESSED IN BONE MARROW, SIGNAL = 0.94
tccacatttgttgttatttttctgataataaatttcatactttttattggaaaaccacagaaaatgcaaaaaatagctaagccgttggtatgtttctatctagatttcaattaaattttaattattctctccccgtgcctagccccccttgccccatttttaaaaagacctggagttcagggtaggagacatcaagagcatcctagagggcagcagcacaaattcactcccctccagaccttgcagcttgcttcgcccatctcccctccccctgagcttggtcgcttatcattggtcattgccatggcaaccagcagctgccgggccagcagcctctaccgcagcaggggtggggcactgggggagggggagagagagaggaggagccagaggaggtgtctgctgcaagttcctggctgcttccgagctcaccccatcctccgagagggaggaggcccaactggtgatg

SEQ ID NO: 1841 - DNA, 457 bp, Homo sapiens
  MAP TO AC011460.1; EXPRESSED IN FETAL LIVER, SIGNAL = 1.5; EXPRESSED IN ADULT LIVER, SIGNAL = 1.2; EXPRESSED IN HELA, SIGNAL = 0.91; EXPRESSED IN BRAIN, SIGNAL = 1.4; EXPRESSED IN BONE MARROW, SIGNAL = 1.3; EXPRESSED IN BT474, SIGNAL = 1.5; EXPRESSED IN PLACENTA, SIGNAL = 1.2; EXPRESSED IN HEART, SIGNAL = 1.5; EXPRESSED IN HBL100, SIGNAL = 1.3
caggagctggggagaagtgggggaatgagtagttgttgttttgtgggtacagagtttcagttttagaagacagaaggtagtgttggtggctgcataacactatgtgcgcgaatgcatttaacccactgaactgcacgcttatggttaagacggtaaattttatgttatatattttaccaccacaacaaaaaatctataacatataatactttagtctaaaccattaaatatttatgggaccgtacagtggtcaccaaataagaaagaaaaggtaagtgacggcaatgctgtccttacctattgatactaggttgatgtagttctccaacattacttccttgtacaagaccttctgagactggtccaaaaactgccactcctccctggtgaagcccacagccacatcttcgaatgacaatgacccctataataacaattccaatgcaatctgaggtgg

SEQ ID NO: 1842 - DNA, 418 bp, Homo sapiens
  MAP TO AC011482.1; EXPRESSED IN BT474, SIGNAL = 2.3; EXPRESSED IN HEART, SIGNAL = 1.2; EXPRESSED IN BRAIN, SIGNAL = 2.1; EXPRESSED IN FETAL LIVER, SIGNAL = 1.5; EXPRESSED IN ADULT LIVER, SIGNAL = 1.2; EXPRESSED IN PLACENTA, SIGNAL = 1.8; EXPRESSED IN HELA, SIGNAL = 1.8; EXPRESSED IN HBL100, SIGNAL = 2.6; EXPRESSED IN BONE MARROW, SIGNAL = 1.5
cctctttcttgatagaaatcatgcatttgctttttttctctttcctctagattgatcactaatttgtacactatgtcttgtaactgtcggtccaaccttataaagaggttgtgtctgatgtactgctatattgcattttggacatctgttgctgtagtaaaaatgtcttacgacgcagcttttacaaaaggtataaagatattctgtgatggtagttgcatctattaagtaacctttgcaaatggaacacaagatatatggggtcagctcagagagattaatcaggcgctcctcctcgtcctccgagtcttgccggcctccctccagcctcaacgagaagtgactcatgtcctcctcctcctcctcctcttcttcctcctctagctcctcttcttcttccaactgctcgtccttatcc

SEQ ID NO: 1843 - DNA, 496 bp, Homo sapiens
  MAP TO AL109614.4; EXPRESSED IN HBL100, SIGNAL = 4.2; EXPRESSED IN HEART, SIGNAL =   5; EXPRESSED IN LUNG, SIGNAL = 2.7; EXPRESSED IN FETAL LIVER, SIGNAL = 4.1; EXPRESSED IN ADULT LIVER, SIGNAL = 2.8; EXPRESSED IN PLACENTA, SIGNAL = 3.9; EXPRESSED IN HELA, SIGNAL = 3.6; EXPRESSED IN BRAIN, SIGNAL = 2.3; EXPRESSED IN BONE MARROW, SIGNAL = 3.2; EXPRESSED IN BT474, SIGNAL =   4
atttaggggaagggggtgaggttgtattttaacgctatagggctaaaaaaaaaaaaagtaggtgaattgtgaatttaagagagagtggtttaggagataaaaatagcaggtgtgagatgctggacttgggagatgagggggaaggaggagtcttggataatgcccaggtgtttgccttgagtggtgtcacttgccatagagagcaaaaagggcttgcttggatattctaacctagactaattttggacatgcagaatctgaggttttctccaggggatgctcttcaggaggcagtagataaatggtccagctttcctggggctcaggaagaggtgggagttgaggtcctgaatcaaaaactctgattggctctttgtgacatcatagaaatggggagtagtgtagtaaaagaagcctttgaccataaaaatatggaaggtaacttgtccaaaccagtttttcatgttgaacttgctgtcccaggtgagcttgctag

SEQ ID NO: 1844 - DNA, 444 bp, Homo sapiens
  MAP TO AC011087.1; EXPRESSED IN PLACENTA, SIGNAL =  16; EXPRESSED IN BONE MARROW, SIGNAL = 8.4; EXPRESSED IN FETAL LIVER, SIGNAL =  22; EXPRESSED IN ADULT LIVER, SIGNAL = 6.7; EXPRESSED IN HEART, SIGNAL = 7.9; EXPRESSED IN HELA, SIGNAL = 6.9; EXPRESSED IN HBL100, SIGNAL = 5.2; EXPRESSED IN BRAIN, SIGNAL =  10; EXPRESSED IN LUNG, SIGNAL = 4.9; EXPRESSED IN BT474, SIGNAL = 3.5
cacacacacacacacacatgcgcacgtgcacacaaggtcatgctgaagtactgacactatagagcactcgtaaaacatatactattaccgccacaaacatgtgcacattgtctgtgtaatcttatttccttactctttttaaattgatttcagtcattaagatatgaatatttatatcccattaatgccatatgttaataagggagacaatctttagatatgctctaaaatactatttagaagctgtccagcacgtgttcactcataaagtagtacctcatcttctttttgattgagtccctgctttagttcttccactcgtaatcttagtttctttacttctgcttcattttgatccactcggttgtttgcatgagtcagttctgcaatatttgcctggtattgtctgtttagtttatagtaggcatgttgaaggttcagtaa

SEQ ID NO: 1845 - DNA, 500 bp, Homo sapiens
  MAP TO AL033526.19; EXPRESSED IN BRAIN, SIGNAL = 2.2; EXPRESSED IN BONE MARROW, SIGNAL = 1.9; EXPRESSED IN LUNG, SIGNAL = 1.2; EXPRESSED IN BT474, SIGNAL = 1.6; EXPRESSED IN FETAL LIVER, SIGNAL = 2.1; EXPRESSED IN ADULT LIVER, SIGNAL = 1.7; EXPRESSED IN HBL100, SIGNAL = 1.9; EXPRESSED IN HELA, SIGNAL = 1.9; EXPRESSED IN PLACENTA, SIGNAL = 1.9; EXPRESSED IN HEART, SIGNAL = 1.8
cctcctgtctcatctctgggtcccaggaccagccgggccaagaaggggcgcaacgggagttcaggatttggagcctggggcctgctgagcaccagccaggtgcagggctcagggtgagcctggctgcagggcctcttggccctgtctacaccccgggaccaagcctggaacaaacgtttgcacaaaatgaagccggccccacccaggcctccctgggtccgctccaccttgagtggtgggtgtctgggggcggtggctcacaccagctctgccccctccagagcccgagccattctgagtgccagcccagcgctgctttgtcttctagtggagcgagaccgtgccctgggccaccaggagccccattggaaggagttccgctttgacctgacccagatcccggctggggaggcggtcacagctgcggagttccggatttacaaggtgcccagcatccacctgctcaacaggaccctccacgtcagcatgttccaggtggt

SEQ ID NO: 1846 - DNA, 497 bp, Homo sapiens
  MAP TO AL117325.3; EXPRESSED IN HELA, SIGNAL =   1; EXPRESSED IN HEART, SIGNAL = 1.1; EXPRESSED IN PLACENTA, SIGNAL =   1; EXPRESSED IN BONE MARROW, SIGNAL = 0.95; EXPRESSED IN BRAIN, SIGNAL = 1.1; EXPRESSED IN FETAL LIVER, SIGNAL = 0.92
tgccattttgttcattgttttctagttattttgttgattctttcttcctttttttctttttttctgtctcctttatgactagatattcttcattggtatgctttgataccctactttttgtcttttgtgtatctattatagatttttgctttgtgtttgccatgaaatatctgatatttgcataaaatatcctataacaagctatataaggctgataacaaattaacaatgatggtatttaaaaactctatacttttattccatccttctctgctttatgatattgatatcagcatttacatcttttcatattatgtatttttaacaaattattgtaactattgttattttaataattttgtttttaatcttcatataggatatatatatgatttatacaccaacattactgtattagagtattctgaatttaactgtgtacttacttgtactagtgagttttatactttcatgtgcttttgtgttaccaattagga

SEQ ID NO: 1847 - DNA, 486 bp, Homo sapiens
  MAP TO AL080238.9; EXPRESSED IN HEART, SIGNAL = 1.3; EXPRESSED IN BRAIN, SIGNAL = 1.1; EXPRESSED IN BONE MARROW, SIGNAL = 0.94; EXPRESSED IN BT474, SIGNAL = 1.1; EXPRESSED IN FETAL LIVER, SIGNAL = 1.1; EXPRESSED IN HELA, SIGNAL =   5
acattggaaaaaggaggcaggatgggaaagttgtctgctaggaaccaagaaatgactggtctttaaggcaaataaggggaatttgtagaagaggagtgggaagattcatacccccatggaggcttaaaaatggtcacaatgccttggaaggattttggcaagccattcaaaatactagataatgacgaagactgagagagaacagaatgaacaactggatgggggtggctatggggagagacttggagaatactctctcttcctgctatgtgtaccatcagaattgaaccaggggaaatgtgaacgggtctccagttactttgggatgaatctttcgggggttctaaagaaacttccttttcctccaaccagagaatcttggcctcctccacacttcaccggcaccccccacaatcatcatggaggagtcagcaatggtgctttgggatggtaagccactccagggctgcactgtctggaggagaa

SEQ ID NO: 1848 - DNA, 485 bp, Homo sapiens
  MAP TO AL022337.19; EXPRESSED IN PLACENTA, SIGNAL = 1.6; EXPRESSED IN BONE MARROW, SIGNAL = 1.2; EXPRESSED IN BRAIN, SIGNAL = 1.4; EXPRESSED IN FETAL LIVER, SIGNAL = 1.2; EXPRESSED IN BT474, SIGNAL = 0.96; EXPRESSED IN HEART, SIGNAL = 0.98; EXPRESSED IN HELA, SIGNAL = 1.8; EXPRESSED IN HBL100, SIGNAL = 1.1; EXPRESSED IN LUNG, SIGNAL =   1; EXPRESSED IN ADULT LIVER, SIGNAL = 1.1
attctcagtgcctcatccactatagacgaggagactgaggctcagtatttattctcagtgcttcatccactatagatgaggagactgaggctcagaggggtaatgtcccttgtctctggttgtctgtgtcccaaccagagacaagagacattacctctctgagcctcagtcacatctatagtggctaaaaacatggatctgtttcttaatcagtctagattcaggataactgatgtaggggtctgtataatttgacgatgatgatgatgataatggtggtagtgatgatgatggtgatagcgataatttaatgatgatggcaatgatagtgatgatggtgatgatggccatgttggtgatgaagatagtgataacttgatgatgatgatggtgatgatcataatgataatcatggcaatgatggtggtggtgatactaataatggagatgatgatgatgatgatagcgatgatgatgatggtgat

SEQ ID NO: 1849 - DNA, 476 bp, Homo sapiens
  MAP TO AL096819.2; EXPRESSED IN BT474, SIGNAL = 1.2; EXPRESSED IN HBL100, SIGNAL = 1.9; EXPRESSED IN HEART, SIGNAL = 2.2; EXPRESSED IN LUNG, SIGNAL = 1.1
tacaaagactggagtccccgtgggtgcaccgctgggtcttcctctcatccagttggtgtttctgctggtttctgtcctagcattacagctaccctaggaacccactgcaggaggaaaataagacagttgaaggtgtcacagatgtagggatccaagtagtgattcactttaacaacttgcatttgattgcttagaatgtatgtaatatgcaatatatatgcaataccgctcctcattctgagggtgtttaatgtttcccttcaccaaaatgcagcatctagaccggcttatgaatcttccgctgcattccgtgaagatggaaccttgttatactaaagtcaacctgcttcacgagcgcctgcaggatctcaagagccgcttcagattcccccacattgatctggtggttcagaggacacagaactacatgcaggaggtgggtgtggcaggggcatccgtggtggatgagggtaaag

SEQ ID NO: 1850 - DNA, 484 bp, Homo sapiens
  MAP TO AL078463.11; EXPRESSED IN ADULT LIVER, SIGNAL = 1.4; EXPRESSED IN PLACENTA, SIGNAL = 1.3; EXPRESSED IN BRAIN, SIGNAL = 1.1; EXPRESSED IN LUNG, SIGNAL =   1; EXPRESSED IN BONE MARROW, SIGNAL =   1; EXPRESSED IN FETAL LIVER, SIGNAL = 1.5; EXPRESSED IN HEART, SIGNAL = 1.3; EXPRESSED IN HELA, SIGNAL = 0.94; EXPRESSED IN HBL100, SIGNAL = 0.95
aacctgcctttgctggatgccacacagcaacgccggggagcaactctggtccagcacctgggtaaacaatgtgactctccggaatgtcccgaacactacagtcaaaatctaggatttaggaacagtataatgggggatatctcccctcaaaacctaactcagttacagagggagggatctgtctaggacccgatctgctatgaaagtttcaattataaaacttggggtttgctcatttttcagaactgggatcttcaacacctttgggattcattcatcagatatggaattcagactgcttaaagccttggagaactgcaactaggcagcagagagctagctggtttctaaggagatcgagactgagcagacgatacagaagtagagcatcctctagaggtcgcctagtccaccaccccaccacctcctgctcactcccacccctccccagcagcaggctaccaggaagcaagagcagacaggt

SEQ ID NO: 1851 - DNA, 474 bp, Homo sapiens
  MAP TO AL049612.11; EXPRESSED IN BT474, SIGNAL = 1.1; EXPRESSED IN FETAL LIVER, SIGNAL = 3.8; EXPRESSED IN ADULT LIVER, SIGNAL = 1.5; EXPRESSED IN HELA, SIGNAL = 1.8; EXPRESSED IN PLACENTA, SIGNAL = 2.2; EXPRESSED IN HBL100, SIGNAL = 1.3; EXPRESSED IN HEART, SIGNAL = 2.5; EXPRESSED IN BRAIN, SIGNAL = 2.3; EXPRESSED IN BONE MARROW, SIGNAL =   2; EXPRESSED IN LUNG, SIGNAL = 1.3
gcctatcagtcagggttctccagagaaacagaaccaaccggatacacagttcaaagaatttgtttttaaaaattggctcatgtggttgtgggggctggcatatctgaaatctgcagggaggctggagtcaggcgggcttctgtattatggtcttgaggcagagctcctctgggaaacctaagttttacttttactcaggttttactccttcaactgattggacacggcccacctgcatatggaggggaatctgctttactcaaagtcaattgattgtagttgtcaatcacatctgcaaatgcatccacagcagcaactggactggtgtttgaccaaacaacaacttggtggcataatggcccaccaaggtgacacaaaattcacgatcacacccagtctggaatttctttcaatggttgtacttgagtattatttcctgaactttaacagcagttttcttcaaacacagccatg

SEQ ID NO: 1852 - DNA, 482 bp, Homo sapiens
  MAP TO AF172272.1; EXPRESSED IN ADULT LIVER, SIGNAL = 1.1; EXPRESSED IN BT474, SIGNAL = 1.4; EXPRESSED IN FETAL LIVER, SIGNAL = 1.8; EXPRESSED IN HELA, SIGNAL = 1.7; EXPRESSED IN PLACENTA, SIGNAL =   1; EXPRESSED IN HEART, SIGNAL = 0.99; EXPRESSED IN BRAIN, SIGNAL = 0.93
atttgccaccagtggacctagaattagttctgtctccatccaaatacacaatagacccatctcctctgacctttcgcacagatgtgccatggcaccaattacaagctgttaggttactcattccatagtctggtaccagaacatctttcactgaatcatatgagcaaaccaaattgttcaagggaaagctgtaatttttgtcagtcctcagctgtccatgagtactttttgccaggttatacaatttccctccaggagccaaccactctggaggaacatgaagttcagaaagggcaccacagagcaaacatttgtgaaggcgattatccattactgcttttttagcagctgctgtgacttcctcaggctgaactcctatcactccagtccttctgtagaaatactgatggacatcagcaaccaaactaggatggataccatgtttgtccataaagacttcttccatagcagcaacaagccta

SEQ ID NO: 1853 - DNA, 482 bp, Homo sapiens
  MAP TO AL109628.2; EXPRESSED IN PLACENTA, SIGNAL =  24; EXPRESSED IN HBL100, SIGNAL =  37; EXPRESSED IN HELA, SIGNAL =  36; EXPRESSED IN HEART, SIGNAL =  19; EXPRESSED IN BRAIN, SIGNAL = 5.1; EXPRESSED IN BONE MARROW, SIGNAL =  24; EXPRESSED IN LUNG, SIGNAL =  22; EXPRESSED IN ADULT LIVER, SIGNAL =  18; EXPRESSED IN BT474, SIGNAL =  45; EXPRESSED IN FETAL LIVER, SIGNAL =  12
tttcttttcatgtgccttaaattgttatacagattaaacacccttcacttttaactatatctttaaaatttaaagtcaaaccaacagtattttactagagatttgaagggcttatgaagagtcatgctgaaggctaagagagagcaactgcagaatattagcttgtttcttttttttttcttaagagttcagcttttttattgaacatgttataaaagaggtttagtcaaaaagaccaaagtccatgtcatcatcatactcctcaggttcttctttctttgtttccactttcttttcctcagctggggcagcagtggtggtgggggcaggaccttctgcaggtgcagcaccaactgttggagcaggtccaccagcccctacattgcagatgaagctcctgatgttgacattggccagtcctttgcaaacaaatcaggccagaaaggttcaacatttatatcagctgctttaacaagggcatt

SEQ ID NO: 1854 - DNA, 473 bp, Homo sapiens
  MAP TO AL034346.18; EXPRESSED IN FETAL LIVER, SIGNAL = 6.6; EXPRESSED IN HELA, SIGNAL = 6.4; EXPRESSED IN PLACENTA, SIGNAL = 7.7; EXPRESSED IN HBL100, SIGNAL = 4.9; EXPRESSED IN HEART, SIGNAL = 8.6; EXPRESSED IN BRAIN, SIGNAL = 4.3; EXPRESSED IN BONE MARROW, SIGNAL = 6.4; EXPRESSED IN LUNG, SIGNAL = 4.9; EXPRESSED IN BT474, SIGNAL =   4; EXPRESSED IN ADULT LIVER, SIGNAL = 4.8
gagcaggaacaaatgaaccccaagacttcattgtctagctgcacaaaaggtgagctcttcctcagtccattgaaggcctaggacaccttctcagacaactgtctccctgggggagttcagtattctgggttgcttcacacatgccaacctgggctccatcatcacactggctgggaggatatggcatggaaaacctggtgccagctcccaaatgcttccgcccggaagtggcatccagtgtgtctgctcagatttccctgactgaggcaagtcacgtggccacgcctaactccaaggggacagggcacacccctccatgaacttgaaggaagaagaggcgaaaggaatgagcaagaacacggtctttggcatcttgaggagctgcaggtcagtcccactgcagcaggacagtcctagagaggcagcaggcagtctggcacctttgcatggctccagacctcggatcccctcac

SEQ ID NO: 1855 - DNA, 486 bp, Homo sapiens
  MAP TO AL121758.4; EXPRESSED IN BT474, SIGNAL = 2.5; EXPRESSED IN FETAL LIVER, SIGNAL = 2.3; EXPRESSED IN ADULT LIVER, SIGNAL = 2.2; EXPRESSED IN HELA, SIGNAL =   3; EXPRESSED IN PLACENTA, SIGNAL = 1.7; EXPRESSED IN HBL100, SIGNAL =   3; EXPRESSED IN HEART, SIGNAL = 5.9; EXPRESSED IN BRAIN, SIGNAL =   2; EXPRESSED IN BONE MARROW, SIGNAL = 1.9; EXPRESSED IN LUNG, SIGNAL = 1.2
ctcttgctctggctctcaccatgtgacaccacttgctctcccttcaccttctaccatgattagaagcttcccgaggcctcaccagaagcagatgctagagctatgctggtacagcctgcagagccatgagccaattaaaccacttttctttataaatcacccagcctcaggtatttctttatagcaatgcaaaagtgaactaacacagtacctgatctaatcctaagagcccttttaaagcagtgagtttttcccggttggtcacagaagaggaagtcaaagacatgaagcataaggaggattcaaaacaccattgctcacttgaagatggaggggccacacatcaaggaatgcaggtggcttctagccaacaaaaaaatcgtctgttacggtcagtcccacaaccgcaagacgctgaacattgcgaacaacaagaatgaacttgggggcaacccattttcgccaggacccctctctctgcaacag

SEQ ID NO: 1856 - DNA, 476 bp, Homo sapiens
  MAP TO Z95330.7; EXPRESSED IN HEART, SIGNAL = 1.4; EXPRESSED IN LUNG, SIGNAL =   1; EXPRESSED IN BRAIN, SIGNAL = 1.4; EXPRESSED IN ADULT LIVER, SIGNAL = 1.3; EXPRESSED IN PLACENTA, SIGNAL = 1.6; EXPRESSED IN HELA, SIGNAL =   4; EXPRESSED IN HBL100, SIGNAL = 4.1; EXPRESSED IN BONE MARROW, SIGNAL = 1.3; EXPRESSED IN BT474, SIGNAL = 2.1; EXPRESSED IN FETAL LIVER, SIGNAL = 1.3
cttgtctctgctccacgaccagcactcgcactaccagaacatccttgtcttctgcagtaaaacctacagcaatatgctggtgttggatggcatcgtcctgggcatagggagggatgagttctcctgccaggagatggtagccatcctgcctctctgcagccaccccaagccacgaaaggtgctgatcatcgtgggcagagatgggtgtcttgcacaaggtggggaagcacctctccatggagtctgtggtccagtgtgacattgacaaggatgtcatccaagtctctaagaagttcctgctaggcatggccagttgctactctagttcaaagctgatccttcatgtgggtgacagttttgagttcatgaagcagaaccaggatgcctttgatgtatcactgacttctcagaccacatgggcccggctgaaagcctcttcaaggaagcctattgtcagcagatgaaggtgaaggtgg

SEQ ID NO: 1857 - DNA, 475 bp, Homo sapiens
  MAP TO AL049820.14; EXPRESSED IN BONE MARROW, SIGNAL = 1.1; EXPRESSED IN ADULT LIVER, SIGNAL = 1.2; EXPRESSED IN PLACENTA, SIGNAL = 1.2; EXPRESSED IN HEART, SIGNAL = 0.92; EXPRESSED IN BRAIN, SIGNAL = 0.98
ggacagtagccaggcatgagaatgagaagaggactgtaggcagaggagacagctgagaccagaaacatgccagagcatggtgtattccaggaattccaaggaaagcagcatccattagggaaagaagtgtaggaagtgggaggccgggaggatggtggggagtgtaaaggctggggccccatcacagaggggctttgaagctcctgtgaggaggttagccttgatcctaagagcaagaggaagccattggaaagagattttattttcgcctgggacatgatctgagtacacttgaatttcagaaagatcttcctgactgccatgtggagaatggattggaagggaccagactggagctaaggatgctcttggaggattttgtgtatggacaacacagccatggaggttgggtactgcagagggtgagggagcatcatgtgaatgcctggcccctacctcgtactgtacatcccgg

SEQ ID NO: 1858 - DNA, 475 bp, Homo sapiens
  MAP TO AL110114.1; EXPRESSED IN PLACENTA, SIGNAL = 1.4; EXPRESSED IN HELA, SIGNAL = 1.4; EXPRESSED IN HBL100, SIGNAL = 1.1; EXPRESSED IN HEART, SIGNAL = 1.4; EXPRESSED IN BONE MARROW, SIGNAL = 1.2; EXPRESSED IN BRAIN, SIGNAL = 1.3; EXPRESSED IN ADULT LIVER, SIGNAL = 1.1; EXPRESSED IN BT474, SIGNAL = 0.98; EXPRESSED IN FETAL LIVER, SIGNAL = 1.2
agtctatgaaggtggggtgcacagagagagtctgttggaccagtgtggtcacacacacaccctgaaccaaggagcacaacacctgagtggctgaggctgcagggcacgtcccagattacactgaccaaagagtaggaaaatgttccccatcagaaattggtagaacagggaatggattctggggaagtaagcaatgaacattatccgtaagggcctactatatggtaagcagctattaatcgctttgccaatttatagttgaggaaacagcctcagagaggtgaagtcactctgacagccaggaagtagggaaaagcaagcttggaacgcagctctgtctggtaccagagctgagggtctggggagctccaccatcctgctttccaggcaacatctttacccatctctgttttggtccaaggcacaaagctggtgtcagatggctcttggataagcctgtgtgggaaggacagat

SEQ ID NO: 1859 - DNA, 484 bp, Homo sapiens
  MAP TO AP000497.1; EXPRESSED IN BT474, SIGNAL = 1.3; EXPRESSED IN FETAL LIVER, SIGNAL = 1.6; EXPRESSED IN HEART, SIGNAL = 1.8; EXPRESSED IN LUNG, SIGNAL = 1.1; EXPRESSED IN BRAIN, SIGNAL = 1.9; EXPRESSED IN ADULT LIVER, SIGNAL = 1.4; EXPRESSED IN PLACENTA, SIGNAL = 2.1; EXPRESSED IN HELA, SIGNAL = 1.7; EXPRESSED IN HBL100, SIGNAL = 1.7; EXPRESSED IN BONE MARROW, SIGNAL = 1.9
tggtttatgtgctgcactccccacaattctcctgagctcagtactcccgtctccttctcccagcctggcttgctccttccactttgggccggagacctactctctgccaggggtgggctgaggagctcctcccatcccagggagggcgagactccagctcaggccctcccctacccctgcagccctctcctagggaaattcatggggcaccttgcgtcacagctgggtggggcgagagctttctccatgagcagagagggaccctgtacccagagcagagcggagtgctcggggagaaaccacggggctcagaggagggcccagggctcccactcctgagaagtggcttcccaggccctggggtggggcacttgtgccatgggctggggtgcccctctgggtggctcacagccttgctgtccgtgctggccaggctccctgaggaggtccccagcttccagccacgactgtttgagtgctccag

SEQ ID NO: 1860 - DNA, 474 bp, Homo sapiens
  MAP TO AL034405.4; EXPRESSED IN FETAL LIVER, SIGNAL = 2.8; EXPRESSED IN HELA, SIGNAL =   3; EXPRESSED IN HEART, SIGNAL =   5; EXPRESSED IN LUNG, SIGNAL = 1.9; EXPRESSED IN BRAIN, SIGNAL = 3.3; EXPRESSED IN BT474, SIGNAL = 2.4; EXPRESSED IN ADULT LIVER, SIGNAL = 2.4; EXPRESSED IN PLACENTA, SIGNAL = 3.7; EXPRESSED IN HBL100, SIGNAL = 2.6; EXPRESSED IN BONE MARROW, SIGNAL = 2.8
ccaacagcatcttttcaacgacagcagatctagctcactgagcagatttgcattcaagtgaactcgtgggcctcccacactctccactcaggctaataccctgaagaccttagatagccacatgtccaagcaagtttctgtagctgtggctttgctcagccagaaagctggaagccaaggtctgtctctggacaccttaaacaagccaagctatctcaccagcatcccttctgctgccagctctgtgaccccatggctgacacccttcaccctgaagctggataggacacgggtgctcctgaatattgtgtctcagctcccaagtgctttgctacctcaggcttgggttctgtgctcttccagagtcctttctctactgtggcattatacccatccaagaaagagaaagataagccaccaaacatctgagatgtgtgtcaaacccaaagacgaggccatcctctacaagcacaa

SEQ ID NO: 1861 - DNA, 474 bp, Homo sapiens
  MAP TO AL079307.2; EXPRESSED IN PLACENTA, SIGNAL = 4.4; EXPRESSED IN HBL100, SIGNAL = 2.8; EXPRESSED IN HEART, SIGNAL = 3.9; EXPRESSED IN FETAL LIVER, SIGNAL = 3.3; EXPRESSED IN ADULT LIVER, SIGNAL = 2.6; EXPRESSED IN HELA, SIGNAL = 3.8; EXPRESSED IN BRAIN, SIGNAL = 3.3; EXPRESSED IN LUNG, SIGNAL = 2.7; EXPRESSED IN BONE MARROW, SIGNAL = 4.1; EXPRESSED IN BT474, SIGNAL = 3.3
tcctagaaagatcacagagggtgcatgcaggcctggagcagcaggtgggtgcagagccagcgtggctataggctgtgaggcagcagaaaaacaatcatgtttgctgtgtggagagtagattggaaaagaggaagaagtgggagtctgcatggaaaactgttgcagaatcccaggatgcttccaaaccagtccctgggggccaaccagagcacagactgaccaggtacctgggtggagaccttagctgggagaaggggcacctggaaggaaattacagaggaaatcaacatggaacagaagccccaggacagcaggagaggcctcacctgccgagaggtgcccctggcggccaggctgctgctggccatggccctcatggatgagtggttctacctctgccctgaccacttcttcattgcctcttgatggtccatggcagatgccaggcactgtccctgtggccacttcaggata

SEQ ID NO: 1862 - DNA, 482 bp, Homo sapiens
  MAP TO AL035704.7; EXPRESSED IN HBL100, SIGNAL = 1.6; EXPRESSED IN HEART, SIGNAL = 1.7; EXPRESSED IN LUNG, SIGNAL = 0.99; EXPRESSED IN FETAL LIVER, SIGNAL = 1.4; EXPRESSED IN ADULT LIVER, SIGNAL = 2.3; EXPRESSED IN PLACENTA, SIGNAL = 2.1; EXPRESSED IN HELA, SIGNAL = 1.8; EXPRESSED IN BRAIN, SIGNAL =   2; EXPRESSED IN BONE MARROW, SIGNAL = 1.8; EXPRESSED IN BT474, SIGNAL = 1.2
ttgctcttcctttggtgtccttgaattttacccccaaactgggtgtcttgaagaaaccccagtggcatcaggatcctcattttatacacgaggacatcgaggcacagagaggcaacaagactgtcccaaagatgcacagctagtgagagctggactcagaatggagtccagagcttctgagtctaaatcttatggtcctcccctacacactagaatcaggggtggcagctcaaagcccaggaggacccagggggctatggggaggaactcaaggctgtctctgcactcaccggtcttcagcttggggaggtgatactgccacaggaagcagccagtcatgaccactgagagcaggcagaagaagctgcagatggccgggaggagccacttcttcttcactttcagcaagttgggccaccagccatcctgggagagcaaggacataaggtacagtccccttgggggtcagtcagagggaagag

SEQ ID NO: 1863 - DNA, 473 bp, Homo sapiens
  MAP TO AL078463.11; EXPRESSED IN BRAIN, SIGNAL = 0.96; EXPRESSED IN ADULT LIVER, SIGNAL = 1.1; EXPRESSED IN HELA, SIGNAL = 0.92; EXPRESSED IN PLACENTA, SIGNAL = 1.3; EXPRESSED IN HEART, SIGNAL = 0.94
tcaagagctttgactgtatcgactacagtcctgtttaccagtcttttctctcatactttcaaattttaataatggattttgtcacctggaaactgatgaattctaaatagccctctataatctttttctacctataacttttaggaagattatttgccttctggaaagtcttccggggatgtcaatgcttgaatggtagacatgacatatcatatacaatggttggggccttcaccgctgtctgtaacccaacctcatgaataaatgattccactttgagctcaagctgagacagcttagaaaagagcttcctggattttcaagaggctggttccatcgttgacaggtaaggtgaattgggtccttaagattatcatgattattttgagttttcctttgtcaaattgttcaacctatacccaaggaagtacgataacaattgagttccgaaagcattcagagacccaaagaca

SEQ ID NO: 1864 - DNA, 469 bp, Homo sapiens
  MAP TO AL034347.15; EXPRESSED IN FETAL LIVER, SIGNAL = 1.3; EXPRESSED IN BT474, SIGNAL = 1.1; EXPRESSED IN HBL100, SIGNAL = 1.9; EXPRESSED IN PLACENTA, SIGNAL = 1.3; EXPRESSED IN HELA, SIGNAL = 1.3; EXPRESSED IN HEART, SIGNAL = 1.4; EXPRESSED IN BRAIN, SIGNAL = 1.2; EXPRESSED IN BONE MARROW, SIGNAL = 0.99
catttcatccccataacaaccatgtgattaggtaggtactattaatatctttatttccattttgctgatgagaaaactgaggcttagagagctcaaataacttgctccaggtcacctagcctgcctgattaaaacctagagtctgctccagaatctaggctcttatccactttgttatgctgtcttattaaatattttaatcacaaaatttttaagtatttaattcaagatggtggacaaagtaggcacctgctgctttgattcaaccatcttgctaaaacctggaaagttccttcctgtcccagttttgctgtcatcaattgggtctgaatggagggttccacctgtttctccattccctgttatattcccaggctcccaaattattgttgcccattggttgccaaataaccctctcaagatcattaattcattcactccatagactccttccatgtgccaagtgtgt

SEQ ID NO: 1865 - DNA, 462 bp, Homo sapiens
  MAP TO AL078583.15; EXPRESSED IN BONE MARROW, SIGNAL = 4.7; EXPRESSED IN HBL100, SIGNAL = 3.1; EXPRESSED IN HELA, SIGNAL = 3.8; EXPRESSED IN HEART, SIGNAL = 3.9; EXPRESSED IN BRAIN, SIGNAL = 3.8; EXPRESSED IN LUNG, SIGNAL = 2.9; EXPRESSED IN BT474, SIGNAL = 2.6; EXPRESSED IN ADULT LIVER, SIGNAL = 4.8; EXPRESSED IN FETAL LIVER, SIGNAL =   4; EXPRESSED IN PLACENTA, SIGNAL = 3.9
cctcagatcatcaggcattagttagatcctcataaggagcacacaacttacatcccatgcatgtgtagttcacgataaggttcatgctcctatgagaaggtaatgccaccactgatctgacaagaggtggagctcgggtgataattctcgctcacccactcacctctggctgtgcggcctggttcctaacaggctacggacaggtactggtccatggctcgggaggttggggaccccctgccctgtagtgggtttgtctgaggatgccccaaaatagatattgtaatttattctcgatcttagtgatgaagaaacaggatagaagaggctcacgggactgcccaggtgtgatgggctagtaagccgcccagctgggatggaatccaggcgatgcagtcttctcagctccacacgctgcccccaggaacctgagccaggaggcaggagcagactctgatgtcc

SEQ ID NO: 1866 - DNA, 468 bp, Homo sapiens
  MAP TO AL121757.2; EXPRESSED IN HELA, SIGNAL = 1.3; EXPRESSED IN HEART, SIGNAL = 1.5; EXPRESSED IN PLACENTA, SIGNAL = 0.98; EXPRESSED IN BONE MARROW, SIGNAL = 1.7; EXPRESSED IN BRAIN, SIGNAL =   1; EXPRESSED IN FETAL LIVER, SIGNAL = 1.6
tgagctcacaagagtgtccagttcaaggttactgaagtctgccttgacaaataattgcagatggtatcaggaaatcaactttcccctcaccttctgctgaaaaaaggaactatgaaaacaagaggattgttcattgggtgtggtagaaacgctacatagaatgaccatggaaagctaaatattattataataataatagtattataatactatcacagcttgaggttgcaaagcaccttccttcagaccgaagtctgcctctgatgggaacaaatctttagcataataaagcaccaaatttatgtaccctccagtggagaatcaagcatagaatcaagaactacctcaccatctccacctccctgacaccagataccccctggatggagctaggaccctgggggaagagggttaggaaagagaagaggtagggagaccagagtcaaaagggactatgggtgccatatg

SEQ ID NO: 1867 - DNA, 460 bp, Homo sapiens
  MAP TO AP000426.1; EXPRESSED IN BT474, SIGNAL = 1.1; EXPRESSED IN BONE MARROW, SIGNAL = 1.3; EXPRESSED IN ADULT LIVER, SIGNAL = 1.1; EXPRESSED IN FETAL LIVER, SIGNAL = 1.8; EXPRESSED IN PLACENTA, SIGNAL = 1.3; EXPRESSED IN HEART, SIGNAL = 1.4; EXPRESSED IN HELA, SIGNAL = 0.93; EXPRESSED IN HBL100, SIGNAL = 1.1; EXPRESSED IN BRAIN, SIGNAL = 1.4
agagtcaacagcatgggctctggactcatagggccctgggttctaaattaactttttccatttgcccaatcttgcagggcctgatatgttgagaggtaatatttagtggaatcagaatctaaaaggcccaagaagattatccatgatgtctcttaggctctttgctcccttccccacctccattgggtctcagccctgcccacctccaatctcattaggaaaatttgttaacagagataaaaacagatgccttacttgtgtccttggccctttctaaaactgcaacaacttcctgtctggaaggtcctccctaatcccaaaatgcaggaagaacatttgctgatgctctggcaaagcagaaggctagacaaaccaatacccctaagtcctctcctgcaactcaacacacagcgggaaggaggagcaggatagacatcactcaggaaagtaatcagtctgc

SEQ ID NO: 1868 - DNA, 459 bp, Homo sapiens
  MAP TO AL049537.18; EXPRESSED IN PLACENTA, SIGNAL = 1.4; EXPRESSED IN HEART, SIGNAL = 1.1; EXPRESSED IN BRAIN, SIGNAL = 1.1; EXPRESSED IN BONE MARROW, SIGNAL = 0.99; EXPRESSED IN BT474, SIGNAL = 4.5; EXPRESSED IN FETAL LIVER, SIGNAL = 0.97; EXPRESSED IN ADULT LIVER, SIGNAL = 1.2; EXPRESSED IN HBL100, SIGNAL = 1.3; EXPRESSED IN HELA, SIGNAL = 1.1
tgagccagtagaaagcctgcttcaacacaatttaattgtttcgagtgatttggatttcatagaactgttcattgtttttcaactaacagccataggagttggctcttcataataatcacctagtttaatttgcagagccatcttacaatttatttgaaaaaagcacacagaaaagaaaaacaaaaccagaccctctagaaaagtgtggccataggagggcaggaaggtgatgtgcgttcctgatggtgaaggtcgcggatttctattttaggctcttctgactgcagtgacttccccacacattgaaattcatgagggtactatcctgcagacagtgagaacatgttacaatatctatttggccagcaaaaatctcatcaatcaaaccactgccaaggctacccttactcagatgctgaacgtcattttcacccgcatggaaaaccaagtggtgagtga

SEQ ID NO: 1869 - DNA, 469 bp, Homo sapiens
  MAP TO AF191068.1; EXPRESSED IN FETAL LIVER, SIGNAL = 1.7; EXPRESSED IN ADULT LIVER, SIGNAL =   1; EXPRESSED IN PLACENTA, SIGNAL = 1.2; EXPRESSED IN HELA, SIGNAL = 1.2; EXPRESSED IN HEART, SIGNAL = 1.7; EXPRESSED IN BONE MARROW, SIGNAL = 1.3; EXPRESSED IN LUNG, SIGNAL = 0.89; EXPRESSED IN BRAIN, SIGNAL = 1.4
tgtgtttgttaattttggagtggagactgtggattctgtatgtatgggtgtatgtgtatctgcatcgtgtgtatgtacatgtttacgcatgtgagtgtgtgtgagtgtgtgtatgagtgtgtgtgtacatctgtgcagctggtcaccagcatgtaccttcacaagttagattttgctggcatatccacgagctgtcaccactgtgccctgggcactgagctttctgaggcttgtgtgttggcctgtcccagggctctgccatcgtcagtattggccccactcacagatgttctttcctgggttgggccagctccttttggacacttttgagatccacctcgggcccgtctgcgtttgcgatgctgcttttctgtggctccttccggctactgggactgttcccttctggcattgccttcggcagcacttcgaggaactcagcctccagggcctcctgttgtccttgaaa

SEQ ID NO: 1870 - DNA, 461 bp, Homo sapiens
  MAP TO AL117694.1; EXPRESSED IN HBL100, SIGNAL = 2.7; EXPRESSED IN HELA, SIGNAL = 2.6; EXPRESSED IN PLACENTA, SIGNAL = 3.5; EXPRESSED IN HEART, SIGNAL = 2.4; EXPRESSED IN BRAIN, SIGNAL =   3; EXPRESSED IN BONE MARROW, SIGNAL =   5; EXPRESSED IN LUNG, SIGNAL =   2; EXPRESSED IN BT474, SIGNAL = 2.2; EXPRESSED IN ADULT LIVER, SIGNAL = 3.2; EXPRESSED IN FETAL LIVER, SIGNAL = 2.6
ctgttgtagcccagtgttgactataagccttacctataacataaacatttgattaaaaacacatcgacatccatgttgtatgttacatactgcattcttaaaataaggtaagctacagaaaaaaatgttattaagaaaatcataaggaagagaaactatatttgctattcagtaagtggaagtggatcatcatgaaagttttcatcctggttgtctccacattgagtaggctgaggaggaggagaagaaggaggacagctactgctgtctcggggtggcagaggcagaagaggtggaggaggaggaaggggaggcaggagaggcaggcacagtcggtataacttttatgaaaaaaaatcttgtaagtgaacctgcacagttcaaacctgtgatgttcaagggtcggttgtatattgtttatttgaaatttgctaagacagcagatcttagtatcctcatca

SEQ ID NO: 1871 - DNA, 459 bp, Homo sapiens
  MAP TO AL031943.5; EXPRESSED IN PLACENTA, SIGNAL = 2.2; EXPRESSED IN HBL100, SIGNAL = 1.5; EXPRESSED IN HELA, SIGNAL = 1.9; EXPRESSED IN HEART, SIGNAL = 1.8; EXPRESSED IN BRAIN, SIGNAL = 2.1; EXPRESSED IN BONE MARROW, SIGNAL = 1.9; EXPRESSED IN LUNG, SIGNAL = 1.2; EXPRESSED IN ADULT LIVER, SIGNAL = 1.7; EXPRESSED IN BT474, SIGNAL = 1.2; EXPRESSED IN FETAL LIVER, SIGNAL = 1.8
cagctctcctcctgccttcccctccagccaaggctcaaactccacacttttgtcccaagcagttccactcaagccctcaatttacgtattttgaccaggaaaccaaaaagcccacaggtgactggacttgcattccttaggagggcactttggtcaatttaatggagtgggaagggctcaccccttgcaccaaagtcaatatccaaggattctctccagccacatggagtcatctctctgagccatgatcaggtggataaatgttgcttttctcttgcccattacatttctaggactgtgttagtgggtgttggagatcagcctcctcagaagcagactttgagaccagaattttcgtgcaagcaatttcttcaggcagttctcctggagaaactgatcaacaggcaggaacagcacagcaggaaaggtaggcacccaagccaggtggtaaaagcattt

SEQ ID NO: 1872 - DNA, 467 bp, Homo sapiens
  MAP TO AL121714.1; EXPRESSED IN BRAIN, SIGNAL = 1.8; EXPRESSED IN BT474, SIGNAL = 1.5; EXPRESSED IN HELA, SIGNAL = 1.1; EXPRESSED IN PLACENTA, SIGNAL =   1; EXPRESSED IN HBL100, SIGNAL = 0.99; EXPRESSED IN HEART, SIGNAL =   1
tgaacggaagtcagaaatcttgaagttgtccatttaagttacacattctagcaattaataaacatctaagaacaattaattttccttgctacagcgttttagggagattccatcaaagactaacttggaaaaaaaaatggtaagttaataggtttgcttattatatatagacgttacatctaaaatcattagcagaccattcataaactaaaagaagtgcttattaagcttgggaatgtgcaaggctggccgactaaaatctctattcatagcatataataaactgtttactttcgctttggttatcacctgagttgtagaaaaggtcaggtctttcgagaatatctccttcatgaatgtatggctcaattcgatcatcaccatacaagtactgctcactctcatccatctgacgactctctaccatctccagccactgagagttatgccagcgaaacttttcactc

SEQ ID NO: 1873 - DNA, 458 bp, Homo sapiens
  MAP TO AL035703.17; EXPRESSED IN HBL100, SIGNAL = 1.4; EXPRESSED IN HEART, SIGNAL = 1.6; EXPRESSED IN BONE MARROW, SIGNAL = 1.7; EXPRESSED IN LUNG, SIGNAL = 1.1; EXPRESSED IN BRAIN, SIGNAL = 1.8; EXPRESSED IN ADULT LIVER, SIGNAL = 1.5; EXPRESSED IN BT474, SIGNAL = 1.3; EXPRESSED IN FETAL LIVER, SIGNAL = 1.5; EXPRESSED IN PLACENTA, SIGNAL = 2.3; EXPRESSED IN HELA, SIGNAL = 1.5
aagcgaaggcgtttcctaagtagtatgcaaatgagcctatagtatgcaaatgaacccctcctgctcctgcaaaaagctgtcagagtaggaagcgctgctgcttccagggacaggctctgggaatatggcccggctgcaggggcttgggcctttaggtttaggggggttgggaggtcagaataggagtaggggtggggctcaccttgagggtctccagcacacctgcagcccttccatgggacactgtggggatggcagagggaaaaataggtatggggctcagagaagtggctctgaatctgaataccactgtcctcacctgggtgaccttggtctttgtcaccgtgctcttgctctgctgcagaggtcatggagtccttgcactgccgtgggtggagccacggcattcaagtggcctggcttgctgaggttctgcatgagggacaactgctctggag

SEQ ID NO: 1874 - DNA, 450 bp, Homo sapiens
  MAP TO AL078602.10; EXPRESSED IN PLACENTA, SIGNAL = 6.5; EXPRESSED IN HELA, SIGNAL = 6.2; EXPRESSED IN HBL100, SIGNAL = 3.8; EXPRESSED IN HEART, SIGNAL = 6.1; EXPRESSED IN LUNG, SIGNAL = 4.6; EXPRESSED IN BONE MARROW, SIGNAL = 6.1; EXPRESSED IN BRAIN, SIGNAL = 6.7; EXPRESSED IN ADULT LIVER, SIGNAL = 5.2; EXPRESSED IN BT474, SIGNAL = 3.9; EXPRESSED IN FETAL LIVER, SIGNAL = 6.4
tgccactgtactctagcctgggtgacagcgagaccttgtcaaaacaaaaaaacaaaaaaacaaaaaacaaaaaacagctggaactctttacattctgatttccttggtgctctgctctgtcattttttgttttagagtgaactactcttaaaatactagtcttctgaagttgtttttctgatgtctaacttctgttttggcttcaaagcaacaattttaagcacaacggaccagaatagagctaatgttctattatttaccagtagctattaagagcaaaataatagtgcatattatcatttttccccttggaggctctcatgtcactagaaaatatgtcacgttggggagtcaatacaaaccagcaaagaaaatgctctgaatgcttattcaatacgcgggcatccatttccacaaagtgattcggggatgactccacattgactctgc

SEQ ID NO: 1875 - DNA, 498 bp, Homo sapiens
  MAP TO AL121675.2; EXPRESSED IN BT474, SIGNAL =   2; EXPRESSED IN HEART, SIGNAL = 1.8; EXPRESSED IN LUNG, SIGNAL = 1.2; EXPRESSED IN BRAIN, SIGNAL = 1.4; EXPRESSED IN ADULT LIVER, SIGNAL = 1.4; EXPRESSED IN FETAL LIVER, SIGNAL = 1.5; EXPRESSED IN PLACENTA, SIGNAL = 1.6; EXPRESSED IN HELA, SIGNAL = 1.6; EXPRESSED IN HBL100, SIGNAL = 2.3; EXPRESSED IN BONE MARROW, SIGNAL = 1.3
tgttgggcagaagaaatcaagaattttattttggccatgttaagtttgaggtgctcaggaggtagtttgataaaaatccaagctctagcgagtgaccagggctctagacgtagattcagcagacaccacgttgaagccatggggctagcgagagtgtggggaaggggaggcagtcaggaccaagaggggccctcccacattcagaggagcattgtcccgtgaggcaggaggaaaaccgggagagtgtagggtccgagacgtctacagcagaaagccttcccagagggaggcagcggtcagtggactggatgtttctgagagattgagcgaggtggggaccatcggatttggccacgtgggaggtgctggaaaaggaagctggcctgcagtgggctgggaaggaaggagctggggatgggaaggacccacaagccttgaagaaggtttgctgtgaatatcacgcagcaggggcgtggtcgctggaggcagataaggagg

SEQ ID NO: 1876 - DNA, 450 bp, Homo sapiens
  MAP TO AJ239326.3; EXPRESSED IN PLACENTA, SIGNAL =  14; EXPRESSED IN HBL100, SIGNAL =  15; EXPRESSED IN HEART, SIGNAL =  45; EXPRESSED IN FETAL LIVER, SIGNAL =  19; EXPRESSED IN ADULT LIVER, SIGNAL =  25; EXPRESSED IN HELA, SIGNAL =  17; EXPRESSED IN BRAIN, SIGNAL =  30; EXPRESSED IN LUNG, SIGNAL = 7.3; EXPRESSED IN BONE MARROW, SIGNAL =  14; EXPRESSED IN BT474, SIGNAL =  39
gatgatggcctggaggtggcctggagatgatggcctggaggtggcctggagatgatggcctggaggtggcctggaggcagcctggaggtggcctggagatgatggcctggaggtggcctggaaatgatggcctggaagtggcctggaggtggcctggagatgatggcctggaggtggcctggagatgatggcctggaggtggcctggagagggcctggatatgatggcctagagatggcctggagatggcagggaaatgccacgtggggggtaccaattattaaggggactagtcaattgccaaagcctccgattatgatgggtattactatgaaaaagattataacgaatgcatgggctgtgacgatgacgtcgtggatgtggtcattacctagaaggttgccgggttggcctagttcagcccgaataaggaggcttaaagctggaggt

SEQ ID NO: 1877 - DNA, 365 bp, Homo sapiens
  MAP TO AL096861.9; EXPRESSED IN HEART, SIGNAL = 1.4; EXPRESSED IN PLACENTA, SIGNAL = 1.7; EXPRESSED IN BONE MARROW, SIGNAL = 1.8; EXPRESSED IN FETAL LIVER, SIGNAL = 2.2; EXPRESSED IN HELA, SIGNAL = 2.9; EXPRESSED IN HBL100, SIGNAL = 3.1; EXPRESSED IN BRAIN, SIGNAL =   1; EXPRESSED IN BT474, SIGNAL = 3.3
tccctcaggcattttatttttcttcaacacttaactattttctcttcttttccataaaacgtttcaatgtggaacttatgctgaatttctttaaattcaatttgtctcatataagattttaaatacagataacttctcttttctcttgcattcctgaccccaacttttaaatggctcctgagcctgtccacttagatgccttgtaggcatcttagaatcaaaagacgaaaaagtgaattatcctctataaaaaacgaaacaattatcttgctttttctatgttttctgaatttgttaatagcttcatcgttggcatagcagtacaaggccacaattttagcgtcagctccaaagccttcctcttt

SEQ ID NO: 1878 - DNA, 349 bp, Homo sapiens
  MAP TO AL034346.18; EXPRESSED IN BT474, SIGNAL = 1.2; EXPRESSED IN HEART, SIGNAL = 0.87; EXPRESSED IN PLACENTA, SIGNAL = 0.99; EXPRESSED IN HBL100, SIGNAL = 1.1; EXPRESSED IN HELA, SIGNAL = 1.1; EXPRESSED IN BONE MARROW, SIGNAL = 0.93
gcgaggctggaaattgttaccattgttggagaaagaaatttgacagtttaatcaaaagccttaaaatcattcacatctgttgatccagtaatttcatgtctaagaaacaaaaagatgacaaagatgtttatcgaagcttttttatagtaatgacatattggaaagcacataaatcaatgacataactcacactccaggtactggatacttgctacttgttgatgaccccaccgaggtacttcctattgtgtgcagtcgtaggaaggcagtgccggcccacccagaaaccagggcggcagagcctttcttctccccagaacagccaagggcaggcatctacggcagattt

SEQ ID NO: 1879 - DNA, 472 bp, Homo sapiens
  MAP TO AC011460.1; EXPRESSED IN FETAL LIVER, SIGNAL = 1.5; EXPRESSED IN PLACENTA, SIGNAL = 1.5; EXPRESSED IN BT474, SIGNAL = 1.7; EXPRESSED IN HEART, SIGNAL = 1.5; EXPRESSED IN HELA, SIGNAL = 1.1; EXPRESSED IN HBL100, SIGNAL = 0.92; EXPRESSED IN BRAIN, SIGNAL = 1.2; EXPRESSED IN BONE MARROW, SIGNAL = 1.4; EXPRESSED IN ADULT LIVER, SIGNAL = 1.1
ttcacagtacttcatttcctccacttaaaagtacttgggcttcctttactcatttaattgacacagtcgagcaattgctgtgtatgtgcttaggttaacatcaaatttgcctgtgtatcacagcatacattttaataggatgagtttatcaggctatctcagccttatacatgttctctcagtgtatgcttttcggccacataatgaactacaaatttttgctcaacccttttccacatagatctgagttttcttcctatgggttttctgtaacataaaataagacataattgatcacggaaggcacaaccacattcactgcattcacaaggtttctgtcctgtgcaaatcctctgttatctcctgaggctgcacatctgaccactggctgtcccacaaggactacgttcctgtttgcgaggaggccgctgatgtttaatgatgtctgaggggccacagaaggcacttgtgt

SEQ ID NO: 1880 - DNA, 482 bp, Homo sapiens
  MAP TO AF186190.1; EXPRESSED IN ADULT LIVER, SIGNAL = 7.8; EXPRESSED IN BT474, SIGNAL =  41; EXPRESSED IN FETAL LIVER, SIGNAL = 5.2; EXPRESSED IN HEART, SIGNAL = 8.3; EXPRESSED IN HBL100, SIGNAL =  49; EXPRESSED IN HELA, SIGNAL =  20; EXPRESSED IN PLACENTA, SIGNAL =  20; EXPRESSED IN BRAIN, SIGNAL = 4.7; EXPRESSED IN BONE MARROW, SIGNAL =  12; EXPRESSED IN LUNG, SIGNAL =  21
tccagatgcacttgctaaggacatgaccttatacaagctacttcaccctctggagtctcagtttcttcatccgtacaatgggtttaataatagcatttatcttcttcttcagcgctgcctaggagggggcagccatttcttcagcataatggcggcccttagacccctcgtgaagtccaagattgtcaaaaagagaaccaagaagttcatccgtcaccagtcagactgatatgtcagaattaagtgtaactgatgggaacccagaggtattaacagcagggttcacagaaggttcaaaggccagatcttgatgcccaacattggttatgggagcaaccaaaaaacaaagcacatgctgcccagtggcttctggaagttcctggtccacaatgtcaaggagctggaagtgctgctgatgtgcaataaatcttactgtgctgacatcgctcacaatgttgcctccaagaaccacaaagccaaca

SEQ ID NO: 1881 - DNA, 474 bp, Homo sapiens
  MAP TO AC011145.1; EXPRESSED IN PLACENTA, SIGNAL = 3.1; EXPRESSED IN HEART, SIGNAL = 3.5; EXPRESSED IN HBL100, SIGNAL = 2.5; EXPRESSED IN BRAIN, SIGNAL = 2.2; EXPRESSED IN BONE MARROW, SIGNAL =   2; EXPRESSED IN LUNG, SIGNAL = 2.3; EXPRESSED IN ADULT LIVER, SIGNAL = 1.8; EXPRESSED IN BT474, SIGNAL = 3.1; EXPRESSED IN FETAL LIVER, SIGNAL = 2.9; EXPRESSED IN HELA, SIGNAL = 3.1
aaaacaagatgggaaaagaatttgttaccgggagagaaaaaaaattcaagtaatgacgttttgttctctaacttaagactattatttatttattaagttatttattatgactattgacaagttattatgactattaagttattttgtctactgaaaccttccgatttcattaaattacatttagagtatctatggcacaggcttaaaggcgcctacttccatacctgaataaaagcatttgcttgcacacactttgcattttccactgttactttgataccatttttagttgcgaaacacgtggcatgttctcggaaatgaatagctttcaagatagtggagagattcctaacgttgtcaaggctggccacaaggctgtactgatcatcctcgtcttggatctgttgggtcagaaggggcatcgtccactgcgcattcggccccgagggatgctcctggggccaacaacttctc

SEQ ID NO: 1882 - DNA, 483 bp, Homo sapiens
  MAP TO AC011474.1; EXPRESSED IN HELA, SIGNAL = 1.8; EXPRESSED IN HBL100, SIGNAL = 1.2; EXPRESSED IN BRAIN, SIGNAL = 1.9; EXPRESSED IN PLACENTA, SIGNAL = 2.1; EXPRESSED IN HEART, SIGNAL = 2.4; EXPRESSED IN LUNG, SIGNAL = 1.3; EXPRESSED IN BONE MARROW, SIGNAL = 1.8; EXPRESSED IN ADULT LIVER, SIGNAL = 1.6; EXPRESSED IN BT474, SIGNAL = 1.1; EXPRESSED IN FETAL LIVER, SIGNAL = 2.8
ttatgagaatgcctgggtggagcccgcatccttgtaattggcagaggggtcaggacatgtgttttgccccatggacagttgtgcaagttaatgtaatgttctctctcaagcctggagcatgctttggtggaattcagtgcagtgtttgcatggaatcataacaaggtctgtatttgattttcagccaatattgactgaagtcccacagagcgctctcagacctgaattagggggggcctatgtaactaatatacataatttttccaacgagactcatgaaggttttcctggaactgctgctgatggaatgcctggcacagtggtgggacttctcacccacaggagaggagaccattttctgcaaagtgaaacacttgccaagcaccctgactcactgcctgggggcgctggggcaggctggaagcacccccattttacagaataaacccaggtctgcagtaatgggagctttcctcaaagtca

SEQ ID NO: 1883 - DNA, 482 bp, Homo sapiens
  MAP TO AL080316.8; EXPRESSED IN BONE MARROW, SIGNAL =   3; EXPRESSED IN ADULT LIVER, SIGNAL = 5.6; EXPRESSED IN FETAL LIVER, SIGNAL = 2.9; EXPRESSED IN BT474, SIGNAL =   2; EXPRESSED IN HELA, SIGNAL = 7.4; EXPRESSED IN PLACENTA, SIGNAL = 9.1; EXPRESSED IN HEART, SIGNAL = 2.2; EXPRESSED IN HBL100, SIGNAL =   3; EXPRESSED IN BRAIN, SIGNAL = 4.1; EXPRESSED IN LUNG, SIGNAL = 5.3
cgcttgaccccaatacaaactggacagtagttccaaatagccagaaaatggcactttgaatttttccatcctgcaagatctaaataattcttgtcataaaataggcaaacggtctgaggtgcctgacgtccaagcattcttttacacatcagtcccttcctagtctctgtgcccagtgcaactcatcccaaatcttccttctttccctcccgcctgtcccctcagtaccaaccccaagcgtcgctgagtctttctaatcttcgttttctacagatccatctgacctctcccttcctccccaggctgctcctcgccaggctgagctaggtcccaattcttcctcagcctctgctcctccaccctataatccttttatcacctcccctcctcacacctggtccggcttacagtttcattccgtgactagccctcccccacctgcccagcaatttactcttaaaagggtggctgaagctaaaggc

SEQ ID NO: 1884 - DNA, 481 bp, Homo sapiens
  MAP TO AC004913.2; EXPRESSED IN PLACENTA, SIGNAL = 2.4; EXPRESSED IN HBL100, SIGNAL = 1.6; EXPRESSED IN LUNG, SIGNAL = 1.4; EXPRESSED IN BRAIN, SIGNAL = 1.9; EXPRESSED IN BONE MARROW, SIGNAL = 2.1; EXPRESSED IN ADULT LIVER, SIGNAL = 6.4; EXPRESSED IN HEART, SIGNAL = 1.8; EXPRESSED IN FETAL LIVER, SIGNAL = 1.2; EXPRESSED IN BT474, SIGNAL = 1.5; EXPRESSED IN HELA, SIGNAL = 2.6
ctttcctgagcaagctggacagatgggctgggcctctgggaccacacccctctgctactctcaactccccaagctcagggaatccaaaggtgccacagggatgctgggaccagttataggtacctcaaccagtctgacagcccacagctcacctctggtcaccagtcctcagccccttcaggtgccacgtcctgccctgggaggatgagcaggaggaaagagaaggcaccaccccagagcagcctgctacttactttttcttctctttgtctctcttcagagtctgtgagcctccagcctgggagccctgggactggagcagctcagccgccgtctttctttgcttgaaagcattcacttcatcatccagggatttcttcttatcctccagtttcttcttctcgtcctggtgcagtttcttcagacggtcaaacttctcgtgcagctggcagggaagcacagggagattggagagaatccc

SEQ ID NO: 1885 - DNA, 471 bp, Homo sapiens
  MAP TO AC005049.2; EXPRESSED IN HELA, SIGNAL = 1.2; EXPRESSED IN PLACENTA, SIGNAL = 1.2; EXPRESSED IN HBL100, SIGNAL = 1.1; EXPRESSED IN BRAIN, SIGNAL = 1.4; EXPRESSED IN HEART, SIGNAL = 1.1; EXPRESSED IN BONE MARROW, SIGNAL = 1.2; EXPRESSED IN ADULT LIVER, SIGNAL = 1.3; EXPRESSED IN FETAL LIVER, SIGNAL = 0.91; EXPRESSED IN BT474, SIGNAL =   1
ccactaatccttaaactcacagccttaccttgcccagcacatttatctacacatgagagccattactaagacaaacacagactaggaagcagaggaactccgccgccaccgcacaggagccgcgggggtaccctggagaggacgatcagcctcagggcaggccatctagaagaattaccaataacaccaacccattcgtctctctataaagtgctgacatctgtgctctggaacttacagctgagagagcacaaaacttgtctgactcagcacagtccaggaagtcaagcagctcaatctcaaacaggacagtggtgtttggggggatcaagggagggcagcccagcgttccataggcgtagttcggtttgaacagaaacctggccagctctcctctccgcatgctcagaaggcccagctccatgccccacagtgtaatatctgtaagaatggacaaagaaggtgggtgaa

SEQ ID NO: 1886 - DNA, 455 bp, Homo sapiens
  MAP TO AL022400.8; EXPRESSED IN FETAL LIVER, SIGNAL =   1; EXPRESSED IN ADULT LIVER, SIGNAL = 1.1; EXPRESSED IN HELA, SIGNAL =   1; EXPRESSED IN PLACENTA, SIGNAL = 0.99; EXPRESSED IN HEART, SIGNAL = 1.4; EXPRESSED IN BRAIN, SIGNAL = 0.91; EXPRESSED IN BONE MARROW, SIGNAL =   1
catcacttgcttatctgtctgtcctagaacctctggtgtctcaggtttttctgatgaaaagaaattgagttctccaaaaataattagtaggtttcatcatattagttaaaaataatactagaggaacataaatttagaatatcctgtgaaggacagtgcaccttaaaagttttcagaacctcagacatgctgtagatcaaacacaacacgccattcttcattgcagctcttttgaatgcattatttaaatactatctttcaatgtttccttcagatttctaatacttaaatatactgttatatttttctcagtctgagggaaaaggccataccaatgctggagatgcaatatatgaggtggtgagtctacagcgagagtctgacaaggaggaaccagtcactcctactagtggagggggtccaatgtcaccccaggatgatgaagcagaagaggg

SEQ ID NO: 1887 - DNA, 465 bp, Homo sapiens
  MAP TO AC010896.1; EXPRESSED IN BONE MARROW, SIGNAL = 2.4; EXPRESSED IN FETAL LIVER, SIGNAL = 2.6; EXPRESSED IN ADULT LIVER, SIGNAL = 2.2; EXPRESSED IN BT474, SIGNAL = 1.5; EXPRESSED IN HELA, SIGNAL = 2.3; EXPRESSED IN HBL100, SIGNAL = 1.5; EXPRESSED IN PLACENTA, SIGNAL = 2.2; EXPRESSED IN HEART, SIGNAL = 3.3; EXPRESSED IN BRAIN, SIGNAL = 2.4; EXPRESSED IN LUNG, SIGNAL = 1.6
agcagtcactccagcactttctctcctggtccttatgtctctggggcctctctcattagtctccctactcaggttccaagctcagggcctgtgatctgctatgatggctggctttttctcccacccagaggagcagctgtgcttggaccagctggccaaactacaggttcagagaggagaaaaccactgagaacatttatttcacttaaggccattggtttccaagttcccaaccttcctcaccaggtggcagcaactggcagtacccgggttcgggatggctgaagacaaggcagccacaaggctggtggttgtggaggctttgacaaggagggtaatggaggcagatgctggtgttccactggtagccagagaggcaagcacaatagaaattccccttgtggttgacattacactctgacagagagaagagaagagggggtgggcaggctgtctgaagaagct

SEQ ID NO: 1888 - DNA, 454 bp, Homo sapiens
  MAP TO AL109928.5; EXPRESSED IN PLACENTA, SIGNAL = 1.7; EXPRESSED IN HEART, SIGNAL = 1.6; EXPRESSED IN LUNG, SIGNAL = 1.2; EXPRESSED IN BRAIN, SIGNAL = 1.7; EXPRESSED IN BONE MARROW, SIGNAL = 1.9; EXPRESSED IN FETAL LIVER, SIGNAL = 1.6; EXPRESSED IN ADULT LIVER, SIGNAL = 1.1; EXPRESSED IN BT474, SIGNAL = 1.9; EXPRESSED IN HELA, SIGNAL = 1.4; EXPRESSED IN HBL100, SIGNAL = 2.4
ttggtggatctgaagctgtgggttattgtttaacctccttcgtgtacacaggctgccttccttcatgcatacatgcacgtggcaaatacttatcaaatgcttagtgaatgctaagcctgtgttaccattttgcctacgttatttaattctcactttctgttttcaccccattttgcagatgaggagaacaaggctgggagaaagcaaaggagccacttgtttaaggttatgcagctgagaaatgaacaaggtggggttcgagtccagagtgcgcattccccatcaccccttaacaaaaaggcatgtttcccaggagactacagaggagaatcggcaggtggtcacaattgcagggctgtctcaggctgagcagagagtacggtggaggggcatgggcctgctgttggcggtgagggccttggaaatggcttcctggaggagatggcaattatcc

SEQ ID NO: 1889 - DNA, 464 bp, Homo sapiens
  MAP TO AL080317.11; EXPRESSED IN HBL100, SIGNAL = 1.6; EXPRESSED IN HELA, SIGNAL = 1.5; EXPRESSED IN HEART, SIGNAL = 1.6; EXPRESSED IN PLACENTA, SIGNAL = 1.6; EXPRESSED IN LUNG, SIGNAL = 1.2; EXPRESSED IN BRAIN, SIGNAL = 1.2; EXPRESSED IN BONE MARROW, SIGNAL = 1.1; EXPRESSED IN ADULT LIVER, SIGNAL = 1.6; EXPRESSED IN FETAL LIVER, SIGNAL = 1.8; EXPRESSED IN BT474, SIGNAL = 1.5
gctgggacaaactgacttccagaataaaagctacaaaatccagtctgacctattgtgttaatatcaaaattataattatgttcaggagataaactatcttcaagtgagtaacaactttcaaagcctggatctgaaaaaaagatgggactatcatctgatacagagttatccaactggctagagttttgtaaatttaaagagtctactttgagaagtttggggattttttctttttgttttgtacttctgggagttcgaggttttcttggggacgttaccgatcgtgtccgtttatttgctttgttatgctcaagggaaccagaaatatttttatttggttgatgtttattggataatgggtcttgtgtagtatttgcattttgtgctttctgctgtcttttttgtaacaattcttttagaactgccagtccagactgtccttcaccaaatgctgaaggtgttga

SEQ ID NO: 1890 - DNA, 453 bp, Homo sapiens
  MAP TO AL031651.32; EXPRESSED IN HBL100, SIGNAL = 1.5; EXPRESSED IN HELA, SIGNAL = 1.7; EXPRESSED IN HEART, SIGNAL = 4.1; EXPRESSED IN PLACENTA, SIGNAL =  58; EXPRESSED IN LUNG, SIGNAL =  17; EXPRESSED IN BRAIN, SIGNAL = 1.2; EXPRESSED IN BONE MARROW, SIGNAL = 1.4; EXPRESSED IN ADULT LIVER, SIGNAL = 3.3; EXPRESSED IN FETAL LIVER, SIGNAL = 2.7
aatcaagtcctttcccctgcaactgatttaacatcagtagcagagaactctttccctaaatgaataatcctctaccactgtccctcaacatgtttgctcctgtttctaaggcattgctgaagatggagtatagcctacggggccattgctgtacgtaggctaccaattaaaacacacgcacacacatacacgagcctgccgggctgggaaaactggatgcttatcttcaaggctgcattaaagactctgagggcacataccctctgggtatttgtaggtgtgggtgatatcctcccgctcgtctcggcccacgctcttagtgctgatcttcagcccaacgatcagggaacggttgatggatttgtgcacagacccatcgtcctgctggatccagtctaccacgtcggcattgacctccgcaaagacaaagggcgcatcgtacttggtgctcag

SEQ ID NO: 1891 - DNA, 452 bp, Homo sapiens
  MAP TO AL008718.23; EXPRESSED IN LUNG, SIGNAL = 2.9; EXPRESSED IN BRAIN, SIGNAL =   6; EXPRESSED IN BONE MARROW, SIGNAL = 2.9; EXPRESSED IN FETAL LIVER, SIGNAL = 2.2; EXPRESSED IN ADULT LIVER, SIGNAL = 2.5; EXPRESSED IN BT474, SIGNAL = 3.7; EXPRESSED IN HELA, SIGNAL = 2.5; EXPRESSED IN HEART, SIGNAL = 2.1; EXPRESSED IN HBL100, SIGNAL = 3.4; EXPRESSED IN PLACENTA, SIGNAL =   3
gtgagcctctgagcaactcctctgcctcagtgagctggtctgagagatgggaccaacacacgccgtcaaaggaagtgagttctaggaaaccagggaagatgaaaagacacccccgcccccagaagacggggtcccacctagaaccttcctgggaggatgccagccccaccccacatcagacaccctttggcagatatcctgttctgcctggctaccgaggcctcccgactaccctcagaatccaaattctgcaggttcctccgtgcgaggcccagcgtgggatgtcccaggttggaggtgtgcgtgttggcggtgttctttggctggaagcaaaaggccgttctggcgggatcggggccgtctgctcagctggaggcctttctggaactgggcgtgggtgaggtattcccagcccagggcaaagccatcaaacttctcgtgttcccatctcc

SEQ ID NO: 1892 - DNA, 463 bp, Homo sapiens
  MAP TO AL078633.10; EXPRESSED IN PLACENTA, SIGNAL = 2.8; EXPRESSED IN LUNG, SIGNAL = 2.2; EXPRESSED IN BRAIN, SIGNAL = 1.6; EXPRESSED IN BONE MARROW, SIGNAL = 1.9; EXPRESSED IN FETAL LIVER, SIGNAL = 1.4; EXPRESSED IN ADULT LIVER, SIGNAL = 1.3; EXPRESSED IN HEART, SIGNAL = 2.2; EXPRESSED IN BT474, SIGNAL = 4.9; EXPRESSED IN HELA, SIGNAL = 3.3; EXPRESSED IN HBL100, SIGNAL = 6.4
ggaagccaccctatgaggacacgccattagtatgtaagcagaatgtgtgtctacctgtcaaagtaatttccagtaacctgagttcacaattctggtcctaggtgagtttttctaggagtgaaaatgcagaaaaggatgttgaaagctattggctaatgtatcatttgaactgctgataacctgagaaggggctcaggcatggtttaaaatgttcgtatcttcactaagtacggttctttcctcacatgcagtttcttaattggatggcactgacctgtttcttttcttgctagcgttatacgcagagcaatgggcgcaggccgtttggcatctctgccctcatcgtgggtttcgactttgatggcactcctaggctctatcagactgacccctcgggcacataccatgcctggaaggtgagttcgtgacaaaggggctttggacagtcttgccagaaaaaggc

SEQ ID NO: 1893 - DNA, 451 bp, Homo sapiens
  MAP TO AC007868.1; EXPRESSED IN BT474, SIGNAL = 2.9; EXPRESSED IN HBL100, SIGNAL = 2.7; EXPRESSED IN HELA, SIGNAL = 2.1; EXPRESSED IN HEART, SIGNAL =   2; EXPRESSED IN PLACENTA, SIGNAL =  15; EXPRESSED IN LUNG, SIGNAL = 3.4; EXPRESSED IN BRAIN, SIGNAL = 2.8; EXPRESSED IN BONE MARROW, SIGNAL = 2.5; EXPRESSED IN ADULT LIVER, SIGNAL = 1.2; EXPRESSED IN FETAL LIVER, SIGNAL = 1.7
agggctcagctcctctctggctgagccacggtggctggtaagaagagctccaccctctgggtcctggttacgtgggccccctggtccctgtaaggtggatggggtgatgcggaagagcagaggggtgaaggcggatggggacaacagcagcagggtcagaagagggtggcagcatctcagaccacagccgaggaggaagatggggatgaggaggaggctgccgaggaagacggggaggatggactgttccagaagagccaacgccgtttgggctgccgcttgaggtggaggtagtcctccttctcacgctccttccgtgcccgctggtaatgatcttcctccttcaggtaccacacaggtggccaccgatgcttctcgaaatactcctggttttctggagcagagagcaggcagcttggttagaaaggaggcagagggacaagaggaacgt

SEQ ID NO: 1894 - DNA, 463 bp, Homo sapiens
  MAP TO AC007981.24; EXPRESSED IN FETAL LIVER, SIGNAL = 4.3; EXPRESSED IN ADULT LIVER, SIGNAL = 1.3; EXPRESSED IN BT474, SIGNAL = 2.6; EXPRESSED IN HBL100, SIGNAL = 1.6; EXPRESSED IN HELA, SIGNAL = 1.5; EXPRESSED IN HEART, SIGNAL = 1.5; EXPRESSED IN PLACENTA, SIGNAL = 2.5; EXPRESSED IN LUNG, SIGNAL = 1.9; EXPRESSED IN BRAIN, SIGNAL = 2.4; EXPRESSED IN BONE MARROW, SIGNAL = 1.7
ctcctgaccttcccacaaaggtcatgtgtgatttgcaggggttctggccgcttgaaaggttcctgagaaagcacatgcaatgaggacagagcttgcagagggaggacaggcatgcagaaggctctgtgtgcagccccagacctgggtaccttcatcaccgtcctcaccccacctccgggtgtgcacatagggagcaggtctcctgtgttatggcccaagcagggctgttaggacactgagaacattccctcctcccgcaggagagagaggtccaaggtgccctacatcgtgcgccagtgcgtggaggagatcgagcgccgaggcatggaggaggtgggcatctaccgcatgtctggggtggccgcagacatccaggcactgaaggcagccttcaacgtcagtgagtgtcggcctgcgcaggacgggatggaggtgtgggcagtggtgtccacgatgagatctc

SEQ ID NO: 1895 - DNA, 449 bp, Homo sapiens
  MAP TO AF107885.2; EXPRESSED IN FETAL LIVER, SIGNAL = 1.7; EXPRESSED IN ADULT LIVER, SIGNAL = 1.7; EXPRESSED IN BT474, SIGNAL = 3.4; EXPRESSED IN HBL100, SIGNAL = 1.3; EXPRESSED IN HELA, SIGNAL = 1.5; EXPRESSED IN HEART, SIGNAL = 2.3; EXPRESSED IN BRAIN, SIGNAL = 1.5; EXPRESSED IN PLACENTA, SIGNAL = 3.2; EXPRESSED IN LUNG, SIGNAL = 1.8; EXPRESSED IN BONE MARROW, SIGNAL =   2
gccggctcttaacagaatggctctatctccttccccacccacctccccagccccaacggaggagcatcgcacatcctgagccttggtgctggtgaatcctggggcaccctgctgtgtggccagcactaggcccccctctgcagagctcccagctccagttcagaccctccagagcagacaccccagcgagaatttggacttactgtgctccgccagcccctggatcatgtcgaatttatggatttctttggcatagtattccgactcggtgttttcctgggtgcagccttcctccctctccccatgcatctcctccagcagctcccgggtgctgttgtaaagggccaggacctgataggggacgtgggtcatcaccgttggctcaggggggctggtgagcctgagcttgctcaagatctgtcccctaatggcttccaccctcttcttct

SEQ ID NO: 1896 - DNA, 466 bp, Homo sapiens
  MAP TO AC004617.1; EXPRESSED IN BT474, SIGNAL =   2; EXPRESSED IN HBL100, SIGNAL = 2.3; EXPRESSED IN HELA, SIGNAL = 5.7; EXPRESSED IN HEART, SIGNAL = 2.5; EXPRESSED IN PLACENTA, SIGNAL = 9.4; EXPRESSED IN BONE MARROW, SIGNAL = 2.9; EXPRESSED IN LUNG, SIGNAL = 5.5; EXPRESSED IN ADULT LIVER, SIGNAL = 4.7; EXPRESSED IN BRAIN, SIGNAL = 4.1; EXPRESSED IN FETAL LIVER, SIGNAL = 2.4
gaggaaacctctttcagcccatataacagcatggtggtgcaggatatggaagcatatttagagtcagcataaatattgatgcatagtccctttgcaagaatgagggcctgagttaaggcaatgaattcagcttgctgagaggtagtggaggagggcagagttgtagcctcaatgatagatgtggaagatactatagcatagcctgcctttgctggtgagtggcgattaggcctggtggaactgccattgatgaaccaagtgtgatcaggatgaggaacaggaaagaaggaaatatggggaaattgaatgaatgtcaggtggatcagagagatacagtcatgggggtcaggtgtggtatctgcaataatgtgggaagccggattgaagtccaggccaggaacaatggtaactgtgggagactcagcaaagggtgagtatagctgaaggagccagggagcagaaagta

SEQ ID NO: 1897 - DNA, 455 bp, Homo sapiens
  MAP TO AC009966.2; EXPRESSED IN HELA, SIGNAL = 3.9; EXPRESSED IN HEART, SIGNAL = 7.8; EXPRESSED IN PLACENTA, SIGNAL =  73; EXPRESSED IN BRAIN, SIGNAL = 2.5; EXPRESSED IN BONE MARROW, SIGNAL = 2.1; EXPRESSED IN LUNG, SIGNAL =  44; EXPRESSED IN FETAL LIVER, SIGNAL = 3.2; EXPRESSED IN ADULT LIVER, SIGNAL = 5.5; EXPRESSED IN BT474, SIGNAL = 1.7; EXPRESSED IN HBL100, SIGNAL = 3.1
ggttcctcattctttctggcatggcaccagaaattcccaggtggaaatgaatgatgtcaaaaccaaaaagaaggggcagggtggggccaggaggatagttcccaataaaccccatatgacagcatagacctttctttaaatgttccaagtgctaaatttgcaagaaaacaggcactaatttcattgtcatcatctgggaagagttagtgtccaagggaagctcagcgggaagggagggaagtgaggtggggcagggtctggcgctcaggggtctgtggcattgatgatgcttttatccgggggggcccatcctcggtaccagctgcagtagccgcccttctgccggatgcaggcgtagtgtttggactggtagccagggtaaccgaaattggagagcatgtcggtccagagacactcgttcttggaagtcacaaagcaaggcaggtagtagcagg

SEQ ID NO: 1898 - DNA, 464 bp, Homo sapiens
  MAP TO AP000351.2; EXPRESSED IN HBL100, SIGNAL = 6.5; EXPRESSED IN HELA, SIGNAL = 8.6; EXPRESSED IN PLACENTA, SIGNAL = 6.4; EXPRESSED IN BONE MARROW, SIGNAL = 5.6; EXPRESSED IN LUNG, SIGNAL = 3.7; EXPRESSED IN FETAL LIVER, SIGNAL = 5.7; EXPRESSED IN ADULT LIVER, SIGNAL = 4.6; EXPRESSED IN HEART, SIGNAL = 5.3; EXPRESSED IN BRAIN, SIGNAL = 4.3; EXPRESSED IN BT474, SIGNAL = 6.4
agccacctgagcaatagtccagaagataagcagggcgggcagtgaagaagcacagttttgagatggacatttaaagcaccagccatcgcatggagcactgccaagggacccctcaggcccttcctggaggagtcccaccagccaggccttatgaaagtgatcatactaggcaggcattggtgtggggccagtcaccccagccctctctccctcactcgcggcacctgccccctcctctttgtgaacaccagcaggtacctccttgtgcctccgctgatgcaggagcagctgccccaaggggagtaacccctgccagcacaccctgcagctgagggccaggaagtggacaagaatgaaccctttcttccaaatgatcagctcttccagcccctgctgggggccccacgaccccttccttaggttgacgtgcctgggaaagctcacctccccctcttccctaagag

SEQ ID NO: 1899 - DNA, 454 bp, Homo sapiens
  MAP TO AC010684.1; EXPRESSED IN BT474, SIGNAL =  29; EXPRESSED IN FETAL LIVER, SIGNAL = 8.4; EXPRESSED IN ADULT LIVER, SIGNAL = 4.8; EXPRESSED IN HBL100, SIGNAL =  15; EXPRESSED IN HELA, SIGNAL =  11; EXPRESSED IN HEART, SIGNAL = 3.7; EXPRESSED IN PLACENTA, SIGNAL = 9.6; EXPRESSED IN BRAIN, SIGNAL = 4.8; EXPRESSED IN BONE MARROW, SIGNAL =   9; EXPRESSED IN LUNG, SIGNAL =   9
catcgtacgcatttttgtgcaaacttgtcaggaggagcataagaagaagcatccagatgcttaggtcaacttctcagagttttctaagaagtgcttagagaggtggaagaccatgtctgctaaagagaaaggaaaatttgaagatacggcaaaggcggacaaggcccataatgaaagagaaatgaaaatctatatcccttctaaaggggagacaagaaagaagttcaaggatcccaaggcacccaagaggcctccttcagcctttttttctattctgttctgagtattgcccaaaacatcctggcctgtccattggtgatgctgcgaagagactgggagagatgtggaatgacactgctgcaggtgacaagcagccttaggagaagaaggctgcaaagccgaaggaaaaatgcgaaaagggtcttgctgcatatcgagctaaaggaaagcctga

SEQ ID NO: 1900 - DNA, 464 bp, Homo sapiens
  MAP TO AL020996.3; EXPRESSED IN LUNG, SIGNAL =   2; EXPRESSED IN ADULT LIVER, SIGNAL = 1.8; EXPRESSED IN BT474, SIGNAL = 2.8; EXPRESSED IN FETAL LIVER, SIGNAL = 1.6; EXPRESSED IN HBL100, SIGNAL = 1.7; EXPRESSED IN HELA, SIGNAL = 1.8; EXPRESSED IN HEART, SIGNAL = 3.3; EXPRESSED IN PLACENTA, SIGNAL =   4; EXPRESSED IN BONE MARROW, SIGNAL = 1.4; EXPRESSED IN BRAIN, SIGNAL = 1.9
agagggtatcagtttgggggctaagggagggactctgcctggggtcacaggttaatattttgttcttaaccaaaccattcagcccaaaatggctggtagaaaccatctaagaggcactactggctagccaggcttcaggacaaccccagggcccggaacctaagtacctgcaaaccaaggattaccactttctttacccctatcctgcccaagagccaggggaaaggaacagcctgttacgttctggccctggcacaggggctcctacctgcatcagctgccactatctttgcaatctggctgcgcaagtggctcagctcgtcctgcagctcagtagtgcggcttagggctggcagagctggcttcttcagggccagaagcctctcctcggacccacgcaggttgggaacagaggcattgcgctgcatgacaatcagagggctgggtttccaggtgtgcctcag

SEQ ID NO: 1901 - DNA, 453 bp, Homo sapiens
  MAP TO AC007938.1; EXPRESSED IN PLACENTA, SIGNAL = 2.1; EXPRESSED IN BONE MARROW, SIGNAL = 1.6; EXPRESSED IN LUNG, SIGNAL =   1; EXPRESSED IN BRAIN, SIGNAL = 1.6; EXPRESSED IN BT474, SIGNAL = 1.4; EXPRESSED IN FETAL LIVER, SIGNAL = 1.5; EXPRESSED IN HBL100, SIGNAL = 1.3; EXPRESSED IN HELA, SIGNAL = 2.1; EXPRESSED IN HEART, SIGNAL = 1.6; EXPRESSED IN ADULT LIVER, SIGNAL = 5.9
tgggtgtgtccatcagctctgcccaaaccaggctgggagggcagttcccccaggttatagaaggcctttgggctttcctgaatccaggggtgggagtgagcccttccataccacctcacccccaactccatgcaaagaactggattccagaagccacagaagctggaggagccacaccgccatgccctctgtccccccacagtgtccggagccagcagtaacccctgctcggagacttaccacggcaagtttgccaattccgaagtggaggtcaagtccattgtagactttgtgaaggaccatgggaacatcaaggccttcatctccatccacagctactcccagctcctcatgtatccctatggctacaaaacagaaccagtccctgaccaggatgagctggtaggcactgacctcggcttgccccctcgtccccaaggtggcttcggacag

SEQ ID NO: 1902 - DNA, 463 bp, Homo sapiens
  MAP TO AP000346.1; EXPRESSED IN HBL100, SIGNAL = 3.1; EXPRESSED IN HELA, SIGNAL = 3.1; EXPRESSED IN HEART, SIGNAL = 1.5; EXPRESSED IN PLACENTA, SIGNAL = 9.7; EXPRESSED IN BRAIN, SIGNAL = 1.8; EXPRESSED IN BONE MARROW, SIGNAL =   3; EXPRESSED IN LUNG, SIGNAL = 2.9; EXPRESSED IN ADULT LIVER, SIGNAL =   3; EXPRESSED IN BT474, SIGNAL = 3.3; EXPRESSED IN FETAL LIVER, SIGNAL = 2.5
gaaatagacaagaaaaaggcaagctagccatttacatctcactatagcagactctcctgtttgctttttgactgtatttgggaagcaggggcctgactgctttcctacttactaagcacaactcacttttcctaggaaatcctcaacgcaacctgcatggattaaaccagctcctcgctttgtttccaatattcttacaatcaaagtgtccagaatgggcaaggcaacctgaaaaaatgaggacgggtacattatcctatgagccaaactgccgcttacactggttagtcatgaaatcggcaaaattccagatgagctctccaaccacgtattttctgagtttttgatccagacccagatggtactgctctagcagacttttctggtagtcttcactgaacatcagaggtggatcctgggattcaaggcaaagagaatttaagagtcagaactggcagaattg

SEQ ID NO: 1903 - DNA, 451 bp, Homo sapiens
  MAP TO AL049762.19; EXPRESSED IN FETAL LIVER, SIGNAL = 5.1; EXPRESSED IN HBL100, SIGNAL = 3.8; EXPRESSED IN HELA, SIGNAL = 3.4; EXPRESSED IN HEART, SIGNAL = 1.9; EXPRESSED IN PLACENTA, SIGNAL = 5.3; EXPRESSED IN BRAIN, SIGNAL = 1.4; EXPRESSED IN BONE MARROW, SIGNAL = 2.9; EXPRESSED IN LUNG, SIGNAL = 3.9; EXPRESSED IN BT474, SIGNAL = 2.3; EXPRESSED IN ADULT LIVER, SIGNAL = 1.9
cgttgttctcacatcaaatccaagaactgaaaacattatttaaagtttctctcgagtttttaagaacctacaactatttatggagaaaaagcagcccaaggatgatctttttgatagactcaatactggtattctgaataagcatctccaggatctcatggagagcttgacagccaaggtattccatacatacaatgcctccatcacgctacagcagcagctagaagaactcacagccccggatgagaacatcccagcgaagatcctttcttataaccgtgccaatcgagctgttgcaattctttgtaaccatcagagggcaccaccaaaaacttttgagaagtctatgatgaacttgcaaactaagattgatgccaagaaggaacagctagcagatgcccggagaaacctgaaaagtgctaaggctgatgccaaggtcatgaaagatgca

SEQ ID NO: 1904 - DNA, 463 bp, Homo sapiens
  MAP TO AC011457.1; EXPRESSED IN FETAL LIVER, SIGNAL =   1; EXPRESSED IN HELA, SIGNAL = 0.89; EXPRESSED IN HEART, SIGNAL = 0.89; EXPRESSED IN PLACENTA, SIGNAL =   1; EXPRESSED IN BRAIN, SIGNAL = 1.2
ccactaataagcattatagtccctcctcttaatctaaatatagtatagtccttctgtttatggtttctcagcttcttctttaggcattgaagactgttcctttctgggtgaaggagaatcacgtagcaattgggagcaagatgcatccatgtaacccagtactggaggtcaagatggagacaatctccacagccaccatggcctttccctgagtgctactataactcaggaggaaagccacccagatactgcagaacaccaacatgctgaaggtgagacatttggtttcattgaagatgtcaggcgggttactttccaggaagactacagcaaaggtccccagaaccaagaagcccaaatagctcaagacacagtagaaaacagtgatagagcccccattacactggatgatgattataccaggactatgggtctttgtctagggaggaaggagatgtttcca

SEQ ID NO: 1905 - DNA, 449 bp, Homo sapiens
  MAP TO NM_006994.1; EXPRESSED IN PLACENTA, SIGNAL = 1.8; EXPRESSED IN BONE MARROW, SIGNAL = 1.5; EXPRESSED IN LUNG, SIGNAL = 4.5; EXPRESSED IN ADULT LIVER, SIGNAL = 1.9; EXPRESSED IN BT474, SIGNAL = 1.2; EXPRESSED IN HBL100, SIGNAL = 1.7; EXPRESSED IN HELA, SIGNAL = 1.7; EXPRESSED IN HEART, SIGNAL = 0.94
gggaatagccccactgtttctgaccctgggatactgcactagcaaatttagttttcccctcatcatgaccacacttttgtaaacagctcctgaatgaaatatctcttgaattatcaaatctgagcctgacattgattcccattgagaccctccctaatacaggagctatccagaatttaggccaaattatccttccacagcactgggttctaatcttcacgtcgaagtgaagggttatgaggatggagggatccatctggagtgcaggtccaccggctggtacccccaaccccaaatacagtggagcaacgccaagggagagaacatcccagctgtggaagcacctgtggttgcagatggagtgggcctatatgaagtagcagcatctgtgatcatgagaggcggctccggggagggtgtatcctgcatcatcagaaattccctcctcg

SEQ ID NO: 1906 - DNA, 462 bp, Homo sapiens
  MAP TO AP000425.1; EXPRESSED IN BONE MARROW, SIGNAL = 4.4; EXPRESSED IN LUNG, SIGNAL = 4.2; EXPRESSED IN BRAIN, SIGNAL = 2.6; EXPRESSED IN BT474, SIGNAL = 2.2; EXPRESSED IN FETAL LIVER, SIGNAL = 3.3; EXPRESSED IN HEART, SIGNAL =   3; EXPRESSED IN HELA, SIGNAL = 4.9; EXPRESSED IN HBL100, SIGNAL = 2.6; EXPRESSED IN ADULT LIVER, SIGNAL = 8.1; EXPRESSED IN PLACENTA, SIGNAL =   5
ggctcctcttcaaagagattttcctccccatctaattaagaataaatagtaacttctcttagaagcaaaatttattcaaagacctgtgctaacattcttagatatctgctagccgtaataaagaaatcaatgtactttgtattcttagctcccacaatttggcctaaatatttgccctggcatgcttatactggtcccagcaagcattaggtcgtagcctattcctcttccttttttggaggtgtttttacctttctgagcattccacaagttacttcctccttcctttgttctctgcctttgcctcttttgaaaagttctaagttgctagccaattgggacaaatacagaatgtgaggtcctgttccagccagtggaaactggtaacagcagtagggtgaatgtgtcaggttataaatgtccctgtctcctttgttcagtgtattctcgtggcagaagtgc

SEQ ID NO: 1907 - DNA, 460 bp, Homo sapiens
  MAP TO AC006441.13; EXPRESSED IN PLACENTA, SIGNAL = 2.3; EXPRESSED IN HELA, SIGNAL = 2.5; EXPRESSED IN HBL100, SIGNAL =   5; EXPRESSED IN HEART, SIGNAL = 0.86; EXPRESSED IN BONE MARROW, SIGNAL = 1.7; EXPRESSED IN LUNG, SIGNAL = 2.5; EXPRESSED IN BRAIN, SIGNAL = 1.6; EXPRESSED IN ADULT LIVER, SIGNAL = 2.3; EXPRESSED IN BT474, SIGNAL =  47; EXPRESSED IN FETAL LIVER, SIGNAL = 1.2
agtcttcaccgatacccacgatatccagaaaaaagaacaacagtcagagagagtgggggctgatttagcacacaggcccccacagaatacagtcccttcaagaagaaaatgctatgcgtgctggtggtctgggggtacacagagaagaggcatctgggaaccccaagctcttccccaggcccaccctggagggcaggggtagtggaggcactggcctcattcacatctgccaggcttgcgtctgccaggctggcaggaaggggaccaaacagagggcagcagggatgccgcagggcagggcaagagctcacgttactgatctggtcctgggtcttcttgattctctggagctcgggcgtgtctgccactacgctgaaacctttgcccttgttcttctcaaactcctccttgtagcgcacctgcaggaggggaggaagagggattggagtcaggccaggag

SEQ ID NO: 1908 - DNA, 476 bp, Homo sapiens
  MAP TO AB015752.1; EXPRESSED IN BT474, SIGNAL = 3.3; EXPRESSED IN FETAL LIVER, SIGNAL = 7.2; EXPRESSED IN PLACENTA, SIGNAL = 5.7; EXPRESSED IN HBL100, SIGNAL = 4.6; EXPRESSED IN HELA, SIGNAL = 5.5; EXPRESSED IN HEART, SIGNAL = 6.2; EXPRESSED IN BRAIN, SIGNAL = 5.7; EXPRESSED IN BONE MARROW, SIGNAL = 6.4; EXPRESSED IN LUNG, SIGNAL = 3.7; EXPRESSED IN ADULT LIVER, SIGNAL = 4.7
gaatgcctatcagtgccaccacctcctccgcctcctcctcctccaccacctcctcctcctcctctttgtcattgtcatcatcacattaaatgttattcacttaaaaattatttttgagtataaaagtcaaaatgcctttcccattaaaattttccttcttccttttagatggcaaattgctcaagggaggcaacctctctttttgaatgccacagattaacaaaagttaaatagttgctattataatccaatctctgtctccagtgtaaagttggtgaagtctaaatttagaacaaattgttacattaaaggtcaattccacagtgaggacaagggatatattgctttttgctttaaagtggggcatgagctgaagagggatggatttaagaggcatcctgctgccacagtgcttggtgctttaaggacaccagggctgcaggacccagtgagggtggacctcaagaggctgagtg

SEQ ID NO: 1909 - DNA, 470 bp, Homo sapiens
  MAP TO AB020863.1; EXPRESSED IN BRAIN, SIGNAL = 1.2; EXPRESSED IN BONE MARROW, SIGNAL = 1.1; EXPRESSED IN FETAL LIVER, SIGNAL = 1.2; EXPRESSED IN HEART, SIGNAL = 0.94
tagtgcccagccagcatacacgcttcaataattgctgggataacatcctacaaagcaatgatctaattgcttacatgctcatagtcatgaatgaaagatgcaagaaaatgttctttgagagggctcaaattatacactaaattttaaaatgcatgcaaaaaacatttgcatatatatatatatacacacacacacacacagccattttaaatttggatacttagaaggacaaatttcttttctttgagaaacttccctacgtggaacagctcatctaagtcttagatcctcgatgaggctgcttataaggctgtctaagttgtattctgcataactcaagggtgacttgcaacctgtagcccacatcttctggaaccttctggaattctggcacaactggatttacagcatgcctttgcaaatggttatctatctccttagatattatcaccacaatgcaaaatgaatgg

SEQ ID NO: 1910 - DNA, 480 bp, Homo sapiens
  MAP TO AC007078.2; EXPRESSED IN PLACENTA, SIGNAL =   4; EXPRESSED IN HBL100, SIGNAL = 2.1; EXPRESSED IN HEART, SIGNAL = 2.9; EXPRESSED IN BONE MARROW, SIGNAL = 4.8; EXPRESSED IN BRAIN, SIGNAL = 2.3; EXPRESSED IN LUNG, SIGNAL = 2.3; EXPRESSED IN ADULT LIVER, SIGNAL = 3.8; EXPRESSED IN BT474, SIGNAL = 1.4; EXPRESSED IN FETAL LIVER, SIGNAL = 2.5; EXPRESSED IN HELA, SIGNAL = 3.4
tttgctgatggaggaccttgccttgacaatgatagctactgactgatcaaggtggtggttgctgaaggatggggtggctgtggcaatttctaaaataagacaacaatgaagtctgccacatctactgactcttcctttcatgaaagatttctccatagcatgtgatgctgtttgatagcattttacctacagtagaacctctttcaaaattcaagtcaaatttttcaaattctgatgctgctgataaagtttatcaaatattctagaattttgttatcatttcaataatgttcacagcatcttcaccaggaatagattccatttcaataaacttatttctttgctcatccataagaagcaactccttatttgctaaagttttatcatgagactgtagtgattcagtcacatcttcaggctttacttctttttttgtttgttttaattttactttaagttcctggatacatgcgcagaaag

SEQ ID NO: 1911 - DNA, 371 bp, Homo sapiens
  MAP TO AB020870.1; EXPRESSED IN PLACENTA, SIGNAL = 2.4; EXPRESSED IN HELA, SIGNAL = 2.6; EXPRESSED IN HBL100, SIGNAL = 2.3; EXPRESSED IN HEART, SIGNAL = 3.1; EXPRESSED IN LUNG, SIGNAL = 1.5; EXPRESSED IN BONE MARROW, SIGNAL = 2.8; EXPRESSED IN BRAIN, SIGNAL = 2.4; EXPRESSED IN ADULT LIVER, SIGNAL = 2.2; EXPRESSED IN BT474, SIGNAL = 1.4; EXPRESSED IN FETAL LIVER, SIGNAL = 3.7
tccatatgactggggaggactcagaatcatggtcggaggcaaaaggcactccttacatggcagcggcaagagaaaaatgaggaagatgcaaaagtggaaacccctgacaaaccatcatatcttgtgacacttatttattaccatgagaacagtatggggggaaccgcccccatgtttcaaattacctttcaccaggcccctctcacaacacattggaattatgggagtacagttcaagatgagatttgggtgaggacacagagtcaaaccatatcaaagaagatgccatgtaagacttttatagctagagaggagatgtcaatgcctgactttaaagctccaatggacatagtgcagcttgtgactttcaa

SEQ ID NO: 1912 - DNA, 476 bp, Homo sapiens
  MAP TO AC007158.5; EXPRESSED IN ADULT LIVER, SIGNAL = 2.2; EXPRESSED IN PLACENTA, SIGNAL = 2.1; EXPRESSED IN HBL100, SIGNAL = 1.7; EXPRESSED IN HELA, SIGNAL =   2; EXPRESSED IN BONE MARROW, SIGNAL =   2; EXPRESSED IN BT474, SIGNAL = 1.3; EXPRESSED IN FETAL LIVER, SIGNAL = 2.5; EXPRESSED IN HEART, SIGNAL = 2.4; EXPRESSED IN BRAIN, SIGNAL = 2.2; EXPRESSED IN LUNG, SIGNAL = 1.3
tctgagaaaggcaatgaccagaagtcatataacatcaaactttttcctgtaactctcaagagtaaacagaagtggtttacatgtgattcttgttaatgttaagatagtatccagtctcagttggagtggcagtatgaaaagatagagaaatattttcgattacatttaccttccttttcctttgaagattcaaattctctcattctctctcctctctccttttttttctctctctctccctcccttcctcctctcctcactgtctctcactctcccttttctcattccttcctcctacctttacctcactttctctttttctcttctccctatgcttctctttccatcttcctctccaacaccatctccctttctctctctgtctgtctaggagaaagattaaccctagaataaaaacaagagactttaggcgtcataatcatatttgaataccagctctaccgcctcccagctat

SEQ ID NO: 1913 - DNA, 482 bp, Homo sapiens
  MAP TO AC007298.17; EXPRESSED IN BRAIN, SIGNAL = 1.9; EXPRESSED IN BONE MARROW, SIGNAL = 1.9; EXPRESSED IN BT474, SIGNAL = 1.5; EXPRESSED IN FETAL LIVER, SIGNAL = 3.4; EXPRESSED IN ADULT LIVER, SIGNAL = 2.9; EXPRESSED IN HELA, SIGNAL = 1.2; EXPRESSED IN PLACENTA, SIGNAL = 1.7; EXPRESSED IN HBL100, SIGNAL = 1.5; EXPRESSED IN HEART, SIGNAL =   2
gatggaaagtggacaggaggctcacccgtctgcatcccctgctcctgcccctgctcggctacaaaaaccaaagggacagcaggtacctcaataaatatttgtccaatgcatgaatgagtaaaggtgaaggagggggagtggtttgaaagtctattctcatccttccagctgaccacaccccggtagccactcctgcataaagctctcccctcctgtgaccagctgaggacctcaggctgcagcggagccatgcccagatacacggtgcacgtacgtggggaatggctggcagtgccctgccaggacgcgcagctcactgtgggctggctgggccgggaggccgtgaggcgctatatcaagaataagcccgacaatggtggcttcacctccgtggatgacgcgcacttccttgtgcgccggtgcaagggcctgggcctgctggacaacgaggaccggctcgaggtggccctagagaacaacga

SEQ ID NO: 1914 - DNA, 461 bp, Homo sapiens
  MAP TO AB023048.1; EXPRESSED IN HELA, SIGNAL = 4.4; EXPRESSED IN PLACENTA, SIGNAL = 3.4; EXPRESSED IN HBL100, SIGNAL = 3.4; EXPRESSED IN HEART, SIGNAL = 3.7; EXPRESSED IN BONE MARROW, SIGNAL = 3.2; EXPRESSED IN LUNG, SIGNAL = 3.2; EXPRESSED IN BRAIN, SIGNAL = 2.3; EXPRESSED IN ADULT LIVER, SIGNAL = 1.8; EXPRESSED IN BT474, SIGNAL = 7.3; EXPRESSED IN FETAL LIVER, SIGNAL =   3
acaaggattcaagcccaggtgaatgtggctccacagaactggtccttcattgcctagagctgagttgagtgcttccacgtgccagtcagcctccagcactcccccgcctctttcagtggccccaaccccctatccctgccagaccggtgtttttctcggccactgagacaagggctctctttgccctccctgcaacaagccctgcaagctgtcattcccctccccaaagccctgttctcctctgaatcctggggcaccaggtcccagccccactggcacagggatcccacacattggaccatggcattgctcaccttcttgataccgtacattaggctgacaattgctgccaccaaagtgagagtgatcaacacaatggcccagtctgagacagagtccttctggggcttcggacctggggcacaaagacagggccagtgactgaggtaagtggtgcctcc

SEQ ID NO: 1915 - DNA, 481 bp, Homo sapiens
  MAP TO AC006364.3; EXPRESSED IN HELA, SIGNAL = 1.5; EXPRESSED IN BONE MARROW, SIGNAL = 2.2; EXPRESSED IN LUNG, SIGNAL = 1.5; EXPRESSED IN BRAIN, SIGNAL = 1.8; EXPRESSED IN BT474, SIGNAL = 1.5; EXPRESSED IN PLACENTA, SIGNAL = 2.2; EXPRESSED IN HEART, SIGNAL = 2.3; EXPRESSED IN HBL100, SIGNAL = 1.6; EXPRESSED IN ADULT LIVER, SIGNAL = 1.7; EXPRESSED IN FETAL LIVER, SIGNAL = 1.8
tggcataaaagactaaatgctcgttttatatatttgatgtataatacggtttttttaagatagagttttaggtgtcagtagacacattttgatctgtactaaatgtaaatctggataatgaacaaccatgttgtgactggatacaagactattttactttattattttaaactagactttaagtacttaatgataaattataagttgttctttaaataaaatctggataaaactcagtcacatccatagtaacttttttgacttagaatactaatgacaattattgttgcagacatttacctcttcaaaactttgtgaataatttgcaggtgattggaattaagccactgaacaccaccaacaaccaatacagtctggccagtattctctaggggacgtgatctgaaattcagaaagaaaaacaacacatgttgccctaaaacagaaggtaaacattgtaactgcactgcctcacatttca

SEQ ID NO: 1916 - DNA, 483 bp, Homo sapiens
  MAP TO AC006978.2; EXPRESSED IN HELA, SIGNAL = 2.2; EXPRESSED IN LUNG, SIGNAL = 1.5; EXPRESSED IN BRAIN, SIGNAL = 2.2; EXPRESSED IN BT474, SIGNAL = 1.5; EXPRESSED IN ADULT LIVER, SIGNAL = 2.2; EXPRESSED IN PLACENTA, SIGNAL = 2.7; EXPRESSED IN HEART, SIGNAL = 2.6; EXPRESSED IN HBL100, SIGNAL = 1.7; EXPRESSED IN BONE MARROW, SIGNAL = 2.1; EXPRESSED IN FETAL LIVER, SIGNAL = 2.3
ggcagaatatttggattattataaaggttaaaatagaagagtccaaacatctggcatctcatctgtctctaatgtagtccctggttacctttatttctctttggatatagtgattgagaggatcagttcttctgggtgatttttgctggtgtctttattttgtttgtggttattgggaactctcataactaagaaagttgcatttagatgacctgtttgcagttgtagaataatgatttggtatgtaaatctcataatagggccttcatcttctgtcatgcctaacagatctgacttggtggttggagtaatttttctaccaacaaaaaacccaaaaatctcacctgtatttttcctgccaattggtgtattcaccagtctcaggtttaggatcagtccctttttgtttgtggttggtttctaggaggaaacaatgtacaaatactgagttaaaagtagggttgggccactggagatacaaag

SEQ ID NO: 1917 - DNA, 498 bp, Homo sapiens
  MAP TO AB020866.1; EXPRESSED IN HELA, SIGNAL = 1.3; EXPRESSED IN BONE MARROW, SIGNAL = 1.2; EXPRESSED IN LUNG, SIGNAL = 1.6; EXPRESSED IN BRAIN, SIGNAL = 1.2; EXPRESSED IN BT474, SIGNAL = 2.9; EXPRESSED IN PLACENTA, SIGNAL = 2.4; EXPRESSED IN HEART, SIGNAL = 1.1; EXPRESSED IN HBL100, SIGNAL = 1.9; EXPRESSED IN ADULT LIVER, SIGNAL = 1.7; EXPRESSED IN FETAL LIVER, SIGNAL = 1.9
tgacttcaggctgttttctttcttctagaaatccacaagtagcttccacttggaatgaagtaaatagtcatagtaatgcacagtgtgtttctaataatagagatgggcgaacagttaattctaattgtgaaattaacaacagatctgctgccaacataagggctctaaacgtgcctccttctttaggtatgactgactgtatttacatataattttgctgtgttattcttacaaagtgggttttcgttcatgtgtgctctttcctttaaaagttactggttttaattatacatgttttcagcagattgtcgatataatagagaaggggaacaggagattcatgttgcacaaggtgaagatgatgaggaggaggaggaagaagcagaagaggagggagtcagtggagcttcattatctagtcacaggagcagtctggttgatgagcatccagaagatgctgaatttgaacagaagatcaaccgacttatggctgcaaaa

SEQ ID NO: 1918 - DNA, 402 bp, Homo sapiens
  MAP TO AB020873.1; EXPRESSED IN LUNG, SIGNAL = 1.9; EXPRESSED IN BRAIN, SIGNAL = 2.4; EXPRESSED IN FETAL LIVER, SIGNAL = 2.7; EXPRESSED IN ADULT LIVER, SIGNAL = 2.7; EXPRESSED IN PLACENTA, SIGNAL = 3.2; EXPRESSED IN HELA, SIGNAL = 2.4; EXPRESSED IN BONE MARROW, SIGNAL = 2.8; EXPRESSED IN BT474, SIGNAL = 1.5; EXPRESSED IN HBL100, SIGNAL = 1.8; EXPRESSED IN HEART, SIGNAL =   3
ttgtatgagggtgaggggtggagaagcatttttttttctccagatgatcttaaggtgcagtcaggattgagaatactgaattagagattaaggggaggccagtgaacagagtaaaagtgaaacgagaaaatcgtcagggttctgatctcatcaagacttgcaatccatattagtgagttagactttacctggagggcaactggaaccctgtggagtcataagcagaagagcaaagagtcccactcacatttgaaactgccatatagaaaatccattgatcagcaaatagtagcatcattaagaagtcagctgcaaggatgatggtagtacgcatacatacacacactaatatatatgttgcaattggagataaaagtaaggagaaagatttgagaattctga

SEQ ID NO: 1919 - DNA, 416 bp, Homo sapiens
  MAP TO AB026898.1; EXPRESSED IN FETAL LIVER, SIGNAL = 2.3; EXPRESSED IN ADULT LIVER, SIGNAL =   2; EXPRESSED IN PLACENTA, SIGNAL = 3.1; EXPRESSED IN HBL100, SIGNAL = 1.4; EXPRESSED IN HELA, SIGNAL = 2.6; EXPRESSED IN HEART, SIGNAL = 2.4; EXPRESSED IN BRAIN, SIGNAL =   2; EXPRESSED IN BONE MARROW, SIGNAL = 2.2; EXPRESSED IN BT474, SIGNAL = 1.2; EXPRESSED IN LUNG, SIGNAL = 1.5
cttcaaaagtgccccaaatccccactgtaccctgtttaaaatacaattgacccttgaaaaatgaggacattagggttactgaccacctacacagtcaaaaattcatgtataactttggttaccccaaaacttaattactaatagcctactgttgattggaagtcttactgataacataaagtagattaacacatattttgtagttatatgcattatatactgtattcttacaataaagctacagaaaagaaaatttaaaaaatctaaggaagagaaaatatatttactattcattaggtggacgtggatcatcacaaagggcttctcattgtcttcacgttgagtaggctgaggacaaggaggaaaaggagtgtctggttggtcttgctgtctcaggggtggcagaaacagagaaa

SEQ ID NO: 1920 - DNA, 449 bp, Homo sapiens
  MAP TO AC007488.15; EXPRESSED IN BONE MARROW, SIGNAL =   1; EXPRESSED IN ADULT LIVER, SIGNAL =   1; EXPRESSED IN PLACENTA, SIGNAL = 0.97; EXPRESSED IN HEART, SIGNAL = 0.95
gttgcagcgaactgagattgcaccactgcactccatcctgagcaacagagccggatcctgtctgaaaaaaaaaaaaaaaaaaagtctgtgatttaagtgatggatttgtaatgttgtacttggccagtctaaactgtccaagaattctacttcctgtatgtttcctatcagagttagcaacaagggactttagacggtgggaaaaaggcagcagctactttgaagcagcatctgggcctacagttgctctactacctacccttggattcaccagtttttctgactttgggaccatgtatgtgtttagttctgtgacaaagcgccctggcttctgcaggataccctcatcaccaacatcagaggcaacaagaatggacaagagtttcagcctgtccttgtgaggctccagctcatgcttccccatgccagcccacttgtgatcgtcttga

SEQ ID NO: 1921 - DNA, 452 bp, Homo sapiens
  MAP TO AF165147.1; EXPRESSED IN FETAL LIVER, SIGNAL = 1.4; EXPRESSED IN HBL100, SIGNAL = 1.4; EXPRESSED IN HELA, SIGNAL = 4.5; EXPRESSED IN HEART, SIGNAL = 1.5; EXPRESSED IN BONE MARROW, SIGNAL = 2.4; EXPRESSED IN ADULT LIVER, SIGNAL = 1.2; EXPRESSED IN PLACENTA, SIGNAL = 1.3; EXPRESSED IN BRAIN, SIGNAL = 1.7
tggtactcattcatttatgtcgttcatgtttctagttatttattcattcatgacctagccattaaataaataattataaagtctctattataaaccacataatgtttgaggtactggagatgaaaagataaataagacagcatccgtgcctcaagttctttacagtctagaacaggatttctcaacttcaccattattgacactgggggccaggcaattctttgttacagaacttttcctgtgcattgtagaacatttaacatcacccctggcctcttcccactagatgccagtagcaccccctcaccaccttctccccagggttgtgacaaggaaaatgtctccagacattgcccagatgtccatgggggacagaatcactttcagatgaggactgctggtctagaaggaagagacagacattacaaaatacaatgaacgacaggcacaat

SEQ ID NO: 1922 - DNA, 482 bp, Homo sapiens
  MAP TO AC010000.1; EXPRESSED IN BONE MARROW, SIGNAL = 1.4; EXPRESSED IN BRAIN, SIGNAL = 1.4; EXPRESSED IN BT474, SIGNAL = 1.3; EXPRESSED IN FETAL LIVER, SIGNAL = 1.3; EXPRESSED IN HBL100, SIGNAL = 0.92; EXPRESSED IN HELA, SIGNAL = 1.4; EXPRESSED IN HEART, SIGNAL = 2.4; EXPRESSED IN ADULT LIVER, SIGNAL = 1.4; EXPRESSED IN PLACENTA, SIGNAL =   1
cattcaaagccatcctgagccacatgtggcccatggactgcaggttggacaaacttggtctaggctttttctacagcctttcaggagtacctgaaactcacactagaaaaggattagccatttatcattgtaagtctcacattaccattacctcttatccttacctctatctcctaaagcttattttgattttgcacacaattatatagcttgtttctgcttcaaaaactgcagtataacatatatcaaaaagttttttaaattctacatatggacaaaagtccaacagatgtgtggagatctgcttcactctccataattttacctgtaacatccattagcacgccaccagcttcagtaacaataatgccagctcctgcaacatcccagcagtgaattcccatttcataatatgcatctgctccgccagttgccacaaggcacatattaacagctgctgttccaacactccggatcctaac

SEQ ID NO: 1923 - DNA, 450 bp, Homo sapiens
  MAP TO AC010134.1; EXPRESSED IN BT474, SIGNAL = 1.3; EXPRESSED IN FETAL LIVER, SIGNAL = 0.98; EXPRESSED IN ADULT LIVER, SIGNAL = 0.94; EXPRESSED IN HELA, SIGNAL = 0.96; EXPRESSED IN HEART, SIGNAL = 0.89; EXPRESSED IN LUNG, SIGNAL = 0.98; EXPRESSED IN BONE MARROW, SIGNAL = 1.2; EXPRESSED IN PLACENTA, SIGNAL =   1; EXPRESSED IN BRAIN, SIGNAL = 1.3
tcttcatccaggtctgaggctggcccagcccccagcacagccctacccctatctggacacaagggtttgaaaacagtctcctccctccctgcatcaggagccaaggagccatccaggaaggaaacctggagcttgttcacagcagttgaaccttgaggcacttcagaggggcagagactggcaacaggttttgtggttttcagcccaagttcagcagtgggatgacagccacagcagcagactcacccactcctcctcgtgccagtccacctgcagggaagatcggctgtttctccctgtccaccgggccatgagggtgtcctggtcatttctaagcatcacctgctcctcctcagtcgaagtgggagaggccttggaggcaatgtagtcaggccgtgcagcgttcagcccatggatggagttggccaggagcttgcagtcgcagaccgt

SEQ ID NO: 1924 - DNA, 458 bp, Homo sapiens
  MAP TO AF191069.1; EXPRESSED IN PLACENTA, SIGNAL =   1; EXPRESSED IN BONE MARROW, SIGNAL = 0.9; EXPRESSED IN BRAIN, SIGNAL = 1.2; EXPRESSED IN ADULT LIVER, SIGNAL = 1.1; EXPRESSED IN FETAL LIVER, SIGNAL = 0.99; EXPRESSED IN HELA, SIGNAL =   1; EXPRESSED IN HEART, SIGNAL = 1.1
tcccactgactgacttaggttgggaaacacatttttcttttcaggatttctttagctgtgtagctgggctggaaggctgcggttggctgaaggccgactcctgtgattgacggaaaggaaacagccattgaaagaggaggagcaagaaaattggcactagttgcctacttaaagctaaaaattagaaaaataaattaataagaactttcaaaatgtgtacatgatctttttttattgactagaaaacttcattttttgaaactttgtgcagtttgtttttcgtaacagttttctgatctcagtgacctcttctttctctgcagtcgactttgtggaaagcctgatccggttcccacaggagcttatgcagcagtggcatttgcagtaggtggtgacggtatttctaaaaatttctgtctgtgctggaaaataagacatcggcactgacatttccaatt

SEQ ID NO: 1925 - DNA, 496 bp, Homo sapiens
  MAP TO AC011502.1; EXPRESSED IN BT474, SIGNAL = 5.5; EXPRESSED IN FETAL LIVER, SIGNAL = 1.3; EXPRESSED IN PLACENTA, SIGNAL = 4.6; EXPRESSED IN HBL100, SIGNAL = 1.6; EXPRESSED IN HELA, SIGNAL = 1.3; EXPRESSED IN HEART, SIGNAL = 1.8; EXPRESSED IN BRAIN, SIGNAL = 2.1; EXPRESSED IN BONE MARROW, SIGNAL = 2.9; EXPRESSED IN LUNG, SIGNAL = 1.9; EXPRESSED IN ADULT LIVER, SIGNAL = 1.4
tgcttcttgaggttatctactggaacatctgcagagtactgtttaaagaatacagtcatgcagggttgtactaagtcaagcagctgaccacaacctcccccttctccctatctcctttactcaataaatatgaagggctatagaagctcagggcccttgttcactagaagcaaagagccccctggtgccgtcttccaaatatactcttttgtctgcctttattcctgcattcatcctcctttgtccaggccaataaagtccacagcaaaatgaaacctatagtgtatactaggaattgcgtattaaagttattctcacccaggaagaccaggtttctgtagttctctaacatcacattcctatataaattctgctgtgcagtgtccaggcattgccactcctccagagagaattgtatggccacatcccgaaatgtcaacgatccctggaaaacacacacaaacacacatatttaccaagtggtcatgggcagaat

SEQ ID NO: 1926 - DNA, 424 bp, Homo sapiens
  MAP TO AC009497.2; EXPRESSED IN BT474, SIGNAL = 2.6; EXPRESSED IN ADULT LIVER, SIGNAL = 2.9; EXPRESSED IN PLACENTA, SIGNAL = 1.4; EXPRESSED IN BONE MARROW, SIGNAL = 1.8; EXPRESSED IN LUNG, SIGNAL = 0.88; EXPRESSED IN FETAL LIVER, SIGNAL = 1.1; EXPRESSED IN HELA, SIGNAL = 1.1; EXPRESSED IN HEART, SIGNAL = 1.1; EXPRESSED IN BRAIN, SIGNAL = 1.1
caggtccttcttggatttggtgattttgataccatactataaggtctcactaatattaaattcttggtgatatgaagtcgtaaaatgatgacagaaggggttagtgtcataaactctctggaagtcatggcaaactgagaaaagagttcaaccccaaatgcagcccactcacatcgctctgcagttcgtaggccttcttggcctgaatcacatcgttctggtcgggcatgcaggtccactggtgcaggtaattgcggtaatccatgtcactgaccagagcctgggaatttttagagtgcaggatggaaagcatgtccacagggctctggatcttggccttccatttggcccagtccagccggtactctcgttcattctggagcttgtcagctatgagggcccagcggatcttgttgtcatccct

SEQ ID NO: 1927 - DNA, 485 bp, Homo sapiens
  MAP TO AC009612.2; EXPRESSED IN PLACENTA, SIGNAL =  13; EXPRESSED IN HBL100, SIGNAL = 9.5; EXPRESSED IN HEART, SIGNAL = 8.1; EXPRESSED IN BONE MARROW, SIGNAL =   3; EXPRESSED IN BRAIN, SIGNAL = 2.5; EXPRESSED IN LUNG, SIGNAL = 7.5; EXPRESSED IN ADULT LIVER, SIGNAL = 3.9; EXPRESSED IN BT474, SIGNAL =  10; EXPRESSED IN FETAL LIVER, SIGNAL = 2.1; EXPRESSED IN HELA, SIGNAL =   7
cacttcatttttgtcccaaattctaaaattgtctgtagtcttcttagaaatttcctgaaaaaggcaactgtctaatcttatctggtggatgcttctccgaaggacttgatttcctgggaatacgaccagcccccaacgaccccttgtccccactccggctgtcccttggcctgggtcctagggaaggaagccatgctggggcaccaggactacaagactgccatgctgtcggacatcaaagccctcattctcaagcacgaggccttcgagagctacctggctgcggcacaccagcaccgcgtggagcagatcgcagcctttgcccaggagctcaacgagctggattactatgactcccacaatgtccacacccggtgccagaagatctgggaccagtgggacgccctcggctctctgaccaacagtcgcagggaagccctggagaaaacagagaagcagctggaggccatagaccatctgcacct

SEQ ID NO: 1928 - DNA, 477 bp, Homo sapiens
  MAP TO AF165423.1; EXPRESSED IN HELA, SIGNAL =   3; EXPRESSED IN PLACENTA, SIGNAL = 3.4; EXPRESSED IN HBL100, SIGNAL = 1.7; EXPRESSED IN HEART, SIGNAL = 2.4; EXPRESSED IN BONE MARROW, SIGNAL = 2.2; EXPRESSED IN BRAIN, SIGNAL = 2.4; EXPRESSED IN LUNG, SIGNAL = 2.8; EXPRESSED IN ADULT LIVER, SIGNAL = 3.1; EXPRESSED IN BT474, SIGNAL = 2.1; EXPRESSED IN FETAL LIVER, SIGNAL = 1.8
tcctactacattcctttctgctgaaataatgaaaatcatgatcaacaaaaactgagggaactcagaggccggtgccggtgcaggtccttgctgtgctgagtgccggtcccctggacccactgttgtttctctatacattgtctctgtgtcttcttttctccgtctctcatcccacccgactagaaatacccacaagtgtggaggggcaggccaacccttcaatttggtgacacatagcctgtgccctcaaagaacactgacacccccgtaacatccattcgaagagcttctccatacctcccctcctttatccccaaggacactgggtcagagatcacggagtcattcacaacatgatgtttaacaccgagacgctctgcaattgctccttcaaaacgactcagaagaagatccagtgctgagacaatcgtgttctctctctggatcactgcccagagacaaggactgccagagacc

SEQ ID NO: 1929 - DNA, 458 bp, Homo sapiens
  MAP TO AC010102.1; EXPRESSED IN LUNG, SIGNAL = 1.2; EXPRESSED IN BRAIN, SIGNAL = 1.1; EXPRESSED IN BT474, SIGNAL = 1.6; EXPRESSED IN ADULT LIVER, SIGNAL = 1.5; EXPRESSED IN PLACENTA, SIGNAL = 1.4; EXPRESSED IN HBL100, SIGNAL = 1.6; EXPRESSED IN BONE MARROW, SIGNAL = 1.3; EXPRESSED IN FETAL LIVER, SIGNAL = 1.1; EXPRESSED IN HELA, SIGNAL = 1.5; EXPRESSED IN HEART, SIGNAL = 1.1
ttccacgtgacactaccttccaggaagcagccattacaggactgcaatacattcttaaatgtggttatgtcatacatcatcttaatgagcatttctctctgtacttatttatttttgctaatgacttattacttgctgtttatttttttctttattttagactatggaaatgatgttagacaaaaagcaaatttgagcaatattcttattcgagttcaaaatggattgtaaagcagtggagacaactcgcaacatcaatggcccaggaactgctaatgaacataccgtgcagtgggggttcaagaagttttgcaaaagagaggagagccttgaagatgaggagcgtagcggccagtcgtcggaagttgacaaccaccaactgagagcaatcacggaagctggtcctcttacaactacaccagaagctgctgaagaactcaacgtccacctttctacgg

SEQ ID NO: 1930 - DNA, 453 bp, Homo sapiens
  MAP TO AC010152.1; EXPRESSED IN HELA, SIGNAL = 2.6; EXPRESSED IN PLACENTA, SIGNAL = 4.5; EXPRESSED IN HBL100, SIGNAL = 2.6; EXPRESSED IN HEART, SIGNAL =  10; EXPRESSED IN BONE MARROW, SIGNAL = 3.6; EXPRESSED IN LUNG, SIGNAL = 2.1; EXPRESSED IN BRAIN, SIGNAL = 3.3; EXPRESSED IN ADULT LIVER, SIGNAL = 3.9; EXPRESSED IN BT474, SIGNAL = 1.9; EXPRESSED IN FETAL LIVER, SIGNAL = 2.5
cagctggcttgaatttctcctcagaaaatgggtttttattttctatcttattgtgaggctgcaaattttctaaacgtttatgctctgcttctcttttaaacataagtttcaattccaaaccatatgtttgtgaatacataaaatttatgattttaacagcatccaagtcacctcttgaactctttgtttcttagaaatttcttccaccagatactctaaatcatgtctctcaagttcaaagttctgcagatttctagggaaggggcaaaatgccaccaacctctgtgctaaaacatagcaagagtcacctttactacagttcccaacaacttcttcacctccatctgagaccacctcatcctggacttcattgtccatatcattatcagcattttggtcaaagccattcaacaagtctctaggaagtttcaaaccttcccacatctgcctgta

SEQ ID NO: 1931 - DNA, 464 bp, Homo sapiens
  MAP TO AL031728.12; EXPRESSED IN HEART, SIGNAL = 1.1; EXPRESSED IN LUNG, SIGNAL = 1.1; EXPRESSED IN BRAIN, SIGNAL = 1.3; EXPRESSED IN BONE MARROW, SIGNAL = 1.2; EXPRESSED IN FETAL LIVER, SIGNAL = 1.1; EXPRESSED IN BT474, SIGNAL = 1.3; EXPRESSED IN ADULT LIVER, SIGNAL = 1.1
gagctttgctgtccatttttcatctgtaaaatggggaagtagttgctggatctgaacagtggtttgcaaacagattttttttcattccatagagtcctttatttaaaaaactaaacacagcaacccaaaatacaaaagagatgtaagtggagctgccacttaggcactcaatgagctcatatcctgaccctgaacccagctccctcaggggttctaaggaatggagtttgaaaaatcactcaactgtctctgagaactggtggctctaagctgagatcagggtcgggtggaagcaggaaaccatggcatgggccaggatgctgctcacccactggaggcagcacatgggggctgtgggacacgcagggttccctgctgctggcctgctggctgccaccattccagctggacaacagtatccccaggaggcggctgagaagcagggagaagaacaccaggcttgg

SEQ ID NO: 1932 - DNA, 473 bp, Homo sapiens
  MAP TO AL033527.25; EXPRESSED IN HEART, SIGNAL = 1.3; EXPRESSED IN LUNG, SIGNAL = 0.89; EXPRESSED IN BRAIN, SIGNAL = 1.4; EXPRESSED IN BT474, SIGNAL = 0.99; EXPRESSED IN FETAL LIVER, SIGNAL = 1.4; EXPRESSED IN ADULT LIVER, SIGNAL = 0.97; EXPRESSED IN PLACENTA, SIGNAL = 0.95; EXPRESSED IN HBL100, SIGNAL = 1.3; EXPRESSED IN BONE MARROW, SIGNAL = 1.4; EXPRESSED IN HELA, SIGNAL = 1.1
gagcctcatctcattgcctcagcccacagaggtgtacacatggggaaactgagtctcagtgacctgtccaagtccccacagccaggatggcagggcagggacttgaagtcaggattgtcactggggctcttcccacagtgcaggggcctcgggccaagcatccttcccatctttgaggctctctttcagcccaccacgactccctgctgggctgccttgaccatgagactgtgaggtggggggttaggtggggcacccgggccaaggggaaggcacctgttggactgctcctggaccacctggaacatgctgacgtggagggtcctgttgagcaggtggatgctgggcaccttgtaaatccggaactccgcagctgtgaccgcctccccagccgggatctgggtcaggtcaaagcggaactccttccaatggggctcctggtggcccagggcacggtctcgctccactagaag

SEQ ID NO: 1933 - DNA, 444 bp, Homo sapiens
  MAP TO AL034384.1; EXPRESSED IN FETAL LIVER, SIGNAL = 9.6; EXPRESSED IN ADULT LIVER, SIGNAL = 7.6; EXPRESSED IN HELA, SIGNAL =  25; EXPRESSED IN BONE MARROW, SIGNAL =  16; EXPRESSED IN LUNG, SIGNAL =  19; EXPRESSED IN BRAIN, SIGNAL =  15; EXPRESSED IN BT474, SIGNAL =  35; EXPRESSED IN PLACENTA, SIGNAL =  32; EXPRESSED IN HEART, SIGNAL =  19; EXPRESSED IN HBL100, SIGNAL =  28
cttgccacagcagtccttcaccccacagtgttccctgatccgaagcctcactcccaccagtaatcttctaagccagcaacagcagcagcagcagcagcagcagcaagcaaatgtgatctttaagcccataagcagcaactcatccaaaaccctgagcatgatcatgcagcaggggatggcaagctccagcccaggagccacggagccatttacttttggcaacaccaagcccttgtcccattttgtttctgagccgggtccccagaagatgccctccatgcctaccacctctaggcagccttccctgctccactacctgcagcagccgacaccaacgcaggcctcctcagccactgcctcctccacggccactgccaccttgcagctgcagcagcagcagcagcaacagcagcagcagcctgaccattcttcattccttctgca

SEQ ID NO: 1934 - DNA, 457 bp, Homo sapiens
  MAP TO AL096699.11; EXPRESSED IN FETAL LIVER, SIGNAL = 5.3; EXPRESSED IN ADULT LIVER, SIGNAL = 3.7; EXPRESSED IN PLACENTA, SIGNAL = 4.4; EXPRESSED IN HELA, SIGNAL = 4.6; EXPRESSED IN BRAIN, SIGNAL = 4.3; EXPRESSED IN BONE MARROW, SIGNAL = 4.2; EXPRESSED IN BT474, SIGNAL = 2.5; EXPRESSED IN HEART, SIGNAL = 5.1; EXPRESSED IN HBL100, SIGNAL = 3.6; EXPRESSED IN LUNG, SIGNAL =   3
ttgatactctccccctccactataaccactttcacgctccgctaatgttaatgtttcaacaactgaattatatgtatcccatagaacactggaaaatattcttaattagttcattccaatggaacgttagatcaatgtggtcaatgtacataacatgttgtaaagtaggacatgatctggaaccatactggggaaaaatatgtcatcagagtctaaatcaccacttttacaagttatttaatgtctcagtaatcttcttacctatgactatggatgagagcattcaaagccaggccatcagaccagctggtggtgaagttgattacattaacctgtggataattacgagttgattgtcggacccagctcaggagaatcttttcactgttggtttgttgcaatccagccatgatatttttcattacatttttgacctacatgtggaaataaattttca

SEQ ID NO: 1935 - DNA, 482 bp, Homo sapiens
  MAP TO AL034548.24; EXPRESSED IN HEART, SIGNAL =   3; EXPRESSED IN LUNG, SIGNAL = 1.4; EXPRESSED IN BRAIN, SIGNAL = 2.1; EXPRESSED IN FETAL LIVER, SIGNAL = 3.2; EXPRESSED IN ADULT LIVER, SIGNAL = 2.1; EXPRESSED IN PLACENTA, SIGNAL = 2.7; EXPRESSED IN HELA, SIGNAL = 2.1; EXPRESSED IN BONE MARROW, SIGNAL = 2.4; EXPRESSED IN BT474, SIGNAL = 1.3; EXPRESSED IN HBL100, SIGNAL = 1.7
gggagaaaggtgtctgtagccaaacctgcctgtctggcttcttctaggttgcctagcaatggatgccaaccctctcccccatccttgggggtttcttagcaacccagtttctcaccctctgctgttttcagggtttccttttaactaaatgtcaagttttgctctttctcctccagaaaacctgaggccaagggtctctgtgtagagctggatacaacccagaatacacagagacctgggtttgaggtcagtggaggatttgctgtgtgacttggaggtctttgacctctctggctttcatttcagactgtgattccctgtcatatgctcctcagagttcttcttcttttcttcttcttcttctttcctcttcttcttcttcttcttcttcttcttcttcttcttcttcttcttcttcttcttcttcttcttctcttcttctttcttcttcttcttctttcttttcttcttcttcctcttcc

SEQ ID NO: 1936 - DNA, 458 bp, Homo sapiens
  MAP TO AL035414.18; EXPRESSED IN HBL100, SIGNAL = 3.3; EXPRESSED IN HELA, SIGNAL = 8.3; EXPRESSED IN HEART, SIGNAL = 5.3; EXPRESSED IN LUNG, SIGNAL = 4.6; EXPRESSED IN BRAIN, SIGNAL =   5; EXPRESSED IN BT474, SIGNAL =   3; EXPRESSED IN ADULT LIVER, SIGNAL = 5.5; EXPRESSED IN PLACENTA, SIGNAL = 5.9; EXPRESSED IN BONE MARROW, SIGNAL = 5.5; EXPRESSED IN FETAL LIVER, SIGNAL = 5.2
ccacccttcccagctaatttagcagatttaaatcagtttatttttaattttaaaggttaaacaaagtgttactttagccttaatttttttttgaaacgttgatttagcctttgtattccttttttgctttagagttaataaggggtggctatttctgaaggtgtttatgatatttcagtttatgtgagtattcaagcccattatttcagacattttgttttttaaatgtagatctttccatgatatataaatatgcattaaaatactgtcttctctttttactcggcccccattccacttacagaaacagaaagtgaaaatgaatttcgccccttggatgaaaggatagatgaatttcaccccaaagcaacaagaactctctttattggcaaccttgaagaacgcactacttaccatgaccttcgcaacatcttccagcgctttggagaaattgtggt

SEQ ID NO: 1937 - DNA, 454 bp, Homo sapiens
  MAP TO AL033378.6; EXPRESSED IN BONE MARROW, SIGNAL = 1.1; EXPRESSED IN LUNG, SIGNAL = 2.3; EXPRESSED IN FETAL LIVER, SIGNAL =   1; EXPRESSED IN ADULT LIVER, SIGNAL = 1.4; EXPRESSED IN PLACENTA, SIGNAL = 2.1; EXPRESSED IN HEART, SIGNAL = 1.2; EXPRESSED IN HELA, SIGNAL = 1.1; EXPRESSED IN BRAIN, SIGNAL = 1.4; EXPRESSED IN BT474, SIGNAL = 1.5
ctggcagagaaaagctctggaacaggaataattagtatccgttttcttcaagcggatttgcttccggacactctgaaactcctccagggacaccagaaggtggtgcctgcgacggtggttgtcatagaagcaaacaccatccgtacttaccccgtggcttagggacccgagacccttcttcatctccccctcggtgagggagcgggacactttctgggccttttcttcttctgggtaggagaagaatgtccccatcttcttggggggcttaatcaggccccggctctctcctttgctgaaggttttgaccaacttccggccagccccccaggtgtccaggctgctggaggatggagacgtggtgagagagtctgagtcatcttcgggaggtttctcaggagagccatcaaagaaaaggggcttcttgtgcacgccagagtagagggcggaccgt

SEQ ID NO: 1938 - DNA, 466 bp, Homo sapiens
  MAP TO AL080246.13; EXPRESSED IN BT474, SIGNAL = 1.9; EXPRESSED IN FETAL LIVER, SIGNAL = 2.8; EXPRESSED IN ADULT LIVER, SIGNAL = 2.8; EXPRESSED IN HBL100, SIGNAL =   2; EXPRESSED IN HELA, SIGNAL =   3; EXPRESSED IN PLACENTA, SIGNAL = 3.2; EXPRESSED IN HEART, SIGNAL = 3.8; EXPRESSED IN BRAIN, SIGNAL = 2.6; EXPRESSED IN BONE MARROW, SIGNAL = 3.2; EXPRESSED IN LUNG, SIGNAL =   2
ctggccaacaacattgacaggctgtactcatagccagcgttggcaggagcgccccacgtgctaagcgttttgcatggatcatttcacttaattctcctaactgcctccatcacggccggtcctattatttcccccatttcctagaaccgaggttctgagagctgaagtgatgtacaaaagttccttgctccacgaatggtggccactatcattgttgaaccctgtaagagaaacggagtgagttgagttattcacgcaattgctttttttggcacctgctcctggttctctccttcccttaatggaactgactgtctccattgtggatggagaagtttggaagacagaatccaacgtgggtctcgtgatcgcagcggggtgagcagggggcagactgaacctctgcagtatgatgaccaaatgaagtgctgtggtgttcagggcaggggtgacggggtagtaggaa

SEQ ID NO: 1939 - DNA, 464 bp, Homo sapiens
  MAP TO AL034485.5; EXPRESSED IN BONE MARROW, SIGNAL = 1.1; EXPRESSED IN BRAIN, SIGNAL = 1.2; EXPRESSED IN FETAL LIVER, SIGNAL =   1; EXPRESSED IN ADULT LIVER, SIGNAL = 1.1; EXPRESSED IN PLACENTA, SIGNAL =   1; EXPRESSED IN HEART, SIGNAL = 0.84; EXPRESSED IN HELA, SIGNAL = 0.92; EXPRESSED IN HBL100, SIGNAL =   1; EXPRESSED IN BT474, SIGNAL = 1.1
ttttgtctgagggaggcaactggggccacttaggccggcaggtgcccactgtgattggttgacatgataccaagcaacaggatcatccagtcaccttcaatgcagggaggatggctgacaggctccctgggtgacacttcatgcaatcagatgtcgagttggactgtgacatagagccatgtggccacactaaattcccccccacccttcccctgtccacaaccgtcattgtctgttcttgccatccagtggccactgcctccaccatggctgaggctttctctaagacaacctctgaggaagaccagagcatccaggagcccaaagaggccaactccatgacggcccagaagcagaagaagtgagggcttcgaggctcccgtaggcgccatgccaacagcggcggagatatcttcggggacagctttgccgcctatttcccccgggtgctgaagcaggttcac

SEQ ID NO: 1940 - DNA, 476 bp, Homo sapiens
  MAP TO AL035079.14; EXPRESSED IN BT474, SIGNAL = 2.3; EXPRESSED IN HBL100, SIGNAL =   2; EXPRESSED IN HELA, SIGNAL = 1.9; EXPRESSED IN BONE MARROW, SIGNAL = 3.1; EXPRESSED IN LUNG, SIGNAL = 1.5; EXPRESSED IN ADULT LIVER, SIGNAL = 2.8; EXPRESSED IN FETAL LIVER, SIGNAL = 4.6; EXPRESSED IN PLACENTA, SIGNAL = 2.6; EXPRESSED IN HEART, SIGNAL = 2.1; EXPRESSED IN BRAIN, SIGNAL = 3.1
agctagacctgctcctccagggccacagcagaactgcaaagagaaacagaagactccaactcttggctttcgcacttccaagggtctaagtcttggtgatttcacagtgagttaaggaattgtccattttggtgaagtgtcttcaaaacctaactcccaagctggatgttactgtactctagccagtgtgaaagatctttctccctgcttttaactactggatacaagtaacatctgaggtggaaatgctcaataaaatatataaaatagataaaaagcatggagagtcctcaggcagcctaaatcttcactgctgggcaaaaaagcgcccagttagcagcacctggggagcacctttaccaagcaggaggtcctgcggggccagcttgagagccactggcctggcctcccgcccatctgctccacgtgccctctgcccacgcagggggagcccaacgtctttaggcctaccctga

SEQ ID NO: 1941 - DNA, 452 bp, Homo sapiens
  MAP TO AL035427.17; EXPRESSED IN PLACENTA, SIGNAL = 1.4; EXPRESSED IN BONE MARROW, SIGNAL =   1; EXPRESSED IN BRAIN, SIGNAL = 1.5; EXPRESSED IN FETAL LIVER, SIGNAL = 1.1; EXPRESSED IN HBL100, SIGNAL = 1.1; EXPRESSED IN HELA, SIGNAL = 1.1; EXPRESSED IN HEART, SIGNAL =   1; EXPRESSED IN LUNG, SIGNAL = 1.9; EXPRESSED IN ADULT LIVER, SIGNAL = 1.1
tttagatcccaggcaccatctgaggcaagccctccttcatatattgttctggcctccgctgaagaaaatgcctgttctttgcctgtggcaacagcttgccgcccttctaggaacactcgctcatgctcacagcctatccctgagtgtcgttttgattctgacccctgcatccagaccatagatgagattagacgtcaaatcaggatcagggaggtaaatgggattaagccatttgcttgtccttgcaaaatggaatgctatatggattctgaggaatttgaaaaacttgttagcttacttaagtcaactactgatcctcttattcataaaatagcacggattgcaatgggtgtccataatgttcacccatttgcccaagagtttattaacgaagtaggtgtagtgacacttattgaaagcttgctcagttttccttcccctgaaatgagaaa

SEQ ID NO: 1942 - DNA, 366 bp, Homo sapiens
  MAP TO AL096818.2; EXPRESSED IN PLACENTA, SIGNAL =  15; EXPRESSED IN HBL100, SIGNAL = 8.7; EXPRESSED IN HELA, SIGNAL =  11; EXPRESSED IN HEART, SIGNAL =  10; EXPRESSED IN BONE MARROW, SIGNAL =  13; EXPRESSED IN LUNG, SIGNAL =  13; EXPRESSED IN BRAIN, SIGNAL = 9.3; EXPRESSED IN ADULT LIVER, SIGNAL =  11; EXPRESSED IN BT474, SIGNAL = 8.5; EXPRESSED IN FETAL LIVER, SIGNAL =  10
gggctttccagagagatgtgtttagaaaagaagttgctgtctgaactggtccttctgggagagcttgttatgtgaaagagcaggtatctgaggaagcctcagtttacccatgaaactgacctctaggtctctctcactctgagagaggtgaactggcttctgttctatgagtgcccctaagttcccaagtcaatttgattaggaaaggagaggattgggaaatggaaatctctgtaaagcagtggattcattccttgatcaaaggcatggtggttggcagcaagcataaaaatatgaatgtgtatgttgacagaggaggcacccggctactacttgtcaatgtagtgaggcaggggatggataaag

SEQ ID NO: 1943 - DNA, 442 bp, Homo sapiens
  MAP TO AL035588.21; EXPRESSED IN BT474, SIGNAL = 1.2; EXPRESSED IN FETAL LIVER, SIGNAL = 1.4; EXPRESSED IN HBL100, SIGNAL = 1.4; EXPRESSED IN PLACENTA, SIGNAL = 1.9; EXPRESSED IN HELA, SIGNAL = 1.3; EXPRESSED IN HEART, SIGNAL =   2; EXPRESSED IN BRAIN, SIGNAL = 1.7; EXPRESSED IN BONE MARROW, SIGNAL = 1.6; EXPRESSED IN LUNG, SIGNAL = 2.8; EXPRESSED IN ADULT LIVER, SIGNAL = 1.5
ttcatgaagtaacgctcccctcgtccttaatagatgcaatgcattctaataatttctattctagtctagtctagacaagtcaatttcaattaaaaaaatagaaagctggtcaagactcactacggtggcttcacaacccactaatgagttacgacttgtagtctgaaaaaacactggtctagactctagagctaccctatgctttcttccagcggaaacactttgggtcttgggtgccgtagggcaggggcaagtgctgtgatagaggcccaggggaggggtcctggtggctggtgcccataggtgtgttccccagccttctgtctgctcccctgcaggagctggagatgcaggctcgagtgcacggcctccctaccacctccccgtccggcatgaacatggctgagctggcccagcaggtggtgaagcaggagctgcctag

SEQ ID NO: 1944 - DNA, 387 bp, Homo sapiens
  MAP TO AP000344.1; EXPRESSED IN BRAIN, SIGNAL = 1.4; EXPRESSED IN BT474, SIGNAL = 1.2; EXPRESSED IN FETAL LIVER, SIGNAL = 1.5; EXPRESSED IN ADULT LIVER, SIGNAL = 1.3; EXPRESSED IN HBL100, SIGNAL = 1.1; EXPRESSED IN HELA, SIGNAL = 1.5; EXPRESSED IN HEART, SIGNAL =   2; EXPRESSED IN LUNG, SIGNAL =   1; EXPRESSED IN BONE MARROW, SIGNAL = 1.5; EXPRESSED IN PLACENTA, SIGNAL = 1.8
gagctgtgaaccctgtcctgaggagcactgggacattctagtgagcgttcaggccacccagattgcagccttgtaaatgaagggtttatttctctaatgagagtggtttgtgtcttcacccaaataatattttaatattaaattatgacaaatattttaaatttaaaagtagatatacataaattagtatgatttttaaaataatttcagtaattgtttaaaaaagtaattttaatacatgtcaataatttattttagactcaaggggtacacgcacaggtttgttgcatgggtatgttgcacgatgctgaggtttggggtacggatcccgtcacccaggtagtgagcatagtttttcaactcatgcccatccctcattcccttctt

SEQ ID NO: 1945 - DNA, 994 bp, Homo sapiens
  MAP TO AL078605.18; EXPRESSED IN ADULT LIVER, SIGNAL = 1.7; EXPRESSED IN BT474, SIGNAL = 3.2; EXPRESSED IN FETAL LIVER, SIGNAL = 0.89; EXPRESSED IN PLACENTA, SIGNAL = 3.2; EXPRESSED IN HBL100, SIGNAL =   2; EXPRESSED IN HELA, SIGNAL = 1.7; EXPRESSED IN HEART, SIGNAL = 1.3; EXPRESSED IN BRAIN, SIGNAL = 1.6; EXPRESSED IN BONE MARROW, SIGNAL = 1.3; EXPRESSED IN LUNG, SIGNAL = 2.4
aacccacaatgttctctttctctcttgtattcttatagcacttttctataatattcatgtgacagtatccaacattggttgtgagtttccacacatataacgtcacacttcctaacgagacttagagactcctgttgtgcatcctctcagtggccaaacactgaggcagtaatggatcttcactaacaaatccatcagcggatatattttcaatcatggcatattggctgggcagatacacatacctttaagatttcagtgtctgaaaccatggttacttgttgctttacttcaggccccacatttgtggggtcttcttgtttaatttcagggtttgtacacatgagagcttctagcttaaattcaaaatctgttgctacaggtaatttttgattgatttcagcgtgtgtacacatggagtcttcttgcttggatataggatctgtacatatgggaacttcctgtttggattcatggcctgtacacataatttcttgcctagattcagggtctgtccgtattaaaacttcttgcctggattcagggcctgtatacatgggaacttcttgcctggattcagggcctgtatacatgggaacttcttgcctgggttcagagcctgtatacatgggaacttcttgcctgggttcagagtctgtatacatgggaacttcttgcctgggttcagagtctgtatacatgggaacttcttgcctggcttcagggcctgtacacatgggaacttcttgcctgggttcagggtctgaacacatgggaacttctcgcctggattcagggcctgtacacgtgggaacttcttgcctgggttcagggtctgaacacatgggaacttcttgcctgggttcagaatctgtatacacgggaacttctcgcctggattcagggcctgtacacatgggaacttcttgcctggattcagcatctgaacacatgggaacttcttccctggattcggcgtctgaactcgtggata

SEQ ID NO: 1946 - DNA, 455 bp, Homo sapiens
  MAP TO AP000352.2; EXPRESSED IN BONE MARROW, SIGNAL = 6.2; EXPRESSED IN LUNG, SIGNAL = 6.1; EXPRESSED IN BT474, SIGNAL = 6.8; EXPRESSED IN ADULT LIVER, SIGNAL = 3.7; EXPRESSED IN FETAL LIVER, SIGNAL = 7.9; EXPRESSED IN HELA, SIGNAL = 9.8; EXPRESSED IN PLACENTA, SIGNAL = 9.7; EXPRESSED IN HBL100, SIGNAL = 8.5; EXPRESSED IN HEART, SIGNAL = 8.4; EXPRESSED IN BRAIN, SIGNAL =   6
tgggtccagcatccactcagcaagggcattgatccagccgtgctgatcacttcaccaaggcgcctccgttactggtggtagaccactgcatggacagggcctaaaaccagggtgactttctttcccttcttctcaactgtaggaaaaaacgaggagtcattggagagtacagaaggcttccgggctgcagagcaaggtgtccagaagcctgctgcagaaaccccagcctctgcttgcatccctggcaagccctcagcatccacacccaccctgtgggatgggaagaagagaggggacctcccaggggagccagtggccttcccccaggggctgccggctggtgctgaggagcagcggcagtttctcacagagcagtgcatcgcctccttccgcctgtgcctgagccgcttcccccagcactataagagtctctaccgtctggccttcctctacac

SEQ ID NO: 1947 - DNA, 465 bp, Homo sapiens
  MAP TO AP000356.1; EXPRESSED IN HELA, SIGNAL = 5.3; EXPRESSED IN PLACENTA, SIGNAL = 5.1; EXPRESSED IN HBL100, SIGNAL = 2.9; EXPRESSED IN HEART, SIGNAL = 4.3; EXPRESSED IN BONE MARROW, SIGNAL = 4.9; EXPRESSED IN BRAIN, SIGNAL = 3.9; EXPRESSED IN LUNG, SIGNAL = 3.5; EXPRESSED IN ADULT LIVER, SIGNAL = 4.3; EXPRESSED IN BT474, SIGNAL = 2.3; EXPRESSED IN FETAL LIVER, SIGNAL = 3.6
ttaacaagcatgctgccttcaagcatttgtttaacaaagcacatcctgcacagccctgaatccattaaaccttgagtcgacacagtacttgtttctgtgagcacagggttggggatagggttacagattaacagcatctcaaggcaaaagaatttttcttactacagaacaaaatggagcctcttacgtctacttctttctacatagacacagtaacagtctgatatctctttcttttccccacagggaccttcctggctgtgcctcggatcaggaccagaatgacacccattcatttccctgggcctttgctccggtggtccctgcaccctggcctctgcctgacgaggatggtggggagaggaggggggacatcccccacgctgctgtctccactgtggcctctgagcttccaggactgcagcgggtgggtgggtggcctggcctaagcccaggaatgcactt

SEQ ID NO: 1948 - DNA, 981 bp, Homo sapiens
  MAP TO AL035660.11; EXPRESSED IN HELA, SIGNAL =   1; EXPRESSED IN PLACENTA, SIGNAL = 1.1; EXPRESSED IN HBL100, SIGNAL = 1.4; EXPRESSED IN HEART, SIGNAL = 0.92; EXPRESSED IN BRAIN, SIGNAL = 1.6; EXPRESSED IN BONE MARROW, SIGNAL = 1.4; EXPRESSED IN BT474, SIGNAL = 1.5; EXPRESSED IN FETAL LIVER, SIGNAL = 0.92; EXPRESSED IN ADULT LIVER, SIGNAL = 1.1
gccctgtgctttctcttcagtttggctataaatactgctttgggatacatctttctgcacaccattttctccatagtggagtcgtctttcttctgtacttgaagattggtatgatattttatttgcctttcggccatgctgttgatcttgattgagattttttgtctggtgttgattcttgttatatactaggagctcatcttgggtagaaaaaatgtctttggatccatgttggagtttgtcttggtgcgcaggacagagtgaggtttgtactttacttgaatgttcctctctcacttcaaccacattttggtaatgccctttattttgatgagaatttttagtctcacgttgttgtttgttagctactagctcttcagtttggagaacataactgctttgggatccgccttgttttctacctttttgtgcaccagagacggaagtttgttctttacttagtccatgaacccacagcctttcttctgtgtttgaatattgactggatattccctttccagatgggctattcccctgatcttgagaaggattttgtgtcccacgatgagctttgcctcctttatggtgtataactaccctgtgaaaatgaccttttgatttatcatggtctctgccttcttgtttattatggagcagttgttgacttccacctagatgtcgttgtgattttgtcgtcttatgtagggcattcaaatcatattgctgactttttcgggactggtcatgatcattggcatctacatgatatgtgtattgaatagaaaaactgcctttggattcagtttgttgcttgcctttttgtccagaatagtgctggcccttttgtccgtgtggaaattgggaaaattcacttggtaatcggccttttgatccacctggtaattgataataagaaggtatgcattcattatctccaaagctcccttacaactcttaccccccacttttcccccaacaaat

SEQ ID NO: 1949 - DNA, 460 bp, Homo sapiens
  MAP TO AP000346.1; EXPRESSED IN BT474, SIGNAL = 3.7; EXPRESSED IN FETAL LIVER, SIGNAL = 8.4; EXPRESSED IN HELA, SIGNAL =  11; EXPRESSED IN PLACENTA, SIGNAL = 4.5; EXPRESSED IN HBL100, SIGNAL = 3.3; EXPRESSED IN HEART, SIGNAL = 4.7; EXPRESSED IN BONE MARROW, SIGNAL = 5.5; EXPRESSED IN LUNG, SIGNAL = 3.9; EXPRESSED IN BRAIN, SIGNAL = 5.1; EXPRESSED IN ADULT LIVER, SIGNAL = 6.7
aaaccacagcagggagtgagggcactggtctcacaaggccctcagcctgaggctttgagaaagacattgaggtaccgtgacccccaaacctgacacatccagttctggccccgaccccagtgcaaaccaggagaaagaccgccaagacaacatcctgttgcacaagagggccccggcccacacagggtggggaggctcagcccccagccctgctcccttttctattgaaagcatcaggacttgaacccagggctgacttcacagccacagctggagactgtcccacccccaggctggctatcaatgagcaggtcagcatctgccctctgtccacgtctagaaagggccaggtggagctggtgttctcaggccacaagccccagctgccccagaggtcattcattcattcactcactcactcattcacctgacagctgttggtgaatacctcaatgtccca

SEQ ID NO: 1950 - DNA, 593 bp, Homo sapiens
  MAP TO AL079339.11; EXPRESSED IN HEART, SIGNAL = 2.2; EXPRESSED IN LUNG, SIGNAL = 0.9; EXPRESSED IN BRAIN, SIGNAL = 1.6; EXPRESSED IN BT474, SIGNAL = 1.3; EXPRESSED IN ADULT LIVER, SIGNAL = 1.3; EXPRESSED IN PLACENTA, SIGNAL = 1.6; EXPRESSED IN HBL100, SIGNAL = 1.2; EXPRESSED IN BONE MARROW, SIGNAL = 1.5; EXPRESSED IN FETAL LIVER, SIGNAL = 1.3; EXPRESSED IN HELA, SIGNAL = 1.1
acagcaatgactacagccccattcattgagcactcggcactcatcatctcattaagccttgtcctgcaatgccagaggctttggaatcagagctggagttttggaatcagacagagctggagttcaaggaagagctctgacacttatgagctagcaaccttgaacgcatcatttaacctttaggggctcaaaaacagccattgtttattcatctcacaaatatgcagtctgggcaaggcttggcaggaacagcttatgtctgactttatgtggtgtcagctagggtggcttgcagaaaagctagcaaccaaaatccccgaaggctcactcactcacagatgatgccgatgccaataccaatgacgatggtgatgcagatcatgatgcagatggtgatgcacgtgctgatgcaggtgctgatgctgaggcaggtgctgatgcagataatgatgcagatgctgatgcaggtgctggtgctgatgctgaggcagatatgatgcagatgctggtgcaaatgctgaagcaggtgttgatgcagatactaatctgacgcagctgctgatgttaaagcaggtgttgatgctgatgcaggt

SEQ ID NO: 1951 - DNA, 475 bp, Homo sapiens
  MAP TO AP000354.1; EXPRESSED IN HELA, SIGNAL = 1.8; EXPRESSED IN LUNG, SIGNAL =   1; EXPRESSED IN BRAIN, SIGNAL = 1.3; EXPRESSED IN BT474, SIGNAL = 1.8; EXPRESSED IN ADULT LIVER, SIGNAL = 1.3; EXPRESSED IN PLACENTA, SIGNAL = 1.4; EXPRESSED IN HEART, SIGNAL = 1.4; EXPRESSED IN HBL100, SIGNAL = 1.2; EXPRESSED IN BONE MARROW, SIGNAL = 1.4; EXPRESSED IN FETAL LIVER, SIGNAL = 1.2
ccctgggagagcagtaaagcattgtgaacagtttcaggtaagtaaatattgtttcaagcctgggaaggttttatgaaaaggtcatgtgagccaagtctggcagtcctgtgacccctagacaggtgtttttatctgcctgtctccctcactgtcaccaccacaaattgctgttcttctggcagctggtccacgatgatgatgatgatgatgattataccattttttaaaaaagagatgagatattattcttattattactattaccatttttttttaaatagatgagatctatgttgcccaggctggtctcctgggttcagtggatcctcctgcctcagcctctcgagtagctggactagaggtgtgcgtatgcatgcacaactggaaacatgatctgttcattccaggcagggccctgatagatcatggcttaattattttaagaaggaactcaggaacagccgatgaggaactt

SEQ ID NO: 1952 - DNA, 493 bp, Homo sapiens
  MAP TO AP000471.1; EXPRESSED IN FETAL LIVER, SIGNAL = 3.4; EXPRESSED IN ADULT LIVER, SIGNAL = 1.9; EXPRESSED IN PLACENTA, SIGNAL = 3.1; EXPRESSED IN HELA, SIGNAL = 2.6; EXPRESSED IN BRAIN, SIGNAL = 2.6; EXPRESSED IN BONE MARROW, SIGNAL = 2.9; EXPRESSED IN BT474, SIGNAL = 1.7; EXPRESSED IN HEART, SIGNAL = 2.4; EXPRESSED IN HBL100, SIGNAL = 2.1; EXPRESSED IN LUNG, SIGNAL = 1.8
ttctgtaaactgccaagggctaggaaagctattctgccaatcagccgtatggttttctttaccaggcataattagcagtcctcattgttagaccccttggatatagatattgatgaaggcagtgtttgtggagagccatctgttggccaggtgtggcagagtagactgggtcagccctcgggcctcatggtccccaccagtctgttgactttgtggttctgttatttttttctcacttacctttgcctttactacttatctacatttttgcgcagcttgctcacttccgacagagaaaaacaaaaggtgacagttcgcattcggagaaaaagacggcgaagaggaagggctcggctgtcgatgcgtctgtccaggaggagagtccggtaaccaaggaggacagcgcactctgtggaggaggggacatttgcaaaagcacatcatgtgacgacacccctgatggggcaggaggggcctttgcagctcaggtaga

SEQ ID NO: 1953 - DNA, 484 bp, Homo sapiens
  MAP TO AP000510.1; EXPRESSED IN FETAL LIVER, SIGNAL = 3.4; EXPRESSED IN ADULT LIVER, SIGNAL = 2.1; EXPRESSED IN HELA, SIGNAL = 2.1; EXPRESSED IN BONE MARROW, SIGNAL = 1.7; EXPRESSED IN LUNG, SIGNAL = 1.3; EXPRESSED IN BRAIN, SIGNAL = 1.6; EXPRESSED IN BT474, SIGNAL = 1.3; EXPRESSED IN PLACENTA, SIGNAL = 2.1; EXPRESSED IN HEART, SIGNAL = 2.1; EXPRESSED IN HBL100, SIGNAL = 1.4
cttgggcctctgtacctcagctctccatgcccaccgcttatcctcagttggcctcgttcccctgatgccctgaatattcccagaccaaatactcaccacaatgaagcccaatccaacaaagagcacaacagtgactgtggttgcagccagggatatgaggataattcccatgggtgtcaggagcctggtgggtttcactgctgtgactgaagtagttcacagaaggtgagtgtcaccatgtttagtggtttcatcttctgtggtccctgggtctgcagtgacggagtcctcggtggtccctgggtctgcagtgatggagtgtttggtggtccctgggtctgcagtgacagagtcctcagtggtccctgggtctacagtgatggagtgtttggtggtccctgggtctgcagtgacggagtcctctgtggtccttgggtctgcagtgatggagtccttggtggtccctgggtctgcagtgacaaag

SEQ ID NO: 1954 - DNA, 481 bp, Homo sapiens
  MAP TO AP000513.1; EXPRESSED IN HEART, SIGNAL = 0.94; EXPRESSED IN LUNG, SIGNAL = 5.7; EXPRESSED IN BRAIN, SIGNAL = 2.5; EXPRESSED IN FETAL LIVER, SIGNAL = 1.7; EXPRESSED IN ADULT LIVER, SIGNAL = 1.5; EXPRESSED IN PLACENTA, SIGNAL = 2.6; EXPRESSED IN HELA, SIGNAL = 2.7; EXPRESSED IN BONE MARROW, SIGNAL = 1.9; EXPRESSED IN BT474, SIGNAL = 1.9; EXPRESSED IN HBL100, SIGNAL = 3.3
tctgtgatattttcctgatctgcaaactgagggtaataattgacccttagcatagtgattgtaaagattgaagttgatgtgcacaaaggttctgttcagcaatctgcacataggaagttgaatgaatggatgaatgaatgaatgccagcagctctaaagattattgttattcctagtctttgcctcttccccatctttccttggctttagttcttgctcaaaactctcctccatttttttcttgttttggttccccaggcacctgggagtcccatccagagaccacggagctggtggttttgcagggcagggtggggccagcaggtgacgaggaggaggaggaagaggaagagctgagcagctcctgtgaggaggagggagaggaggaccgggatgcggatgaggagggagaaggggatgaggagaccccaacctcggctccagggtccagcctggctggccgaaacccttatgccctgct

SEQ ID NO: 1955 - DNA, 989 bp, Homo sapiens
  MAP TO AL008639.10; EXPRESSED IN HBL100, SIGNAL = 3.5; EXPRESSED IN HELA, SIGNAL = 4.4; EXPRESSED IN HEART, SIGNAL = 2.3; EXPRESSED IN LUNG, SIGNAL = 6.1; EXPRESSED IN BRAIN, SIGNAL = 3.7; EXPRESSED IN BT474, SIGNAL = 5.4; EXPRESSED IN FETAL LIVER, SIGNAL = 2.2; EXPRESSED IN ADULT LIVER, SIGNAL =   3; EXPRESSED IN PLACENTA, SIGNAL =   5; EXPRESSED IN BONE MARROW, SIGNAL = 3.1
agaaagggttcaaggcaagcttgggttggtgtcgaagaatgatgagaaggtatgacctgtctctgaggcataaagtgcccgtgccccagcacctgccggaagacctgactgagaaactcgtcacttaccagcgcagtgtcctggctctgcgcagggcgcatgactatgaggtagctcagatggggaatgcagatgagacgcccatttgtttagaggtgccatcacgggtaactgttgataaccagggcgaaaagcctgtcttggtcaagacaccaggcagggaaaaactgaaaatcacagcaatgcttggtgtcttggctgatgggaggaagttaccaccgtacatcattttgaggggaacatatatccccccggggaagtttcccagtgggatggaaattcgctgccaccggtatgggtggatgactgaagacttgatgcaggactggttggaagtggtgtggagacggaggacaggagcagtgcccaagcagcgagggatgctgatcttgaatggcttccggggccatgccacagattccgtgaagaactccatggaaagcatgaacactgacatggtgatcatcccagggggtctgacctcacagcttcaggtgctggatgtcgtggtctacaagccactgaatgacagtgtgcgggcccagtactccaactggcttctggctgggaacctggcgctgagcccaaccgggaatgctaagaagccacccctgggcctctttctggagtgggtcatggtcgcgtggaatagcatctcaagtgagtccatcgtccaagggttcaagaagtgccatatctccagcaacttggaggaggaagacgatgtcctgtgggaaatcgagagtgagttgccaggaggaggagaaccaccaaaagattgtgacaccgaaagcatggctgagagcaactgaagggaaagggaaaggtaaccactcaggagtagatactcagtgcctttgctgacatgt

SEQ ID NO: 1956 - DNA, 445 bp, Homo sapiens
  MAP TO AB020873.1; EXPRESSED IN LUNG, SIGNAL =  12; EXPRESSED IN FETAL LIVER, SIGNAL = 7.6; EXPRESSED IN ADULT LIVER, SIGNAL = 7.3; EXPRESSED IN PLACENTA, SIGNAL = 8.9; EXPRESSED IN HBL100, SIGNAL =  22; EXPRESSED IN HELA, SIGNAL =  13; EXPRESSED IN HEART, SIGNAL =  22; EXPRESSED IN BRAIN, SIGNAL =  12; EXPRESSED IN BONE MARROW, SIGNAL =  15; EXPRESSED IN BT474, SIGNAL =  22
ccttttctggagaaggaattagtgtgttttcagttgcacacaggatagttgtattatgttatgtggcatatggccctgttattgtttttatttgaagatgaagtatggtttagggagatgtgtatctgcactaagctggcaaagggtgaacatgtgaaagttaatattatgtgtctttttaaaaattttattatttttttttttgagacagggtctcactctgctgcccatgctggagtgcagcattgccatcacaggttgctgcagccttaaccacctgggctcaagtgattctcccacctcagcctcccagatgggactgcaggtgtgcaccaccatgcccagctaattatttctttttcttctccttctccttcctcttcctctccttctcctcctcctcttcctctccttccccttctcgtctctttcctcctcctcctcc

SEQ ID NO: 1957 - DNA, 487 bp, Homo sapiens
  MAP TO AC007721.7; EXPRESSED IN HBL100, SIGNAL = 2.4; EXPRESSED IN LUNG, SIGNAL = 4.6; EXPRESSED IN BRAIN, SIGNAL = 3.6; EXPRESSED IN FETAL LIVER, SIGNAL =  12; EXPRESSED IN ADULT LIVER, SIGNAL = 3.9; EXPRESSED IN PLACENTA, SIGNAL = 4.4; EXPRESSED IN HEART, SIGNAL =   5; EXPRESSED IN HELA, SIGNAL = 4.3; EXPRESSED IN BONE MARROW, SIGNAL =   5; EXPRESSED IN BT474, SIGNAL = 2.3
ccctccacaaagacaggaactcgtgtgtgctcaccgatgtttcccacacccctgaacggcgcccagaacacgataggttttcaacaatatgtggtgaaaagaactgcatggcccacggctgtgaagattcgccatgatttgcactcagacataaccgaagcaggctgtgagcccgtttccatgtcctaccaatcccacatttggatgtctcctaactccatctgcctctaatttcaccattccacctggtccaggtgttcaccgaactgagctgagacagccggcatcctttccgccctgcgaggttctgcctgctgctgctgctgctgcactgggtccctgggccccagccgggtcaacagctcttcccactcccgggagctctgtggggttcccttcctctggggcggctccgtcaggctggtctctggcatcctcatttctgcgcccttgggttgagggtggcgctgattcctccctgccctta

SEQ ID NO: 1958 - DNA, 448 bp, Homo sapiens
  MAP TO AC004852.2; EXPRESSED IN BT474, SIGNAL = 1.1; EXPRESSED IN FETAL LIVER, SIGNAL =   1; EXPRESSED IN ADULT LIVER, SIGNAL = 0.97; EXPRESSED IN HELA, SIGNAL = 1.3; EXPRESSED IN PLACENTA, SIGNAL = 1.1; EXPRESSED IN HEART, SIGNAL = 1.5; EXPRESSED IN BRAIN, SIGNAL = 1.3; EXPRESSED IN BONE MARROW, SIGNAL = 1.3
tgcagcttgatttcataggctgctgtttgttagaaaataaaatgattttggggttgtttttcactaaaaggaaaaccttaccgaggactcccctaccctcactatcagcctaaatgatttctccttaactcataaaaaattgtggaccacagtttatttattcactcattgcaaatttattcatttctttattcaaagtagtattcatttatttattcatttagtcattcatttcattattcatttcttgattcacagtagtattcatgatggaatattactccatgataaaaaaaagaatgaattaatggtatttgcagcaacctggatggaactggaggctattattctaaatgaagtaactcaggaatggaaaaccaaatattgcgtgctctaacttgtaagtgggagctaagctatgaggaggcagaggtgtaagaatgataca

SEQ ID NO: 1959 - DNA, 446 bp, Homo sapiens
  MAP TO AC006205.7; EXPRESSED IN FETAL LIVER, SIGNAL = 2.5; EXPRESSED IN HBL100, SIGNAL = 1.9; EXPRESSED IN HELA, SIGNAL = 1.8; EXPRESSED IN HEART, SIGNAL = 1.9; EXPRESSED IN LUNG, SIGNAL = 2.7; EXPRESSED IN BONE MARROW, SIGNAL = 4.2; EXPRESSED IN ADULT LIVER, SIGNAL = 1.4; EXPRESSED IN BT474, SIGNAL = 1.5; EXPRESSED IN PLACENTA, SIGNAL = 1.9; EXPRESSED IN BRAIN, SIGNAL =   2
gtgggaaaacctgagcctgagagcagagagccattaacacagcagtggggctttgtgcaagcctcgctgaggccaggctcttgcagatcctctccttgctctcggagctacaggccttccccctttgtttggcaagggatctgtttcttgccccaaagccccagaggagagagaagggccacctggggagtccctggagctggggttcctccatcctccctcacctgggtcccaggctgcattcagagaggattccttgaggccctggcagccaggaaccctgttttatgtgccccgaaggctgtaatgaaaacattgatgaccacagtgaagaagaccaagatggtggctgcgttgttgagctggttgagtcgccactgcttttctacctcattcaggttcagccgtgctgcagggaagtggagtggggggaaagggtcagagac

SEQ ID NO: 1960 - DNA, 476 bp, Homo sapiens
  MAP TO AC008000.7; EXPRESSED IN FETAL LIVER, SIGNAL = 1.2; EXPRESSED IN PLACENTA, SIGNAL = 1.1; EXPRESSED IN HELA, SIGNAL = 1.9; EXPRESSED IN HEART, SIGNAL = 1.2; EXPRESSED IN BRAIN, SIGNAL = 1.2; EXPRESSED IN BONE MARROW, SIGNAL = 1.1
ccagcttcagtagatccccccattctttggtacagatcattgatgttttcacagcttctagatgagtcctggtcaccaccttccactcagatccccagcccccacacccacttccctgcccatgtgggaagtctggagccctgagtggagaagtttagtaaagaattcccacagtggagagaagagtgggaactcagcctgacttggagaaaaggcaggtgataggtttaaatcagtggaaacttgtgtccacacgtgtgttgaattacaggaacacagcctctgtgtgcccgttctgtgccatgtccacatgggtgcacataagcgaatggacattgcgtccacatgcttgcaaagaaaccacccagcgctgcactatgcacattcaaatccacaatctagtgccacatccacagttgtgtgccacatctgtgggtgcatgtgcacgtctagatgtcaggtctgctatgagcaca

SEQ ID NO: 1961 - DNA, 472 bp, Homo sapiens
  MAP TO AC006466.3; EXPRESSED IN HEART, SIGNAL = 0.9; EXPRESSED IN PLACENTA, SIGNAL = 1.1; EXPRESSED IN BONE MARROW, SIGNAL = 1.2; EXPRESSED IN BRAIN, SIGNAL = 1.5; EXPRESSED IN FETAL LIVER, SIGNAL = 1.2
ccgtctttgtcctgtgtgtgcagttttgcctccatgggcagctttgactcagaatcatgggatgctgcaattttcaactctttgatccaggaatattgactctcttagatccttgggatgtttgaacctgagcatgccagagccaacgggccctaggattctcccttgctcctgttcctgttgggctcacgcccctcaccctggcgcttctccctgcaggtggaatgtaaggccgtcatggttttcttccactactgtgttgtgtccaactacttctggctgttcatcgagggcctgtacctcttcactctgctggtggagaccttcttccctgaaaggagatacttctactggtacaccatcattggctggggtaggttcctggctgtggcttggacaggttcaggtcccgtggtcaggtgtgtccaggtgtgtctttggttccatcttcaggaagtgtcaggtgaggagg

SEQ ID NO: 1962 - DNA, 493 bp, Homo sapiens
  MAP TO AC005003.2; EXPRESSED IN PLACENTA, SIGNAL = 2.4; EXPRESSED IN BRAIN, SIGNAL = 2.4; EXPRESSED IN BT474, SIGNAL = 7.1; EXPRESSED IN FETAL LIVER, SIGNAL = 1.9; EXPRESSED IN ADULT LIVER, SIGNAL = 1.6; EXPRESSED IN HBL100, SIGNAL =   4; EXPRESSED IN HELA, SIGNAL = 2.9; EXPRESSED IN HEART, SIGNAL =   3; EXPRESSED IN LUNG, SIGNAL = 2.1; EXPRESSED IN BONE MARROW, SIGNAL = 3.1
atcacttccctccgcattcacagcatttcccagcagtccccagatggttgtttccgtggggacacagcagctgcctcatttcccttcaggccccatgggctgctggtcaacctcaggatctactaaagatgacgcaaatgccgactgaacaatctgaaacccaaaggactcgaggagagacatgttctgctgaggagagaaaggtgagccaagggcagggcccaggtcccccagggggcccccgagagcccggacatgcaccttctggatgtgtttgttcaagtaggacttagagcggaagaagctcccacattcagggcatgggtacttcttctccccatcagactccattttgtttttggggactgccatgtcgcaggagaaagagccattggcactctgcttctctggcgtcttcaggtcgctggcatctgagaggtcaccataggagtcagagctctcaatcggatcctgatgtgagcatttctggcct

SEQ ID NO: 1963 - DNA, 490 bp, Homo sapiens
  MAP TO AC006445.10; EXPRESSED IN HELA, SIGNAL =   1; EXPRESSED IN PLACENTA, SIGNAL =   1; EXPRESSED IN HBL100, SIGNAL = 0.97; EXPRESSED IN HEART, SIGNAL =   1; EXPRESSED IN BRAIN, SIGNAL = 1.2; EXPRESSED IN BONE MARROW, SIGNAL = 1.1; EXPRESSED IN FETAL LIVER, SIGNAL =  54; EXPRESSED IN ADULT LIVER, SIGNAL = 1.1
agttccctaaactcaggccctcattctccccaaggaataaggagactcataggttggcttggagataaaaggagataacgtagttaaagccctttggagtgggtgcatggcacagagcaagctcttaaaagatgatcaggcacacaaggctggatggaacccgcctttctagaccctgctcagcctcttcttcccttccttcctatctgcagaagagggagatgatctttccaaaactccctactgtgaatagtaaatggcttttttttttttttttttgtctccagtggagaccggggcagcagcctgaaagggaaggcttttaatcctggcttcatttaccacgtgccactccttggtgacagtgcagatcctagtgtgcaggtagctctggcgggcctcacaggcaaggcggaggacccagggccgttcctcctacctggggtgacaggaaggagggtacaaggcccagcaaggcacatcagttgct

SEQ ID NO: 1964 - DNA, 500 bp, Homo sapiens
  MAP TO AC006977.3; EXPRESSED IN ADULT LIVER, SIGNAL = 2.1; EXPRESSED IN BT474, SIGNAL = 1.5; EXPRESSED IN FETAL LIVER, SIGNAL = 2.3; EXPRESSED IN PLACENTA, SIGNAL = 2.7; EXPRESSED IN HELA, SIGNAL = 2.2; EXPRESSED IN HBL100, SIGNAL = 1.6; EXPRESSED IN HEART, SIGNAL = 2.6; EXPRESSED IN LUNG, SIGNAL = 1.6; EXPRESSED IN BONE MARROW, SIGNAL = 2.3; EXPRESSED IN BRAIN, SIGNAL = 2.3
gctggggagtccaagagcttggtgctagcatctgatgagtgtcttcttgcttcatcataacatgggagagggcatcacgtgtgaagagagcttactcttataacatagccactcccacaagaattaacccaccgccatgagagccatgtgaattcattcatgaggacagcgggttaagtttccaatatatggacttttcggggacacattcaaaccacagcagttagttgtaacgttcgtgtcatgtctcattctggttctgatgcttgtgcagtctcttcaaactgcgtctttgccttttagtgtgccttgcaatgtggaaatgatatactgggtaagaggagctgtagtaaagaggcttctagtgacgtagtgacaagctgtggggagagggagtgttgcacagtcctgccgcatgtcacagtcttccagtgagcctgtgtccctggactgtgaacttcatgcttgcttctcagcttccccagccccttagatggtac

SEQ ID NO: 1965 - DNA, 467 bp, Homo sapiens
  MAP TO AC009406.1; EXPRESSED IN HEART, SIGNAL = 0.86; EXPRESSED IN BRAIN, SIGNAL = 0.92; EXPRESSED IN BONE MARROW, SIGNAL = 0.97; EXPRESSED IN FETAL LIVER, SIGNAL = 2.1
taccttccatcaggtcccacctccaacactgggaatcacattttaacatgagatttggaggggacaaatgtccaaaccatttcactcctattcttaaaataaaaacaacgaaaaactagactagctacacattcataattttcttgaacactccatagatttgagtttataggtcaaccaaataactaaaaatttaacaaaaacaagtttcttctggaaaaatgagattcaggcacttgcttacctgaggaagatgctattgcacactggtaagattagtctggataaattgtttaatggaatgctaaagcctgagtatgggatagcagagaatgtagaactcctggtgggtgcagtctgagagaagacttttctctcactcacaggattttttccatagaactcaatagcctcaccaaaaagattgttgagcatcctaaaatgtctcccttgtggtgctattctgg

SEQ ID NO: 1966 - DNA, 469 bp, Homo sapiens
  MAP TO AC009413.1; EXPRESSED IN HELA, SIGNAL = 1.5; EXPRESSED IN LUNG, SIGNAL = 0.94; EXPRESSED IN BRAIN, SIGNAL = 2.3; EXPRESSED IN BT474, SIGNAL = 1.2; EXPRESSED IN ADULT LIVER, SIGNAL = 1.4; EXPRESSED IN PLACENTA, SIGNAL = 1.5; EXPRESSED IN HEART, SIGNAL = 1.8; EXPRESSED IN HBL100, SIGNAL = 1.4; EXPRESSED IN BONE MARROW, SIGNAL = 2.1; EXPRESSED IN FETAL LIVER, SIGNAL = 2.1
ccaaagctggcctttaagtgtcttggaggggaagttggtggcagggaagctggctggggggctggctccatggtccaaatgatagtccaggggtctagtgtgtaagagtgaggcactgagaatgaagaggaagagaaaaatggtgagaatcagctcagaggagactgtgggattttaatgactttctggtcatggggaatatccaagagcagggagggaagagctccaattgggtcatgagccacagtaactcagctgtgggggctccatgaccatgggcttcccaggacctgtggctgcagggtgggcccatggtgggggtggtctgaaaggagcagctcttggaggcccttgggcccatgatccttgttggctgtgtctccactctcggggagggctgtggtgagtacaggctgcagcagaaagtgacagggatgattaaagggatggaaaatcaggcccatgaaga

SEQ ID NO: 1967 - DNA, 438 bp, Homo sapiens
  MAP TO AC009421.1; EXPRESSED IN LUNG, SIGNAL = 3.1; EXPRESSED IN FETAL LIVER, SIGNAL =   3; EXPRESSED IN ADULT LIVER, SIGNAL = 4.8; EXPRESSED IN PLACENTA, SIGNAL = 6.6; EXPRESSED IN HELA, SIGNAL = 4.8; EXPRESSED IN BRAIN, SIGNAL = 3.7; EXPRESSED IN BONE MARROW, SIGNAL = 4.3; EXPRESSED IN BT474, SIGNAL = 1.9; EXPRESSED IN HEART, SIGNAL = 5.2; EXPRESSED IN HBL100, SIGNAL = 2.7
  unsure 94
gatgggtgcaccaaaatctcacaaatcaccactaaataacttattcatgtaaccaaataccaccttgtgatgattaagtgttgactgagtgtcnaacttgattggattgaaggatgcaaagtattgatgctgagtgtgtctgtgagggtgttgccaaaggagattaacatttgagtcagtgggctgggaaaggtgaaccaaacttaatctcggtgggtgccatctaatcagttgccagtgtggctagaatataaagcaggcagaaaaatgtgaaaagaataaactggcctagcctcccagcttacatttttctcccatgctggatgcttcctgcccttgaacatcggactctgagttcttcagttttgggacttggataggctctccttgctcctcagcttgcagctggcctactgtgggacattgcgagtgtgtgag

SEQ ID NO: 1968 - DNA, 478 bp, Homo sapiens
  MAP TO AC009474.1; EXPRESSED IN HBL100, SIGNAL = 1.4; EXPRESSED IN HEART, SIGNAL = 1.8; EXPRESSED IN LUNG, SIGNAL = 1.1; EXPRESSED IN BRAIN, SIGNAL = 2.1; EXPRESSED IN FETAL LIVER, SIGNAL = 1.3; EXPRESSED IN ADULT LIVER, SIGNAL = 1.4; EXPRESSED IN PLACENTA, SIGNAL = 2.2; EXPRESSED IN HELA, SIGNAL = 1.6; EXPRESSED IN BONE MARROW, SIGNAL = 1.7; EXPRESSED IN BT474, SIGNAL = 1.1
cacaaaattgtgagggctcccccagtaactggatccacctgaaatgtttacctcttaaacttgtccacactgagcctccagcaatttgtcaattatagttcaggttttcccaccccagcacttgtttctatctgggtttctcctcctgtaaggtgtatttgcctgtctctccaattatgggggcaaggatctgagaagagttgttgattttttgtttgtacagctttttacttgttattaggatggagtgaaaacttctaagctccttacgttctggaccagggaaatttctttttaccagaatagccattatgatcaagagagagaaagtatagatgagtagccagagcttggtacctgggttcaaaacccactgtcctctcttgcttgttactgacgaggggtcagtttgctccccctgttcgagtccaatttcatctcctgttaaaaaaagggactcgattgtagttttgaggcc

SEQ ID NO: 1969 - DNA, 417 bp, Homo sapiens
  MAP TO AC009403.1; EXPRESSED IN PLACENTA, SIGNAL = 1.3; EXPRESSED IN HBL100, SIGNAL = 0.92; EXPRESSED IN HELA, SIGNAL = 3.5; EXPRESSED IN HEART, SIGNAL = 1.3; EXPRESSED IN BONE MARROW, SIGNAL = 1.3; EXPRESSED IN BRAIN, SIGNAL = 1.1; EXPRESSED IN FETAL LIVER, SIGNAL = 1.3; EXPRESSED IN ADULT LIVER, SIGNAL =   1
tgtgactatactactaggcagatgttcatcagaacattgatatgttctcagtaccagtgtaggtcaaggtgagatttactcctggctttcccaacatactagcattgattatctgtctcatcactttgtctaaaatgttaacacactttttctagcagcaaaacatttttgtaagtggatttaagttcaaacaagatatctgatatagaaatgatttctttttacagaagatgatgctgatggccagatcttggaactgctctggcaaagagctcaatactgagggcttggaaattagcaacggctttgctgtgtgcattttgatatggatcacgctatggtccttggccgtctacgctgcccttggccgtctacgcggctatcttcagagtgcttccctctcttctgccactcctg

SEQ ID NO: 1970 - DNA, 481 bp, Homo sapiens
  MAP TO AC009408.2; EXPRESSED IN HBL100, SIGNAL = 1.9; EXPRESSED IN HELA, SIGNAL = 2.8; EXPRESSED IN LUNG, SIGNAL =   2; EXPRESSED IN BRAIN, SIGNAL = 3.2; EXPRESSED IN BT474, SIGNAL =   2; EXPRESSED IN ADULT LIVER, SIGNAL = 2.4; EXPRESSED IN FETAL LIVER, SIGNAL = 2.6; EXPRESSED IN PLACENTA, SIGNAL = 3.4; EXPRESSED IN HEART, SIGNAL = 2.9; EXPRESSED IN BONE MARROW, SIGNAL = 3.1
gcctagagcattttctcccctgatgttctgaaaaatgacctgattgaatcctgggtcactcttggtccgcaggtctccccggctcactttagggccatatgaccttcagcctgagtcagttgtggaacagcccatttgcttccagcttcaagatctggagcagaactggacataagctggggaaggatagggagaaggctacaaatgcaggctgcaccacctggacgtgcctccgtatctgccgccggggcctgttcttcctggtgttgggcagtgtttttcctggaccttttctaccagctgtgttgctttctgtttcaacaggtcaaatggatgatgtactggattatatttgcacttttcaccacagcagagacattcacagacatcttcctttgttggtaagtactccaggagttgggatgtttctaaggacaattttgcttagtgtcactcagggggaggtgggaaagggctgaac

SEQ ID NO: 1971 - DNA, 486 bp, Homo sapiens
  MAP TO AC009599.2; EXPRESSED IN BONE MARROW, SIGNAL =  11; EXPRESSED IN FETAL LIVER, SIGNAL =  14; EXPRESSED IN HBL100, SIGNAL = 7.1; EXPRESSED IN HELA, SIGNAL =  16; EXPRESSED IN HEART, SIGNAL =  21; EXPRESSED IN BRAIN, SIGNAL =  11; EXPRESSED IN LUNG, SIGNAL = 8.7; EXPRESSED IN BT474, SIGNAL = 5.6; EXPRESSED IN ADULT LIVER, SIGNAL =  10; EXPRESSED IN PLACENTA, SIGNAL =  17
  unsure 81
  unsure 171
  unsure 183
  unsure 431
ttctctttcccacatcccctggcaatgaaccattccacactgtctctattattctgaatatctcatatacatggcatcacnatagttttcatgcttttgtgactggcttacttcactttgcagaatgtcttcaaggttcatacatgttgtagcatatgtcagaatttcctntcatttttaagnactgcttagcattccagtatagacacacacacacacacacacacacacacacacacaccccatatatttagagcattcattccagtatacacacttggttgacttccatgttgtagcattgtgaataatgctgctatgaccatggaagtgtaaataccttttagagactctgcttttagttctttggagtatttattacgaagaattgctgaattagatggcagtttcatattttttatttttttttngaggagctgccgtactgttttctacagtggttataccattttacattcccaccaa

SEQ ID NO: 1972 - DNA, 468 bp, Homo sapiens
  MAP TO AC009468.1; EXPRESSED IN BT474, SIGNAL = 2.6; EXPRESSED IN HBL100, SIGNAL = 1.2; EXPRESSED IN HELA, SIGNAL = 0.99; EXPRESSED IN HEART, SIGNAL = 0.91; EXPRESSED IN FETAL LIVER, SIGNAL = 3.9
gggcactgggtacaatggttactctgaaagtactgggaaatgtgataacatatgccaggcacatgggagggcctcagtaaatgataattactctctgttttacacaatcttgtaattagctgggaatggcaaattgacagttgtgctctccaaaatagtaacactgtaaacgttcctgtaacaatagccaccataagacataattctgaaaactaaaaacctactatgagttgagggaaaaaagttacattagagtagacagtattgtgctagaatatttatcacaaaccacttaccgtccatgctcttcgcaccaagtttagaccacccactactcctcagtgtcctctgccactgctttcttcggtttttcctaaacaggctggacaatactcccaatttaatgttatcactcatctctcttagaagccagtgcattctaaaagcttcaaataaagaagtggttgc

SEQ ID NO: 1973 - DNA, 491 bp, Homo sapiens
  MAP TO AC009974.2; EXPRESSED IN ADULT LIVER, SIGNAL = 1.1; EXPRESSED IN BT474, SIGNAL =   1; EXPRESSED IN FETAL LIVER, SIGNAL = 1.5; EXPRESSED IN HBL100, SIGNAL = 0.96; EXPRESSED IN PLACENTA, SIGNAL = 1.3; EXPRESSED IN HELA, SIGNAL = 1.2; EXPRESSED IN HEART, SIGNAL =   1; EXPRESSED IN BRAIN, SIGNAL = 1.1; EXPRESSED IN BONE MARROW, SIGNAL = 1.2; EXPRESSED IN LUNG, SIGNAL = 0.98
caagtcaattaccagatatccattgatggttttttagatgtagaatgttgtacttatatgctatgagggacaccaaagaaaatggaaaacatagtgcctctttgcagaatgggagatgtaaggttgaggagctatgcctagacctaagctttgaagacaaaagaaatgagttgtgaggtccaggcaagaagtagcagattggtaatggagaaggggcaaatactgggagatgatgaaggaatgagaatctaactgtgacctctttgatggagttgactaggctgggggcatgattctttcttttagttcagctactgacctccagccagatcaggctgagactgaagatacagaagaagaactagtagatggtttggaagactgttgtagccgtgatgagaatgaagaggaggagggtgagtaggaaaccctttcacttccaactaggagttggttatgacctgttgggcagggggctgacaattgtgtac

SEQ ID NO: 1974 - DNA, 472 bp, Homo sapiens
  MAP TO AC010799.1; EXPRESSED IN HELA, SIGNAL = 1.2; EXPRESSED IN HEART, SIGNAL =   1; EXPRESSED IN BRAIN, SIGNAL = 3.2; EXPRESSED IN FETAL LIVER, SIGNAL = 1.3
  unsure 36
  unsure 81
  unsure 255
  unsure 279
  unsure 313
  unsure 324
  unsure 372
tcaccctgatacctaagccagacagatactgtaagnaaaagaaaactacaggccaatatcgctgaaaatattgatgaaaanaaacacaataaaatattagcaaaccaaattcaacaacacatcacaatattatacatcatgatcaagtgaaatttatcactgacatggaccctcatttaacatatactaattaatcaatgtgatacattaacagactgaaagataaaaatcacatgatcatctcaattgatgcangaaaaagcattcaacgaagttcanacattgtttcttgatttaaactctcaacagtttnaggtataaatnggaaagtttgtcatcataaaaaaggctatgaaaaagccacagttaacnatcatagtcaatgggaaaaaaattaaagcttttccgctaagatctggtacaaggcaaggatgcccactcttgctgcttctattcagcgtggtactggaaa

SEQ ID NO: 1975 - DNA, 458 bp, Homo sapiens
  MAP TO AC010889.1; EXPRESSED IN ADULT LIVER, SIGNAL = 0.9; EXPRESSED IN PLACENTA, SIGNAL = 1.9; EXPRESSED IN HELA, SIGNAL = 1.2; EXPRESSED IN BONE MARROW, SIGNAL = 1.2; EXPRESSED IN LUNG, SIGNAL = 1.7; EXPRESSED IN BRAIN, SIGNAL =   1; EXPRESSED IN BT474, SIGNAL = 1.7; EXPRESSED IN HEART, SIGNAL = 0.86; EXPRESSED IN HBL100, SIGNAL = 0.94
cagaggaagcaggttacaacagagtaacttgcatatgtggaatttttggtctgagccaattaaagtaggagttctgagagaaaagagtttctatcacatttttctgttgcagaaaacatctccagattttcagccctgggattatgcagtataatacccagtattacttaggacaaatttagacacaatattgttgacataatttaaataaagtttctttcccctattccagaatggtgaccactacccctgtctagatgacttggagggcctggtggctgtgggccgggacctgcctgtggggctggaagagctgagacagctagagctgcaggtattgacagcacattcctggagagagaaggcctccaagacctttctcaagaagaattcttgctacacactgcttgaggtgaggtctgagaccctgacccacagcctcttcttcatctggcctg

SEQ ID NO: 1976 - DNA, 482 bp, Homo sapiens
  MAP TO AC010106.1; EXPRESSED IN BRAIN, SIGNAL = 2.1; EXPRESSED IN BONE MARROW, SIGNAL = 2.4; EXPRESSED IN LUNG, SIGNAL = 1.9; EXPRESSED IN ADULT LIVER, SIGNAL = 2.8; EXPRESSED IN BT474, SIGNAL = 8.6; EXPRESSED IN FETAL LIVER, SIGNAL = 1.6; EXPRESSED IN PLACENTA, SIGNAL = 2.6; EXPRESSED IN HBL100, SIGNAL = 1.7; EXPRESSED IN HELA, SIGNAL =   2; EXPRESSED IN HEART, SIGNAL = 2.2
ttttctaccagatggccaggctgcacatcttctaaactttaatgctctacttcccttttaaatgttagttcgagttttaggtctttgctttcctcacacatatgaacataggttgttagaggcagccaggccacatcttgaacactgcgatgcttagaaactccttcctccagataaccctaaatcattactctcaagcacaaagttccacagatccctagagcggagccacaatgctgccaggttatttggtaacacataacaaaaattacctttgtttttattcccaatatcttcttcatctccatctgagacttcatcaccttggactttattgtccatatctttatcagcattttggttgcaaccacttaaccagcctctagggagttttaaattttctctcatcctcctatcttcttctgagctctcccagctctcacaacctctgctcattacctagttccaaagctccttccaca

SEQ ID NO: 1977 - DNA, 462 bp, Homo sapiens
  MAP TO AC010905.1; EXPRESSED IN FETAL LIVER, SIGNAL =  11; EXPRESSED IN HELA, SIGNAL = 1.2; EXPRESSED IN HEART, SIGNAL = 1.4; EXPRESSED IN BRAIN, SIGNAL = 1.3
tcattgtattaggtgtgcctggagaaattaagttaacccatcatgtaaattatatgttcatatatagtacacactaaaatacaaatagataatttccacagtagtaaatgtttgtttccttgttactagaagctcaaagagcattgactggcgtacaggcaaactgctgactgcaactgttgcacattttctaagatagagaacattagcaaagttagcatagacatcgtgtttagctaataaatgaagaaatcatacaagtatttcaaaataataattggtgtccgccacagagcccataacatcaccaagatttatgcttgctattctctgatccttctgctgtgcatgctgtgacttaggaattatttgtatgtgggtaatgacaacatttagcctctcacacagaagctcagtaattgtgctaatggtagtgatgagtccatccctctaaattcagaa

SEQ ID NO: 1978 - DNA, 468 bp, Homo sapiens
  MAP TO AC010125.2; EXPRESSED IN HELA, SIGNAL = 1.3; EXPRESSED IN HEART, SIGNAL = 1.6; EXPRESSED IN LUNG, SIGNAL = 1.2; EXPRESSED IN BRAIN, SIGNAL = 1.4; EXPRESSED IN ADULT LIVER, SIGNAL = 1.5; EXPRESSED IN FETAL LIVER, SIGNAL = 1.4; EXPRESSED IN PLACENTA, SIGNAL = 2.4; EXPRESSED IN HBL100, SIGNAL = 1.2; EXPRESSED IN BONE MARROW, SIGNAL = 1.2
acactgctcagatgtggtggtctggagtgtaaccatggtctttggcttgacatggaatcttttacgtgttcttctattatttacagggaccatttatttccttcatgaaatactctattcactcaggatccaagatcctagatttgcgttctgtggtggtcatgaaggatgacagcatgtgttgtttcctacccactggagcttgataggaatgtaatgcattctagccaatgaaatatgagcaggagttcctgtgtcagttccagatcaagccacctcctagaccattgtcaatgtaccttaatgacaagcaactttttgaagcttggctgtctttgcagcatgggttttggagtgagctgttccctagatctggggagagtaagaagtagccctttgtgtatgtatatcactactgagagactgttattttgttgtcgttgccatgccataacctggcctcttctg

SEQ ID NO: 1979 - DNA, 459 bp, Homo sapiens
  MAP TO AC010132.2; EXPRESSED IN FETAL LIVER, SIGNAL = 1.5; EXPRESSED IN ADULT LIVER, SIGNAL = 1.1; EXPRESSED IN HELA, SIGNAL = 2.7; EXPRESSED IN BRAIN, SIGNAL = 0.97; EXPRESSED IN LUNG, SIGNAL = 1.1; EXPRESSED IN BONE MARROW, SIGNAL =   1; EXPRESSED IN BT474, SIGNAL = 4.5; EXPRESSED IN PLACENTA, SIGNAL = 2.2; EXPRESSED IN HEART, SIGNAL = 1.5; EXPRESSED IN HBL100, SIGNAL = 1.9
aaaacatgtgaactctcaggtatccttagagtgctttacaaaagtttatgtaatacctttagctgtagggaggatttttttgtgtagtactaaatgaccagtgagggaaaaactgacttaccatttcttaggtaattttggtaataggactccggaagaaaaggttttataaattaaaggaaataaaggagtttgcgtttagcgcatccataattagaaagctgttaaaacagtcttaaaaatgattaaacatttatgtctctctctttttttttaagctgcaaatggtgtggtattagcaactgagaaaaaacagaaatccattctgtatgatgagcgaagtgtacacaaagtagaaccaattaccaagcatataggtttggtgtacagtggcatgggccccgattacaggtactttatactttttatagtgtttctcaccatctcatgaattgattg

SEQ ID NO: 1980 - DNA, 434 bp, Homo sapiens
  MAP TO AC010925.1; EXPRESSED IN PLACENTA, SIGNAL = 2.1; EXPRESSED IN HELA, SIGNAL = 1.2; EXPRESSED IN HBL100, SIGNAL = 1.4; EXPRESSED IN HEART, SIGNAL = 1.2; EXPRESSED IN FETAL LIVER, SIGNAL = 1.9; EXPRESSED IN ADULT LIVER, SIGNAL = 0.95; EXPRESSED IN BT474, SIGNAL = 2.3
ttcctaacttgagtgaagtaacacttaaatgtcctaggtccattttttaaatgtaataagtgatacaacactttaattctacttgcatatgtttaacaacataattgcagtttaatttttttttctctgctgtgtttctttcctaacaagtaagtattacattgtaaggtctaaaatataaattgtgtgttggtagctaatataaaaagcttttactttcttctaagtaaattgtgaaggtcagaaggaacaatattgtttatctgctatttcttccctctaggagcatttcatggaagtaatcagaaaccaggaatttgtattattaccagccagcgaaattgcaaagctcttggctagtgatgacatgaacattcctaatgaggagacaatattgaatgcacttcttacttgggtccgtcatgatttggaac

SEQ ID NO: 1981 - DNA, 415 bp, Homo sapiens
  MAP TO AC011235.1; EXPRESSED IN BT474, SIGNAL = 1.3; EXPRESSED IN HBL100, SIGNAL = 1.6; EXPRESSED IN HEART, SIGNAL = 1.6; EXPRESSED IN LUNG, SIGNAL = 0.93; EXPRESSED IN BRAIN, SIGNAL = 1.7; EXPRESSED IN FETAL LIVER, SIGNAL =   2; EXPRESSED IN ADULT LIVER, SIGNAL = 1.1; EXPRESSED IN PLACENTA, SIGNAL = 1.6; EXPRESSED IN HELA, SIGNAL = 1.4; EXPRESSED IN BONE MARROW, SIGNAL = 1.6
aagatttcttgggctgggagggtgggggtgaggagggcaggaaatctacatttataacaagctcccaggtatgtttatgtggccatcccagctctggtccccagacatttggaagccgctaaaaaccaaactcctcaaactccttagtttgtaactatgtaaactaagacttggatatggaagtactgccaaaggccacacacagctggactagaactcaaatatgtcacttctcagtccagaattttttttactatacctgaatctccttcaaagcatgacagaggcctaaattctgtctaccacctcagtcattcctgagcctacatctagaaattccatggtcatgataattgatgatgatgatgatgatgatgatggtggtggtggtggcagtggcagcagtggtaagcta

SEQ ID NO: 1982 - DNA, 429 bp, Homo sapiens
  MAP TO AC011242.1; EXPRESSED IN BONE MARROW, SIGNAL = 3.1; EXPRESSED IN FETAL LIVER, SIGNAL =   4; EXPRESSED IN HBL100, SIGNAL = 2.9; EXPRESSED IN HELA, SIGNAL = 4.1; EXPRESSED IN HEART, SIGNAL = 3.6; EXPRESSED IN BRAIN, SIGNAL = 3.4; EXPRESSED IN LUNG, SIGNAL = 3.3; EXPRESSED IN BT474, SIGNAL = 2.7; EXPRESSED IN ADULT LIVER, SIGNAL = 2.6; EXPRESSED IN PLACENTA, SIGNAL = 3.4
agtatgcacactgtaactccagcaatataaaaaactgtgagtgtacacacaccaacatacacacatttatatataaacatataaataaaccaaaaaggtagacatcaaaatattaatacctatttttccttctgcactttttgtattctccaaatgtctatgctgaatgtgtatcattcttacaatcagaaaaaaaaacactttaaattgcatgtatatgtatcaatattaatatctacctgcaatggtcctggttgattctgtggctgtcttcgtcttgtctgtttaataagctgacagcaaatttcattctgcagctcaggatgtgtcaggcagatttgcaaagcactctgggctaaagatatgtggtaatcaattgcaggagagtcaactgcagcatttataaaaagctggcaggtctgaattaaa

SEQ ID NO: 1983 - DNA, 491 bp, Homo sapiens
  MAP TO AL049652.13; EXPRESSED IN BONE MARROW, SIGNAL = 2.8; EXPRESSED IN FETAL LIVER, SIGNAL = 3.5; EXPRESSED IN HBL100, SIGNAL = 2.6; EXPRESSED IN HELA, SIGNAL = 3.1; EXPRESSED IN HEART, SIGNAL = 3.1; EXPRESSED IN BRAIN, SIGNAL =   3; EXPRESSED IN LUNG, SIGNAL =   2; EXPRESSED IN BT474, SIGNAL = 2.2; EXPRESSED IN ADULT LIVER, SIGNAL = 2.7; EXPRESSED IN PLACENTA, SIGNAL = 3.5
tggccaaatgtgagggttagctaccctattacccatcttttaaagcaaagtatttgctcaaggtcacagggcaaaatagcagagttcacacatagacttatcacttactccaagcccttaagcactctaatgcctctcatgcctctccactgccctccacctgaagtgggcctcacactttcaagttccctactagctctgaaagtctaagtgggtgatcactgagcctttcccctggttccagctctttagctgctctggttaactggctctcatgggattgggggtgtgtgattgcagtcaccggaagaaaagaatgcgacagctgcagaagaaaataaagaatggaacactgaacataaagcaggacgacccctttgaactcttcatagcagccacaaacattcgctactgctactacaacgagacccacaagatcctgggcaataccttcggcatgtgtgtgctgcaggtgggtggcttcctctaac

SEQ ID NO: 1984 - DNA, 415 bp, Homo sapiens
  MAP TO AC011331.1; EXPRESSED IN BT474, SIGNAL = 4.7; EXPRESSED IN HEART, SIGNAL = 1.5; EXPRESSED IN LUNG, SIGNAL = 1.2
caccatccagagtaggtgccttccactgtgcatcactaaggacaggatttaactgcaagctcattacaactaaagcagtttgtttgtttatagtttaaagaggaaggtttggtttaggtggagcaggaaacattgcattagtaacatatttcttgagcattctgcacagaattacattagaatgtaattaaagaagtcaaatgagtttgtattttggggaaaaaatgctgaattttcactcctgtgtcattctgtaggatagtgaatattacaactctttgaaatggatcctggagaatgaccctactgagctggacctcatgttctgcatagacgaagaaaactttggacaggtacatgtgggtaaccctgggaactcttctttagctttcaaggggcatttttcttcttgacg

SEQ ID NO: 1985 - DNA, 489 bp, Homo sapiens
  MAP TO AL078463.11; EXPRESSED IN BONE MARROW, SIGNAL = 1.5; EXPRESSED IN LUNG, SIGNAL = 1.9; EXPRESSED IN BT474, SIGNAL =   1; EXPRESSED IN ADULT LIVER, SIGNAL = 1.8; EXPRESSED IN HBL100, SIGNAL = 1.8; EXPRESSED IN HELA, SIGNAL = 2.1; EXPRESSED IN PLACENTA, SIGNAL = 2.3; EXPRESSED IN HEART, SIGNAL = 0.92; EXPRESSED IN BRAIN, SIGNAL = 1.5
tcagaaaggaagaaaggaatgccaattcaaataatttttttctccacaagtatgtggtagggaatgactagtggaaagcctatgaagtgggccaataagatattctttcttttattttttctttccaacttttattttaggttcaaggggggtatatgtgcaagtttgttacatgggtaaattgcatgtcatgggggtctggtgtacagataattttgtcacccaggtaatcaacataatatctaataggattttaaaaattgtgtcattgctccacccaagaacctctgtgaagaaatatctctgtacctttttaaagagtcttcctgagtcctcgctgacttgtacaaatcgaggaatgatattattcaggtagatgtcactcagggtggtatggtccctgctttcccgcttcacctggtttaagaggagattccagcagttgactggagagagaacattctgatccttcctgtgaagaaacatcaa

SEQ ID NO: 1986 - DNA, 487 bp, Homo sapiens
  MAP TO AL117378.1; EXPRESSED IN ADULT LIVER, SIGNAL = 1.3; EXPRESSED IN BT474, SIGNAL = 1.2; EXPRESSED IN PLACENTA, SIGNAL = 1.2; EXPRESSED IN HEART, SIGNAL = 0.91; EXPRESSED IN BONE MARROW, SIGNAL = 1.1
tttcactgccctcaatctcctttttctggcttctatcactgctctgagtcaagaatcaaatcactaagccgagggcctagcaaagtgctgggcagtgggggtgtgcagaccaccctgctgtgagtggtgtactttaaccagcaagcagcctagtggaacaaacagataagtaataagatgacatgttccccacatttcttcagtgagtctgagagtcaggaagaaggtaaaaatctgtcttgcctcaccatcatctccacaaagttgcctacaatgtgacctgcttttgataatcctatttcaggtctattttcagaagggaaaaaaggcacctgttcacacttaccacacattaagttatagacttcaatgttttcaaaggtgtcagcctcaatgccatgcttgaatccaggtccatagccaacaaagagggcctagatggccagaaaaggaagtttatcagtgcatttcagctgtctacaagttg

SEQ ID NO: 1987 - DNA, 472 bp, Homo sapiens
  MAP TO AC011299.1; EXPRESSED IN PLACENTA, SIGNAL = 3.3; EXPRESSED IN BRAIN, SIGNAL = 3.1; EXPRESSED IN BT474, SIGNAL = 2.2; EXPRESSED IN FETAL LIVER, SIGNAL = 2.2; EXPRESSED IN ADULT LIVER, SIGNAL =  11; EXPRESSED IN HEART, SIGNAL = 2.4; EXPRESSED IN HELA, SIGNAL = 3.1; EXPRESSED IN HBL100, SIGNAL = 2.3; EXPRESSED IN LUNG, SIGNAL = 3.9; EXPRESSED IN BONE MARROW, SIGNAL = 3.6
ccctttcaaaattggagactgtattagtccattttcacactgctataaagaactacctgagacagggtaatttataaaggaggtttaattgacttgcatttccacatggctgggggcgcctcaggaaacttaaaatcatggcagaaagttaaagagacacaagcagcttcttcacaaggtggaaggagagacagagagcaaggagggaactgccaaacacttttaaactatcagatcttgtgggaactcactcactatcacaagaacaacatggggaacccccacttccccgatgatccaatcacttcccaccaggtccttccctggacacgtgaggattataattcgagatgagatttgggtggagacacagagccaaaccatatcagaggcaatcctctcaaatcctgccactgctgtatcgcctaaatttatgtaatatactgatccttccattattgtcatttcatca

SEQ ID NO: 1988 - DNA, 491 bp, Homo sapiens
  MAP TO AL117192.1; EXPRESSED IN PLACENTA, SIGNAL = 1.9; EXPRESSED IN BONE MARROW, SIGNAL =   1; EXPRESSED IN BRAIN, SIGNAL = 2.1; EXPRESSED IN BT474, SIGNAL = 2.3; EXPRESSED IN HEART, SIGNAL = 1.1; EXPRESSED IN HELA, SIGNAL = 1.1; EXPRESSED IN HBL100, SIGNAL = 1.3; EXPRESSED IN LUNG, SIGNAL = 1.1; EXPRESSED IN ADULT LIVER, SIGNAL = 1.1
tgacactattgccctgattcctcttatgtgtcttctgcatcctgggtagcatggggcttggggaacagaagttacaaacgtggggtgtgcccttgaggagttagcaggagagaagagttgtggggtcttggagggtttgtcctgcttgtcctgtctgtattttccatgtcagccctcctcctgccccatctccagagtgctacagggaggctcgagggtcctctggtgatatgccccagggtggacaagaggatgggggcagtggactcaggtgctgaagttgttgcttttgtctgtgttccctgcctcacagctgaaccttagccggccgatcgaggagcagggccccctggacgtcatcatccacaagctgactgacgtcatccttgaagccgaccagaatgatagccagtccctggagctggtgcacaggttccaggtgagtgaggaccatgcagcccttggctgtggcattttcaggaggaggaggg

SEQ ID NO: 1989 - DNA, 475 bp, Homo sapiens
  MAP TO AC011351.1; EXPRESSED IN ADULT LIVER, SIGNAL =  11; EXPRESSED IN BT474, SIGNAL = 4.5; EXPRESSED IN FETAL LIVER, SIGNAL =  22; EXPRESSED IN HELA, SIGNAL =  14; EXPRESSED IN PLACENTA, SIGNAL =  20; EXPRESSED IN HBL100, SIGNAL =   8; EXPRESSED IN HEART, SIGNAL =  17; EXPRESSED IN BONE MARROW, SIGNAL =  15; EXPRESSED IN BRAIN, SIGNAL =  19; EXPRESSED IN LUNG, SIGNAL =  14
ttatttaatgtcggggcacgatttcaaaaatttcaataggctatagagttttccatgagagtgtgtgtgtgtgtgtgtgtgtgtgtgtgctgaagagaagacaacacttgaattgcaaggcattgtgtcctgagcattgtttcacattgatttcacatattattttatttaatcctcacaacctctctgactgtagatattcttattctctttgtatggatggaaactaaagctgtcgcaggcattactcacctaggaaagggtaactcattaatttcctcttcttctctcttaagaaactgcaccatcaggtgcacaaagctgttggtgctgggaaaggcagacagccctccacctttctcagtagctgccatgaatccattaacaagtcctgttgcttcaatcaaatgtttgctgcccttgaacacaactgcctggctcacattatttcttgccttggcaaacagtcccattc

SEQ ID NO: 1990 - DNA, 470 bp, Homo sapiens
  MAP TO AL022337.19; EXPRESSED IN BT474, SIGNAL =   1; EXPRESSED IN HEART, SIGNAL = 1.8; EXPRESSED IN LUNG, SIGNAL = 1.2; EXPRESSED IN BRAIN, SIGNAL = 1.9; EXPRESSED IN FETAL LIVER, SIGNAL = 1.5; EXPRESSED IN ADULT LIVER, SIGNAL = 1.5; EXPRESSED IN PLACENTA, SIGNAL =   2; EXPRESSED IN HELA, SIGNAL = 1.5; EXPRESSED IN HBL100, SIGNAL = 1.4; EXPRESSED IN BONE MARROW, SIGNAL = 1.7
cctgcccaaatcagaaactggacagttactctggactcctcctaactccctatcccagacacacataggtaattaaccctcagattctgtatctgctccctctttttcataaacatattctccctgaagatttttaactgcttctctcaattgcctcctttttgtctcccattgtggtggttttcaaatgtgttcataaattatttagcaaccttcctggcaaaaggtggagactaatttctctcctcttgagtgtggacaagactcatttctaacaagtagaatgtagtgggggtgatagtgagtgacttctaggattaagtcataaaaggcattatttttgctcctcttctcccctctcctttcctctatcctcttctctcctccttcatcccctctttctttgtcctctgcttcttcctctcctcttcgtctcttctgttttcttctctcctcctcttgtcctttcc

SEQ ID NO: 1991 - DNA, 477 bp, Homo sapiens
  MAP TO AL049543.14; EXPRESSED IN BT474, SIGNAL = 2.2; EXPRESSED IN FETAL LIVER, SIGNAL = 1.4; EXPRESSED IN ADULT LIVER, SIGNAL = 0.95; EXPRESSED IN HELA, SIGNAL =   2; EXPRESSED IN PLACENTA, SIGNAL = 1.1; EXPRESSED IN HBL100, SIGNAL = 2.2; EXPRESSED IN HEART, SIGNAL = 2.5; EXPRESSED IN BONE MARROW, SIGNAL = 2.2
gggacatggggttttctcagtaggaagatgtttgacaactttttcaatttatttcgtagtttaactattcattattgctattccttcttgaatcgtacttaatagtcatgtcgtcctaataatttctccatttcataaaagtattcaaatgtatttggccagattctttccccttttgttttgttttaacgtttactggtttaattttttttgttgttctattttttatatcttcctgaccagacaattgttttgactttcactggtttattataaagggcattacaaaggctctctttcgccttttggagaaactgcttcctcttcttcaagatcttttcctggctcgcctcttctcctgttttcaggtctctgttaacaccttggttcctcagatattgcggacagtctaattcgccccgcgacgtgagggagaacccaggagcgggctccggtagagaaagaagcttccggtca

SEQ ID NO: 1992 - DNA, 472 bp, Homo sapiens
  MAP TO AL035460.12; EXPRESSED IN BONE MARROW, SIGNAL = 4.1; EXPRESSED IN HBL100, SIGNAL = 3.4; EXPRESSED IN HELA, SIGNAL = 4.8; EXPRESSED IN HEART, SIGNAL = 4.4; EXPRESSED IN LUNG, SIGNAL = 3.2; EXPRESSED IN BRAIN, SIGNAL = 4.9; EXPRESSED IN BT474, SIGNAL =   3; EXPRESSED IN ADULT LIVER, SIGNAL = 4.4; EXPRESSED IN FETAL LIVER, SIGNAL = 5.4; EXPRESSED IN PLACENTA, SIGNAL = 5.3
gggacaagccctactttcatcagtaatggggggaggctctttgttgacacccatcaccccaggaagtggagggagcaaaaactcctgcatctcatcccttttcgcagatttccccaaagtctctctctgctaagtccagctcttcttagccccatcctgacagggctccaccagtccctttcctctacatccccccttcctccaagcatcccattggcccctgctctcccctgcaggcaccctctggaccccgggactgctgatgatgatcaagctgggcctggccctcctgccccagacaagatctattggcctggccctgcccagcccctgacatgccagcccctggccatggtgcagactggggaagataaaagcagtagcccagtggggcacacccacctcaacaatgcttgcacagggaggacctggtggctgcaggcagctgcccagagcctgtgtccagttggtc

SEQ ID NO: 1993 - DNA, 472 bp, Homo sapiens
  MAP TO AL110122.1; EXPRESSED IN PLACENTA, SIGNAL = 4.9; EXPRESSED IN FETAL LIVER, SIGNAL =   2; EXPRESSED IN ADULT LIVER, SIGNAL = 3.4; EXPRESSED IN HEART, SIGNAL = 2.5; EXPRESSED IN HELA, SIGNAL = 2.7; EXPRESSED IN HBL100, SIGNAL = 2.2; EXPRESSED IN BRAIN, SIGNAL = 2.7; EXPRESSED IN LUNG, SIGNAL = 2.1; EXPRESSED IN BONE MARROW, SIGNAL =   3; EXPRESSED IN BT474, SIGNAL = 1.6
tctcttttcacatatttctgcctgtttatattctagccatgctggcagctgattagatgatgcctacccagattaagggtggatctgcctttcccagcccagtgactcaaatgttaatctcctttggcaacaccctcacagacacacccaggatcaatactttgtatccttccatccaatgaagttgacactcagaactaaccatcacgccatgacataggacaagttattgcctgggacaaaaatgagctcataaacaaagaagcttccttacatacagattttatagattctctagtaaaaacaacttccaaggtcacctcctcctcctcccagtcctctgtccgcccccccacagcctgagcacccacatcataaatggggagcagctggtgtcccagattttgggacccttccctgtccttggcgtctgatgctctatggcttcttggacatttgttttattcacaaa

SEQ ID NO: 1994 - DNA, 471 bp, Homo sapiens
  MAP TO AL008639.10; EXPRESSED IN BT474, SIGNAL = 1.7; EXPRESSED IN HBL100, SIGNAL = 1.1; EXPRESSED IN BRAIN, SIGNAL = 1.3; EXPRESSED IN ADULT LIVER, SIGNAL = 0.97; EXPRESSED IN FETAL LIVER, SIGNAL = 0.95; EXPRESSED IN PLACENTA, SIGNAL = 1.5; EXPRESSED IN HEART, SIGNAL = 0.91; EXPRESSED IN HELA, SIGNAL = 1.4; EXPRESSED IN BONE MARROW, SIGNAL = 1.1
gatgtcccatgtcctccaaccggtgatcatggtagggagttagttttcttctcaaagtgctgcttaccttatctgaactgagggtggcagctgctgtggtgggcacagaaggactgtgctcttgcccttgttggcttccagcagctgtatgaatgtggacagtccgttttcccctgggtcagggtccctcacctgacctgtgagaggacaggctgtgctgggctgtctgtaaggtcctgtccgctctgaaagtctgtctgcatatgcctgtttgtcattgtgaaagggctgttcactcttccaggtaccggccctatttgatgaggtggccatatatttttccgatgaggaatgggaagttttgacggagcaacaaaaggccctctaccgggaagtcatgaggatgaattatgaaactgtcctgtccctgggtaaagctgtgttttcctttgtctcctggaagctctgagc

SEQ ID NO: 1995 - DNA, 479 bp, Homo sapiens
  MAP TO AL121756.2; EXPRESSED IN BONE MARROW, SIGNAL = 4.4; EXPRESSED IN HBL100, SIGNAL = 2.6; EXPRESSED IN HELA, SIGNAL = 7.2; EXPRESSED IN BRAIN, SIGNAL = 4.6; EXPRESSED IN LUNG, SIGNAL = 3.2; EXPRESSED IN BT474, SIGNAL = 2.6; EXPRESSED IN ADULT LIVER, SIGNAL = 4.4; EXPRESSED IN FETAL LIVER, SIGNAL = 6.2; EXPRESSED IN PLACENTA, SIGNAL = 7.1; EXPRESSED IN HEART, SIGNAL = 5.4
tcaataaatggaaataggggctattatgattgggaactgggcttatagggtcgttctcgcccccactttcccacgcaggcctggtgtcccttggggctcttgggtccgtggaattctctctggccacattgcctctcatctccaaccagtacatagaactggacatcaacgtgagtaaccagaggggcctctcctcctgctgggggtggctagataggggatgccggatcaaggcaggtgggtgagcaccttaagaccctcctcggccctgtttcctgcccctgcagcctatcgtgaagagtgtagctggtgatatcattgacttccccaagtcccgtgccccagccaaggtgccccccaagaaggaccacacatcccaggtgatggtgccactgtacctcttcaacaccacgtttggactcctgcagaccaacggcgccctcgacatggacatcacccctgagctggtgagtgtggtg

SEQ ID NO: 1996 - DNA, 471 bp, Homo sapiens
  MAP TO AL079303.2; EXPRESSED IN PLACENTA, SIGNAL =  20; EXPRESSED IN BONE MARROW, SIGNAL =  11; EXPRESSED IN FETAL LIVER, SIGNAL =  11; EXPRESSED IN HBL100, SIGNAL =  28; EXPRESSED IN HELA, SIGNAL =  44; EXPRESSED IN HEART, SIGNAL = 9.2; EXPRESSED IN BRAIN, SIGNAL = 5.5; EXPRESSED IN LUNG, SIGNAL =  21; EXPRESSED IN BT474, SIGNAL =  27; EXPRESSED IN ADULT LIVER, SIGNAL = 9.5
tcctgcctcagttttacgtgtacaaatagcacaggaggaccccagccccatgcagacggcagcctgggggtgggggagtcacaccagtcctgtcctcatggacatgtccccatgtccagatagatagacagagatatctatctgaagcctttataggggcctgggcaccttttggagcctgagctggaactgaagcgggagctgcagcctgggccttggtttgatcctttgccttggcctttggctggcacagcttgagccccttggcaatgcgggcacgggcatgcttcccaagtttggggtgggcaatgtaggcaagtcatttgagcttgcaggtgacacccttcggaatcttggggttaacctccttggcctttacgagggccttgatagcctcggcacatacactcacagccttggcattgctggcctgcatcttctttaggctcttcttgttgtgctcttggcaaa

SEQ ID NO: 1997 - DNA, 470 bp, Homo sapiens
  MAP TO AL121754.3; EXPRESSED IN BT474, SIGNAL = 2.2; EXPRESSED IN PLACENTA, SIGNAL = 4.1; EXPRESSED IN BONE MARROW, SIGNAL = 3.3; EXPRESSED IN BRAIN, SIGNAL = 3.8; EXPRESSED IN FETAL LIVER, SIGNAL = 4.3; EXPRESSED IN ADULT LIVER, SIGNAL = 3.5; EXPRESSED IN HEART, SIGNAL = 3.6; EXPRESSED IN HELA, SIGNAL = 3.6; EXPRESSED IN HBL100, SIGNAL =   3; EXPRESSED IN LUNG, SIGNAL = 2.5
gttataaccgtattttacacgcatacattatgatcacaaataggttaatatgaataaaatattagaaaaaagatcaaaatgctgggttggcagaactataggtgatctcttcataactatttctgcattttccagatgttccttagtaagcactgctttttgtaagtggtggggaaaagttttatttacaacaaaaaagataaattattaaactcctaagaatataagtaaaaattccttcgctaataaagaataataataattcagcaatctaatggcccctaacacacctttccttcccctcccctacagaagccaggaaagttgaactctctccttccggaaacacgataccctcgatttccaggacatctctagctcctgctttccccccctcctctccagctgctccatcttctcggtcctttcctcctcctcttcttcctcctcctcctccccctgagtagtaa

SEQ ID NO: 1998 - DNA, 457 bp, Homo sapiens
  MAP TO AL121760.1; EXPRESSED IN ADULT LIVER, SIGNAL = 1.7; EXPRESSED IN BT474, SIGNAL = 0.96; EXPRESSED IN FETAL LIVER, SIGNAL =   2; EXPRESSED IN PLACENTA, SIGNAL = 1.4; EXPRESSED IN HBL100, SIGNAL = 1.3; EXPRESSED IN HELA, SIGNAL = 1.4; EXPRESSED IN HEART, SIGNAL = 2.2; EXPRESSED IN BONE MARROW, SIGNAL = 1.7; EXPRESSED IN LUNG, SIGNAL = 1.1; EXPRESSED IN BRAIN, SIGNAL = 1.9
acacccaggtacccttacccatatttaatgaatattaacatttagccctatttgctttacattacgcatacaagaaaaaaatatttctttaaaaaaaggcgagagaccttgaggctgttccctgggagagggaagcatgggtggccacaggcaggggctgatttcaccaggtcttacttcctattcctctgtctagttgtccccaccctgaagatcaccactgaaacctctgggacccatgtacatgtgcaagacagagtgaatctcacctgccacgtcctccacttctatcccgcccacctgcgactcacctggatggagaacaggagcatgatccagaccctggtgtcccctcgtcccctcaggccaccagaaatccagatgggacatactctctggagcacacgtggcaggcagaggccacgctggaggagcgtgagtttgcttgctgggtggt

SEQ ID NO: 1999 - DNA, 456 bp, Homo sapiens
  MAP TO AP000403.1; EXPRESSED IN BONE MARROW, SIGNAL = 1.3; EXPRESSED IN BT474, SIGNAL = 1.1; EXPRESSED IN FETAL LIVER, SIGNAL = 1.3; EXPRESSED IN ADULT LIVER, SIGNAL = 1.1; EXPRESSED IN HELA, SIGNAL = 1.2; EXPRESSED IN PLACENTA, SIGNAL = 1.8; EXPRESSED IN HBL100, SIGNAL = 1.1; EXPRESSED IN HEART, SIGNAL = 1.3; EXPRESSED IN BRAIN, SIGNAL = 1.5
ccattagttcctgcgaaagctgatcaatacaaagagcctggcatctcccctatctttcttgcttcctatctcaacatgtgatctttgcaaatgctggctctccttccccatctaccatgagtggaagcaacttgaagccctcaccagaagcagatgctggcaccatgcttactatacagcctgcataactgtgaaccaaatagacaactttaaaaaaaaataaatcatccagcttcaggtgtttcttcatagcacgaaaatagactaaaaccagtcacattcttgggccctgtagtttctgttcgtttgttttacctcacagtttatggtggagtatatcttcttagaaatgatgattatcataaacttctcggtaccttgcttatctgaaaatatattcatattcctcctatatgtgactattttgcaagtagcattctgcctactcatttagca

SEQ ID NO: 2000 - DNA, 454 bp, Homo sapiens
  MAP TO AL033523.10; EXPRESSED IN ADULT LIVER, SIGNAL = 1.1; EXPRESSED IN FETAL LIVER, SIGNAL = 3.9; EXPRESSED IN HELA, SIGNAL = 3.5; EXPRESSED IN PLACENTA, SIGNAL = 2.3; EXPRESSED IN HEART, SIGNAL =   1; EXPRESSED IN BRAIN, SIGNAL = 1.4; EXPRESSED IN BONE MARROW, SIGNAL =   1
gagatcactttgctgctctgctagttatctggcaattctttaagcttcctgtccattagtgtcttgacctaaaaggaagggaataataataatgataataataataataataataataataataatatttgcctcttaacagttgttgtggaccaaaataaaggaatatatgtaacaccccatcttttggggccagcttatctctgggcctctggaatggcttcatactctccctatatctggatcttccccagaaagagttctagttgctccacagccaatcaacacttgatattgtcaatcttttcagtattagccatgtgactgggggtgaaatggtatctcattgtggttttaatttttatttcctggatgactagttttcttgaccgtcttttcgtgttcatattggtcatttgactccttttgcaaagtgtctctactggcttttgcc

SEQ ID NO: 2001 - DNA, 453 bp, Homo sapiens
  MAP TO AL078601.10; EXPRESSED IN PLACENTA, SIGNAL = 1.4; EXPRESSED IN HEART, SIGNAL = 1.4; EXPRESSED IN BONE MARROW, SIGNAL = 1.3; EXPRESSED IN BRAIN, SIGNAL = 1.4; EXPRESSED IN FETAL LIVER, SIGNAL = 1.5; EXPRESSED IN ADULT LIVER, SIGNAL = 1.5; EXPRESSED IN HELA, SIGNAL = 1.5
aaatccagggggtcataaggacctttaaggctcattacacacagtactctatggggaaaggattatcaacactgtggaagagaaccctgacatggagaacatcatgaaagtttggaaagattacaccattgaggatgccattgttattatagaaaaaaacatgaaaaccatcaagcctgaaacaataaattcctggtgaagaaaactgcgtccagatgttgtacatgacttcacaggatttatcacagagccaatcaaggaaatcatgaaagtgattgtggatatgacaaaaaaagattgggggaaagggtttctagatacagatcttggagaaaatcgaaagctaatagatatcagactagaattaaaagatgatttgatggagatgagtgtttccaaacctgtgacagattatgaggaagaagatatagaaggagcaatgccaggaaataa

SEQ ID NO: 2002 - DNA, 490 bp, Homo sapiens
  MAP TO AL021578.1; EXPRESSED IN BONE MARROW, SIGNAL = 6.4; EXPRESSED IN BT474, SIGNAL = 7.5; EXPRESSED IN HBL100, SIGNAL = 8.6; EXPRESSED IN LUNG, SIGNAL =   9; EXPRESSED IN BRAIN, SIGNAL = 5.6; EXPRESSED IN ADULT LIVER, SIGNAL =   5; EXPRESSED IN FETAL LIVER, SIGNAL = 4.8; EXPRESSED IN PLACENTA, SIGNAL = 5.3; EXPRESSED IN HEART, SIGNAL = 4.7; EXPRESSED IN HELA, SIGNAL = 6.6
ataaccagtggccagcagtgcaggagagcacctgcttccctgttcccttgggtgcattcatttttcatttgggacagatatactaaaaaagttggggataaggattttggcagcataattgtggagacagtgttgccaattcctgctccaggaccatatggttcagctgaatatggcagaaccagattctctgcctggctgaatgtccctgtcccctgccctgagtctcttccaaaatacgctgagtgtctcttctcctttccgcccatccaggtgcctctagataaccatatccctgagagggcagggtctgggagccaagtccccaccgaacccaagaaactagaggagaatgaggttatccccaagagaatctcacccgttgaagagagtgaggatgtgtccaacaaggtgtcaatgtccagcactgtgcagggcagcaacatctttgagagaacggaggtcctggcaggtaagtccccatgctgct

SEQ ID NO: 2003 - DNA, 406 bp, Homo sapiens
  MAP TO AL035704.7; EXPRESSED IN BT474, SIGNAL = 1.1; EXPRESSED IN PLACENTA, SIGNAL = 1.3; EXPRESSED IN BONE MARROW, SIGNAL = 1.6; EXPRESSED IN FETAL LIVER, SIGNAL =   1; EXPRESSED IN ADULT LIVER, SIGNAL = 1.1; EXPRESSED IN HEART, SIGNAL =   2; EXPRESSED IN HELA, SIGNAL = 1.4; EXPRESSED IN HBL100, SIGNAL = 1.1; EXPRESSED IN BRAIN, SIGNAL = 1.5
agatagtgcatgcaaagcccatagagagctgttcaccagttggtagctagaggtgtaataaagggcttcagggctcacagatacagatgagctcagcctagggggagggaggaggaggagagagtcattgaacaggtagttaggaatgagcttgggtcactccaggcagaggcctctggggatgtaaaaaggaagaggagttagtttctggtttgttttgataattcagtgagtttatgtaaaacatttgaaactgttcctggcctgcaggtgcaagctctagagatgatgatgatgatgatgatgatgatgatgatgatgatgatgatgatgatgaaggtaacgtgggggggatttagcccaatatttgaagccagaaggacggtggcatggtcagacatgtgtc

SEQ ID NO: 2004 - DNA, 488 bp, Homo sapiens
  MAP TO AF165146.1; EXPRESSED IN BT474, SIGNAL = 8.2; EXPRESSED IN BONE MARROW, SIGNAL =   1; EXPRESSED IN LUNG, SIGNAL = 1.6; EXPRESSED IN ADULT LIVER, SIGNAL = 1.1; EXPRESSED IN FETAL LIVER, SIGNAL = 1.1; EXPRESSED IN PLACENTA, SIGNAL =   3; EXPRESSED IN HEART, SIGNAL = 2.1; EXPRESSED IN HELA, SIGNAL =  20; EXPRESSED IN HBL100, SIGNAL = 2.9; EXPRESSED IN BRAIN, SIGNAL = 1.6
tccgggaattaagagaggtgatagaattacctcttacaaacccagagttatttcagcgtgtaggaataatacctccaaaaggctgtttgttatatggaccaccaggtacgggaaaaacactcttggcacgagccattgctagccagctggactgcaatttcttaaaggttgtatctagttctattgtagacaagtacattggtgaaagtgctcatttgatcagagaaatgtttaattatgctagagatcatcaaccatgcatcatttttatggatgaaatagatgctattggtggtcgtcggttttctgagggtacttcagctgacagagagattcagagaacgttaacggagttactgaatcaaatggatggatttgatactctgcatagagttaaaatgatcatggctacaaacagaccagatacactggatcctgctttgctgtgtccaggaagattagatagaaaaatacatattgatttgcca

SEQ ID NO: 2005 - DNA, 424 bp, Homo sapiens
  MAP TO AP000403.1; EXPRESSED IN PLACENTA, SIGNAL =   3; EXPRESSED IN HEART, SIGNAL = 2.9; EXPRESSED IN BRAIN, SIGNAL = 2.3; EXPRESSED IN BT474, SIGNAL = 1.8; EXPRESSED IN HELA, SIGNAL = 2.7; EXPRESSED IN HBL100, SIGNAL = 1.6; EXPRESSED IN LUNG, SIGNAL =   2; EXPRESSED IN BONE MARROW, SIGNAL = 2.5; EXPRESSED IN ADULT LIVER, SIGNAL = 2.5; EXPRESSED IN FETAL LIVER, SIGNAL = 2.7
atgcaaggtggtcttcatgcttgatgataaaaagggaatttctgtttctgaccaagatataggaaaaggagccaaatttatcaatttgcatgaaataacaccaaaataaccccttcataatatatcagacacatgacttcaaaagactagatatcaagcaacaaagaacaacgatacctgagaaacgaggactaaatgcttgtgtccccacaaatttatattttgaagcctaattcacaatgtgatgatatttagaaatggagcctttgaaagattaggtcataaggatggagtcctcatgaatgggattagtgcccttgctaaagaggcaccaagagctccttttcctcttctgccaagtgagggcaaagtgagaagatgatgtctataaatcaaaaagtgggccctcaccagacaccaaatc

SEQ ID NO: 2006 - DNA, 418 bp, Homo sapiens
  MAP TO AL033539.16; EXPRESSED IN ADULT LIVER, SIGNAL = 1.7; EXPRESSED IN PLACENTA, SIGNAL = 2.7; EXPRESSED IN BONE MARROW, SIGNAL = 2.2; EXPRESSED IN BRAIN, SIGNAL = 2.3; EXPRESSED IN FETAL LIVER, SIGNAL = 3.2; EXPRESSED IN BT474, SIGNAL = 1.4; EXPRESSED IN HEART, SIGNAL =   3; EXPRESSED IN HELA, SIGNAL = 2.5; EXPRESSED IN HBL100, SIGNAL = 1.7; EXPRESSED IN LUNG, SIGNAL = 3.6
aaggggtttcctgatccttgactgcactaatgtagaggtgtctatgcatggcaggtcttcctggagaacccttgatctgctcatttgtgaaacctggagaaaaatgattgaatgccagtgaagtcatggataggactttcataggtcttgtttgactgctcagacataagtcttattaatatctgtcactggaaaccttagtgtggaaaagcaaaagctatgaacactgacttgtcaggtttgagtcctgactatgcatgtcccttattagttaaatgactttatgcaagtcacttcctcttctaaaacttcagtttccacatctatgaaatggcagtcatcatcatcatcatcatcatcatcatcatcatcatcatcatctttatcatttcgtctcccttttgggatgctgtgaggt

SEQ ID NO: 2007 - DNA, 413 bp, Homo sapiens
  MAP TO AP000470.1; EXPRESSED IN PLACENTA, SIGNAL = 1.2; EXPRESSED IN HEART, SIGNAL = 1.1; EXPRESSED IN BRAIN, SIGNAL = 1.4; EXPRESSED IN FETAL LIVER, SIGNAL = 0.88
gggtgaaggtgcttcaagtgacacacaaaaaagcattgtatagatttacttttttctgtctagttgtttgcatgactcaactctcacttgtacttaaaccagtccattacagtatctccttcatgagggcagtaagcttcaatctaggaaaattaacacaaaaaggttaatgggaaaagcaagctaaggtccctactcttgcagtttgtctgaatcaaaatagttgatactcattgccttcttccttcacctcccattctagattactagccccttgctagcaattagttagtctggcttacttgcctgttggaggtaacccagatcatcaaaggggtatcgattaggctgtggttgttcttattatttgttcctacgatagttttgattaacctgtcactgctcccaattag

SEQ ID NO: 2008 - DNA, 407 bp, Homo sapiens
  MAP TO AL049697.8; EXPRESSED IN PLACENTA, SIGNAL = 3.1; EXPRESSED IN BRAIN, SIGNAL = 1.9; EXPRESSED IN ADULT LIVER, SIGNAL = 2.2; EXPRESSED IN FETAL LIVER, SIGNAL = 2.5; EXPRESSED IN BT474, SIGNAL = 1.8; EXPRESSED IN HEART, SIGNAL = 3.1; EXPRESSED IN HELA, SIGNAL = 2.9; EXPRESSED IN HBL100, SIGNAL = 1.8; EXPRESSED IN LUNG, SIGNAL = 2.9; EXPRESSED IN BONE MARROW, SIGNAL = 2.3
catcacataccagcctaaggaagtgaaagaacaaaaaataaatatgaaaaagtgaaggaatgctagaacagaaaagtcagataaaaatgaagtatgagaatatcacctgacactgcttcaggattattttgcagttctttcagcccaaaaaaaaaatttgagtcttaattttaaattcacctacaaatctatttttaaaacacaagcttaacacgcaactttactatgcaggtaacagccgagagctgcactgcatcatgggaaagcagaagggagggtcaaccaataccttgtaaacccgaatgtactcttcaatgctcaagtcccgaaatttttgccacagtgaaagtgcttgcacatcgcccagttccaatcgttggaagaactcctgtgctgcttttgctaca

SEQ ID NO: 2009 - DNA, 487 bp, Homo sapiens
  MAP TO AP000550.1; EXPRESSED IN PLACENTA, SIGNAL =   7; EXPRESSED IN HBL100, SIGNAL = 3.6; EXPRESSED IN HELA, SIGNAL = 5.7; EXPRESSED IN HEART, SIGNAL = 6.6; EXPRESSED IN BRAIN, SIGNAL = 5.8; EXPRESSED IN BONE MARROW, SIGNAL = 5.1; EXPRESSED IN LUNG, SIGNAL = 4.2; EXPRESSED IN ADULT LIVER, SIGNAL = 5.1; EXPRESSED IN BT474, SIGNAL =  15; EXPRESSED IN FETAL LIVER, SIGNAL = 5.6
gtacagggcagagccacccaatccccacgcaggcgctgtgtcctgccatgctggcctcctcctggccatcacatcaggccaagcaggggagaggaatgggaatgcccacgcacccctatcaactctgcagacacagaaccatgcacagctcttgggaggagtcagatgagctgctcaaagcccaggagggacccacacagtggtcagcatggcagggacggtgctttagccaaggcagggatggtgggtgactcactcaggatcttcaaggaggccgctgcatttccgtgctctttccagataacaaggacgtgtcagtgatgatgagcgagatggacgtgaacgccatcgcaggcatgctgaagctgtacttccgtgagctgcccgagcccctcttcactgacgagttctaccccaacttcgcagagggcatcggtgagcactggaggccttggcctcatgggagacgtctcctccacgtgcactg

SEQ ID NO: 2010 - DNA, 486 bp, Homo sapiens
  MAP TO AC009967.1; EXPRESSED IN BT474, SIGNAL = 3.4; EXPRESSED IN FETAL LIVER, SIGNAL = 1.9; EXPRESSED IN ADULT LIVER, SIGNAL = 1.3; EXPRESSED IN HELA, SIGNAL = 5.8; EXPRESSED IN PLACENTA, SIGNAL = 2.8; EXPRESSED IN HBL100, SIGNAL = 2.6; EXPRESSED IN HEART, SIGNAL = 1.6; EXPRESSED IN BRAIN, SIGNAL = 1.8; EXPRESSED IN BONE MARROW, SIGNAL = 1.1; EXPRESSED IN LUNG, SIGNAL = 1.7
ccagttgcaccattttcatcatgttcatcatgttcatcatcactagcaaatttcgttttcttgccctgaaactgtacttttcctttaccagacccaggctgggcagctttattaccctttccttttcctttaaatctacgacctgtagagacacaattgagcactctgtaaagaactttttttaagtctcttgtcaatgtttttgaacactgattaaagtttttgctcaagtaaatgggttcaacaaccaaactgttaaagaaaaatcagaataaatgaccttttgacttccatttgtttagggattcttgttggtcttctattattttcttcagtgcttctttttccacctctccttctagtacttcccaagtcacttctttgttccttaattgtaggttaccattatttgcatctttggctttacccaatgcttccttggctttttctttaaatagaattatcccctataccagagacagaaaa

SEQ ID NO: 2011 - DNA, 470 bp, Homo sapiens
  MAP TO AL031685.15; EXPRESSED IN BT474, SIGNAL =  23; EXPRESSED IN ADULT LIVER, SIGNAL = 4.9; EXPRESSED IN FETAL LIVER, SIGNAL = 2.7; EXPRESSED IN HELA, SIGNAL =  28; EXPRESSED IN PLACENTA, SIGNAL =  35; EXPRESSED IN HBL100, SIGNAL =  14; EXPRESSED IN HEART, SIGNAL = 1.1; EXPRESSED IN LUNG, SIGNAL =   7
tggtgacttctgtagtgttctcctcaatctactgagatcagtacatgtccagctcctctctgttcttctgagccagcttgtcatattgggcctgcatgtctgtcatgatcttgctgacgtcctgagatttgggggcatctacctccacagtcaacccagagctggcaatctgggcttataggccttttacttcctctttgtggttcttcttcatgaagagcagctcctcctagagagcctcgatctctgtctccagctgcagccaagtgacattggtgtcatcagtgaccttgcagagcccatggatgtcgctctccacagactggcgcatggccagctctgtctcctacttgactgtaaagtcatcagcagcaagacaggcattgttgatctgcagaacaatgcaggcattgtccacagtatttgtgaagatctgagccctcaggtcctcgatggttttgaagtgatgg

SEQ ID NO: 2012 - DNA, 469 bp, Homo sapiens
  MAP TO AL022238.1; EXPRESSED IN BT474, SIGNAL = 0.98; EXPRESSED IN FETAL LIVER, SIGNAL = 1.7; EXPRESSED IN HEART, SIGNAL = 1.9; EXPRESSED IN LUNG, SIGNAL = 1.4; EXPRESSED IN BRAIN, SIGNAL = 1.6; EXPRESSED IN ADULT LIVER, SIGNAL = 1.5; EXPRESSED IN PLACENTA, SIGNAL = 1.7; EXPRESSED IN HELA, SIGNAL = 1.7; EXPRESSED IN HBL100, SIGNAL = 1.5; EXPRESSED IN BONE MARROW, SIGNAL = 1.9
aggaacttggtctgccctgtggggctgtggccttagcacctagcacactgtttgggtccatcagtatttgttaagtgaaatatccgtggaaagggccagtctccaagaagagacttcactaataaagagtatgacacagatttctaattcctggcatctccacatgttcacacacactgatcctgacatctatctactctgtgaaagaggaagcaacccgagtttacaaagatggaaagtgaacagagcaaggcctctgttattatttattgttgtatgtccctgtttcttaaagcaacaggcactatcccaagttcatacaacctgtgcatgaggctctcaaactctgtgccttggttctcccaaggctaagcaggaagtcaaagattaagaagtcaagagcctcagcccaattctgcttcagcctggcactccctcccctcctgcatctcagctgcctctcacacag

SEQ ID NO: 2013 - DNA, 476 bp, Homo sapiens
  MAP TO AL096887.5; EXPRESSED IN PLACENTA, SIGNAL =   1; EXPRESSED IN HBL100, SIGNAL =   2; EXPRESSED IN HEART, SIGNAL = 0.96; EXPRESSED IN BONE MARROW, SIGNAL = 0.92; EXPRESSED IN ADULT LIVER, SIGNAL = 2.9; EXPRESSED IN BT474, SIGNAL = 1.4; EXPRESSED IN FETAL LIVER, SIGNAL = 1.4; EXPRESSED IN HELA, SIGNAL = 0.95
ttcattatcaccaatgaaaggcttataacagcatgagtgaacagaaccatctctatgatagtcctgaatggctttttggtctgaaaaatatgcattggctctcattacatttaaccaaaattatcacaatatatagaatgagatctttaacattgccaattaggtcagtggtcccaagtagtcacttagaaaatctgtgtatgtgaaatactgtttgtgacttaaaatgaaatttatttttaataggtgaacataatattgaggagacagaacatacagagcaaaagcgaaatgtgattcgaattattcctcaccacaactacaatgcagctattaataagtacaaccatgacattgcccttctggaactggacgaacccttagtgctaaacagctacgttacacctatttgcattgctgacaaggaatacacgaacatcttcctcaaatttggatctggctatgtaagtggctgg

SEQ ID NO: 2014 - DNA, 468 bp, Homo sapiens
  MAP TO AB020878.1; EXPRESSED IN BONE MARROW, SIGNAL = 4.8; EXPRESSED IN BT474, SIGNAL = 3.8; EXPRESSED IN HBL100, SIGNAL = 5.4; EXPRESSED IN BRAIN, SIGNAL = 4.1; EXPRESSED IN LUNG, SIGNAL = 5.2; EXPRESSED IN ADULT LIVER, SIGNAL = 5.2; EXPRESSED IN FETAL LIVER, SIGNAL = 3.8; EXPRESSED IN PLACENTA, SIGNAL =  58; EXPRESSED IN HEART, SIGNAL = 5.5; EXPRESSED IN HELA, SIGNAL = 6.6
catattcagcccactgacccagaagtgcaaagtgctcatgttagggggcagtgccctgaatcacaactaccggggctacatcgagcacttcagtctgtggaaggtggccaggactcagcgggagatactgtctgacatggaaacccatggcgcccacactgctctacctcagctcctcctccaggagaactgggacaatgtgaagcatgcctggtcccccatgaaggatggcagcagccccaaagtggaattcagcaatgcccacggctttctgctggacacgagtctggagcttcttctgtgcggacagacattgtgtgacaacacagaggtcattgccagctacaatcagctctcaagtttccgccagcccaaggtggtgcgctaccgcgtggtcaacctctatgaagatgatcataagaacccgacggtgacgcgcgagcaggctggatcttccagcaccatcag

SEQ ID NO: 2015 - DNA, 475 bp, Homo sapiens
  MAP TO AL049732.9; EXPRESSED IN PLACENTA, SIGNAL = 0.97; EXPRESSED IN HEART, SIGNAL =   1; EXPRESSED IN BRAIN, SIGNAL = 1.5; EXPRESSED IN FETAL LIVER, SIGNAL =   2; EXPRESSED IN ADULT LIVER, SIGNAL = 1.6
tactaagtgccccaccgaagccagcactggtgctaaatgcaccgccaaagccagggttggtgattggtgcaccactgaagcaagcactggtgctgacagcaccactgaagctggcactggtgctgacggcacagccaaagctggcattggtgttgagtgcaccaccaaagccagcactggtgctgggagagccaccaaaacagacgctggtgcttagtgtaccaccaaagtcagtgttggtgctgacagcaccaccataaccagcattggtgttgagtgcactgccaaagctgacactggtgccaggagagccaccaaagcagacactggtgcttagtgtaccgccaaagtcagcactggtgctcatagcaccaccaaaaccagtactggtgttgagcacactgccaaagctggcactggtgttgagagcaccaccaaagccagcaccagtgctgggagagccatcaaagcagat

SEQ ID NO: 2016 - DNA, 467 bp, Homo sapiens
  MAP TO AL035427.17; EXPRESSED IN PLACENTA, SIGNAL = 2.2; EXPRESSED IN BONE MARROW, SIGNAL = 1.6; EXPRESSED IN FETAL LIVER, SIGNAL = 1.7; EXPRESSED IN HEART, SIGNAL = 2.2; EXPRESSED IN HELA, SIGNAL = 1.3; EXPRESSED IN HBL100, SIGNAL = 1.3; EXPRESSED IN BRAIN, SIGNAL =   3; EXPRESSED IN LUNG, SIGNAL = 2.1; EXPRESSED IN BT474, SIGNAL = 1.4; EXPRESSED IN ADULT LIVER, SIGNAL = 1.5
gagttgctgctgacaaccaccctcaacgggtctgcacccatccaggaaatatctgtcttcctttagcttggttgtacctgttctcactctatctgtattattgaattattgactgagactgtgtttgggaaggaggctgagtgactactggactggatattgactctaactcttattcccaagcttatatccttaatcacctaaagatcagagtgtgaagaaacaaacctgtgacagatctgtggttgaggtttagactacgggaggagtatattacctgactttctttgtaacttgtaccatgactggggcagagattgagcctagtgcccaggccaagcctgaaaagaaggctggggaagaggttatcgctgggcctgagagagagaatgatgtccctctggtggtcagacccaaggttaggacccaggcaactactggggcaaggcccaaaactgagaccaagt

SEQ ID NO: 2017 - DNA, 467 bp, Homo sapiens
  MAP TO AC006001.2; EXPRESSED IN BRAIN, SIGNAL =   2; EXPRESSED IN BT474, SIGNAL = 1.6; EXPRESSED IN BONE MARROW, SIGNAL = 1.7; EXPRESSED IN LUNG, SIGNAL = 1.1; EXPRESSED IN ADULT LIVER, SIGNAL = 1.9; EXPRESSED IN FETAL LIVER, SIGNAL = 1.6; EXPRESSED IN PLACENTA, SIGNAL = 2.6; EXPRESSED IN HEART, SIGNAL = 1.9; EXPRESSED IN HELA, SIGNAL = 1.7; EXPRESSED IN HBL100, SIGNAL = 1.3
ttccatcaatatgtcatctcctcttctaggtactatgtcacccagcctgggtgacagcatgagactccatctcaaacaaaaaagtttaagtaagctcccagctgagacctaaagtatgagaagggaccagtggggaaagaattgcagggaagagcatccaggcaaagggaacagcttatgcaaacacacagattccaggggaaaagaactaggggacagtgaaattggaggaggtgaggcagcaccaggtcatggtgaacctcagagctatttggggggtgtcgattttggtgcaaatgcaataggaagcccttggggaaaggggcggtttaagaaggagaatgagatggggcctgatttacattttctgcaagttattctggctgttgggggtagagaggaggcagggaggcgggaaggaggctgtgctggcctccagggccaagctggtgatggcttgacacagg

SEQ ID NO: 2018 - DNA, 447 bp, Homo sapiens
  MAP TO AC009945.1; EXPRESSED IN BT474, SIGNAL = 6.1; EXPRESSED IN PLACENTA, SIGNAL = 5.1; EXPRESSED IN BONE MARROW, SIGNAL =   3; EXPRESSED IN BRAIN, SIGNAL = 2.9; EXPRESSED IN ADULT LIVER, SIGNAL = 3.1; EXPRESSED IN FETAL LIVER, SIGNAL = 3.1; EXPRESSED IN HEART, SIGNAL = 3.6; EXPRESSED IN HELA, SIGNAL = 4.6; EXPRESSED IN HBL100, SIGNAL = 6.8; EXPRESSED IN LUNG, SIGNAL =   4
gttctgcaatactgggcctgccgcctaccctccctgagcctcagtttgctggcccgtgaagtgggcatagtcacgaagcgtctcatctccgtcgggctcagtgtcaggtgccgttgcccctttcagaccgctgtttaacaactttggacagccttccatgggctatgtgcaggcgatgaagccaccggcgcccagggctcccagagcacctacaacgacctgctgtcggtcatagaggagaagggcaaagagatccggcctgcctatgctggcagcaagagcaccatggagcgcctgaagagaggtatcatccatgcccgggccctagtcagagagtgcctggcagagacagagtgcaatgcccgcacgaaacaggaagcccctcggcctcaggggctggacctttcctggccactgcagagcacccgcttctccctggccttcatc

SEQ ID NO: 2019 - DNA, 445 bp, Homo sapiens
  MAP TO AP000550.1; EXPRESSED IN PLACENTA, SIGNAL = 3.8; EXPRESSED IN HELA, SIGNAL =   4; EXPRESSED IN HEART, SIGNAL = 2.3; EXPRESSED IN BRAIN, SIGNAL = 2.4; EXPRESSED IN BT474, SIGNAL = 1.8; EXPRESSED IN HBL100, SIGNAL = 2.5; EXPRESSED IN LUNG, SIGNAL = 3.2; EXPRESSED IN BONE MARROW, SIGNAL = 3.8; EXPRESSED IN ADULT LIVER, SIGNAL = 7.3; EXPRESSED IN FETAL LIVER, SIGNAL = 1.7
gggaaacttgtgtgtactgggcctagaggcctcggatgtggaggagtcattcctgagggcgagtgtctgccctggtgctatatctgctgccttttcacactgggtgtgacctgaagagacagcctgaggcctgtcctcactcactgtctttgaggaactgagggtcagctggcagtgggatgaggctggccccctcctccgctttagccccggcaagcctcccgtggagctgtaggagctggagatggcatttcggttggtgcaggagctcgtccaggaggtctgggatgtctggttatatctgatttctgacctctgggcatggaggtctgtctgcagaggcccgggcccgggcacaaagggagagaggcctccattgtcccgcaggggccgaaatgcagacggtgcatccccggtgacctcggggacccttctctgatcacca

SEQ ID NO: 2020 - DNA, 460 bp, Homo sapiens
  MAP TO AC009892.1; EXPRESSED IN PLACENTA, SIGNAL =   2; EXPRESSED IN HEART, SIGNAL = 1.6; EXPRESSED IN BRAIN, SIGNAL = 2.4; EXPRESSED IN BT474, SIGNAL = 1.8; EXPRESSED IN HELA, SIGNAL = 2.8; EXPRESSED IN HBL100, SIGNAL = 2.1; EXPRESSED IN LUNG, SIGNAL = 3.2; EXPRESSED IN BONE MARROW, SIGNAL = 4.8; EXPRESSED IN ADULT LIVER, SIGNAL = 2.1; EXPRESSED IN FETAL LIVER, SIGNAL = 2.8
tccctgagtctccctgagtctccaggcaggtggggagcagccacgtctcagggcagctccaggtgggatgatgttggggcgagagggctcagggctcctggggccggagacacaggaagatcagcagtggtgaggccccgggggagagggaggatatgtggggaagcctgagggtcggctcctggaaaccatgagcaccttttcccaggtgtttctaagaagccatcactctcagtgcagccaggtcctatagtggcccctggggagagcctgaccctccagtgtgtttctgatgtcagctacgacagatttgttctgtataaggagggagaacgtgacttcctccagctccctggcccacagccccaggctgggctctcccaggccaacttcaccctgggccctgtgagccgctcctacgggggccagtacagatgctccggtgcatacaacctctcct

SEQ ID NO: 2021 - DNA, 444 bp, Homo sapiens
  MAP TO AC011406.1; EXPRESSED IN ADULT LIVER, SIGNAL = 1.5; EXPRESSED IN PLACENTA, SIGNAL = 1.5; EXPRESSED IN BRAIN, SIGNAL = 1.9; EXPRESSED IN FETAL LIVER, SIGNAL = 1.8; EXPRESSED IN BT474, SIGNAL = 1.3; EXPRESSED IN HEART, SIGNAL = 1.6; EXPRESSED IN HELA, SIGNAL = 2.4; EXPRESSED IN HBL100, SIGNAL = 1.2; EXPRESSED IN LUNG, SIGNAL = 1.1; EXPRESSED IN BONE MARROW, SIGNAL = 1.6
ttgtcaccagccttgtcttggtggccaatgcccctcaccccacctgtaccccagaactccatgtaataatgccccatgccctctctctcatggggaagagagtacctcctctgtgttggggacgttagcaatcttcttagagtgtgcgacatggcccacgatgcccatgtccaaagggaagacgatctcttggtcgggcatcaccaggcagtcctcgaggacagcatccttgtggacattgaaaagcctggtggccagctctgcgatgccattgcgggtccggtacatgaacaggctcatgcggtctgcctgcaggaggaagcacagcttcttcatgacattgaagatgcatttctctgtctgtaaattctcctgaaagtcccgcaggagatcaaagatgatttcgctctcctccatgctgctcggggagtggtagttgctgaa

SEQ ID NO: 2022 - DNA, 459 bp, Homo sapiens
  MAP TO AL109613.10; EXPRESSED IN LUNG, SIGNAL = 1.1; EXPRESSED IN ADULT LIVER, SIGNAL = 0.91; EXPRESSED IN PLACENTA, SIGNAL = 2.9; EXPRESSED IN BRAIN, SIGNAL = 0.97; EXPRESSED IN BT474, SIGNAL = 1.8; EXPRESSED IN HEART, SIGNAL = 0.92; EXPRESSED IN HELA, SIGNAL = 2.3; EXPRESSED IN HBL100, SIGNAL = 1.1
aaaggttgtcccagcttgtggttcccaccccttaaataaattcccatgctggtgttatcttcagactttcctatgggcaaagcatttaatgggtgaggcagagtgaggccagatggatcccctccttccaaacctacaaaagccagaggagcaccgggacccctagctcttaccaaaccttgaaaagccagaggagcaccaggacccccagcgcttaccctgcagtccatgctcagtacgtgctgggcgatgaccttggggtcgttgttggtgaacagttcttttgcacgtttcaacattgctgtttccaggggcttattctcagggggaaggaactttgactcaaactcgttgggcctgaaggaggagacagtctccaggaggggcgtcacaaactcgcccttgtcccactgccccttctccatctgagctgccgcaggttcccaaggtctttccctg

SEQ ID NO: 2023 - DNA, 459 bp, Homo sapiens
  MAP TO AC005048.2; EXPRESSED IN HBL100, SIGNAL = 1.6; EXPRESSED IN PLACENTA, SIGNAL = 3.8; EXPRESSED IN HELA, SIGNAL = 2.1; EXPRESSED IN HEART, SIGNAL = 2.1; EXPRESSED IN BRAIN, SIGNAL = 1.6; EXPRESSED IN BONE MARROW, SIGNAL = 1.6; EXPRESSED IN LUNG, SIGNAL = 1.5; EXPRESSED IN ADULT LIVER, SIGNAL = 1.4; EXPRESSED IN BT474, SIGNAL =   3; EXPRESSED IN FETAL LIVER, SIGNAL = 1.6
atactcaaggcgtctgcctctcctggtggaatcctgcataatttcccaactaccaggacagacacagattatttggatcaacttgtttgcagaaggatgagctcttaaagctgaggtatttttgcaatcctccactctccaaaatagggtagtttggagatgccgttaagcagataaggtgcgggcagccccagtaagatcaaactgaactttgctcagacagtgggtaggatccaggcagacccggggactcacgaatgcacgcgtagggatctgagatggtcttgagcgggtccctgtagaagaggggtctgcagcggtcgcagtgctgcccctcagtgttgtgctggcagtcttcacacacgcccccgctgaggccaccgcttgccaggtacgtagtcatgtcaaagtgacagcggctggagtggctattacagctgcacgctgaaaggagaagac

SEQ ID NO: 2024 - DNA, 458 bp, Homo sapiens
  MAP TO AL031685.15; EXPRESSED IN PLACENTA, SIGNAL = 2.4; EXPRESSED IN BRAIN, SIGNAL = 1.8; EXPRESSED IN ADULT LIVER, SIGNAL = 1.4; EXPRESSED IN FETAL LIVER, SIGNAL = 2.2; EXPRESSED IN BT474, SIGNAL = 1.1; EXPRESSED IN HEART, SIGNAL = 1.9; EXPRESSED IN HELA, SIGNAL = 2.2; EXPRESSED IN HBL100, SIGNAL = 1.4; EXPRESSED IN LUNG, SIGNAL = 1.2; EXPRESSED IN BONE MARROW, SIGNAL = 1.7
caaaagctttgtttttctttctttctttttttttttttttttaagatcatagcccactgcagccttgaactcctgggctcaagtgatcctctcagtctcccaagcagctgggattacaggtgtgagccccatgccttgcttgactatggagccattttcaccaaaccatcattaatattttatttccaaggaatacatttttggaaatgtcacattaatacattaaaaatgcatgtatcaaatgttcataattggttctcactatttttggtctttaaattgtaggcgccagatgttcatttattaggtgtttggtttactttatgaaatttcaaagccagaggaacaaacaaaagataagggagtgagggatctggctctgaggagctgctgccctgctgccagggaaagtctcaactgacttctcaaacaggataaggaagcaagatcagctctgg

SEQ ID NO: 2025 - DNA, 404 bp, Homo sapiens
  MAP TO AC009704.2; EXPRESSED IN LUNG, SIGNAL =  19; EXPRESSED IN ADULT LIVER, SIGNAL = 8.8; EXPRESSED IN PLACENTA, SIGNAL =  18; EXPRESSED IN BRAIN, SIGNAL = 5.5; EXPRESSED IN BONE MARROW, SIGNAL = 9.3; EXPRESSED IN FETAL LIVER, SIGNAL = 4.1; EXPRESSED IN BT474, SIGNAL =  81; EXPRESSED IN HEART, SIGNAL =  12; EXPRESSED IN HELA, SIGNAL =  30; EXPRESSED IN HBL100, SIGNAL =  12
  unsure 124
tcgcttcttcctctttctcgactccatcttcgcagtagtggcagctgggaccgcggttcagtcaccaatatgcagctctttgtccgcgcccaggagctacacacccttgaggtgactggccagngaaatggtcgcccagatcaaggctcatgtagcctcactggagggcattgccccggaagatcaagtcgtgctcctggcaggtgcaccgctggaggatgaggccactctgggccagtgcggcgtggaggccttgactgccctggaagtagcaggccgcatgcttggaggtaaagtccatggttccctggcccgtgctggaaaagtgagaggtcagactcctaaggtggccaaacaggagaagaagaagaagaagaggaagaagaagacaggtcaggctacgc

SEQ ID NO: 2026 - DNA, 457 bp, Homo sapiens
  MAP TO AL034405.4; EXPRESSED IN HELA, SIGNAL = 1.4; EXPRESSED IN HEART, SIGNAL = 1.1; EXPRESSED IN BONE MARROW, SIGNAL =   1; EXPRESSED IN BRAIN, SIGNAL = 1.2; EXPRESSED IN ADULT LIVER, SIGNAL =   1; EXPRESSED IN FETAL LIVER, SIGNAL = 0.95; EXPRESSED IN PLACENTA, SIGNAL = 1.4
gaatagccttttgtgtgcagcatacatgggcaagcttttaccaccaaaggcaacttgaaggtccactgtatgactcatggagcaaacaataactcagcacaccagagaaggaagctagccattgagaacactatggcttaattaggtatgaatggaaagaatctcagaaatgtttactggaaatcctggccccttcagtgaaggtggtggaaccaatataccaacatgctcaacagtggtcttgccatgaagactagcgagatctctatgacccagagtggtggtgttcccaccctcccagtttctgtgggggccaactctgctgtgaataacactgctgagtccaagatggatggctcccagtcaggtatcagtgccaatgtggaaaaaccaggtgctactgagactgttcccacacattggttccctcacttcctggaagaaaacaagattgtgg

SEQ ID NO: 2027 - DNA, 393 bp, Homo sapiens
  MAP TO AC009954.1; EXPRESSED IN PLACENTA, SIGNAL =  10; EXPRESSED IN HBL100, SIGNAL = 5.1; EXPRESSED IN HELA, SIGNAL = 8.9; EXPRESSED IN HEART, SIGNAL = 4.3; EXPRESSED IN BRAIN, SIGNAL = 2.7; EXPRESSED IN BONE MARROW, SIGNAL = 2.4; EXPRESSED IN LUNG, SIGNAL = 4.7; EXPRESSED IN ADULT LIVER, SIGNAL = 3.6; EXPRESSED IN BT474, SIGNAL =  11; EXPRESSED IN FETAL LIVER, SIGNAL =   2
aaaagggtgggaaaaatgaagaaaattaaaagaaattctacttcctatatctgtcctgcttagagaagacaagttatagcaaaatgagtacttcaggtttctcttttaataaacaaaaccatccaaggtacagttccaaagtacaaaatcaaccaggtctgaactgattggtgataagagcacacagatcagtccttccttaaggaaacagtttcctccctgatgccctctttggtcactatgcagatccggagtgcgtccccagtgtacacatctctctcagccgcagaaatgaagacatctttcaccagccgcatggctctgtccaaggacagcggaacatgctccacattctgcatgttcttaaaaccaacctggtgggacatgaaactt

SEQ ID NO: 2028 - DNA, 462 bp, Homo sapiens
  MAP TO AC008037.3; EXPRESSED IN BT474, SIGNAL =  63; EXPRESSED IN ADULT LIVER, SIGNAL =  27; EXPRESSED IN FETAL LIVER, SIGNAL =  10; EXPRESSED IN HELA, SIGNAL =  66; EXPRESSED IN PLACENTA, SIGNAL =  35; EXPRESSED IN HBL100, SIGNAL =  41; EXPRESSED IN HEART, SIGNAL =  35; EXPRESSED IN BRAIN, SIGNAL = 8.8; EXPRESSED IN BONE MARROW, SIGNAL =  35; EXPRESSED IN LUNG, SIGNAL =  40
gcatatagaaaattgcctgagctttcctcagctgctgccaaggtgttcggtccttccgaggaagctaaggacacattgaggtgaggccctcacttcatccagtgactagcactgcgtccggcagcgccagtcccacactcgcccgcgccatggcctccatctccgagctcgcctgcatctactcagccctcattctgcacgacaatgaggtgactgtcacagagtataagatcaaggccctcattaaagcagctggtgtaaatgttgaaccttttcggcctggcttgtttgcaaaggccccggccaatgtcaacattaggagcctcatctgcaatgtaggggctggaggacctgctccagcagctggtgctgcaccagcaggaggtgatccacccgcatcaacctccctaagtgctgggataataggcatgagccaccgtggtcagccaagaatgcgcatac

SEQ ID NO: 2029 - DNA, 460 bp, Homo sapiens
  MAP TO AP000507.1; EXPRESSED IN BT474, SIGNAL = 2.4; EXPRESSED IN FETAL LIVER, SIGNAL = 2.7; EXPRESSED IN PLACENTA, SIGNAL = 4.4; EXPRESSED IN HBL100, SIGNAL = 6.3; EXPRESSED IN HELA, SIGNAL = 7.6; EXPRESSED IN HEART, SIGNAL = 2.6; EXPRESSED IN BRAIN, SIGNAL = 3.5; EXPRESSED IN BONE MARROW, SIGNAL = 3.3; EXPRESSED IN LUNG, SIGNAL =   4; EXPRESSED IN ADULT LIVER, SIGNAL = 1.9
tttctcacctggaccctctgcagctgatgttttcttcttacaacaacggacatagaaaataataataacaaaaatagcagcagccagcagcaacagcagaaacatggaatgtctgccaatgactctgaagcaccagcactttccctgaaaaaaagggacttgttatacactgggcagagagccacagccatccctgctgtccctaccctggcctgaccctctccagggtcaccctaggctcaccagagggcacagggtgagtgctgtgattcccgctgtgttccatgtagcaggtgaacctctgctcctctcctcggcaaatcctggtggccacccaggtctggtaggttccattcccatcaggcaggacatccccccactgctgggtgtcgtggctcaaagataccccatcctgacgccaggtcagtatgatattccggggatagaagctggaagccct

SEQ ID NO: 2030 - DNA, 445 bp, Homo sapiens
  MAP TO AL035665.22; EXPRESSED IN BT474, SIGNAL = 1.1; EXPRESSED IN ADULT LIVER, SIGNAL =   1; EXPRESSED IN FETAL LIVER, SIGNAL =   1; EXPRESSED IN HELA, SIGNAL = 0.99; EXPRESSED IN PLACENTA, SIGNAL = 8.1; EXPRESSED IN HBL100, SIGNAL =   1; EXPRESSED IN HEART, SIGNAL = 2.6; EXPRESSED IN BRAIN, SIGNAL = 1.2; EXPRESSED IN LUNG, SIGNAL = 3.4
cacgtgtacatctttatgcccacacagaagggtaacagcagccttgcttcagaggccacaccttccaggaaacccttcagcctgccgtgtcttagctgatccctctgccatccccttgcagaaggagcttggagtctctcagctcagctggactagatgaatcttctcagggtcgtcttctcccacctctggctcccagttccttcccccagtctctccctccctgctctgtgtgatcagggaagctgcaaacccaacccttacatcaaaagggaacttgaaaaatacttggagcaaaaactgctaactgtgcatccttgctgtatgctggcgctgatattaaatcaggaaatggcactgaacagccgctccgaacacagaaacaggggttgtcaacacagcaaccaaaagcaatctctaacgggcagaggtgaaagggacctgg

SEQ ID NO: 2031 - DNA, 459 bp, Homo sapiens
  MAP TO AP000553.1; EXPRESSED IN BRAIN, SIGNAL = 1.5; EXPRESSED IN BONE MARROW, SIGNAL = 1.9; EXPRESSED IN LUNG, SIGNAL = 1.5; EXPRESSED IN BT474, SIGNAL = 2.1; EXPRESSED IN FETAL LIVER, SIGNAL = 1.8; EXPRESSED IN ADULT LIVER, SIGNAL = 1.8; EXPRESSED IN HELA, SIGNAL = 4.4; EXPRESSED IN PLACENTA, SIGNAL = 2.2; EXPRESSED IN HBL100, SIGNAL = 4.7; EXPRESSED IN HEART, SIGNAL = 1.5
ctgcacagacagatgcaatggtgtgtgcatgtgtctgaagagcccatgctggggagggagtgctagaggttgcgggggcgggtcatggtgtcaccttttgcagctgtgggagctgaggctccaggaagggtagggaagaacccgaggctcggtgtactaggtgcgaatgccgccttctgtggtgaccactgtcttctcatcctttgcacctataggaggtgagtgcctttggggaagacggcgagggcgacgacctggacctatggacagtgcgctgctctggacagcactgggagcgtgaggctgctgtgcgcttccagcatgtgggcacctctgtgttcctgtcagtcacgggtgagcagtatggaagccccatccgtgggcagcatgaggtccacggcatgcccagtgccaacacgcacaatacgtggaaggccatggaaggcatcttcatcaagc

SEQ ID NO: 2032 - DNA, 443 bp, Homo sapiens
  MAP TO AC010678.1; EXPRESSED IN PLACENTA, SIGNAL = 5.1; EXPRESSED IN HBL100, SIGNAL = 5.5; EXPRESSED IN HEART, SIGNAL = 3.3; EXPRESSED IN BONE MARROW, SIGNAL =   3; EXPRESSED IN BRAIN, SIGNAL = 2.5; EXPRESSED IN LUNG, SIGNAL = 2.8; EXPRESSED IN ADULT LIVER, SIGNAL =  10; EXPRESSED IN BT474, SIGNAL = 6.6; EXPRESSED IN FETAL LIVER, SIGNAL = 3.5; EXPRESSED IN HELA, SIGNAL = 7.8
ttcacgtcctgattccattgattctttgcaaccagcttttgctgccactgttattgctgattaatatcttgctgatcacaggttatggaaagactgtgtttctgttttaagtctctgttagaaattgctgatgcatacactatattgtaaattttttatcttcgtatactgtacttctgcatacataccaatgctatgttaaagaattacttcatccccatgtgaccatctcacctcataatcaaatgatgctaaatccctcactaacctacccccaccctcactaaacttaataataaatgctggtatatccagtgcattggcagcatcacaggaccagaagacggtgacccccctgaacccagctttcactatcttgtgtgtgtcttttatttctcgacctgccgatccacctggaaacaaagaaagagcccctgttgcat

SEQ ID NO: 2033 - DNA, 458 bp, Homo sapiens
  MAP TO AL096775.9; EXPRESSED IN BONE MARROW, SIGNAL = 3.4; EXPRESSED IN FETAL LIVER, SIGNAL = 3.4; EXPRESSED IN HELA, SIGNAL =   4; EXPRESSED IN HEART, SIGNAL =  29; EXPRESSED IN LUNG, SIGNAL = 3.2; EXPRESSED IN BRAIN, SIGNAL = 2.7; EXPRESSED IN BT474, SIGNAL = 2.5; EXPRESSED IN ADULT LIVER, SIGNAL = 3.9; EXPRESSED IN PLACENTA, SIGNAL = 4.1; EXPRESSED IN HBL100, SIGNAL = 2.3
cattcccctgacccacagtgggttctttagatcttccttccctgaccccagcccctgtactctggattaagtgacggaggccaaatctgaaatctgggcatcatgtgtcaggccagggagtccctggcctgccctggatagagtggagggccctagtttgggaggatggtccacctggggtctggggtgcgtgggggctagaacctgggctgagatgtcctggagctgttgtaatggggttagcgaggctttgctggcaggcgtggggcggggggacagggaaagggaagggagaggcactcagattttgatctccgtccggaaggtctgctggacgtgttctgtatgcgggtgacgccgtgcccggatagtgaggctgccgtcctcccgcagagccgaggtcaccgacgtcgggtccacgtcctccggcagctggcacttgtgagcgaaggtgttca

SEQ ID NO: 2034 - DNA, 458 bp, Homo sapiens
  MAP TO AC009312.1; EXPRESSED IN HELA, SIGNAL = 1.1; EXPRESSED IN PLACENTA, SIGNAL = 1.1; EXPRESSED IN HBL100, SIGNAL = 1.4; EXPRESSED IN HEART, SIGNAL = 0.87; EXPRESSED IN BT474, SIGNAL = 1.2; EXPRESSED IN FETAL LIVER, SIGNAL = 1.1
tcaatatagctttcccttttccagtattttttctttaagataacttactttccctataagggaacaccataaaactataagttgttttaattacatgaaagagaagaaaatctaaataatttgtgtcaggaagccatggaagttctcatttgggatttcagtgtttctaagtaaacttctccttctttgtcacagtatatgttctgtttatttaaacaggggcctcaaatctgaccctatcggaaactcaaaatggagatgtatctgaagaaacaatgggaagtagaaaggttaaaaaatcaaaacaaaagcccatgaatgtgggcttatcagaaactcaaaatggaggcatgtctcaagaagcagtgggaaatataaaagttacaaagtctccccagaaatccactgtattaaccaatggagaagcagcaatgcagtcttccaattcagaatcaaaa

SEQ ID NO: 2035 - DNA, 457 bp, Homo sapiens
  MAP TO AC008116.8; EXPRESSED IN BT474, SIGNAL = 2.7; EXPRESSED IN FETAL LIVER, SIGNAL = 2.3; EXPRESSED IN HEART, SIGNAL = 2.4; EXPRESSED IN LUNG, SIGNAL = 3.3; EXPRESSED IN BRAIN, SIGNAL = 3.1; EXPRESSED IN ADULT LIVER, SIGNAL = 3.4; EXPRESSED IN PLACENTA, SIGNAL = 3.6; EXPRESSED IN HELA, SIGNAL = 4.2; EXPRESSED IN HBL100, SIGNAL = 2.8; EXPRESSED IN BONE MARROW, SIGNAL = 2.4
cgcatgagtgattattcccccaactctacagggagtgtccaaaacacctccagagacatggaggcctcagaggaaggctggtcccagaattctcgttcatttcgcttctccagaagctcagaagaaagagaggtgaaggagaaaagaacattccaagaggagatgcctccgcgtccttgtggaggacacgcatccagctccctgccaaagagccacctggagccaagcctagaggagggcttcattgacactcattgtcacctggacatgctctattccaagctatctttccaagggacctttacaaagttcagaaaaatttacagcagctccttccctaaggaatttcagggctgcatctctgacttctgtgatccccgcaccctgacagattgcctatgggaggagctgttgaaagaggatctggtctggggggcctttggctgtcaccctcatt

SEQ ID NO: 2036 - DNA, 369 bp, Homo sapiens
  MAP TO AC005488.2; EXPRESSED IN HEART, SIGNAL = 1.2; EXPRESSED IN PLACENTA, SIGNAL = 1.5; EXPRESSED IN BONE MARROW, SIGNAL = 1.3; EXPRESSED IN FETAL LIVER, SIGNAL = 1.4; EXPRESSED IN HELA, SIGNAL = 2.2; EXPRESSED IN HBL100, SIGNAL = 1.3; EXPRESSED IN BRAIN, SIGNAL = 1.4; EXPRESSED IN LUNG, SIGNAL = 1.6; EXPRESSED IN BT474, SIGNAL = 3.2; EXPRESSED IN ADULT LIVER, SIGNAL = 1.7
ggatgtgttgaatttgaagtgtctatccagaagtattttgggtacttgtttaaggattgtaaaacaatgtttccatttctggatataataaatgtatttgttaatataataaatgaatagattagacccataaactatttgcagtgttgagtcatttcccacagttaaaatcaggatgaaaatatatagctgaatacttgctttgtttcttgtaactgatttctttagtacagaacctgctaaggccatcaaacctattgatcggaagtcagtccatcagatttgctctgggccggtggtactgagtctaagcactgcggtgaagaagatagtaggaaacagtctggatgctggtgccactaatattgg

SEQ ID NO: 2037 - DNA, 455 bp, Homo sapiens
  MAP TO AC008080.1; EXPRESSED IN BT474, SIGNAL =   1; EXPRESSED IN HEART, SIGNAL = 1.7; EXPRESSED IN PLACENTA, SIGNAL = 1.9; EXPRESSED IN ADULT LIVER, SIGNAL = 1.2; EXPRESSED IN FETAL LIVER, SIGNAL = 1.6; EXPRESSED IN HELA, SIGNAL = 1.2; EXPRESSED IN HBL100, SIGNAL = 1.2; EXPRESSED IN BRAIN, SIGNAL = 1.8; EXPRESSED IN LUNG, SIGNAL = 1.1; EXPRESSED IN BONE MARROW, SIGNAL = 1.6
cccagacacacacaaagggaaagatcatatgaagacacagggagaagacgctcacctgctagccagggacaggggcctcagaaggaaccaaccctaccttggaagaagttgacaccctgatctcagacgtccagccttcagaatggtgagaaaatatatttctgttgtggaagtcacacagtctggtactttgtcatggtcatcccaggaaatgattacaatccactaccaagaaatgtctggcaccttcatgacgaccaagctggatgtcaagtcagggatgacagcttgcagcttctgctgatgtttgccctcggagaggagcccccaaaccctgctgtttgtgccgatgtcattcagtgtttgtggagtagcccaggggtctccaaccccgggaccatgtatcggtaccagtctgtggtctgtggcctgttaggaacagcaggaagtgagtg

SEQ ID NO: 2038 - DNA, 491 bp, Homo sapiens
  MAP TO AC008173.1; EXPRESSED IN BONE MARROW, SIGNAL = 1.8; EXPRESSED IN BT474, SIGNAL = 1.3; EXPRESSED IN HBL100, SIGNAL = 1.6; EXPRESSED IN HEART, SIGNAL = 2.8; EXPRESSED IN BRAIN, SIGNAL = 2.5; EXPRESSED IN LUNG, SIGNAL = 1.2; EXPRESSED IN ADULT LIVER, SIGNAL = 2.4; EXPRESSED IN FETAL LIVER, SIGNAL = 2.1; EXPRESSED IN PLACENTA, SIGNAL =   2; EXPRESSED IN HELA, SIGNAL = 2.4
ttgcttgaccttgcattagcagtgagctttattctctattcctacttgtagagtgcatgcagttaagtccataaaggtcctttctactcccaacctcagcaccctaagccatctaagttaaagctggaaatatagtgtagtggtatttatcatgttctttgaccacccagaatattctattttgtaaatttggatataatgcattaagaaaaagtacacaaatagtaagtatacagctcaatacattattttgtgaaaatacctatgtaagaactaatgttggcaattaaagtaaacatgaataaaaccttcaagaagccctcaacatcccacttccaagtcaccaaacccactattccattagcaatgtgtgagattgtcagttgctctgcaactgtgttattgtcacctgtggtaacaacatatatggtcttgtcagtctttttcacgttagccattctagtacatatgtggaggcatcacattgtggt

SEQ ID NO: 2039 - DNA, 481 bp, Homo sapiens
  MAP TO AC007917.15; EXPRESSED IN HBL100, SIGNAL = 3.3; EXPRESSED IN HELA, SIGNAL = 8.5; EXPRESSED IN HEART, SIGNAL = 7.7; EXPRESSED IN PLACENTA, SIGNAL = 8.4; EXPRESSED IN BRAIN, SIGNAL = 6.5; EXPRESSED IN BONE MARROW, SIGNAL = 8.7; EXPRESSED IN LUNG, SIGNAL = 5.3; EXPRESSED IN BT474, SIGNAL = 3.7; EXPRESSED IN FETAL LIVER, SIGNAL = 8.3; EXPRESSED IN ADULT LIVER, SIGNAL = 6.9
ttctcccatgcagagactcccagccatccagcccaccgcttctccagggtttgcttcgcttcagctacacaggcctgtgacctttagctagcacccactccctcccctgcccccagcctctgattactttcagttatcctgcccttctctgtggctcggggaacgtaagtgtctctagcccacagacacagtggggagtcccatagtcacagatgccctgggcttacctgccctgacaactacctgtgcattagcaagaatacagcctttctgctgtggtggcaaatgcagtgctgtcctccacaggttatgaagggggcagcttgacaaaaatcctgaaagacattgagcagagccccttggtgatgctggaccgctggcatctggaagtcatccccagagaggaagtggaaaacggggaccaggtcccatacagcatcatgaacaactatttctccattggtgtggtgagttggtcaaa

SEQ ID NO: 2040 - DNA, 492 bp, Homo sapiens
  MAP TO AC008000.7; EXPRESSED IN PLACENTA, SIGNAL = 3.4; EXPRESSED IN HELA, SIGNAL = 2.1; EXPRESSED IN BT474, SIGNAL =   2; EXPRESSED IN HEART, SIGNAL = 2.5; EXPRESSED IN HBL100, SIGNAL =   2; EXPRESSED IN BRAIN, SIGNAL = 3.7; EXPRESSED IN LUNG, SIGNAL = 1.6; EXPRESSED IN BONE MARROW, SIGNAL = 2.4; EXPRESSED IN ADULT LIVER, SIGNAL =   3; EXPRESSED IN FETAL LIVER, SIGNAL = 2.8
tcctacttgcccttcattgcttgggcaagtcacctgacctctctgagaaacctcagcttccacatctgtgaaatgggcagcgggaataccctgtgagatgatctgcgtgaagcactttccacagggcttggtacccagacacactgagtaagtggataattatcatctgattcttaacacttgttactttgcagagctgagctgtaaatccaggcccatgaggcctctcctgtctggttgacctcactctgcctgcttctatctggtctttcaggatgtgcgacggcccagggtggggcagaggatgaaggagaggcagaggcaggttggatcgagggggccgccattctcctctcagttatctgtgtggtcctggtcacggccttcaatgactggagcaaagagaaacagttccggggcctgcagagccgcatcgagcaggaacagaaatttaccgtggtccgggctggccaggtggtccagatccctgtg

SEQ ID NO: 2041 - DNA, 486 bp, Homo sapiens
  MAP TO AC009473.2; EXPRESSED IN BRAIN, SIGNAL = 4.9; EXPRESSED IN LUNG, SIGNAL =   4; EXPRESSED IN HEART, SIGNAL = 3.6; EXPRESSED IN PLACENTA, SIGNAL = 6.9; EXPRESSED IN BONE MARROW, SIGNAL = 5.4; EXPRESSED IN ADULT LIVER, SIGNAL = 5.9; EXPRESSED IN BT474, SIGNAL = 3.6; EXPRESSED IN FETAL LIVER, SIGNAL = 2.5; EXPRESSED IN HELA, SIGNAL = 4.1; EXPRESSED IN HBL100, SIGNAL = 3.6
gtgcgaactctctgacatgccctgaagacattttcctcattgttgggtatttgcatttggcttctcattacttatgcaagtttctgcagagggtttgaatttttctccagaaaatgggtttttcttttctactgtatcatctggatgcatatttttcaaactttatgctctgccacctcttgaatgctttgctgcttagaaatatcttccgccagataccctacatcgtctctcaagttcgaagttccacagatctctagggcaaggacaaaatgctgccagtctctttgctaaagcatagcaggaatgacctttactccagttcccatcaagtttcttatctccacctgagaccactcaccctggacttcattgtccatatcaccatcagcattttggtcaaagccattcaacaagtctctaggaagttccagactttactacgtcttctagtcttcttctgagtcctccaaactgttccaacct

SEQ ID NO: 2042 - DNA, 450 bp, Homo sapiens
  MAP TO AC010170.3; EXPRESSED IN PLACENTA, SIGNAL = 2.2; EXPRESSED IN HEART, SIGNAL = 2.8; EXPRESSED IN HBL100, SIGNAL = 1.9; EXPRESSED IN HELA, SIGNAL = 2.6; EXPRESSED IN BRAIN, SIGNAL = 2.5; EXPRESSED IN BONE MARROW, SIGNAL = 2.2; EXPRESSED IN LUNG, SIGNAL =   2; EXPRESSED IN ADULT LIVER, SIGNAL = 2.2; EXPRESSED IN BT474, SIGNAL = 1.5; EXPRESSED IN FETAL LIVER, SIGNAL = 3.2
ctctgagcatcaaacatgcctgtgagatccttgattacactgcaggtaagcagacaggaggacagatgttgtgtaaggttggggaacgcaaggaagatgaatggacttcaacacaaggaaaggctctcagggaatactttccaagcccgcaggaatgtaaggacactcccacatcgctggtaagtgagtcatcaccaatcaccatccagttaagaatcattgtatgtaacaggcttagaatcaaagccttattattattattattttaatcaacagaaaagagaacctatttagaagtctggagaatgatctaaaaggacaggctaagatgagaacacttggaggcaggacagtagaaagacagggacactcctgtgtgactgttgggaagagcaaactcatagggaagcaaggaggcacttgccagctgggacctgctggtgtcatcat

SEQ ID NO: 2043 - DNA, 463 bp, Homo sapiens
  MAP TO AL008582.11; EXPRESSED IN FETAL LIVER, SIGNAL = 1.4; EXPRESSED IN PLACENTA, SIGNAL = 1.3; EXPRESSED IN HEART, SIGNAL = 1.5; EXPRESSED IN HELA, SIGNAL = 1.7; EXPRESSED IN BRAIN, SIGNAL = 1.3; EXPRESSED IN BONE MARROW, SIGNAL = 1.1; EXPRESSED IN LUNG, SIGNAL = 1.3; EXPRESSED IN ADULT LIVER, SIGNAL = 1.8
ctaagcctcctcaaacctggctgcataattgccttccaagttaactactcctgaacagttcggcctcaaaatgagagcattttaaatgcaggccaaagtcattgggaaataagcctcccaccccaaaatacaatagaaccactgtcatcagccctgcctagctaaccattttctgcagcataagcaactaaagctgcacaccaatttatacctcagtgatgttgccgcacaaataaggaagcatataatgccacctttgcctctttaattagagaacaggctggaccagatggctgtggggtggaaccttacaaaaatgatggacaaccagaatgagattttctgctctatcagctcaggctctaattttgactgcaagaagcttatggagcagaggattaaagcactggtgctggcttgtctttagctaaagataggagtggccattcagaggagtttgttc

SEQ ID NO: 2044 - DNA, 465 bp, Homo sapiens
  MAP TO AC010726.2; EXPRESSED IN PLACENTA, SIGNAL = 1.1; EXPRESSED IN BRAIN, SIGNAL = 1.1; EXPRESSED IN LUNG, SIGNAL = 1.6; EXPRESSED IN HEART, SIGNAL = 0.84; EXPRESSED IN BONE MARROW, SIGNAL =   1; EXPRESSED IN ADULT LIVER, SIGNAL =   2; EXPRESSED IN FETAL LIVER, SIGNAL = 1.2; EXPRESSED IN HELA, SIGNAL = 1.8
gacccctctaactcatcccacttctcctaattacctttctttttctccttacaaacttaaaaatctcaccatttctattagcttgaaaataacatccctccattcttctcttcctccttcagcactgggtctcacttacaataggttttatttaataattttcctccttgtaatttatgtctcactagtgtcccctaaaactgatttacctgctgcataaaattgttcttactgggcttatgtgccttttcctccactcattcgacctctcacctggatggatgctcctgcagaaatccatactaactatagtgtgtggatgcctggagccacagatgaccattgcctcactcaaccaggagaataagacactgcatttaatgttactatgggttataaataccctcctctttgcctcagacatgcacctggttgtgtctatccagaaactcaagtggaggctgc

SEQ ID NO: 2045 - DNA, 477 bp, Homo sapiens
  MAP TO AL021707.2; EXPRESSED IN HELA, SIGNAL = 1.5; EXPRESSED IN PLACENTA, SIGNAL = 1.2; EXPRESSED IN HEART, SIGNAL = 1.3; EXPRESSED IN HBL100, SIGNAL = 1.7; EXPRESSED IN BRAIN, SIGNAL = 1.4; EXPRESSED IN BONE MARROW, SIGNAL = 2.3; EXPRESSED IN LUNG, SIGNAL =   2; EXPRESSED IN ADULT LIVER, SIGNAL = 0.92; EXPRESSED IN BT474, SIGNAL = 1.6; EXPRESSED IN FETAL LIVER, SIGNAL = 1.3
ttctgtggccattctctgtgggtgtgtttcttttcccttcagcctgtgagcctggaaaccagggtcatggagaagagccttttgtgcctctggtagccttgcggctcttcctggcagcacccagaagctagtgggagttaagggagatagccgctgtgggagtctgggcccttctgatgactctacagcagcagctctaggaaccttcccactgtgctcctccggctcaaggaggagctgtgagccggaggggatcggggcaagcctggacttgcggatccaattactggggttatgatggtcgctccacctcactcattcactaactctcacatagatgtatgggttcatctacacgcagggtagcagtggtgggcaacgtggatgctggcaaaagcacgcttctgggggtcctgacacatggggagctggacaatggccgaggctttgcccgccagaaactcttccgccacaaac

SEQ ID NO: 2046 - DNA, 471 bp, Homo sapiens
  MAP TO AC010891.1; EXPRESSED IN BT474, SIGNAL = 4.4; EXPRESSED IN FETAL LIVER, SIGNAL =  13; EXPRESSED IN HELA, SIGNAL =  10; EXPRESSED IN PLACENTA, SIGNAL =  10; EXPRESSED IN HBL100, SIGNAL =   7; EXPRESSED IN HEART, SIGNAL = 9.9; EXPRESSED IN BRAIN, SIGNAL =  10; EXPRESSED IN BONE MARROW, SIGNAL = 7.5; EXPRESSED IN LUNG, SIGNAL = 7.9; EXPRESSED IN ADULT LIVER, SIGNAL = 9.4
tgcacctgtgagttgtgagccccaggtgtcagcacactgctttactgtggactatcctttgtcgtggttcctgccttttgcagagaggccctgcaaggaccaggatgaagggagacagtgaggtcaagagcccagccatctttcactgacacccacttctgggttctcaggtaagttcctatcaccaaaataaccctcaacaacataccagactatattccaatccccaagcgacctgattcttacacagcctcttttcagaatggagtcagaagggcagtttccagagactcactcacagtcatgaaacacctccttctccagagaaacctgacaacggagatggcccaaagcattcctgaggttgagactcttaatatcccacagtggatttttgccagcagcctttttcatgataccaacctggctctgcctgtaccatttttttctgctaaggcaggctgacagctc

SEQ ID NO: 2047 - DNA, 493 bp, Homo sapiens
  MAP TO AC011079.1; EXPRESSED IN BRAIN, SIGNAL = 5.8; EXPRESSED IN BONE MARROW, SIGNAL = 5.2; EXPRESSED IN LUNG, SIGNAL =   5; EXPRESSED IN ADULT LIVER, SIGNAL = 8.9; EXPRESSED IN BT474, SIGNAL = 3.5; EXPRESSED IN FETAL LIVER, SIGNAL = 3.7; EXPRESSED IN HELA, SIGNAL = 5.6; EXPRESSED IN HEART, SIGNAL = 5.5; EXPRESSED IN PLACENTA, SIGNAL = 7.1; EXPRESSED IN HBL100, SIGNAL = 4.2
ggggtctcatggagaagctctgctagggcagtgctgaagggaaatgtggggtcagagccccccacacagagtccttgtggggcaccacctagtggaactgtcagaagagggccaccatcctccagaccccagaatggtagatccactgacagcttgcgctgtgcaccaggaaaagctgcagacactcaacaccagcctgtgaaagcaactgggagagaggctatactttgcaaagccacaggggtgcagctgcccaagaccgtgggaacctacctcttgcatcagcgtgacctggatgtgagacatggagtcaaaggagagctttaagatttgactgccctgctggatttcagacttgcatggggcttgtagcccctttgttttggccaatttctcccatttgtagtggctgtatttacccaatgcctgtactcccattgtatctaggaagtaactaacttgcttttgattttacaggctcataggtggaagg

SEQ ID NO: 2048 - DNA, 442 bp, Homo sapiens
  MAP TO AL022398.1; EXPRESSED IN ADULT LIVER, SIGNAL = 1.2; EXPRESSED IN BT474, SIGNAL = 1.2; EXPRESSED IN FETAL LIVER, SIGNAL =   1; EXPRESSED IN HELA, SIGNAL = 0.98; EXPRESSED IN PLACENTA, SIGNAL = 1.5; EXPRESSED IN HEART, SIGNAL = 1.2; EXPRESSED IN BRAIN, SIGNAL =   1; EXPRESSED IN BONE MARROW, SIGNAL = 0.99
taagggccaggtttagaacgcaaaccttttaagctttaatcccttctccttcaaaactacctggcctcttgaatcccaaaagaggctacttttacagtagaactgtatacccctccactttctaatgctttaagtaaccaggttaaaaaacattcccctaagtaagcaagattttgctgagtctgcatcttttgttttctgggtccttcccagagaaaggctttcttgctttatccatcttaaactgtgtaaatcaggctgttttcaagttgactatctcttaagagtgcagcccagaatctggcatgctgcccaccttctccccagcacctggggcctcacctgggttaatgatcgagccctggggctgagggatgtcacacacttgatatatcttcactgggttcatgggcacctccttggtgccatcatacatcaggtt

SEQ ID NO: 2049 - DNA, 313 bp, Homo sapiens
  MAP TO AL021686.4; EXPRESSED IN BT474, SIGNAL = 1.9; EXPRESSED IN HELA, SIGNAL = 4.8; EXPRESSED IN PLACENTA, SIGNAL = 6.8; EXPRESSED IN HBL100, SIGNAL = 3.3; EXPRESSED IN LUNG, SIGNAL = 5.6; EXPRESSED IN BRAIN, SIGNAL = 5.4; EXPRESSED IN HEART, SIGNAL = 6.1; EXPRESSED IN BONE MARROW, SIGNAL = 6.4; EXPRESSED IN ADULT LIVER, SIGNAL = 5.7; EXPRESSED IN FETAL LIVER, SIGNAL = 6.8
cataggaggaaaatgctgccagaaagggcacacaatttagcggagtcagtccagcagcaggtgcctttggaggctcccctggtgtcccatgtgtctgaggttgcttcccttccattagcgccatgccgctcgactcccatcatcggggcggttgcagaagacaggtggtcatttatattttattgtcaggggccttgtctttgcctactgaagatatatttgcagcccctggaatgacacttgggatcattcaaggtaaccaccggaaccgctcgcatgcgacctcctggaaaggttgagccacgctgtcttc

SEQ ID NO: 2050 - DNA, 473 bp, Homo sapiens
  MAP TO AC010872.2; EXPRESSED IN FETAL LIVER, SIGNAL = 2.9; EXPRESSED IN ADULT LIVER, SIGNAL =  11; EXPRESSED IN BT474, SIGNAL = 1.2; EXPRESSED IN HELA, SIGNAL =   1; EXPRESSED IN PLACENTA, SIGNAL = 1.1; EXPRESSED IN HEART, SIGNAL =   1; EXPRESSED IN HBL100, SIGNAL =   1; EXPRESSED IN BRAIN, SIGNAL = 2.6
tcaaagcagaaagataaaggacagtttagtaaaatgtgaaaagtagaagaaaggtaattatgtagttatgtagtaagtctaggctagaattaaaataggtaacccggaatctttcctttctactcctctcctgcttcctcaggacctgaatgatctcaatcaactgtttagcctggcaaaattctgcaggtacattctctgttctctctttcaaactggctaggcagacttggctgaaagaattaccctccactgagcagcttgactggtctctttggggaaggaatgataaacttcagcttcccagcttttagggcaacatgagcctccagacccgactcgtggaagaagttggtgttcatctggaccccactcctagcgaagtccggaatgatgatgcccatatttgtcacaaactccacagacacggagggttttgccaccagttcagcctgcatctataagtcagaaaa

SEQ ID NO: 2051 - DNA, 482 bp, Homo sapiens
  MAP TO AC010898.1; EXPRESSED IN PLACENTA, SIGNAL = 1.8; EXPRESSED IN HBL100, SIGNAL = 1.1; EXPRESSED IN HEART, SIGNAL = 1.4; EXPRESSED IN LUNG, SIGNAL = 0.99; EXPRESSED IN BRAIN, SIGNAL = 1.9; EXPRESSED IN BONE MARROW, SIGNAL = 1.2; EXPRESSED IN FETAL LIVER, SIGNAL = 1.3; EXPRESSED IN ADULT LIVER, SIGNAL = 1.1; EXPRESSED IN BT474, SIGNAL = 1.1; EXPRESSED IN HELA, SIGNAL = 1.5
gccagttgtcacacataaaagcaagatgtgtggtattgtaaatctcacctttggaattttctgaaaatgtgattttgatataaatttttgccaagctcctgtgtaatttgagtctccagggtggtcctagtccatatatgggattctgatatctacttaggccaaactctaagtgatatgactctccttcacaggcccctctctcagtaaggattgtgatatatcactggatctagcacccaagtaatgttacattcttgcctgtgccatgcccacccaaattatagtgacatatttctgtgtccacctcataggtgatgtaactcctttctctggaatgggccgtgcacaaaggaaggatagtgacatattgcaaggccaggcccacaggcaaggatactcttttggcagagccttgcccaaaggagggcattttgacataactctggacctatcacctaggagatgtggctctcctgctt

SEQ ID NO: 2052 - DNA, 344 bp, Homo sapiens
  MAP TO AC011297.1; EXPRESSED IN LUNG, SIGNAL = 1.5; EXPRESSED IN BRAIN, SIGNAL = 2.7; EXPRESSED IN BONE MARROW, SIGNAL = 2.7; EXPRESSED IN FETAL LIVER, SIGNAL = 3.4; EXPRESSED IN ADULT LIVER, SIGNAL = 2.4; EXPRESSED IN BT474, SIGNAL =   2; EXPRESSED IN HELA, SIGNAL = 2.2; EXPRESSED IN HBL100, SIGNAL = 1.8; EXPRESSED IN PLACENTA, SIGNAL = 3.2; EXPRESSED IN HEART, SIGNAL =   3
aatggcaaagacaacactgctgcttctctggttggagtcacgtgagccaatggtaaacctgcatctctgtttctcaccagtactcttcctatggttacgagcccatgggtggatggctgcaccaccaaatcatccccgtggtgtcccaacagcaccccctgactcacaccctgcagtctcatcaccacatcccagtggtgccagctcagcagcccagggtccgccagcaagcactgatgcctgttcctggccagcaatccatgactccaacccaacaccatcagccaaacctccctctgcctgcccagcagcccttccagccccagcctgttcagccacagcct

SEQ ID NO: 2053 - DNA, 461 bp, Homo sapiens
  MAP TO AL035660.11; EXPRESSED IN HBL100, SIGNAL = 2.4; EXPRESSED IN HELA, SIGNAL = 4.6; EXPRESSED IN PLACENTA, SIGNAL = 4.4; EXPRESSED IN LUNG, SIGNAL = 3.7; EXPRESSED IN BRAIN, SIGNAL = 5.2; EXPRESSED IN BONE MARROW, SIGNAL =   4; EXPRESSED IN FETAL LIVER, SIGNAL = 2.4; EXPRESSED IN ADULT LIVER, SIGNAL =   5; EXPRESSED IN HEART, SIGNAL = 4.4; EXPRESSED IN BT474, SIGNAL = 2.2
gcattaacccaaaagtccaagtccgaagtttcatctgagacaaattaagtcccttccacctatcagcctgtaaaatcaaaagcaacttagttacttcctagatacaatgggggtacaggtattgggtaaatacacccattggaaatgggatgagttggccaaaacaaaggggctacaggctccatgcaagtccaagatccaatgaggcagtaattaaatcttcaaattccaaaataatctcttttgactccatgtctcacatccaggtcacgctgatgcaaaaggtgagctccacagccttgggcagctctgtccctgtggctttgcagggtacagcccccctccaggcttctttcatgggctggcattgtctgtggcttctcaaggtgcacattgcaagctgtcagtggatctaccattctggggtctgcaggatggtggccctcttctcacagctccat

SEQ ID NO: 2054 - DNA, 430 bp, Homo sapiens
  MAP TO AL109624.1; EXPRESSED IN BT474, SIGNAL = 6.9; EXPRESSED IN HBL100, SIGNAL = 3.4; EXPRESSED IN HELA, SIGNAL = 5.6; EXPRESSED IN HEART, SIGNAL =  19; EXPRESSED IN PLACENTA, SIGNAL = 5.6; EXPRESSED IN LUNG, SIGNAL = 2.9; EXPRESSED IN BRAIN, SIGNAL = 6.7; EXPRESSED IN BONE MARROW, SIGNAL = 3.6; EXPRESSED IN ADULT LIVER, SIGNAL =  10; EXPRESSED IN FETAL LIVER, SIGNAL =   6
acgttgaaaagctaggctgcaaaatgttttcagtagttatctagcagtggaattgtggataattttttttcttctttttgcttacttgaatcttcccaaatgaacataatttgcctttgaaataagagaacatgttattttttcaatggctgaatgtaatttttttttaaaagaagcactagagggatgagcagtgggataaatgaggctccttcttccttctgccaacgtcctgcccccacttccctgctttagaagtcttcctcatgagtactgtgagagtgctgctgtaacaaaataccatagcccagggggtgcttatcaacaacagaagtttatttcccgcagttctggagactgggaaggtcaagatcaaggcgccagcaggtgggtgtctggggtgtgcctgcctcctggttcacagatggct

SEQ ID NO: 2055 - DNA, 447 bp, Homo sapiens
  MAP TO AL035698.12; EXPRESSED IN FETAL LIVER, SIGNAL = 1.7; EXPRESSED IN ADULT LIVER, SIGNAL =   1; EXPRESSED IN BT474, SIGNAL = 1.1; EXPRESSED IN HELA, SIGNAL = 1.1; EXPRESSED IN HEART, SIGNAL = 1.2; EXPRESSED IN PLACENTA, SIGNAL = 1.2; EXPRESSED IN BONE MARROW, SIGNAL = 1.4; EXPRESSED IN BRAIN, SIGNAL = 1.5
tcctttattttcgcctctgtggagtttgttttatatctcataaaaccattatcgaatagagagaataaaactgaataaatcatttgcaggtggaatctgctagagctagccacaagtacaaagcttgcacaggtgggcgtggcttctgccagtgtcattgctcattcccttcctctgagaacccccaaaagcatttgagaattaaacctgggagcctagtctttatcattgtgaccttggtagtgatctatttttattgttacaggcaatgaaagcttagaagaaaactatgtccaggacagtaagatggggtttgtcatcaatgccatctatgccatggcacatgggctgcagaacatgcaccatgccctctgccctggccacgtgggcctctgcgatgccatgaagcccatcgacggcagcaagctgctggacttcctcatcaag

SEQ ID NO: 2056 - DNA, 483 bp, Homo sapiens
  MAP TO AL109799.4; EXPRESSED IN BONE MARROW, SIGNAL = 2.5; EXPRESSED IN LUNG, SIGNAL =   2; EXPRESSED IN FETAL LIVER, SIGNAL = 2.4; EXPRESSED IN ADULT LIVER, SIGNAL = 2.8; EXPRESSED IN BT474, SIGNAL = 2.5; EXPRESSED IN HBL100, SIGNAL = 5.4; EXPRESSED IN HELA, SIGNAL = 2.9; EXPRESSED IN HEART, SIGNAL = 2.6; EXPRESSED IN BRAIN, SIGNAL = 5.2; EXPRESSED IN PLACENTA, SIGNAL = 2.8
tgggatcaagatcaaaggaagaactatccgagtggatcatgtgtctaactattggactcctaaggactcagaagaaatggataatgtgaccaaagagctccaggagaagggctgtggggcttgtactccctcaccaagtttgtctgagctctgaaaatgaaaaaccaacaaaaaagcacaaaaatgacaaaaagaaaaaaaaaagaaaaagagaaaattggctgggaggtacaggcagagcaaccatcctctttcatcacccagaagcaagacagtgaaagaaaaggatgaccctggccctgagaagcacagcagcaagaactcagagagagctcagaagtcagagcccagggaggggatgaagctccctaaggccaggactgcctactctggtggagcagaggacctagagagggacctgaagaaagagaaacccaagcatgagcacaagtcctcaagcaggagggaggcaagagaagaaaa

SEQ ID NO: 2057 - DNA, 456 bp, Homo sapiens
  MAP TO AL049593.4; EXPRESSED IN FETAL LIVER, SIGNAL = 6.7; EXPRESSED IN BT474, SIGNAL = 3.3; EXPRESSED IN HBL100, SIGNAL = 4.3; EXPRESSED IN HELA, SIGNAL = 5.6; EXPRESSED IN HEART, SIGNAL = 5.4; EXPRESSED IN PLACENTA, SIGNAL =   6; EXPRESSED IN BONE MARROW, SIGNAL = 6.2; EXPRESSED IN LUNG, SIGNAL =   4; EXPRESSED IN ADULT LIVER, SIGNAL =   6; EXPRESSED IN BRAIN, SIGNAL = 6.1
tgctcatgaattatggatgaagaggaacatccagagtcaaacattcctgagaaagcagaccaggctccctttactgggttaggaaaagataaaaggctaaacttcccaaggcagttgactggtgatttttcattctaacatccgaaaaaataggaataaagttgctatggtttgaatatatgtgtcccttcaaaattcatgctgaaatttaatccctagtaaaacagtattaagtgaggactttacgaggtttaggtcatgagggccttacctccatgaatggggatagtgcccttataaaagggcttgagggagcctgctttgctctttttgcccttctgccatgtgaggacacagcaaaaaggtatcatcttggatgcaggagatgagccctcaccagacgccaaatcttctggtgccatggtcttggaattcccagcctccagaactgtgaga

SEQ ID NO: 2058 - DNA, 467 bp, Homo sapiens
  MAP TO AL117343.1; EXPRESSED IN FETAL LIVER, SIGNAL = 6.7; EXPRESSED IN ADULT LIVER, SIGNAL = 6.2; EXPRESSED IN BT474, SIGNAL = 3.4; EXPRESSED IN HBL100, SIGNAL = 4.7; EXPRESSED IN HELA, SIGNAL = 7.3; EXPRESSED IN HEART, SIGNAL = 5.9; EXPRESSED IN PLACENTA, SIGNAL = 6.5; EXPRESSED IN LUNG, SIGNAL = 4.7; EXPRESSED IN BRAIN, SIGNAL = 6.9; EXPRESSED IN BONE MARROW, SIGNAL = 5.7
cctgtacccctgaaagcaaggacagtctcagagtccccaactctcacacatggtgggcctctgcattaaataaaagaatccgtcagctctcatcactttcacagctttgcataggtttcttgtgatcccctcctgcagaagccgctgtacctcgctcaccagctgcccctgaaaccacctgcagagtctgatccagctggctctgggaagccacctggtcacaatgcaactccctaactgcaaaactcttaccaggccgtgaggcggttcttggtttctgcgggatgacgggccgtgctgccagactgggtttgggggactgcaggaggggcttcgggctcgtaggtgtgctggatgagctccgagacctggagcctgcttccgctttgggttctgctttggtattcttttctggtgttcccaaaccaaagcggttctctggaagacctgggtgcagtttaggcact

SEQ ID NO: 2059 - DNA, 474 bp, Homo sapiens
  MAP TO AL049648.6; EXPRESSED IN PLACENTA, SIGNAL = 2.8; EXPRESSED IN BONE MARROW, SIGNAL = 2.8; EXPRESSED IN LUNG, SIGNAL = 2.6; EXPRESSED IN BRAIN, SIGNAL = 3.4; EXPRESSED IN FETAL LIVER, SIGNAL = 3.6; EXPRESSED IN ADULT LIVER, SIGNAL = 1.7; EXPRESSED IN BT474, SIGNAL =   2; EXPRESSED IN HBL100, SIGNAL = 2.4; EXPRESSED IN HELA, SIGNAL = 2.5; EXPRESSED IN HEART, SIGNAL = 2.8
agcctccaccacctctctcctgggttgctggaacagcatactagtgtctctccacatttctgccattgttcctgacaagccatcctccaccaatttgccagagcaatgcttatcaaatgttaagtcagatcacaagactcttatactcaaattcccagtaatagaggtgttcttaacctcttttatgtgtatggcccctctcagaatatttttaaatgcataaagtaagatacataagattacaatatacgagcttcattaaacaaacatgattcagcagggagtctaataattaccataattttgctacatttacgagcataagcttgcactcccagtaaaagccaaagttctacagtggctgagagccccctctccaactctccatgaccacagcctccttccccgtgccctccctctgggattgctgcttgctctgactcatctccaaatagttggcttcttggtttccct

SEQ ID NO: 2060 - DNA, 461 bp, Homo sapiens
  MAP TO AL049698.2; EXPRESSED IN ADULT LIVER, SIGNAL = 1.6; EXPRESSED IN HBL100, SIGNAL =   1; EXPRESSED IN HELA, SIGNAL = 1.4; EXPRESSED IN HEART, SIGNAL = 0.9; EXPRESSED IN PLACENTA, SIGNAL = 1.8; EXPRESSED IN BRAIN, SIGNAL = 0.92; EXPRESSED IN LUNG, SIGNAL = 2.6; EXPRESSED IN BT474, SIGNAL =   2
aaaaataaaaggtctgattggtttgacttttttttgacagtttaattatttttatacgattgagggaaatccactttaaaaggcactaaaaatccagagcttattaggttatatttgtcataaaaggggtactcacggttttaacattctgtgtttaaatgctgtgaacttcatgatgggagtttctttggtttccttcggtttccagttgtttggcccaggaattcagccccatcactgtgaccttaccaacatggatggagtggtcactgtgacgcccagaagtatggacgcagaaacctacgtggaaggccagcgcatctcagaaaccaccatgctgcagagtggcatgaaagtgcagtttggggcgtcccatgtatttaagtttgtggaccccagtcaggatcatgctcttgcaaaaagatctgtggatggaggcctgatggttaagggcccaagac

SEQ ID NO: 2061 - DNA, 480 bp, Homo sapiens
  MAP TO AL049821.6; EXPRESSED IN PLACENTA, SIGNAL = 6.8; EXPRESSED IN BONE MARROW, SIGNAL = 2.2; EXPRESSED IN BRAIN, SIGNAL = 2.3; EXPRESSED IN LUNG, SIGNAL = 3.8; EXPRESSED IN ADULT LIVER, SIGNAL = 5.7; EXPRESSED IN BT474, SIGNAL = 2.3; EXPRESSED IN FETAL LIVER, SIGNAL = 1.4; EXPRESSED IN HBL100, SIGNAL = 2.1; EXPRESSED IN HELA, SIGNAL = 4.8; EXPRESSED IN HEART, SIGNAL = 2.7
tgaattccatgagcatgagcccactgctgcacttctttagccataaagtgagtgccttgttcagaggcaatgctgtgtgtaatgccatgacagtgggtaaagcattccataagtccatggatggtagtcttggcagaagcattgcctgcaggataggcaaacccatatctagagtaagtgcccattccagtgaagacaaaccactgttctttctgtgatggaagaggttcagtataatcaacctgccaccaagtagctggctgatcaccccgaggaatggtgccatatcgcggcctcagtgtttgtctctgctgctggcaaattgggcactcagttgtggctgtagccaggtcagccttggtacgtggaagtccatgttgctgagcccgtgcgtaacctccatccctgccaccacagccactttgttcatgggcctattgggcgatgacaatggtggctggggaaagaggctgagtggta

SEQ ID NO: 2062 - DNA, 475 bp, Homo sapiens
  MAP TO AL121572.4; EXPRESSED IN BONE MARROW, SIGNAL = 1.2; EXPRESSED IN LUNG, SIGNAL = 2.1; EXPRESSED IN ADULT LIVER, SIGNAL = 2.6; EXPRESSED IN HELA, SIGNAL = 2.2; EXPRESSED IN PLACENTA, SIGNAL = 8.6; EXPRESSED IN HEART, SIGNAL = 1.3; EXPRESSED IN BRAIN, SIGNAL = 0.92
ctcatggccctccttgtcatatttttttctttactgttctcttaccccctttcactctcactgaaccccctccatgccactgtactaccagtagctcccattaccaagagcttctatggagaatgcggcttcctggaaatattgatgacccatcgtataggagtttttctaaaggaaaccccattttcaccacccacacctatatgaccctgcacttcaggccatacatttcaatccctgtatctttaacctccttgttaagcttgtctcttgcagaatcgaagctgtaaaactacaaatgcttcttaaaatagagccccagatgcagtccatggctaagatctaccacggacccctggaccggcctgctagcccatgctctgatgttgatgacattgaaggcacggcttccgaggaaatctcaactgcacgacccctactacaccccaatttagcgggaagcaattagagcagt

SEQ ID NO: 2063 - DNA, 471 bp, Homo sapiens
  MAP TO AL049756.16; EXPRESSED IN BRAIN, SIGNAL = 3.8; EXPRESSED IN BONE MARROW, SIGNAL = 3.3; EXPRESSED IN LUNG, SIGNAL = 1.2; EXPRESSED IN BT474, SIGNAL = 2.3; EXPRESSED IN FETAL LIVER, SIGNAL = 3.7; EXPRESSED IN ADULT LIVER, SIGNAL = 1.9; EXPRESSED IN HELA, SIGNAL = 1.6; EXPRESSED IN PLACENTA, SIGNAL = 2.2; EXPRESSED IN HBL100, SIGNAL = 2.2; EXPRESSED IN HEART, SIGNAL =   2
cctcgcaccaactattccacttgaagctgtcagtgctgtcttaagattgatgaaatcccctcaaacatgcgatttcatttgatccacagagggctggagcagacggagggcaggagcacacggagggcaggagcacacggagggagaggagcacacagttgagggaatatagagggaagctgggggaggcggaggagaggtggggcaggaccaggcactggttctctctactgcataggagtctgatctccgctgcccggtggctcctggctgtgggctctcaggtgctcaggtgcttacgtgggtgctgctgtgctcaccccagcaagtcacccgggaacctggccaactgcctgcggggcctgctgcccagcttcagatgcctgggaggcagccactgagccatgagaagatgcttcctggaccagacaagaaacagcgggaggtggtggttgggggaagtggagttct

SEQ ID NO: 2064 - DNA, 446 bp, Homo sapiens
  MAP TO AP000122.1; EXPRESSED IN ADULT LIVER, SIGNAL = 1.7; EXPRESSED IN PLACENTA, SIGNAL = 3.1; EXPRESSED IN HBL100, SIGNAL = 4.1; EXPRESSED IN HELA, SIGNAL = 1.7; EXPRESSED IN BONE MARROW, SIGNAL = 1.7; EXPRESSED IN BT474, SIGNAL = 1.5; EXPRESSED IN FETAL LIVER, SIGNAL = 2.3; EXPRESSED IN HEART, SIGNAL = 2.2; EXPRESSED IN BRAIN, SIGNAL =   2; EXPRESSED IN LUNG, SIGNAL = 2.4
caagctccccagtgaacagggaaggctttctttcccccatcattatcaacccaggaaggtcaggggcaatgtctgaggttgctttcaaatgcaccttgatatcttcttaaaacaagtgagacgctgaacattcagagtaggaattttgtctttctcaaggtgaagtctcagagtttccggtcagcatataacataagcaacgtataagctgctttacaaaagggagggagggaggagggagaagcatgcatagcaatgaacccaactcacctgagcaaaatataacttcatttcctttcccagaaactcagtcttatgcagctggagcctggcatctgctgcggagaaggggttgctgaagtttattctgactcgtttgaagctcttaaaatactgaaaggtgatgtccttgtcatacgtcctaaagagggactcaaatttggcct

SEQ ID NO: 2065 - DNA, 451 bp, Homo sapiens
  MAP TO AP000181.1; EXPRESSED IN PLACENTA, SIGNAL = 1.4; EXPRESSED IN HBL100, SIGNAL = 0.92; EXPRESSED IN HEART, SIGNAL =   1; EXPRESSED IN BRAIN, SIGNAL = 1.1; EXPRESSED IN FETAL LIVER, SIGNAL = 1.5; EXPRESSED IN ADULT LIVER, SIGNAL =   1; EXPRESSED IN HELA, SIGNAL =  28
agcaaactgtacccccgaccaccttgggcacatgtcattctgaattctggaggctatatcatggccacatccttaaccttggcaaaataaactttctaaattgactgagccctgtctcagatattttgggttaatactcatgaaatatctatttaggtgaatattcttaatgtttctaggaactatcttaaatttccaaaaacattgatgtagaatttggggcaaattaaaatatatttcaaagctttatcttcaagaacaagcagcaagagcttaccataggaaaactcaattttcgtgctatttctataaaatcttcatttctttctttgacttgtgactgccctgcagcaaagtggctacagacgaagcaaaggctggttgtatggaagagcattcggattgcaactgctcccttatttccagttgcacctcccattccagtcttcac

SEQ ID NO: 2066 - DNA, 488 bp, Homo sapiens
  MAP TO NM_007104.1; EXPRESSED IN ADULT LIVER, SIGNAL =  11; EXPRESSED IN PLACENTA, SIGNAL =  13; EXPRESSED IN HBL100, SIGNAL = 7.3; EXPRESSED IN HELA, SIGNAL =  12; EXPRESSED IN BONE MARROW, SIGNAL =  11; EXPRESSED IN BT474, SIGNAL = 5.4; EXPRESSED IN FETAL LIVER, SIGNAL =  13; EXPRESSED IN HEART, SIGNAL =  13; EXPRESSED IN BRAIN, SIGNAL =  11; EXPRESSED IN LUNG, SIGNAL =   9
cttctgctctggtgacccaccagcagcccaccaacctgtcatcttccagttagcagccatccccagggccagtagcacctgagcacttggtaagtagaaagacccagtgtctgctcctcatgttaccctggtgtccttccccagagcagttgttttgggaaaaactggctccggctgaagcaggaaatggtgctccttgtcaaggtcatgttgtcctgttgctatagaactgagagaccctgaggatcagccctctgaggttcctgttacctctctttacactattcatcctcataggcctccaggaagggggccaaattcagggccaggaccagggccagtggcttggtgaggcataggctttgctgtatgggccctgtggggagctctggggagttcttattcccctggctcatggccaccatcatggagagacccccagggctctggcagccaagtgggcaggagcggagggagggggcatcttg

SEQ ID NO: 2067 - DNA, 983 bp, Homo sapiens
  MAP TO NM_006994.1; EXPRESSED IN HELA, SIGNAL = 4.6; EXPRESSED IN BONE MARROW, SIGNAL = 3.2; EXPRESSED IN LUNG, SIGNAL =  12; EXPRESSED IN BRAIN, SIGNAL = 2.1; EXPRESSED IN BT474, SIGNAL = 3.2; EXPRESSED IN PLACENTA, SIGNAL = 3.2; EXPRESSED IN HEART, SIGNAL = 2.6; EXPRESSED IN HBL100, SIGNAL = 2.8; EXPRESSED IN ADULT LIVER, SIGNAL = 3.8; EXPRESSED IN FETAL LIVER, SIGNAL = 2.1
cagggtattgggttaggcagagatgctgaggcaaccctcatttcaccctcctcttcccctctggacacaagatacctgatacctggggctttctctcctgacatcgatgagagagtcacatttagggcagactagggacaccaggctttggactcagacctcctcagcatggcccaggccttgcatgctgaggctctgaaatccaggaaaaatggttgacctcatggacacttcctcaaactctctgcagcggatgtgattctggatccaaaaacagcaaaccccatcctccttgtttctgaggaccagaggagtgtgcagcgtgccaaggagccccaggatctgccagacaaccctgagagatttaattggcattattgtgttctcggctgtgagagcttcatatcagggagacattactgggaggtggaggtaggggacaggaaagagtggcatataggggtgtgcagtaagaatgtgcagagaaaaggctgggtcaaaatgacacctgagaatggattctggactatggggctgactgatgggaataagtatcggactctaactgagcccagaaccaacctgaaacttcctaagccccctaagaaagtgggggtcttcctggactatgagactggagatatctcattctacaatgctgtggatggatcgcatattcatactttcctggacgtctccttctctgaggctctatatcctgttttcagaattttgaccttggagcccacggccctgactatttgtccagcgtgaaaagaagaagagagttcctccaattctgaccgagtgctgatcattccctagagacaccagtaaccccgggcttagctaacgaaagtggggagcctcaggctgaagtaacttttctctgcttctccctgcccagctcagagctgagggcctccccctccacagcaaccaatcacaaccataaagctacaagcacgcactgaagcacttta

SEQ ID NO: 2068 - DNA, 494 bp, Homo sapiens
  MAP TO Z92542.2; EXPRESSED IN FETAL LIVER, SIGNAL = 1.8; EXPRESSED IN ADULT LIVER, SIGNAL = 1.4; EXPRESSED IN PLACENTA, SIGNAL = 1.3; EXPRESSED IN HELA, SIGNAL = 1.2; EXPRESSED IN BONE MARROW, SIGNAL = 1.3; EXPRESSED IN BRAIN, SIGNAL = 1.6; EXPRESSED IN BT474, SIGNAL = 1.5; EXPRESSED IN HEART, SIGNAL = 1.1; EXPRESSED IN HBL100, SIGNAL = 1.4; EXPRESSED IN LUNG, SIGNAL = 1.1
ctctgaagtcctctttggcgatgatttagtggaaacttaactaggaggagctgctcccttctgcattcaaagccaggctttaggaaactgtatgtttctgtcttgaatgtggtaaagcaaatgaattttcaaattatcagggctgctttgtgttcccctgagactgcacctttcacagtatcactgagacaaaaaatgagcagaaaattacccctgctacttaggcttttgtaagaaaattcgtttcggggacattttctttgttctgactttctctggccctgagtggggaataagttcatttttatttcattgaaatcagaaagctatatcttaaaaaaaaaaaaattatctacccagcactgcagttacaattgctttgcgaaatatagccctgtccatctcggtggtgtgtgagggggtcccctacggcccgctctgtgccagtcaccccctggcaggcgccgagctgaggcaggcatcaggcacacttg

SEQ ID NO: 2069 - DNA, 583 bp, Homo sapiens
  MAP TO AC007721.7; EXPRESSED IN HEART, SIGNAL = 1.7; EXPRESSED IN LUNG, SIGNAL = 1.3; EXPRESSED IN BRAIN, SIGNAL = 2.4; EXPRESSED IN FETAL LIVER, SIGNAL = 2.1; EXPRESSED IN ADULT LIVER, SIGNAL = 2.1; EXPRESSED IN PLACENTA, SIGNAL = 2.1; EXPRESSED IN HELA, SIGNAL = 1.9; EXPRESSED IN BONE MARROW, SIGNAL =   2; EXPRESSED IN BT474, SIGNAL = 1.3; EXPRESSED IN HBL100, SIGNAL = 1.5
tgcagaacgtgtctcctccccatgtcgctctgtgaccgaggggtgcgcatggcatgaccgctcactcactcctgcctggaagtgaagggctgctaggtggaggtcagcaaggatgttgagtgccctgagacgggtggcaggattctctagatgaaaaataaggcttcacaggtccagagaagcttgctaggttcttttgagaaacctgtttcttcaggttaataattacttttaagatagactattttttagagcagtcttaggtttctgtgtattctctgccgctgcgcatgtacagccttcctctgtgtccagatcctggacgttggttccttttttaatggagaacacgcatgtgattccaaatggaaaaaggcccgacagcccagccctggccacttgcccctcctggaggcagccagtgtggagatgccagtgtgcctggggcgtggcctcctagagggagtcagtgtggagatgccggtgtgcctggggcgtggcctcctggagggaaccagtgtggagatgtcggtgtgcctggggtgtggcctcctggagggagtcagtgtggagatgcccgtgt

SEQ ID NO: 2070 - DNA, 961 bp, Homo sapiens
  MAP TO AC006509.15; EXPRESSED IN HBL100, SIGNAL = 4.5; EXPRESSED IN HELA, SIGNAL = 8.4; EXPRESSED IN HEART, SIGNAL = 3.1; EXPRESSED IN LUNG, SIGNAL = 3.3; EXPRESSED IN BRAIN, SIGNAL = 3.8; EXPRESSED IN BT474, SIGNAL = 6.5; EXPRESSED IN FETAL LIVER, SIGNAL = 3.8; EXPRESSED IN ADULT LIVER, SIGNAL = 3.7; EXPRESSED IN PLACENTA, SIGNAL = 4.6; EXPRESSED IN BONE MARROW, SIGNAL = 3.9
agtagccatggttgtgtcaccatattctagcctgggcaacagagcaagaccatgtctcaaaaaaaaaaaaaaaaaaaaaaaaactgaagaaaggccaaagggctactaagataaaagcgagtttcaagtaacttaaattgctgtgggcagcctagtcaggatgcaaatatgtatatgcatgtcaaaatatgtaccatatataccttattacttatttttagggataatatacagctggcaaacagcactacttatcaaagcctgagaacaagcttgttcaaagtcttacccaacactgcgatacactctacagcagactgccagtccttgtaatttttatcaaagttatagaacagtcgccgcatgcagtccttcaatgatacatccctccgttcttcagcatttatgagattagccaacttcttttcaatagttttggtccagtatcgtttacagcccttcttggtagatttcaactcgtattcttctggcaaattgcgagtggtgaaattctcaggaatttccagctggtaacggttcctaccaatcccccaatagactatggtcctacagccaattctgttgcgctgtttctctaggtattccaggaggctctgttcattttctcttatgtcagcaagagcttggtcataatcagagtcaaagcctgctttgggagtaataagtccagtctttcgagccttttcatggtcaaaggctgtatcccatcggttcaattctacagtcaaatcaggaaaacgaccttcaggattttttgtctgcagagagatgacctgcttaaggattttagacttaaaaccatcagcaacttcttccatgatccctataattttacacattactttgaatccttccagagcagaaagaaaatcaataatcttcttcttgctgtatgtagtttcttcatacattatagccctgctgtctgggtggttctgac

SEQ ID NO: 2071 - DNA, 489 bp, Homo sapiens
  MAP TO NM_006894.1; EXPRESSED IN LUNG, SIGNAL = 7.2; EXPRESSED IN HEART, SIGNAL =   2
cgttgcctacatgttttcccttatttattgacaagagatatttgtgacatgagaattaagtcagaaaataaggatttgcacagacaaccagttaagttagagttttacagatatttgaaaagcccttttattttcagagccgtaccccaaaaatatcaagagggttcaagattcctcagcaaatgatccttcagaatgtttttcttctgtatgtctcagatacattatgaaggaacctgtactaaatgatgatgtcccaagtcgtctactctgtggagccatcaaggtgaaatctacagtgaaagagctcacagaaacttctgccatctttgaggatggaacagtggaggagaacattgatgtcatcatttttgcaacaggatatagtttctcttttcccttccttgaagattcactcgttaaagtagagaataatatggtctcactgtataaatacatattccccgctcacctggacaagtcaaccct

SEQ ID NO: 2072 - DNA, 466 bp, Homo sapiens
  MAP TO Z82188.2; EXPRESSED IN HBL100, SIGNAL = 8.6; EXPRESSED IN HELA, SIGNAL = 0.9; EXPRESSED IN PLACENTA, SIGNAL = 1.1; EXPRESSED IN HEART, SIGNAL = 0.91; EXPRESSED IN BRAIN, SIGNAL =   3; EXPRESSED IN BONE MARROW, SIGNAL = 3.6; EXPRESSED IN BT474, SIGNAL = 2.1; EXPRESSED IN FETAL LIVER, SIGNAL = 1.3; EXPRESSED IN ADULT LIVER, SIGNAL = 1.9
gtcccctcatcccacctaacccccagactcagagaaggacactccacccaagcaatttctcaccttccccttaattggtacagatcagaaacgggagcacctccttctcctggcccccacgtttagggttcccaggacagcctccgacccaccctctgcccctcctgtatccctttcctcggccctgggtgacagcacccctgcccagaccagctctgactgcctccaagtgccaagcgctcacagtcctctacccccagccccagccggcaccctcagtctcgtcccaccatctctctgcctcctgagtccctccctgagtcccatgccctctgccccagcgactgcccttgtaaagtgaaaatccgaccccacccaacatttcctgctgcacttatgcagtatccaggcctcctcgccatggaaagcccaggcctgcggcctctctggcttcttctctcccttg

SEQ ID NO: 2073 - DNA, 491 bp, Homo sapiens
  MAP TO Z84718.2; EXPRESSED IN FETAL LIVER, SIGNAL = 0.98; EXPRESSED IN ADULT LIVER, SIGNAL = 1.3; EXPRESSED IN HBL100, SIGNAL = 2.1; EXPRESSED IN HELA, SIGNAL = 4.3; EXPRESSED IN HEART, SIGNAL = 0.99; EXPRESSED IN BRAIN, SIGNAL = 1.1; EXPRESSED IN BT474, SIGNAL = 2.8; EXPRESSED IN PLACENTA, SIGNAL = 1.3; EXPRESSED IN BONE MARROW, SIGNAL = 1.3
ggttaggactggcatgaagatatgtcatatgaaagtactagtgtgagtggtagaaaattttttcaaggagatatatgagctgatcataatggaatcaggaatatgatgttcgaattcataaaaaaagacttgttaaaatgagagtttgggtgacgaaatttgtggtatagagttctggtatatatatgttatgcagtgctcctaggaagacaatagtgattacgggatttattatttatttattttttgccctagggcgaaggtggcttttatttcctctcttagggaagagggggaggtgagctttcccaggcacgtcaacctaaggaaggggtcgtggggcccccagcaggggctggaagagctgatcatttggaagaaagggttcattcttgtccacttcctggccctcagctgcagggtgtgctggcaggggttactccccttggggcagctgctcctgcatcagcggaggcacaaggaggtacctg

SEQ ID NO: 2074 - DNA, 1965 bp, Homo sapiens
  MAP TO AP000406.1; EXPRESSED IN BONE MARROW, SIGNAL = 2.9; EXPRESSED IN BRAIN, SIGNAL = 1.3; EXPRESSED IN FETAL LIVER, SIGNAL = 1.3; EXPRESSED IN ADULT LIVER, SIGNAL = 2.6; EXPRESSED IN HBL100, SIGNAL = 3.6; EXPRESSED IN HELA, SIGNAL = 4.2; EXPRESSED IN HEART, SIGNAL = 1.2; EXPRESSED IN LUNG, SIGNAL = 4.3; EXPRESSED IN BT474, SIGNAL = 6.1; EXPRESSED IN PLACENTA, SIGNAL = 3.4
tgtagtggtaccaagagtttatctgacagaggttataggaagctccgctttcattttggatcccatgtcaaacactgatttaatattattcactggcccttttagattggttctcagtttctcataggaattttgtgaattgcatacctgaaaagagaaacaaaagactcgggttgcattcagagttttaaagtatctaacatttatttttaggtctctaaagagcaacagaataattgcagtacttctctaatgaggatggagtctagaggagacccaagagccacaactaatacccaggctcaaagattccattcacctaagaaaaatccagaagaccagaccatgccccaaaataggacaatatatgttaccttgaaggtaaaccacaggagaaaccaagatatgaaacttaagctcacacatagtgagaatagtagcttatatatggctctcaacactctccaggctgtcagaaaagagatagaaactcaccaaggccaagaaatgcttgtgcgtggcacagaaggaatcaaagagtacataaaccttggaatgcccctcagttgtttccctgaaggtggccaggtggtcattacattttcccaaagtaaaagtaagcagaaggaagataaccacatatttggcaggcaggacaaagcatcgactgaatgtgtcaaattttacattcatgcaattggaattgggaagtgtaaaagaaggattgttaaatgtgggaagcttcacaaaaaggggcgcaaactctgtgtttatgctttcaaaggagaaaccatcaaggatgcactgtgcaaggatggcagatttctttcctttctggagaatgatgattggaaactcattgaaaacaatgacaccattttagaaagcacccagccagttgatgaattagaaggcagatactttcaggttgaggttgagaaaagaatggtccccagtgcagcagcttctcagaatcctgagtcagagaaaagaaacacctgtgtgttgagagaacaaatcgtggctcagtaccccagtttgaaaagagaaagtgaaaaaatcattgaaaacttcaagaaaaaaatgaaagtaaaaaatggggaaacattatttgaattgcatagaacaacgtttgggaaagtaacaaaaaattcttcttcgattaaagtagtgaaacttcttgtacgtctcagtgactcagttgggtacttattctgggacagtgcaactacgggttacgccacctgctttgtttttaaaggattgttcattttaacttgtcggcatgtaatagatagcattgtgggagacggaatagagccaagtaagtgggcaaccataattggtcaatgtgtaagggtgacatttggttatgaagagctaaaagacaaggaaacaaactacttttttgttgaaccttggtttgagatacataatgaagagcttgactatgctgtcctgaaactgaaggaaaatggacaacaagtacctatggaactatataatggaattactcctgtgccacttagtgggttgatacatattattggccatccatatggagaaaaaaagcagattgatgcttgtgctgtgatccctcagggtcagcgagcaaagaaatgtcaggaacgtgttcagtctaaaaaagcagaaagtccagagtatgtccatatgtatactcaaagaagtttccagaaaatagttcacaaccctgatgtgattacctatgacactgaatttttctttggggcttccggctcccctgtgtttgattcaaaaggttcattggtggccatgcatgctgctggctttgcttatacttaccaaaatgagactcgtagtatcattgagtttggctctaccatggaatccatcctccttgatattaagcaaagacataaaccatggtatgaagaagtatttgtaaatcagcaggatgtagaaatgatgagtgatgaggacttg

SEQ ID NO: 2075 - DNA, 981 bp, Homo sapiens
  MAP TO AC007666.12; EXPRESSED IN BT474, SIGNAL = 1.7; EXPRESSED IN HBL100, SIGNAL = 1.2; EXPRESSED IN BONE MARROW, SIGNAL = 1.5; EXPRESSED IN LUNG, SIGNAL = 0.99; EXPRESSED IN ADULT LIVER, SIGNAL = 2.1; EXPRESSED IN FETAL LIVER, SIGNAL = 2.5; EXPRESSED IN PLACENTA, SIGNAL = 1.9; EXPRESSED IN HEART, SIGNAL = 1.1; EXPRESSED IN BRAIN, SIGNAL = 2.3
tcccacaggtacgtttcagagaaaaagtctctttccaggttaaatgttgttcattgcgtcctttcccaaagagtctgttcccatagagaagcatggcacaaagtgtgccttattctgtgagtctgtaactgtgctgccttttctcgttgccagcctccagttggaattaacagcctccgaggacccaggctaggcacaccagaggagaagcaaatgtgcggggggctgacacacctttctaacatgggcccacaccctggatccttgcagcttgggcagataagtggcccaagtcaggatggaagcatgtatgctccagctcagttccagccaggattcattcctccccggcatgggggggctccagcccggccaccagactttcctgaaagctcagaaattcctcccagccatatgtatcgatcgtacaagtacctgaatcgagtacactctgccgtctggaatgggaaccatggtgctacgaaccaaggacccttgggcccagatgagaagccccacctggggccaggaccctctcaccagcctcgcactctcggtcacgtgatggattcccgagtcatgagaccacctgtcccccccaaccagtggactgaacaatcaggcttcctacctcatggagttccttcctcagggtacatgcgaccgccctgcaagtctgccggacatcggttacagccacctccagtgccagcacccagttctttgtttggagcacctgcccaggctcttcggggggtgcagggaggggactccatgatggacagcccagagatgattgcgatgcagcagctctcctcccgcgtctgccccccaggtgtgccttaccacccccaccagcctgcacacccccgtttacctggcccttttccgcaggtagctcacccaatgtcagtcactgtgtcagcccccaagcctgccctgggcaaccctgggagggcaccggagaacagtgaagcacaa

SEQ ID NO: 2076 - DNA, 963 bp, Homo sapiens
  MAP TO AC011460.1; EXPRESSED IN PLACENTA, SIGNAL = 6.5; EXPRESSED IN BONE MARROW, SIGNAL = 4.9; EXPRESSED IN BRAIN, SIGNAL = 6.4; EXPRESSED IN BT474, SIGNAL =  11; EXPRESSED IN FETAL LIVER, SIGNAL = 6.5; EXPRESSED IN HBL100, SIGNAL = 4.6; EXPRESSED IN HELA, SIGNAL = 4.8; EXPRESSED IN HEART, SIGNAL =   2; EXPRESSED IN LUNG, SIGNAL = 2.5; EXPRESSED IN ADULT LIVER, SIGNAL = 2.5
agccctttccacactcattgcatttataaggtttctctccagtatgagttcgttgatgtaccatgagacagtgcttcattgaaaagccttttccacattcactacatgtatataatttctctcctgtatgagtttgctgatgtgtgataagactgttcttcaaggtgaagcctttcccacatttattgcatataaagggtttctcaccagtatgagttcgatgatgtgcagtaagacgcctcttctcaatgaagccttttccacattcactacatatataaggtttttctcctgtatgagttttctgatgtgtagtgagactgaactttgtagagaaggccttcccacatacactgcatccatggggtttctctcctgtatgagttcgttgatgataaatgagccgacacttcttgatgaaggctttcccacattggctacatgtgtaaggtttccctcccatatgagttttctgatgtatattgagctgtgatttcttgaggaaggttttgtcacattcagtgcattcataatgtttcagttctgtatgagttctctgatggtccattagtctggattttctggagaaagctttcccacacatactgcatacatgaggtttttctccagtgtgaactctctgatgatcaataaactgagacaacttgaggaaggctttcccacattcactgcatacatgggcattctctatgttgtgagttctctgttgcttaatgaactgggacttattaataggttttgcaattgcaggaaacttcatttcagtataaaattgtttatggttagcatgaaaaagggatttcccatctctattaaactcagcagagttctttaggccagagctccttttctggttttcaaaacttaaatttgattttaaaggtttttcatgtaagtcaaacgtatcacaatcttgcttcagcaggaaatgacctttgttct

SEQ ID NO: 2077 - DNA, 472 bp, Homo sapiens
  MAP TO AC007026.3; EXPRESSED IN BT474, SIGNAL = 1.2; EXPRESSED IN ADULT LIVER, SIGNAL = 0.96; EXPRESSED IN FETAL LIVER, SIGNAL = 2.4; EXPRESSED IN HBL100, SIGNAL = 2.2; EXPRESSED IN HELA, SIGNAL = 1.2; EXPRESSED IN PLACENTA, SIGNAL = 1.5; EXPRESSED IN HEART, SIGNAL = 1.4; EXPRESSED IN BRAIN, SIGNAL = 2.8; EXPRESSED IN BONE MARROW, SIGNAL = 2.1
atataggcccagctccaagcttattcttcattgattccctgactgcaagcagggatactgctgaccatgaaatcccccttgtttccatattagaacttatttaggaaacatgacatttgttgggagataacagcagattctggaaagatctttgtggttatggtgtggatacacacacacacacacacacacaacacagtacctctcatcctcagagtgccactctctgccttcaagtccctatatttgaaaattaaattgaaaacttactaacttttgatccattatgcattttattggtataaattcttcaaatgtcaagcatgagtaattcacaaaacagatgaattggatcctctcatttgtgaagctcagcacttcatctttgtcgtacctctgtaatggaataggtttagttattagctgaatataattttataaagatgtgtatttgaaagtaaaatggaattca

SEQ ID NO: 2078 - DNA, 469 bp, Homo sapiens
  MAP TO AC007318.2; EXPRESSED IN BRAIN, SIGNAL = 1.6; EXPRESSED IN BONE MARROW, SIGNAL = 1.5; EXPRESSED IN LUNG, SIGNAL = 1.4; EXPRESSED IN BT474, SIGNAL =   3; EXPRESSED IN FETAL LIVER, SIGNAL = 1.7; EXPRESSED IN ADULT LIVER, SIGNAL = 1.2; EXPRESSED IN HELA, SIGNAL = 2.5; EXPRESSED IN PLACENTA, SIGNAL = 3.4; EXPRESSED IN HBL100, SIGNAL =   2; EXPRESSED IN HEART, SIGNAL = 1.8
catttgcagtgtaggacaaggtaaacttgaacttagatttccactgataaaagaaaaagatgaggaccaagtttgacttaaaacatgagtttctctgcttcatgaatagaaaattcaatgaggcttaagtaatcttgaaaatattatttttaatctaagtaattcttattctaccattctatcttaagtacatgaatcttaagacattttacattcaattttgttagcatagtaaatatatacaaaataacaatacattacaaatttaccaaaataaatttcaaaaaaattactagccaagtcacttactatttgaagcttgattgttttcccgtctaactctatagttcttattttgaaatccacaccaattgtgctgatgtagctttctgtatatgtatcatcctgaagggggaaataattaacaattaaatgtattgttcagtggagcagatgcaagtctaagtgg

SEQ ID NO: 2079 - DNA, 445 bp, Homo sapiens
  MAP TO AC007388.3; EXPRESSED IN BRAIN, SIGNAL = 2.9; EXPRESSED IN BONE MARROW, SIGNAL = 3.2; EXPRESSED IN LUNG, SIGNAL = 2.2; EXPRESSED IN BT474, SIGNAL = 1.5; EXPRESSED IN ADULT LIVER, SIGNAL = 4.1; EXPRESSED IN FETAL LIVER, SIGNAL = 2.6; EXPRESSED IN HELA, SIGNAL =   3; EXPRESSED IN PLACENTA, SIGNAL = 3.6; EXPRESSED IN HBL100, SIGNAL = 2.2; EXPRESSED IN HEART, SIGNAL = 3.1
tctatgtaggaattcaagccagctgcagaaacttgcataagtaaaaaggagccgaatgttaacagccaaaacaatgggaaaaatgcctagaaggcatttcagagacctttgtggcagcccctcccataacaggcccagaggtctaggagggaagaatggttttctggacctggcccagaaaagtttgagtaaccttggttgaacaaagttgctcaaaccctgagcaatctcaggacactgctccatgtgtctcagccactccagctctagccatggctaaaagggcccaagatatgtctcaggccactgctccagagggtacaagccataagcctaggcagcttccatgtggtattaagcctgcaggtgcagagagggtaagagttgaggctcggaagcctctgcctagatttcagaggatgcacggaaagacctggatgtccag

SEQ ID NO: 2080 - DNA, 458 bp, Homo sapiens
  MAP TO AC007378.2; EXPRESSED IN HEART, SIGNAL = 0.93; EXPRESSED IN LUNG, SIGNAL = 1.4; EXPRESSED IN PLACENTA, SIGNAL = 6.2; EXPRESSED IN HBL100, SIGNAL = 1.5; EXPRESSED IN HELA, SIGNAL = 2.7
ctgggatggaaggaagtcagtgtagattttcctagggggaatttctgttccttggtgtaaactggataacagtgtgttttattttattttgttttgcttcactttattgttttctgttacatgaacttacattgagttgagtaaatttccatcaacttataacctcctattagaaattttctagaggctgtttgaaaaacatcaaaggacacaactaaaaaatgactacaaatatgccttgtttgttttaactcttttcagatacaaagccagcctgcgtatttaacaatgtggaatattatgatggagacatgtttcgaatggacaactgtcggttctgtcgatgccaagggggcgttgccatctgcttcaccgcccagtgtggtgagataaactgcgagaggtactacgtgcccgaaggagagtgctgcccagtgtgtgaaggtaagaaaaggtgc

SEQ ID NO: 2081 - DNA, 473 bp, Homo sapiens
  MAP TO AC007721.7; EXPRESSED IN HBL100, SIGNAL = 1.2; EXPRESSED IN HELA, SIGNAL = 4.3; EXPRESSED IN HEART, SIGNAL = 1.6; EXPRESSED IN LUNG, SIGNAL = 1.2; EXPRESSED IN BRAIN, SIGNAL = 1.1; EXPRESSED IN BT474, SIGNAL =   3; EXPRESSED IN FETAL LIVER, SIGNAL = 1.9; EXPRESSED IN ADULT LIVER, SIGNAL = 1.2; EXPRESSED IN PLACENTA, SIGNAL = 1.8; EXPRESSED IN BONE MARROW, SIGNAL =   1
gccagcagcttgtgtgataccagttttactgtcagtggcatgcatgacctagcagcgtctccaggaacgtggagcagctctgtttaaggaaggaaatacaaggcgcgctagactggctgagaaacagaagtttttaaaaggaattcttggcacctagatgtagagaattagcaacttcacatttttgggatgatattgaatagcatagctggagattcacccataacttctaaaaagcgaaactaaaatgtagtcctgtttcttactgtctatacagggatatgggattagaactgtttagaacccatattattagtgataaaatggttcagagtaaaaccattgatggaatcctactgctgatcgagcgcgagaggagcggcgaggccgtggaccggagcctgttgcggagcctcctgggcatgctgtctgacctgcaggtgagtgctgcctgtgcggaagatacctgggta

SEQ ID NO: 2082 - DNA, 495 bp, Homo sapiens
  MAP TO AC009477.2; EXPRESSED IN FETAL LIVER, SIGNAL = 7.1; EXPRESSED IN ADULT LIVER, SIGNAL = 5.8; EXPRESSED IN HBL100, SIGNAL = 5.6; EXPRESSED IN HELA, SIGNAL = 8.6; EXPRESSED IN HEART, SIGNAL = 7.7; EXPRESSED IN BRAIN, SIGNAL = 5.6; EXPRESSED IN LUNG, SIGNAL = 5.6; EXPRESSED IN BONE MARROW, SIGNAL = 6.1; EXPRESSED IN BT474, SIGNAL = 4.6; EXPRESSED IN PLACENTA, SIGNAL = 8.5
tacaacctaaggggctctcgagctgtgtgatggtgaatacttatgtttccttgtcagccaagttgctgtagactgggtgatgggtgactaatggtggtggtgtgagtgagttggtgcattctttcacccaggccacatgtttgtggcaaggatggtttgagaacctagccctgcaacctgcacgctccccctgcagaagaagcatttgtcctgaacccactgggctccttctccacgtgttctcccctcagcccttcccagcccagccccctttgcccagctgctgtctctccttccagccatgcctgatggagctctggacacagctgtctgcgctgacgaagtggggagcgaggaggacctgtatgatgacctgcacagctccagccaccactacagccaccctggagggggtggggagcagctggctatcaatgaggtagggtcagggctgcacgggcagagggagggacaggctggggctacaggctagat

SEQ ID NO: 2083 - DNA, 490 bp, Homo sapiens
  MAP TO AC009483.2; EXPRESSED IN HBL100, SIGNAL =   2; EXPRESSED IN LUNG, SIGNAL = 1.4; EXPRESSED IN BRAIN, SIGNAL = 1.3; EXPRESSED IN ADULT LIVER, SIGNAL = 1.1; EXPRESSED IN PLACENTA, SIGNAL = 2.2; EXPRESSED IN HEART, SIGNAL =   1; EXPRESSED IN HELA, SIGNAL = 2.1; EXPRESSED IN BONE MARROW, SIGNAL = 1.1; EXPRESSED IN BT474, SIGNAL = 2.7
tggttttctttttccactgaggatctgatcttctcatcctccttatttttcaatgtggaggactttaattcattgttctgactgctttgttttatttttgagaagagacttttatctatatcagcctttttttcccctgctattatttgagctattatgatcatgacttttacagtacattcttttctcactctcagaattttctttctgtgtgaactcttactttcttggtttctgtgtttttctttgtttctgtttttactttcttctgtctctgagctccgtgagtctctcctccttctacccctatctctacttcttgatcttcctggtggtgttcttctccctcggctttgtgactgtcctctcctcctgtattcctttcctctgtatctatggtgctccttgcttctgctgcaatctctgtcatggcttcttgatcacactcttctgcttctgtccctacttctgctttgctgttctgttctgc

SEQ ID NO: 2084 - DNA, 478 bp, Homo sapiens
  MAP TO AC009486.2; EXPRESSED IN BONE MARROW, SIGNAL = 1.5; EXPRESSED IN FETAL LIVER, SIGNAL = 3.5; EXPRESSED IN HBL100, SIGNAL =   1; EXPRESSED IN HELA, SIGNAL = 1.1; EXPRESSED IN HEART, SIGNAL = 1.5; EXPRESSED IN BRAIN, SIGNAL = 1.4; EXPRESSED IN ADULT LIVER, SIGNAL = 1.2; EXPRESSED IN BT474, SIGNAL = 0.98; EXPRESSED IN PLACENTA, SIGNAL = 1.5
tctctgcacaggaaggtctggacttcctctctgcatgacagttagatttcaagggcaaatgtcccagggaagccatgtggaagctgtatggcattttgtgatctagcctcagaagtcacctgatgtcactccacttcagtgagaaacctgtctccattcaagggtagggagcacaaaccccacctcctcagtgggaaaagagtcacagttacatcttaagaagaacatgtgggatgagaagcatggttatgattatgtttgaaacatataacctgctatatttttacttgaaaaggtgacttaattacctttgtttcctctatgaaaattcatccctttacccactataatctgactttcatctttaccattctgtccacaactaccttgtgatccacaatcatcctttggtccagtcctactgagatagttgcatttcttccctgaacactaaacaccatgttgtttcacacctcct

SEQ ID NO: 2085 - DNA, 464 bp, Homo sapiens
  MAP TO AC009185.2; EXPRESSED IN BT474, SIGNAL =   2; EXPRESSED IN HBL100, SIGNAL = 1.2; EXPRESSED IN BONE MARROW, SIGNAL = 1.5; EXPRESSED IN LUNG, SIGNAL = 1.7; EXPRESSED IN FETAL LIVER, SIGNAL = 1.2; EXPRESSED IN ADULT LIVER, SIGNAL = 1.4; EXPRESSED IN PLACENTA, SIGNAL = 1.3; EXPRESSED IN HEART, SIGNAL = 1.2; EXPRESSED IN HELA, SIGNAL = 1.2; EXPRESSED IN BRAIN, SIGNAL =   2
tttaattcatgaggccagagctgccaaaaccttggttggtacagcagcaagaatagcctggaaggtatttggggtcaaagcagatcaacaagacttccctgggggagggagggaaacagtcctgcggcacatttagtagctaatctgttccttatactcggctctaccagcgcacaagggactccatcagctcacaacctttcaccttctagatgcagacctccccttccctctgccttagggcaaactctcttaggggatccccagaattcctgggccccctggtgctatctaccatttccattacctggtacatgatggaggaaggtggaggctcgatgcatggctgctggtcggggaggggaagctcttcaagcaggtccacgttggacagggcatcttccagggtgacgtgcgtggtcatggctgcagtttctgtattctgcactgaagggaaggaagag

SEQ ID NO: 2086 - DNA, 459 bp, Homo sapiens
  MAP TO AC009496.1; EXPRESSED IN FETAL LIVER, SIGNAL = 1.3; EXPRESSED IN ADULT LIVER, SIGNAL = 1.2; EXPRESSED IN HBL100, SIGNAL = 0.94; EXPRESSED IN HELA, SIGNAL = 0.9; EXPRESSED IN PLACENTA, SIGNAL = 1.1; EXPRESSED IN HEART, SIGNAL = 1.2; EXPRESSED IN BRAIN, SIGNAL =   1; EXPRESSED IN BONE MARROW, SIGNAL = 0.99
caactaaaagaactgcatgcctcagattctatttaagggggagtctctaggggtacccaaagacaacacgggagacaaaaacaaagacactagaaaaaaaattagcttttgatgtcacagctaaagcgaatagtaaacataacctaacctctagccagactaacataaagcctcacataaaaggcctatctttcttcagtgtcttttattcagtgtttcatgtctggctttcaacaaaaaataacaaggcatggtaaaagacaaaacttatagtctgtggagacagaacgagcaacagaaccagactcagatgtgtcaaaactgctgggattattgaactgggaattgaaaacaactatgattaatatactagtggttctaatagaaaaggtgggcaacatggaagaacagatgcatgatgtaagcagagacatggaaactttaagaaagagtgatacg

SEQ ID NO: 2087 - DNA, 398 bp, Homo sapiens
  MAP TO AC009226.2; EXPRESSED IN FETAL LIVER, SIGNAL = 1.4; EXPRESSED IN HBL100, SIGNAL =   1; EXPRESSED IN HELA, SIGNAL = 1.1; EXPRESSED IN HEART, SIGNAL = 1.4; EXPRESSED IN LUNG, SIGNAL = 0.95; EXPRESSED IN BONE MARROW, SIGNAL = 0.97; EXPRESSED IN ADULT LIVER, SIGNAL = 0.98; EXPRESSED IN PLACENTA, SIGNAL = 1.7; EXPRESSED IN BRAIN, SIGNAL = 1.2
agagcagagaggatcccaggatttctgggacaagggttattgattatttccttggtcatggtggggaaaaggaagaacttcctccagaggaagatgctcacagccagtgatcatgtaacagacctccatgtcaaaaaggccgacaagatctcaaactccacttggaggctgatggatgtggatcccatccatggatcaaggacctttacccagggttggtgctgacccaaatgatggaatttttatccatcctccttgctgtcctaaccagatttggagacctgctcgcaactctggatggtgtgaatgttcaaagcacaagcttaaagaggtgaaggaagtggaggtaaggaaagtcccttgatcactatctaataccatgaagactggacatagcc

SEQ ID NO: 2088 - DNA, 449 bp, Homo sapiens
  MAP TO AC009498.2; EXPRESSED IN PLACENTA, SIGNAL = 3.1; EXPRESSED IN BONE MARROW, SIGNAL = 2.3; EXPRESSED IN BRAIN, SIGNAL = 2.2; EXPRESSED IN FETAL LIVER, SIGNAL = 2.8; EXPRESSED IN ADULT LIVER, SIGNAL = 2.2; EXPRESSED IN HBL100, SIGNAL = 1.4; EXPRESSED IN HELA, SIGNAL = 2.2; EXPRESSED IN HEART, SIGNAL = 2.4; EXPRESSED IN LUNG, SIGNAL = 2.1; EXPRESSED IN BT474, SIGNAL = 1.1
gttgccttctggcttttctgttttttattgattgttggcagcataccattgctggacttagtgattgcttacaaactcagcttctcctaagaactaacaagcaaatttgagcttcccaagaatgcagggtggtgactaaaatgccaaaggcatgaaccagttaagctctaaagaagtccaaagacagaaagcaaaaaaaaaaaaaataaataaataaataaataaaataaaactgagaaagatggaaaatctagtgacacctcaggacttcacatacttccttgggcaaggcagtgtcccaaaattcatgctggctctgatggagggaggggagagctgggacagcagccaccacatggcactcttggagttccatgccttggtgcatcacacagaactggatttggacctcatctctgccactggcaagctgtgtgagcttgaggaag

SEQ ID NO: 2089 - DNA, 466 bp, Homo sapiens
  MAP TO AC009303.1; EXPRESSED IN ADULT LIVER, SIGNAL = 1.2; EXPRESSED IN HEART, SIGNAL = 0.86; EXPRESSED IN BRAIN, SIGNAL = 1.2; EXPRESSED IN BONE MARROW, SIGNAL = 1.1
ttgccctcaggagaatgatacagataagtaacagttgcatgtattcaccatctgggaagtgagaggagcatgaacagatgcagggatggataggccaggctgagcacatgtgcatgggggatgcttcacaggggaggagctttagagctgaggagtggagggtgagtagggaagcaggggcgagaggggaacagcttagtttgtgcagagctctctgttcaggtagtaagtgtaataggaacacagaaggtgctgctggtggtgaggtgaaacacttgttaggctgagccatggaagagaggctttataaggctcctgaggaggttctgttttcttctgagggaagaggcctgccattgataaatgtgcatcaggccaatgcagaagttggacaaggaatgggcaggaagagtgtggggagtgaagctggaggaccaagaccaggtgagcacacaacccagaagtg

SEQ ID NO: 2090 - DNA, 416 bp, Homo sapiens
  MAP TO AC008123.9; EXPRESSED IN ADULT LIVER, SIGNAL = 1.6; EXPRESSED IN BT474, SIGNAL = 5.6; EXPRESSED IN FETAL LIVER, SIGNAL =   1; EXPRESSED IN HBL100, SIGNAL = 4.3; EXPRESSED IN PLACENTA, SIGNAL = 2.3; EXPRESSED IN HELA, SIGNAL = 4.6; EXPRESSED IN HEART, SIGNAL = 1.4; EXPRESSED IN BRAIN, SIGNAL = 1.2; EXPRESSED IN BONE MARROW, SIGNAL = 1.7; EXPRESSED IN LUNG, SIGNAL = 4.6
gggattggtttttatatggctgtattcctctgaaacaaactttcttgcttttgatctgatactccattgtcagaggctcactgaatggtagaactggaacctaatcagtcagtcactctaaatcgatcttttcatggataagaaaaccaagacttgggttaaatacgtgcatagctagagaatactttggcagggccaggactgtataacctgccaatattgccgtggatatctctacgtagaaagcatttgttttagtggagaataatggaaataatcatttttctttcggcttctctgtttaagaggcacagttgaatgctgttgatgctttgattgactccatgagcttggcaaagaaagatgagaagacagacacccttgaagacttgtttccaaccaccaaaatcccaaat

SEQ ID NO: 2091 - DNA, 363 bp, Homo sapiens
  MAP TO AC009487.1; EXPRESSED IN HELA, SIGNAL =   1; EXPRESSED IN HEART, SIGNAL = 0.88; EXPRESSED IN PLACENTA, SIGNAL = 1.2; EXPRESSED IN BONE MARROW, SIGNAL = 0.97; EXPRESSED IN BRAIN, SIGNAL = 1.1; EXPRESSED IN ADULT LIVER, SIGNAL =   1; EXPRESSED IN FETAL LIVER, SIGNAL =   1
attggctaccactactgccctcctctcccaataatggcaccaatataaaacctctttattgagaatttcacacgtaagaaatcttaacagtttgggtatgttatggcctgaagacaagactctgtatcaggtgaacttttaatctatgatttattcatagcatctgataaatggaaaaaaaaacaagaaaatttaaggatcactaaccttaagaaatgccaacacagcatttaccacaaaaagagttacaaaaggaggtgagatggtggtggcagaaagcagggaaccaaaatcccagtgagggttagatttggatactctgaactttataatctcacagctgccaaatttcttcatgtgcga

SEQ ID NO: 2092 - DNA, 348 bp, Homo sapiens
  MAP TO AC008280.2; EXPRESSED IN PLACENTA, SIGNAL = 1.2; EXPRESSED IN BONE MARROW, SIGNAL = 0.91; EXPRESSED IN BRAIN, SIGNAL =   1; EXPRESSED IN FETAL LIVER, SIGNAL = 1.1; EXPRESSED IN HEART, SIGNAL =   1; EXPRESSED IN HELA, SIGNAL = 0.91; EXPRESSED IN HBL100, SIGNAL = 1.2; EXPRESSED IN ADULT LIVER, SIGNAL = 0.99
cactgaccctacaaagtggaaagaaaagagtagtttttggctatacagtgaactaaatctggaaagtcaaaacatgtaaatgttcatttattattttttacaattttggaataaattcacaaactacagaagactaaattgtgattacagaaaagagtatgtgatacacctggaagacttaaatttgcatttaacagaagtaaaagagaagaacagggaaatgcaaattaaaaccacaaggagataccgcctcacacctgttagaatggctgtgatgaaaaagataaacgatagtgttggcgagggtgtggagaaaagggaacattgcgcattgttggtgggagtgta

SEQ ID NO: 2093 - DNA, 452 bp, Homo sapiens
  MAP TO AC010134.1; EXPRESSED IN BRAIN, SIGNAL =   1; EXPRESSED IN BONE MARROW, SIGNAL = 0.97; EXPRESSED IN ADULT LIVER, SIGNAL = 0.94; EXPRESSED IN HEART, SIGNAL = 0.91
aaaaagttaccagcaaatatcaaatgtcattggctttacacagtgaaggtttatttcttaattatatcacagtctcgtgggtggcagtaatggctcagagatccaggctcttgttttttgtttttgtacaaatttatggggcacatgtgcagttttgttacatgcatagattgcatggtggtcaggtcagggcttttaggttatctatcacctgaataatgtgcatagtacccattaactaatttctcatcatgcacccctctccttctgatccaggttctttaattcaaggcttgcacagccactgcaaatgaggagaaaatcatgggacagtcacactcagacaccgacaccacttctgctcacctcatcagcctaacttcaacggtggctggtaggtaaggaggccatggtgtggtgagaggagggtgagtccctcactgcctcaccta

SEQ ID NO: 2094 - DNA, 471 bp, Homo sapiens
  MAP TO AC009813.2; EXPRESSED IN BONE MARROW, SIGNAL = 7.8; EXPRESSED IN FETAL LIVER, SIGNAL =  29; EXPRESSED IN HBL100, SIGNAL = 6.1; EXPRESSED IN HELA, SIGNAL = 7.5; EXPRESSED IN HEART, SIGNAL = 8.3; EXPRESSED IN LUNG, SIGNAL =  11; EXPRESSED IN BRAIN, SIGNAL = 8.4; EXPRESSED IN BT474, SIGNAL = 3.1; EXPRESSED IN ADULT LIVER, SIGNAL =  10; EXPRESSED IN PLACENTA, SIGNAL = 9.1
cccacccaaatctcatcttgaattgtagctaccacaattctcactgtcatgggagggacccagtgggaggtagttgaatcatggggatgggtctttcccatgcagttctcatgatagtgagtaagtctcatgagatctgatggttttataaagaggagttcccctgcacaagttctctctctttgcctgccaccatccatgtaagacgtgcctttcgctttctgctatgattgcaaggcttccccagtcatgtggaactgtgcgttcattaaacctcttgttctttataatttacccaatctcgggtatgtctttatcagcagtgtgaaaacagactacacatcccaaatcttcattaatctagcagactccagccccttttctgtggctcagctcctctctcaaactaatgaaagcagaacccaggaaggcgagcattttggcaactacatcaacatggaatgtcacatg

SEQ ID NO: 2095 - DNA, 455 bp, Homo sapiens
  MAP TO AC009953.2; EXPRESSED IN BT474, SIGNAL = 1.8; EXPRESSED IN HBL100, SIGNAL = 2.4; EXPRESSED IN BONE MARROW, SIGNAL = 4.4; EXPRESSED IN LUNG, SIGNAL = 2.4; EXPRESSED IN ADULT LIVER, SIGNAL = 3.7; EXPRESSED IN FETAL LIVER, SIGNAL = 4.4; EXPRESSED IN PLACENTA, SIGNAL = 3.6; EXPRESSED IN HEART, SIGNAL = 3.8; EXPRESSED IN HELA, SIGNAL = 3.9; EXPRESSED IN BRAIN, SIGNAL = 4.2
gaaaataagcacatgaaaagatgctcatcagtcattagggaaatacataccaaaaacacagtgagatcccacttcacacatcacccagaatggttatgctatggattgaatatggtctgttcatctccaccaaaactcattttgaaatttggtccaaagtgtggcggtgtgggaagtaaggtctagtgaaaggtgcttgtgttatatctccctcatgaatggcctggtgcaactcttgcagtaatgagtgagttcttactctggcaagactggatttagttccagcaagagcacgttgttataaagcaaggttccccctccccagtccctcttcacacatatccacttcccctttgaccttctgtaacatgagggaaatgtaaaactcctcgccagaagccaaggccatgtccttgaacctcgcagcctgcagagccaagagctaaataagcctc

SEQ ID NO: 2096 - DNA, 470 bp, Homo sapiens
  MAP TO AC010723.1; EXPRESSED IN BT474, SIGNAL = 1.9; EXPRESSED IN FETAL LIVER, SIGNAL = 1.3; EXPRESSED IN ADULT LIVER, SIGNAL = 2.2; EXPRESSED IN HBL100, SIGNAL = 1.9; EXPRESSED IN HELA, SIGNAL =   2; EXPRESSED IN PLACENTA, SIGNAL = 2.4; EXPRESSED IN HEART, SIGNAL = 1.6; EXPRESSED IN BRAIN, SIGNAL = 1.7; EXPRESSED IN BONE MARROW, SIGNAL = 1.8; EXPRESSED IN LUNG, SIGNAL = 1.3
ttcaatcctccccacaactggctacttttagaattctgctaattggtgcattttacagagctctgattggtgttttttacaatcctctggtaagacagaaaagtccccgctcgacccaggaagtccaggtggcctcaactctcaatcccctctctaaacatgacaccctcaactgctgttgggaagaaggcaatgactgcagtagctactttctgcagaaaagagtgaagaaagagctctgtagttgtagtgtcttccagaggggaactccttaggccagtcaaaaggtcagtggatcagtccagggctcctcggtagaatttgtgagttgagctcatttggatttccatttgtaagaccatctgtagcttgatggcctcaatcctggaggaaacaaatttgacaaggaggttaaaaatacagggctttaaggtgagtaacagcaagatggctgtcacgggacctagaaa

SEQ ID NO: 2097 - DNA, 420 bp, Homo sapiens
  MAP TO AC010739.2; EXPRESSED IN FETAL LIVER, SIGNAL = 5.5; EXPRESSED IN ADULT LIVER, SIGNAL = 1.3; EXPRESSED IN HBL100, SIGNAL = 1.1; EXPRESSED IN PLACENTA, SIGNAL = 2.1; EXPRESSED IN HELA, SIGNAL = 1.5; EXPRESSED IN HEART, SIGNAL = 1.3; EXPRESSED IN BRAIN, SIGNAL = 3.2; EXPRESSED IN BONE MARROW, SIGNAL = 2.4
aatctcccatggcatctcaccttggggttggagtgtgtgtgtgtgtgtgtgtttgtgtgtttgtgtgtgtgcatgcacatgcataaagacatcttctgtgcatgccaccagcgatgtttgcttctaagcgtgctaaggatgtgtgactaggtgagaaaggcagggctgttcaagttgtgcattcatacactaactcatacacacacatatacatggatgtgtattttttccttttagcttgagaaggaggtgccatttttctaatttgctcaaaagtgttgtatgtgtcagtggcatctctgaagtaatgtgattggtcacactcttttgaaagactgctctggcagaagtgtgtgacgaatggtttgaaaaggggagactccaaactccacaggctagcgccgagcaggtgagttaaaa

SEQ ID NO: 2098 - DNA, 485 bp, Homo sapiens
  MAP TO AC011376.1; EXPRESSED IN PLACENTA, SIGNAL = 1.7; EXPRESSED IN BRAIN, SIGNAL =   1; EXPRESSED IN BT474, SIGNAL = 1.1; EXPRESSED IN FETAL LIVER, SIGNAL = 0.91; EXPRESSED IN HBL100, SIGNAL = 1.8; EXPRESSED IN HELA, SIGNAL = 1.3; EXPRESSED IN HEART, SIGNAL = 0.86; EXPRESSED IN LUNG, SIGNAL = 1.9; EXPRESSED IN BONE MARROW, SIGNAL = 1.1
caatacattagaacccaagggactaaatttaaaacttaatttagaaataaaatggaaatattttatcaggtctttaatataatttctgaggtccattttttttaatccagaagataattttgcctagaaatttaagttgaatttggttaatatggttacagtcccaagggatacactgtatgacttacccaaacacattcttattgaaggagttacctgataacagatggcacaaatatcattgtgtttctcaagctgctctttcgtagcaatgggtaacgatttaatcttattcacagcatccctgcggagaagaaagctcttccaccccagctgggcccgaagccacacgttatagtaggaatgaatgaagatgatcattgagcccatcactgtccattctccaaagatggtctctgagacgccataggccaccacacagagggccacaagaaactccagcaggcggtaagtgccattcacat

SEQ ID NO: 2099 - DNA, 484 bp, Homo sapiens
  MAP TO AC010978.1; EXPRESSED IN PLACENTA, SIGNAL = 2.8; EXPRESSED IN BONE MARROW, SIGNAL = 2.4; EXPRESSED IN BRAIN, SIGNAL = 2.5; EXPRESSED IN BT474, SIGNAL = 1.5; EXPRESSED IN FETAL LIVER, SIGNAL =   3; EXPRESSED IN HEART, SIGNAL = 2.8; EXPRESSED IN HELA, SIGNAL = 2.3; EXPRESSED IN HBL100, SIGNAL = 1.5; EXPRESSED IN LUNG, SIGNAL = 1.9; EXPRESSED IN ADULT LIVER, SIGNAL =   2
attctgcaggaaacaccagcattccctggggagaaccgctgctggagggaactgcagtggcactggatgagggggagtattttctgttgtagtcacagtgtattagctcaagtggtcatgcaggtgccattgtaaatgcctgtgtgatgtgcctcttcatcagtagctgtgtggtgggtccccacccttgtctcctccacactgggggctgagaaaacaggagtgtgtgtcttctcactcttccaagtggcccccggacttttgtgctgttggaatagcttgcacaaggccatttttgctgcttctgtttttccttaatgagttgctgttgttgaagtgaaggtaggcaggtaggttcttgctgaaaaccttgtagcaggacataccaaatccttttcctttgtgcttttatgacatctgggaaggtcttgaagaattccaaggtggctttgaaatctgcttctgaggttgtgagagaggccag

SEQ ID NO: 2100 - DNA, 444 bp, Homo sapiens
  MAP TO AC011004.1; EXPRESSED IN ADULT LIVER, SIGNAL = 2.1; EXPRESSED IN BT474, SIGNAL = 1.1; EXPRESSED IN FETAL LIVER, SIGNAL = 1.6; EXPRESSED IN HBL100, SIGNAL = 1.2; EXPRESSED IN PLACENTA, SIGNAL =   2; EXPRESSED IN HELA, SIGNAL = 1.4; EXPRESSED IN HEART, SIGNAL = 1.6; EXPRESSED IN BRAIN, SIGNAL = 1.7; EXPRESSED IN BONE MARROW, SIGNAL = 1.8; EXPRESSED IN LUNG, SIGNAL = 1.1
cgattatgccccagtttctcactgatagccagccctcatcttttgagtaccaacttgataactaaattgaaccaggtttttaaacactgtaagatgattccagttttttagatagctcagagggccgtggggacaccagggtcagaggccagaggtaccaggttgcaggggaggataagcacagccttaccttctcttttgagaccctggtggcagccttggaagcttttctcggtgcaaactttggtgtgagccacacagctgctgcctgctaaatgggaatgtgcacaggactcgaggaatgaagcaatgttgcgtgacaggttcgtgtccaacccctgtgtgcaggctgggcaggggctgggtgcgggctgctgactcaccagctgcagtgaacaggacctgccttgggagacctttcctagtgttggggcagcgtatatc

SEQ ID NO: 2101 - DNA, 485 bp, Homo sapiens
  MAP TO AC011406.1; EXPRESSED IN BRAIN, SIGNAL = 5.9; EXPRESSED IN BONE MARROW, SIGNAL =   5; EXPRESSED IN LUNG, SIGNAL = 3.4; EXPRESSED IN BT474, SIGNAL = 5.6; EXPRESSED IN ADULT LIVER, SIGNAL = 9.1; EXPRESSED IN FETAL LIVER, SIGNAL =  11; EXPRESSED IN HBL100, SIGNAL = 3.3; EXPRESSED IN HELA, SIGNAL = 5.5; EXPRESSED IN PLACENTA, SIGNAL = 6.2; EXPRESSED IN HEART, SIGNAL =  14
tcctttgtcccagggtagggacatatgtccacagccctaaaatcagagtctgtgctatgttggttgccggggcacttgctgggaggcctggatcgttcctcagcctcaatcttgggaaccgggctctgtctcttactgtgtgacttggtctcttccagccttggtgctctcacacacagaatggggacagtattggccatcaggaggcctgaatgagactccgtgtaagagtctctgaggcaggacgcagacactgagtgctcagggagtggggtggtgggagtccctgcttcccccttccacaaacctgacttggccgactgctgtttctgcttcttctcctcctgcaccttcatcttggcatcgtactcatcagcaagcgccttccactccttgcgattgttggtgatcccgtccaacattggggtgatctcctcgtggaaacgggagaattcctagaagagagagtatgtgcctctggtgca

SEQ ID NO: 2102 - DNA, 455 bp, Homo sapiens
  MAP TO AC011073.1; EXPRESSED IN PLACENTA, SIGNAL = 7.2; EXPRESSED IN BRAIN, SIGNAL =   6; EXPRESSED IN BT474, SIGNAL =  10; EXPRESSED IN FETAL LIVER, SIGNAL = 3.7; EXPRESSED IN ADULT LIVER, SIGNAL = 2.7; EXPRESSED IN HEART, SIGNAL = 4.6; EXPRESSED IN HELA, SIGNAL =   7; EXPRESSED IN HBL100, SIGNAL = 8.2; EXPRESSED IN LUNG, SIGNAL = 3.7; EXPRESSED IN BONE MARROW, SIGNAL =   5
tttacctggagccattctggatgctataagttcataaataatgtctcttcaacttggttaggctcacagtgccaatgtagacagatgatctacggctttgtatggtatcattgttagctaatgtgttacttcatagtcttgggttgccatcccctggagtgttttgatgcgatcagttgtcagtttcaggtctgttgtttctctcaccagaagcccagccggtggaaactaacagccccaaagccctgcttgtgttaggggagctatcgaacacggataatgacataaacgagtcggtgttcatctggggaatctcagacaaagcagcccagaggaaaaccatctctgtcgatgaaggtttgtttcatttgcaacaggaaaagcagcagcaacagcagcagcagcagcgactggagcccgtgcacaggctgggaagaggtaaagggaggctgagg

SEQ ID NO: 2103 - DNA, 399 bp, Homo sapiens
  MAP TO AC011084.1; EXPRESSED IN ADULT LIVER, SIGNAL = 0.93; EXPRESSED IN BT474, SIGNAL = 1.1; EXPRESSED IN PLACENTA, SIGNAL = 1.6; EXPRESSED IN HBL100, SIGNAL = 1.2; EXPRESSED IN HELA, SIGNAL = 1.1; EXPRESSED IN HEART, SIGNAL = 2.7; EXPRESSED IN LUNG, SIGNAL = 1.7
ttggagccatgagagaacagtatatgaggactggcgaaggcttcctgttggtcttttcagtcacagatagaggcaggtttgtaccatattagaatgtagatccactgttcttgtcaagatcactagactttattgagtttggactttttgtttttatagaaaaaggaaaaataaagtactaattggggcatgagacttgctgaattctgatacttgaccaaattgattaatttgtttttgattttttttttttaagttttgaagaaatctataagtttcaaagacagattctcagagtaaaggatcgtgatgagttcccaatgattttaattggtaataaagcagatctggatcatcaaagacaggtgagaaggaatttcactgttgggaaaccaattg

SEQ ID NO: 2104 - DNA, 482 bp, Homo sapiens
  MAP TO AC011460.1; EXPRESSED IN BONE MARROW, SIGNAL = 3.8; EXPRESSED IN ADULT LIVER, SIGNAL = 1.2; EXPRESSED IN BT474, SIGNAL =   8; EXPRESSED IN FETAL LIVER, SIGNAL = 2.4; EXPRESSED IN PLACENTA, SIGNAL = 1.9; EXPRESSED IN HBL100, SIGNAL = 3.3; EXPRESSED IN HELA, SIGNAL = 3.9; EXPRESSED IN HEART, SIGNAL = 2.3; EXPRESSED IN BRAIN, SIGNAL = 3.8
tcaggtgtgacttttggctgaaagtcttctgacactgactgcattcatagggtttttcccctgtatgagttctttggtgtaggatgagactaaacttgatggagaacattttcccacattcgttgcatccatagggtttctctcccatatgagttctccagtgagtattgaggaatgactttacactaaagccttttccacattcactgcagtgatacggtttctctcctgtgtgagttctctgatgtctactgagctcagatctctggatgaaggctttcccacattcattacacccatgcgatttttccccggtatggattttttgatgtaaaatgaggttaaacttaagggggaatgttttcccacactcatcacaaccatagggtttctcttctgtgtgagctctctgatggatcatgagctgtgacttattgctgaagcttttctgacatttgctgcatccatagggtttctctcca

SEQ ID NO: 2105 - DNA, 466 bp, Homo sapiens
  MAP TO AC011482.1; EXPRESSED IN HELA, SIGNAL = 1.6; EXPRESSED IN PLACENTA, SIGNAL = 3.1; EXPRESSED IN HBL100, SIGNAL = 2.4; EXPRESSED IN HEART, SIGNAL =   2; EXPRESSED IN BRAIN, SIGNAL = 2.2; EXPRESSED IN BONE MARROW, SIGNAL = 2.6; EXPRESSED IN LUNG, SIGNAL = 3.4; EXPRESSED IN BT474, SIGNAL = 4.4; EXPRESSED IN FETAL LIVER, SIGNAL = 1.7; EXPRESSED IN ADULT LIVER, SIGNAL = 1.7
agattttaaggtgtgggcaacaatattttacaccactaaatttctggaattaccactattctagagtgagggatacagatcagctcagcaatgtggaaagttcagttcaaggtgaaacctcttgaagaaatttttttttctacactgacaaatccttatgattttcttgaaaacagggatatgaaactcatttatgcaaaacataattatcaaaaattaccaaattaccaaaaaacattctacaaaaaaaaaaataaataaaaaataaagcctttggagtatattaggaattgagtactgaagttatcctcacccaggaagaccaggtttctgtagttctctaacatcacatccctatataaattctgctgtgcagtgtccaggcaatgccactcctccagagagaattctacagtcacatccctaattgtcagtggtccctgaaaaacacacaaacacagacaca

SEQ ID NO: 2106 - DNA, 498 bp, Homo sapiens
  MAP TO AL109919.2; EXPRESSED IN ADULT LIVER, SIGNAL = 1.1; EXPRESSED IN FETAL LIVER, SIGNAL = 1.4; EXPRESSED IN PLACENTA, SIGNAL = 1.1; EXPRESSED IN HELA, SIGNAL =   1; EXPRESSED IN HBL100, SIGNAL =   1; EXPRESSED IN HEART, SIGNAL = 1.2; EXPRESSED IN LUNG, SIGNAL = 1.1; EXPRESSED IN BRAIN, SIGNAL = 3.7
taaatgcctgcagtcacacctcagaaaatggtaggagttgtgattcaaaccagtatgatcaggcttcagaattgcttttgaaaactgttttattttgcatctcaatggatggaatttatatgttgctggatgtatagtagatattcaataaatgttcactgaatttgaatgtaggacatcaacaacaattttattcctgaatctagaaatgagccttcatcaaatagttcttaggcagtttagaaaagcaccccatgaagccaaagaggaatattcaggtggggaaggtgggaaggccaaagggtgtaattaaggcacttacaggtagagtggccacagctgttctatcccctcctggctacctctcagattaccaagcaaaacccaaatgattctgaagcagtccaaatgcacaaccagatagttaacatccatttccttgttcaaatgccccatatgctagactctgattagctctcttggcaccagcacacatac

SEQ ID NO: 2107 - DNA, 411 bp, Homo sapiens
  MAP TO AC010971.1; EXPRESSED IN PLACENTA, SIGNAL = 0.95; EXPRESSED IN HEART, SIGNAL = 1.1; EXPRESSED IN BRAIN, SIGNAL = 0.99; EXPRESSED IN BONE MARROW, SIGNAL = 0.98; EXPRESSED IN FETAL LIVER, SIGNAL = 1.2
gctagtttgcacaccacagccaagtgggatttgttctaggtatgcaagatggttcaatattcaaaagtcaattatacatttaaaaatctcaagccatcacatcaggaggctaaagaagaaatataattatatcaagagatgcagaaaagttatttgacaataagttaataattatattgtcaaatagttgttaattatgaaaatgctgattaattatgaaaatgctcagcaaactaaaaatagagaacttgcctaacttgatgaagaacacctacaaaaacctacagctaacatcatacctaatggtgaaaagctgcatgttttcccctaagatcatcatcaaggaaaggatgccactatctctggtcttactcaacattgtacaagaattccaagtgaatgcaataaggc

SEQ ID NO: 2108 - DNA, 382 bp, Homo sapiens
  MAP TO AC011002.1; EXPRESSED IN BONE MARROW, SIGNAL =   9; EXPRESSED IN BRAIN, SIGNAL =  12; EXPRESSED IN ADULT LIVER, SIGNAL = 5.5; EXPRESSED IN BT474, SIGNAL = 1.9; EXPRESSED IN FETAL LIVER, SIGNAL =  10; EXPRESSED IN PLACENTA, SIGNAL = 9.5; EXPRESSED IN HELA, SIGNAL = 7.8; EXPRESSED IN HBL100, SIGNAL = 4.5; EXPRESSED IN HEART, SIGNAL =   8; EXPRESSED IN LUNG, SIGNAL =  17
caccaacatgaaagaagctctgagaacccaaagtaggacacacacacacacacaaacacacacacacacacaccccaaagtcaaatcaaaggtcaagaaaaacatcttagaagcagtgctatgctctgaatgtttgtgtcttccctaaattcacatgctgaaacataatccttgatgtcaggatatttaggggtgggatctttgggaggttattagatcatgaggatggagccgtcatgaatggaatttgtaaggccccggaaagatccctcacaccttctaccctgtgaggtaatggcaaaatttggctgtatatgaattaggaagcaggtcttcattggacatagaatctgccatgtccttgatcttagatgtctcagcc

SEQ ID NO: 2109 - DNA, 479 bp, Homo sapiens
  MAP TO AC011079.1; EXPRESSED IN HEART, SIGNAL = 1.4
tgcaaaaagctatggcctatgggattcattaactgctaggctctcaagcaactgaacactatttaaatctccttcttcctagaatgcaaaaactataaacagggtggctgctcagaaggactatttatttttttttgccacagtcacatattcttgggagattcagatgtataaacttgataataaacaagtataataactagttatttcaaggccatatacagttttatgagctttacccagagtctccattataaatcactctcatcatcttacctttttcaagcatttcaccatcattttgctttttttcctcttccaggtccattggtttttccagggctgctttctcttccttttcttcttgctctagtactccttttgtttgtggtatacatatgtcggtttttttatactctgtatctttatgttttttctgtggtagttaacataagttatttttactaaaggcagagtgc

SEQ ID NO: 2110 - DNA, 496 bp, Homo sapiens
  MAP TO AF188031.1; EXPRESSED IN PLACENTA, SIGNAL = 1.1; EXPRESSED IN HELA, SIGNAL = 1.6; EXPRESSED IN HEART, SIGNAL =   1; EXPRESSED IN BRAIN, SIGNAL = 1.6; EXPRESSED IN BONE MARROW, SIGNAL = 1.5; EXPRESSED IN FETAL LIVER, SIGNAL = 0.87; EXPRESSED IN ADULT LIVER, SIGNAL = 0.97; EXPRESSED IN BT474, SIGNAL = 0.99
cgagcacgcttcagatgtaacttggagctggtatttctatgtatatcatagggtcatcaggaggcttaaacaagacacttactgcgaggaccctaaggacagcacacagtaggtgctcaaatgcacacacaaatgcacagtccattctctgctgtcttggcttctccacgctctacgccccacgtttaaagcgttctttgagcaattccgccccctggtggcagatctgatgatgactcaggcaaggcctgatgcctctcaggcacaaggtgactgcccgccctctccctcctggccaggtccggtgggcggcagatggccagggcagtgcggaacttcctgaaggcacagcaggtgcaggcacccgtggagctctactcggactggctctctgtgggccatgtggacgagtttctgacctttgtgcctacctctgaccaaaaggtgcgtcccctccctccctgcctgagccacctctgcccttgtttgacctgat

SEQ ID NO: 2111 - DNA, 486 bp, Homo sapiens
  MAP TO AL080245.13; EXPRESSED IN FETAL LIVER, SIGNAL = 3.4; EXPRESSED IN ADULT LIVER, SIGNAL = 2.3; EXPRESSED IN HELA, SIGNAL = 4.1; EXPRESSED IN BRAIN, SIGNAL = 4.2; EXPRESSED IN LUNG, SIGNAL = 2.4; EXPRESSED IN BONE MARROW, SIGNAL = 3.3; EXPRESSED IN BT474, SIGNAL = 1.9; EXPRESSED IN PLACENTA, SIGNAL = 3.6; EXPRESSED IN HEART, SIGNAL = 3.1; EXPRESSED IN HBL100, SIGNAL = 2.4
atgaaacctttcccagcagcccccagtgagggcgtcatgcatagccgcagtacatattgaaaccaggacatcgacagcggtgcattactgtaatccaagcagccgtatcttcaggcctcaaaactgagcatttaactacatctatgcatttaacacatatgtggattaagtggttggttattgctttttatgccagtgggttcacaccacctttgttctatgccctttgcttttttcacatgtcatatcttgccttgggcctctttccacattgcttcatagtgatattcctgattctcttcgtcagctgcaggggactgtccagaatgaatggacctctgtgtatatgacagttctgttcatgagcattcaggttgtttcttgccattttggtattataaataacagcacactgaacatccttgtgtacagacagttgtgcgcattttggaggcatggtttcctggcaggggaactgttaggtca

SEQ ID NO: 2112 - DNA, 477 bp, Homo sapiens
  MAP TO AP000365.1; EXPRESSED IN PLACENTA, SIGNAL = 1.1; EXPRESSED IN HEART, SIGNAL = 1.2; EXPRESSED IN BRAIN, SIGNAL = 1.1; EXPRESSED IN FETAL LIVER, SIGNAL = 0.97; EXPRESSED IN ADULT LIVER, SIGNAL =   1
tttctgccatcacgtctgagacagctaagcctgcattctctgccaaagttttaggaagatacttcagggcccaggcaaatgctaggaatgcaggcccactgggcccttccaatctgcttcctttatcagaaagcatttttgccaaagccatttctgtggccccagctcctggaatcagtctgggatcttgacatagctggaaataggcatcaatgccgtggtagacggcctgctctgcactccgcagcccctgggtggtggctcccctgagaaccacagtgagggcaggtgtgcctgtacattcccattcaaataccacagccaaaccatctcccagctcctgcctgtaaaccctctggcacttgcctggcctctggggagggagcagacgaggcagcagaggtgtgtccaacacctcactcaggtaaatgatctccatccaagacctagcttgaatcaccacgatgccatacttgt

SEQ ID NO: 2113 - DNA, 476 bp, Homo sapiens
  MAP TO AL109654.13; EXPRESSED IN HBL100, SIGNAL = 1.4; EXPRESSED IN HELA, SIGNAL = 1.1; EXPRESSED IN HEART, SIGNAL = 2.4; EXPRESSED IN LUNG, SIGNAL = 1.2; EXPRESSED IN BRAIN, SIGNAL = 2.2; EXPRESSED IN BT474, SIGNAL =   1; EXPRESSED IN ADULT LIVER, SIGNAL = 1.9; EXPRESSED IN FETAL LIVER, SIGNAL = 1.3; EXPRESSED IN PLACENTA, SIGNAL = 1.9; EXPRESSED IN BONE MARROW, SIGNAL = 1.7
gaatagcatgggggaaactgaccccatgattcaattacctcccatcggtccctcctaccacacgtggggattatggggattacaattcaaggtgagatttgggtgggaacagagccaaaccatatcaggctgaatacttaagttcccccagatttcctatattgacaacccacctctaattgggatattattaagagacaggacctttgtgaagtgattaggattagatgaggtcataagggtgaaggcctcataaataggattagtgacctcataatagtcaagagagtatatttccttggtctactctctgccaggtgaacattaaacaagaagtcagtcagtgtgcaactcagaagataagagaatcctcatcagaaataaacaatgctggcatcctgattcccaacttgcagacttcagaactgtgagaaataaatttccattgtttataagccacccagtttatggcattt

SEQ ID NO: 2114 - DNA, 485 bp, Homo sapiens
  MAP TO AL035653.12; EXPRESSED IN BRAIN, SIGNAL = 2.5; EXPRESSED IN BT474, SIGNAL = 1.2; EXPRESSED IN HBL100, SIGNAL = 1.8; EXPRESSED IN HELA, SIGNAL = 2.6; EXPRESSED IN LUNG, SIGNAL = 8.2; EXPRESSED IN BONE MARROW, SIGNAL = 2.3; EXPRESSED IN ADULT LIVER, SIGNAL = 2.7; EXPRESSED IN FETAL LIVER, SIGNAL = 2.9; EXPRESSED IN PLACENTA, SIGNAL = 3.2; EXPRESSED IN HEART, SIGNAL = 2.9
ccattctcatgagcaaacccatttacacataccctcggagtgggcctgtccctatgcaaacctgtttggcagtatctcctgaaccagaacaaccccatgatccgaaattccacctaggtacaggagtgtgtacacacgagcaccaggagacacgcacaagaatattgacggtggcattatctgtcatagtcaaaagctggaaacaatgcatgctgcaacagcccatctgaggcagggtgggcagaaccgggtgagggaggtacacgtccacgcgcctcatcttacatcacccgaggcacacacccatcagtaccatggcgggcagaacccctggtgttctcacttgccaactgtgtctctcccttgctgaggggaatggctgctttccacttggttaggtactcataggatgtgatgccactttcctggatgactttactcaatcctaactctcagatggggagtgggctggaggaacacctatt

SEQ ID NO: 2115 - DNA, 475 bp, Homo sapiens
  MAP TO AF153342.1; EXPRESSED IN PLACENTA, SIGNAL =   3; EXPRESSED IN BRAIN, SIGNAL = 2.3; EXPRESSED IN BT474, SIGNAL = 1.1; EXPRESSED IN FETAL LIVER, SIGNAL = 1.9; EXPRESSED IN HEART, SIGNAL = 2.7; EXPRESSED IN HELA, SIGNAL = 2.7; EXPRESSED IN HBL100, SIGNAL = 1.9; EXPRESSED IN LUNG, SIGNAL =   2; EXPRESSED IN BONE MARROW, SIGNAL = 2.4; EXPRESSED IN ADULT LIVER, SIGNAL = 2.1
  unsure 72
  unsure 156
tgctttggtttaatggaaacagtatatctaactggatgtttgtattagtctgttttcatgctgctggtaaanacatacccaaccactgggcaacttacaaaataaagaggtttatcctacttacagttccacatggctggggaaccctcaaaatcncagtgggaggcaaggaggaccaattcacatcttacatggatggcggcggcagcaggcaaagaaaggagtgcttgtgcagggaaactcccctttttataaccatgagatctcgtgagacttattcactatcatgagaacagcaccagaaagacctgcccccatgattcaattacctcccaccaggtccctcccacaacacatgggaattcaaaatgagatctgggtggggatacagtcaaaccatatcaatgttgaaaaacgggaactacttagacacacacaggtagaggtaagagtgcttcagatgttgaaaatgacg

SEQ ID NO: 2116 - DNA, 475 bp, Homo sapiens
  MAP TO AL078604.10; EXPRESSED IN ADULT LIVER, SIGNAL = 2.6; EXPRESSED IN BT474, SIGNAL =   1; EXPRESSED IN FETAL LIVER, SIGNAL = 3.2; EXPRESSED IN PLACENTA, SIGNAL = 3.3; EXPRESSED IN HBL100, SIGNAL =  25; EXPRESSED IN HELA, SIGNAL = 2.4; EXPRESSED IN HEART, SIGNAL = 3.9; EXPRESSED IN BONE MARROW, SIGNAL = 3.4; EXPRESSED IN LUNG, SIGNAL = 2.1; EXPRESSED IN BRAIN, SIGNAL =   2
agaggctctgtcagcctgggcccctgagtgacttcatggagtataccatctctccaactggattttatgtaagtggaaataacgttctacaaggttaagccactgagatttgggggtttgcctgctacagacatttagctgtaacacatattaatctgtatgactggctaagtgcagttgaaccaggtagtcctggtctaagaactccttttaaagatcgtcatgtttctaagcatctgttttcagtgtacctggtcattctcacttacctgttctttcagctttcagtggttcagtttttctccactgtttccaccaaaataccatcaacagtaaggaagaacaatgtggaccaccagaaggctggagtgttttctgaagctgctcctgcttggactttggttggaagtcgtgattgtctgagggttcatgctggcgctcccccagtgaacctagctcacctaccctctgctct

SEQ ID NO: 2117 - DNA, 475 bp, Homo sapiens
  MAP TO AL110503.1; EXPRESSED IN PLACENTA, SIGNAL = 1.3; EXPRESSED IN HEART, SIGNAL = 1.3; EXPRESSED IN BRAIN, SIGNAL = 1.7; EXPRESSED IN BONE MARROW, SIGNAL = 1.9; EXPRESSED IN LUNG, SIGNAL = 2.2; EXPRESSED IN BT474, SIGNAL = 0.96; EXPRESSED IN ADULT LIVER, SIGNAL = 1.6; EXPRESSED IN FETAL LIVER, SIGNAL = 1.3; EXPRESSED IN HBL100, SIGNAL = 1.3; EXPRESSED IN HELA, SIGNAL = 1.1
cacagactattttcactgccctagatattccctagtatcagcttattcacccatttctcccctgtaatccctggcaaccactgatctttttactgttttcatagttttgccttttccagaatgtcacatagttggaatcatatagtatgtagccttttcagattggcttctgtcacttaggaatatgcatttagggttcttccacatcttttcatgacttgatacctcatttctttttggagtttaataatattctattgtctgaatgtaccaaagtttatttatcccttaacctactgaaagacatgttggttgtttccacgttttggtaattgtcgataaagctactataaacatccatgtataggtctttgtgtgaacctgtgcaagttttcataccattgggtaaataccaaggagcatgactgactatatggtgagaagaatatgtataattttgtaagaaacagccaaa

SEQ ID NO: 2118 - DNA, 473 bp, Homo sapiens
  MAP TO AF182108.1; EXPRESSED IN HELA, SIGNAL = 1.2; EXPRESSED IN PLACENTA, SIGNAL = 1.6; EXPRESSED IN HBL100, SIGNAL = 1.2; EXPRESSED IN HEART, SIGNAL = 1.4; EXPRESSED IN BRAIN, SIGNAL = 1.6; EXPRESSED IN BONE MARROW, SIGNAL = 1.7; EXPRESSED IN BT474, SIGNAL = 1.2; EXPRESSED IN FETAL LIVER, SIGNAL = 1.5; EXPRESSED IN ADULT LIVER, SIGNAL = 1.8
ccaaaacagagatttatggcatcttcactcatttcttcaacaaactgatatttgttgagggccagtgtggtcaggtcctgctctagggcatggaaaacctcagtgaccataactgactgttctctgctcttgtggagtcatcattctagctgtctctttgacacagtttggatgtttgtcccctccaaatcttacgttgatgcgtaatccccaatgttgaagattgggcctggtgggaagtgattggatcataaaagcggattcctcatgaatagcatagcgccatccctttggtgatgagtgagttcacgtgagagctggcccctcctctcactccctcacttatgctctctctcttgttcctgatctcaccaggtgatgtgcttgttcccccttccccttccaccatgattgtaagcatcctgaggtcctcaccagaagcagatgctgaagccatgcttgcacagcctata

SEQ ID NO: 2119 - DNA, 481 bp, Homo sapiens
  MAP TO AC011619.1; EXPRESSED IN ADULT LIVER, SIGNAL = 2.4; EXPRESSED IN BT474, SIGNAL = 1.7; EXPRESSED IN FETAL LIVER, SIGNAL = 4.4; EXPRESSED IN HELA, SIGNAL = 1.9; EXPRESSED IN PLACENTA, SIGNAL = 3.4; EXPRESSED IN HBL100, SIGNAL = 1.9; EXPRESSED IN HEART, SIGNAL = 2.6; EXPRESSED IN BONE MARROW, SIGNAL = 2.9; EXPRESSED IN BRAIN, SIGNAL = 2.7; EXPRESSED IN LUNG, SIGNAL = 1.5
gcacatgcaagcacacatacttgaagaaagcagactgtttctgaggcaagctagagaggaaagattgattaatgtaaggttctttgcagtaccaatttcaatttcctaggatcaataaaagcaaacagattttttaacacattattttgtttcataaggagaattactgttataatgaaacaaggattggcaaactttttctgtagataatcaggtagtgactattttagattttgtgggccacagaggctttatagctggctacgtctgttcctcctcttattttcttcttcgttgtcttcatcttcctctttgtcttcttttcttcccccctcctttcccctcttcctccttcttcttcttgctcttcttctgttttcctcctccttccccctcctcccccctccctcctccttctcttcttcctccttctcctccttcttcttcctcttcttcatctcctccttctttttcttcttcg

SEQ ID NO: 2120 - DNA, 473 bp, Homo sapiens
  MAP TO AL078583.15; EXPRESSED IN BONE MARROW, SIGNAL = 2.6; EXPRESSED IN LUNG, SIGNAL = 2.3; EXPRESSED IN BRAIN, SIGNAL = 2.5; EXPRESSED IN ADULT LIVER, SIGNAL = 3.9; EXPRESSED IN BT474, SIGNAL = 1.9; EXPRESSED IN FETAL LIVER, SIGNAL = 2.7; EXPRESSED IN PLACENTA, SIGNAL = 5.1; EXPRESSED IN HELA, SIGNAL = 3.2; EXPRESSED IN HBL100, SIGNAL = 2.6; EXPRESSED IN HEART, SIGNAL = 3.6
accctcacagaaacacccaggaaaaatactttgcatccttcaatccaatcaaattaacactcagtattaaccatcactcctctcaactttgttcttctaaatttctcctttctgccaatctaaatgtatttattattattcaaatttagacaaatcttgaattctgaagcagttaaacctcttttccacatatgacgacttctcttctgacacattctgtatacacacagtcatagacatacaatgcatatatgtacctttctatatgtattaattcatgtataatgtatacatgcatcagtgtgtatttttactgtagtaacaatgcttcctccatttgcattaccatcgtgctgctttctcatcgttatatgtatttccctttcttccattctaacagtaaaactatcaaaggcaggaaccagacctgtaatgtcttttgtccttggaatgcttttcatgtttttcaaccc

SEQ ID NO: 2121 - DNA, 462 bp, Homo sapiens
  MAP TO AL096712.14; EXPRESSED IN LUNG, SIGNAL = 2.2; EXPRESSED IN ADULT LIVER, SIGNAL = 0.93; EXPRESSED IN BT474, SIGNAL = 1.9; EXPRESSED IN FETAL LIVER, SIGNAL = 1.5; EXPRESSED IN HELA, SIGNAL = 1.7; EXPRESSED IN PLACENTA, SIGNAL = 1.8; EXPRESSED IN HBL100, SIGNAL = 1.7; EXPRESSED IN HEART, SIGNAL = 0.98; EXPRESSED IN BONE MARROW, SIGNAL = 1.1; EXPRESSED IN BRAIN, SIGNAL = 1.4
ctgctgtactgtgccagctctgggagctgaggagtgctcaccagtggcacaagctccagcacagtgcagggccaagggagtaaataatcctgggaaagctggccttgcttcatctgctcacatgtggatctcattgaatgaggagagggcaaaaaatgggtggccagaaccaaaaagggatttacccttggcagttttccttcttggtagtttccaaaccactgcatagattaaaataaaaattaaggatttatccaaccattgtctttccccatctgaccagcagtcttgtctatagggctatctcccagcaaacactgagaggaggaagttgaccctgcagcggaagcgggaggaatattttggcttcattgaacagtattatgactctcgaaacgaggaacatcaccaggatacctacagacaggtacagtcaccacctgctgcctctttgcttaccag

SEQ ID NO: 2122 - DNA, 469 bp, Homo sapiens
  MAP TO AL121752.1; EXPRESSED IN BONE MARROW, SIGNAL =   1; EXPRESSED IN BRAIN, SIGNAL = 1.4; EXPRESSED IN ADULT LIVER, SIGNAL = 1.1; EXPRESSED IN FETAL LIVER, SIGNAL =   1; EXPRESSED IN PLACENTA, SIGNAL = 1.3; EXPRESSED IN HELA, SIGNAL =   1; EXPRESSED IN HBL100, SIGNAL =   1; EXPRESSED IN HEART, SIGNAL = 1.2
aacattacccaaagacccaggatcactttattcgacattttattgtggtctgtcctcttgggcattgtggtatgtgaggtctggctccaggcctgctgccaacaagggccatgtccagtatggggtgctgacagtttggtagaaaaacattccacctgttccaaatgctctctgataaaccctccttacggttccacagcttaggactgtcctggcacaatggctgagtcaggaaaactggctttttctggcacatggggacaggagcagaggacaagctcaggcacatcacccttctgcaaacgatttgctagcacaacagcgtgcctgtgtctgctgtgcctgggcacatgccagagcgctgctggcagcaacccacatgtgctgtgcagaaaggaatgggattgggagcgggtgttatggggacctggagaatgggcagagcccaggatgggaaaacaggcaactt

SEQ ID NO: 2123 - DNA, 468 bp, Homo sapiens
  MAP TO AL034372.14; EXPRESSED IN FETAL LIVER, SIGNAL = 1.9; EXPRESSED IN HELA, SIGNAL = 1.8; EXPRESSED IN HEART, SIGNAL = 2.6; EXPRESSED IN LUNG, SIGNAL =   1; EXPRESSED IN BRAIN, SIGNAL = 2.5; EXPRESSED IN BT474, SIGNAL =   2; EXPRESSED IN ADULT LIVER, SIGNAL = 1.5; EXPRESSED IN PLACENTA, SIGNAL = 2.2; EXPRESSED IN HBL100, SIGNAL = 1.6; EXPRESSED IN BONE MARROW, SIGNAL = 1.8
ggggatgagggacaaaagactacacattgggtacagtgtacactgctcagatgatgggtgtatccaaacctcagaaatcaccactaaagaacttatccatgtaaccaaaaaccacttgtacccacccccaaaactactgagattaaaaagcaacaataatacatacaatttcatggttaaaaaataaaaataaagccatccccagtgattgtgtcttcctcctcgctgttgttgagactgatggtgttggtttactcatcctccctgatgctcacgcagcctccatttgtgcctgtgcttttctagaatggccaacatgcagggactggtggaaagactggaacgagctgtcagccgcctggagtcgctgtctgcagagtcccacaggccccctgggaactgcggggaagtcaatggtgtcattgcaggtagggtcacaaactgttgtcattcctggtcttcttgtgg

SEQ ID NO: 2124 - DNA, 468 bp, Homo sapiens
  MAP TO AL080286.16; EXPRESSED IN BONE MARROW, SIGNAL = 1.7; EXPRESSED IN LUNG, SIGNAL = 1.4; EXPRESSED IN BRAIN, SIGNAL = 1.2; EXPRESSED IN ADULT LIVER, SIGNAL = 0.93; EXPRESSED IN FETAL LIVER, SIGNAL = 1.2; EXPRESSED IN HELA, SIGNAL = 0.97; EXPRESSED IN PLACENTA, SIGNAL = 1.1; EXPRESSED IN HBL100, SIGNAL = 0.97; EXPRESSED IN HEART, SIGNAL = 1.3
taaaatgggctgccactctcccagtttgcctcagggttgttgtggggatttattgagaaaaagttgataatgctctgaactcagaatttagtttatactaggcaattgataaagcgcagccattgtattctattactgacgggatactgggttttcccagagctctaggaagtgccagtcctcaccgatgcccctttaaatcagccacgctgccctgactttatctgtgccactttaatcaccaaggaaacagtggagggacccagatatcactgagaagcccttgattgagaattactgcacctcacaggcaggaatctctcctccgttgcccttgtcctggtgttgcatgttggaatgcagctctccatggtcaagacctgggaactcagcctcaaattaaatgcaaacagatggatatctctcatctgtgttttactccgactctccaagccatcctggagaata

SEQ ID NO: 2125 - DNA, 458 bp, Homo sapiens
  MAP TO AF186190.1; EXPRESSED IN BT474, SIGNAL = 5.2; EXPRESSED IN HEART, SIGNAL = 2.7; EXPRESSED IN LUNG, SIGNAL = 2.9; EXPRESSED IN BRAIN, SIGNAL = 3.6; EXPRESSED IN FETAL LIVER, SIGNAL =   2; EXPRESSED IN ADULT LIVER, SIGNAL = 2.1; EXPRESSED IN PLACENTA, SIGNAL = 4.8; EXPRESSED IN HELA, SIGNAL = 4.9; EXPRESSED IN HBL100, SIGNAL = 1.6; EXPRESSED IN BONE MARROW, SIGNAL = 2.7
ctgggggaatggggagatagtatctgataagtatgttgtttcagtttgggaagatgaaaaagtcctggagatggatggtggtgacggctgcacaacaatgtctgcatgtccttaatgccactgaactatatacttaaaaatagtgaaagtgctaacttttatgttatgtatcttttcccacaatttaaaaagtgcttaagatgatacgttttatattttaccacagttaaaaagtatttaaaagagcaaagcacctgaacccctccccgacacccagtttccaccctgtagagctcatagggcaagaggcctctcaccctgcggggaaggaggctgcgccgtcctgctggccaggggcgtccacgtggcaaacggcaaagtgctgggtgatctcctgcatgtcctcgtagttgaagagggggttgtagcaggttttgtctgaagaacagcagtgaggg

SEQ ID NO: 2126 - DNA, 469 bp, Homo sapiens
  MAP TO AL078639.3; EXPRESSED IN PLACENTA, SIGNAL = 1.4; EXPRESSED IN HBL100, SIGNAL =   1; EXPRESSED IN HEART, SIGNAL = 1.6; EXPRESSED IN BONE MARROW, SIGNAL = 1.4; EXPRESSED IN LUNG, SIGNAL = 4.8; EXPRESSED IN BRAIN, SIGNAL = 1.4; EXPRESSED IN FETAL LIVER, SIGNAL = 1.4; EXPRESSED IN ADULT LIVER, SIGNAL = 1.4; EXPRESSED IN HELA, SIGNAL = 1.3
catgtggcatgtccaaagtcacacagctagcgtccaagctccagactccaatatccatgttttttacactaaactaagctgttttcccttaaaatgagtagctgtcattcacattctggagcatgtgaaaattctgtcatggagctgcgttatggtttgaatgtctgtctcctccaaaactcatgttgaaacgtaattgccactgtaacagtattaagaggtgagatctttaagaggtggttaggctccaccgtcatgaatagattaatgccattcatgggaatggcatttcatgggaatggattccttacaaaagggcaagtttggcctctctctcctttgccatgggatgacacagcaagaaagcccttgccaattgtcagtccctcagtcttggccttctcatcctccataaccacatgaacaaatttctctaataaatcccctctcctctatctatctatctagc

SEQ ID NO: 2127 - DNA, 462 bp, Homo sapiens
  MAP TO AP000474.1; EXPRESSED IN HBL100, SIGNAL = 2.5; EXPRESSED IN HEART, SIGNAL =   4; EXPRESSED IN LUNG, SIGNAL = 2.2; EXPRESSED IN FETAL LIVER, SIGNAL = 4.1; EXPRESSED IN ADULT LIVER, SIGNAL = 3.6; EXPRESSED IN PLACENTA, SIGNAL = 3.4; EXPRESSED IN HELA, SIGNAL = 3.2; EXPRESSED IN BRAIN, SIGNAL = 3.5; EXPRESSED IN BONE MARROW, SIGNAL = 4.4; EXPRESSED IN BT474, SIGNAL = 1.9
ttgactcccagctttgaaccgacccttcattactcagttctgtaatgctggggctggaattctgtaaaaccaaatatttctcttctgtcaacaggatctctgctgagctctagcaataggcagcactagggggagacaaagatcccccttgcctcttgttcctaagagcatttccccaaaagttcttcactggagcaggagcagttggctccaatagcagcagttttgctggcattttccacatttcaaaacgagtctcattttgccccctgagaaatgatgcaccagttgccctgatcctccttcttagacaacttggtcacaatcccactggggcccctcgagattcccaaggcatctgtgctagtcaggcagcacaccatcctcagagatctcagtcccagaatccagaaaatccctccttcaagcacctgaggcacagccaaggtgggcagtatgatt

SEQ ID NO: 2128 - DNA, 461 bp, Homo sapiens
  MAP TO AL035414.18; EXPRESSED IN BONE MARROW, SIGNAL = 1.8; EXPRESSED IN HBL100, SIGNAL = 1.3; EXPRESSED IN HELA, SIGNAL = 1.3; EXPRESSED IN HEART, SIGNAL = 2.4; EXPRESSED IN LUNG, SIGNAL =   2; EXPRESSED IN BRAIN, SIGNAL = 1.7; EXPRESSED IN BT474, SIGNAL = 1.3; EXPRESSED IN ADULT LIVER, SIGNAL = 1.2; EXPRESSED IN FETAL LIVER, SIGNAL = 1.8; EXPRESSED IN PLACENTA, SIGNAL = 1.6
agaactcaagagggccacagaataaaatcttagctgtaaaatggcaagaatctctcagctcacagaactttttctatactggagccacttgcatttgcatttactttggaatttaacactccacctgctttcaaagatgccatctactcggatcctctcaggagggctaagtttttaggtccctttcaggaatcagaatcctgctcaggaagaagcagcgatctacccacggacagagaagccagcaatggagcaaaaattagaaccaaaattcccaacccccactgtcatacaggcagaaatcctgttccttgatcttggaagaaaagtacagcacaccttgccaaagcctgaaacatacataaacataacggctgcaagatgcttttcccccagcaacttccaatatcatttcaaaaatactttagctttacttctgatgcaggcaactaatggattcc

SEQ ID NO: 2129 - DNA, 460 bp, Homo sapiens
  MAP TO AL080312.4; EXPRESSED IN BT474, SIGNAL = 4.8; EXPRESSED IN HBL100, SIGNAL = 2.2; EXPRESSED IN LUNG, SIGNAL = 1.7; EXPRESSED IN BRAIN, SIGNAL = 2.1; EXPRESSED IN ADULT LIVER, SIGNAL = 1.3; EXPRESSED IN FETAL LIVER, SIGNAL = 1.7; EXPRESSED IN PLACENTA, SIGNAL = 8.3; EXPRESSED IN HEART, SIGNAL = 2.5; EXPRESSED IN HELA, SIGNAL = 1.2; EXPRESSED IN BONE MARROW, SIGNAL = 2.4
tctccagagtctgctcctcgtacagaggtgcccataatgggtgtggggtcaggaatcagggaggagctcatctccaggacactcaccttctcctttgatgtcgtgggggtagccaatgacagcactttctggtactgcaagggtggtcggcctgtgtacaacagagaacaaaagggcaaaatgtggcggccccgggtgctagaagtgactcgggccagggactcccaccccaacttgcaggtccacaggggcatcatggaggtgtaggagtgaaggaggaggcccagcctgtgctcacgatggcgtcctcaatctctgcggtccccagccggtggccactgatgttgatgacatcatccatccgccctgtgatctggtaatagccgccctcagttcggtaagccccgtctccagtgaagtaatagcctgcaccacagcagggaaattcagcaccaggaac

SEQ ID NO: 2130 - DNA, 459 bp, Homo sapiens
  MAP TO AL031963.11; EXPRESSED IN PLACENTA, SIGNAL =   2; EXPRESSED IN BONE MARROW, SIGNAL = 1.8; EXPRESSED IN FETAL LIVER, SIGNAL = 1.8; EXPRESSED IN HBL100, SIGNAL = 1.3; EXPRESSED IN HELA, SIGNAL = 1.5; EXPRESSED IN HEART, SIGNAL =   2; EXPRESSED IN BRAIN, SIGNAL = 1.8; EXPRESSED IN LUNG, SIGNAL = 1.1; EXPRESSED IN BT474, SIGNAL = 1.1; EXPRESSED IN ADULT LIVER, SIGNAL =   2
acagtctggctgtcctcgaagagcagctgaggagaggttaatcagaacacctgtacggcacccataattcaggcagcacagacactggcattatgcctgtcctgaggcgttgtcctgtgctaagtgtggtccagttagatgctggatcctaggaggtcttaggccaaggcgggtgagtggcaggaaggagggctcttgagatggaggcttatggacagggctacttagcagttgacacagacatattttaacatcttaaaaaacagtaggatttatccgtgcagatgggcactgttgactatggccctcctgcagcaggccagacaacacaggataccctacagctaaagaacagcctggagatcgagaccttgggaccagtctcatctttgggaatgtcaccaaggctgctgaaggtctgggtaggtcctctgggcctgctgagtgcagacgagtgac

SEQ ID NO: 2131 - DNA, 467 bp, Homo sapiens
  MAP TO AL121756.2; EXPRESSED IN BT474, SIGNAL = 1.3; EXPRESSED IN HBL100, SIGNAL = 1.1; EXPRESSED IN BONE MARROW, SIGNAL = 1.2; EXPRESSED IN ADULT LIVER, SIGNAL = 1.1; EXPRESSED IN FETAL LIVER, SIGNAL = 1.1; EXPRESSED IN PLACENTA, SIGNAL = 1.4; EXPRESSED IN HEART, SIGNAL = 1.2; EXPRESSED IN HELA, SIGNAL = 1.3; EXPRESSED IN BRAIN, SIGNAL = 1.1
gtgtgcccactgtcaccagtgactacatttccctggaagtcaatgtaagtgcctcctggccagcccagagctgggggcttgctgcctctggagtccttggtgttccagaagattcctaaaggagcgggggagtgggaaaggagaggaggagctggaatagtgtcccagccgggagcatgccacacaggcgaaagtgtgaactacacatgtggcatcttgcaggggctggggggcagggagtggcatctaggagtccaggttctgccatggagccacctccgtgctgaggccctgctgcttttctcccacttccccctcccacccctacaggctgttctcttcctgctgggcaagcccatcatcctgcccacggatgccaccccttttgtgttgccaaggcatgtgggtaccgagggctccatggccaccgtgggcctctcccagcagctgtttgactctgcgctcct

SEQ ID NO: 2132 - DNA, 396 bp, Homo sapiens
  MAP TO AL034396.6; EXPRESSED IN BT474, SIGNAL =   2; EXPRESSED IN PLACENTA, SIGNAL = 1.5; EXPRESSED IN BONE MARROW, SIGNAL = 1.4; EXPRESSED IN BRAIN, SIGNAL = 1.2; EXPRESSED IN FETAL LIVER, SIGNAL = 1.4; EXPRESSED IN ADULT LIVER, SIGNAL =   1; EXPRESSED IN HEART, SIGNAL = 1.6; EXPRESSED IN HELA, SIGNAL = 4.7; EXPRESSED IN HBL100, SIGNAL = 1.2; EXPRESSED IN LUNG, SIGNAL = 0.89
aagttagccacatggcaaggaatgaatagagttgcttcataccaaaaatgagctgccagtcacagtgataagatttctttctttctgagaaccatggtttcctgctgcattggggaatccaaactgggtttctccctcctgtccaaagaagtcagagttaggatgtacgctccactccgctttggctggtgtcagtagttctgagacactgttttcacaaagggtgctcgaaggagtcagagtatctgtgtccactgttagcttactgctgggtgtcaaagcctgaggctctggactggagtttttcatggccaaagagtccagagatcccaatggccccacacttacacttgagacctcatccatatttaaggagctctgctgaaaaccagtggc

SEQ ID NO: 2133 - DNA, 450 bp, Homo sapiens
  MAP TO AL080286.16; EXPRESSED IN PLACENTA, SIGNAL = 3.7; EXPRESSED IN HEART, SIGNAL = 3.1; EXPRESSED IN BRAIN, SIGNAL = 3.3; EXPRESSED IN BT474, SIGNAL = 1.5; EXPRESSED IN HBL100, SIGNAL = 1.7; EXPRESSED IN HELA, SIGNAL =  11; EXPRESSED IN LUNG, SIGNAL = 2.1; EXPRESSED IN BONE MARROW, SIGNAL = 2.7; EXPRESSED IN ADULT LIVER, SIGNAL = 2.2; EXPRESSED IN FETAL LIVER, SIGNAL =   3
caagtccagagtcacccagctgatgggagacagaacctggtgacacctgagtccctggcttagagtccccagcctcttctgtgatgggagagcccgggttttgagtacaggacacttgggatctggtgccctggggaacctctgcaaatcttttgatgttactcctcattcaaaatgagatctgctgtgcagcctctggcaaatgtctcaatctctctgagcttcaggttccttcaaaaaggtttggagaaacgtagagaaaaatcctcattctgtgcctcccagggtttgtatggggtgggaagaggtaacagaggtggatattataacctggtcataatcgcggtcaaactagtcctaacagtgagccactctgggccatgccctgtgctgatgcagatgcaccaagcacacttagtgaggcaggccctgttattattcccatgggtg

SEQ ID NO: 2134 - DNA, 360 bp, Homo sapiens
  MAP TO AL031661.16; EXPRESSED IN HELA, SIGNAL = 2.5; EXPRESSED IN HEART, SIGNAL = 2.1; EXPRESSED IN BRAIN, SIGNAL = 1.7; EXPRESSED IN BONE MARROW, SIGNAL = 1.7; EXPRESSED IN ADULT LIVER, SIGNAL = 1.2; EXPRESSED IN BT474, SIGNAL = 1.9; EXPRESSED IN FETAL LIVER, SIGNAL = 1.3; EXPRESSED IN PLACENTA, SIGNAL = 1.7; EXPRESSED IN HBL100, SIGNAL = 2.3
tcactgtgggttattctgtggaataagtgagataaggtgttaaaagcccttggcacagtctagcacaatggttctccaactcacaatcacctggagggcttgttaaagcaaaaatttccgggcctgactccagaatttctgatttattaagtctagaatgggctctaagattttgcatttctaacaactttccaagtaatgctaatgcttttgatgtaggaccacactttaagaaccactggtctagcaatgttatctgttgtgatgatgatgatgatgatgatgatgatgatgacagagatgctgctgctgatgatccgtggggatcaccaggatgatgatgggtacaatggtgatgat

SEQ ID NO: 2135 - DNA, 498 bp, Homo sapiens
  MAP TO AL109615.8; EXPRESSED IN BT474, SIGNAL = 3.8; EXPRESSED IN ADULT LIVER, SIGNAL = 1.4; EXPRESSED IN HELA, SIGNAL = 9.5; EXPRESSED IN PLACENTA, SIGNAL = 1.7; EXPRESSED IN HBL100, SIGNAL = 5.3; EXPRESSED IN HEART, SIGNAL = 1.4; EXPRESSED IN LUNG, SIGNAL = 2.1
cccagaaagctctggaaaaacacataaatgaatacatttattctctcacaggatactacactgttacccagtgtgaagggagcagccatgtggctcccaagctcccttagcaaaagggtggttctcagaactgctccattcacgagtcctgcaaccagaggcctgggctcaactcacacaaagttctgagcaatggccagcaccttggaatactcgccttcccgcttgcgcaggctggtggggatgggtgtcttaattcgtgtccccacagggttcccgttgtcctcaatgaggaccacgttgttggagtcgaatctgggggtcattcgggggccaggcatgcagtgccccacaatgagcgcctttttcttctgtcccttgatggccagtagtatctggtcgcccaccttgcccactccattcttcttatagacatggatgcagcgaggagcccgatggtatgggctgttccccagggcactgttgtccaccactcgt

SEQ ID NO: 2136 - DNA, 365 bp, Homo sapiens
  MAP TO AL109798.8; EXPRESSED IN PLACENTA, SIGNAL = 1.2; EXPRESSED IN HELA, SIGNAL = 1.4; EXPRESSED IN HBL100, SIGNAL = 1.2; EXPRESSED IN HEART, SIGNAL = 1.3; EXPRESSED IN BONE MARROW, SIGNAL =   1; EXPRESSED IN ADULT LIVER, SIGNAL = 0.98; EXPRESSED IN BT474, SIGNAL = 0.99; EXPRESSED IN FETAL LIVER, SIGNAL = 0.9
ccataccattattggcagagagtagaatatttaaatatttcctgagtgttctttcaaaccagccgtagaaaatgaaagagtgattcgttttcagaaatgctctgagcatcttttaccaggaatgtgactgacatagatcctcatatagctggctccttgtcattgccatctcagctcaaatgttacctttttagagaagccctccctgtctatcattctttttccctctttcataacaaaatacaagataatagtctcgtattttttctccaccagcaaaatgtaaagttccatgagggtaaggaccttgcctgtcttgtttaccactatgttgtgtgtcttatcctgaaaacatgggaggcagt

SEQ ID NO: 2137 - DNA, 445 bp, Homo sapiens
  MAP TO AL096867.15; EXPRESSED IN BT474, SIGNAL = 2.5; EXPRESSED IN FETAL LIVER, SIGNAL = 5.3; EXPRESSED IN HEART, SIGNAL = 6.2; EXPRESSED IN LUNG, SIGNAL = 3.7; EXPRESSED IN BRAIN, SIGNAL = 4.5; EXPRESSED IN ADULT LIVER, SIGNAL = 4.9; EXPRESSED IN PLACENTA, SIGNAL = 6.3; EXPRESSED IN HELA, SIGNAL = 5.3; EXPRESSED IN HBL100, SIGNAL = 4.3; EXPRESSED IN BONE MARROW, SIGNAL = 5.8
gctcattgacaatacacctggtcacccaagagttctgagggagacgtacaggaagattaatgttgttttcatggctgctaatacaacatctgttctgcagcccatggatcaaagagtaattttgactttcaagtcttatttaagaaatgcatttcatgaagctatagctgccatagatggtgattcctctgatggatctgggcaaagtaaattgaaaaccgtatgaaagtgattcaccattccagatgccattaagaatatttgggattcactaaagaagatcaaaattcaaaatatcaacattattaagagtttgtaagaagttgattccacccttcatgaaggtctttgagaggtttaagacttcaatggagaaagtcactgcggatgtgttggaaacaataaaagaactagaattagaagtggaggctgaagatgtgattga

SEQ ID NO: 2138 - DNA, 497 bp, Homo sapiens
  MAP TO AL031428.9; EXPRESSED IN PLACENTA, SIGNAL = 1.3; EXPRESSED IN HBL100, SIGNAL = 1.9; EXPRESSED IN HEART, SIGNAL =   1; EXPRESSED IN BONE MARROW, SIGNAL = 0.93; EXPRESSED IN BRAIN, SIGNAL = 1.1; EXPRESSED IN ADULT LIVER, SIGNAL = 0.98; EXPRESSED IN BT474, SIGNAL = 1.3; EXPRESSED IN HELA, SIGNAL = 1.3
tgactgacatgctttctactttccttttgtagattgatgatggtctccagctgtcaaagaagattgtggttgccaagagaaaggtaaccatttctcatccccttgagtggaattggatgcctctaggagcccacattggctggcagtagacatggccgaatttacaagctacaaggagacggcctccagccgccacttgcggtttaagctacagagtctaagccgccgccttgatgagttggaggaagccacaaaaaacctccagaaagcagaggatgaactcctggatctccaggacaaggtgattcaggcagaaggtagcaactccagcatgttggcggagattgaagtgctgcgccagcgggtgctgagaattgaaggcaaagacgaggaaattaagagagcagaggatctgtgtcgtctgatgaaggagaaacttgaagaggaagaaaacctcacccgggagctgaaatctgagattgagcggcttcagaaac

SEQ ID NO: 2139 - DNA, 474 bp, Homo sapiens
  MAP TO AC007318.2; EXPRESSED IN BONE MARROW, SIGNAL = 3.6; EXPRESSED IN FETAL LIVER, SIGNAL = 1.2; EXPRESSED IN HELA, SIGNAL =   6; EXPRESSED IN BRAIN, SIGNAL = 2.3; EXPRESSED IN LUNG, SIGNAL = 3.5; EXPRESSED IN BT474, SIGNAL =  10; EXPRESSED IN ADULT LIVER, SIGNAL = 1.3; EXPRESSED IN PLACENTA, SIGNAL = 3.9; EXPRESSED IN HEART, SIGNAL = 1.7; EXPRESSED IN HBL100, SIGNAL = 8.4
gcagtaaagtgaaaataggaagcctataggaatgatctaaatgcctacttagaagaaacaaagcagcagacagaatccttagccctctagtctatgtagggaagcagttgaattaaactcagatttacccacattaacaaaaatttaacaaagcttccccaagacaccagaataaaacttgacctttccagtcaaagggcagagagaggcctcttccatgtcctggagttgaatgagttcaaagattggcaataaaggaaaaaagaaagcattacgggtatgacgggaacaagctttggagtttatcgaacagtcacaccaagtttctctagcacacggacacccttttcttggtactcttgtcgggtcatccaaaagttgtctttgtctttcatgatatccgctagaactgcaccacccaggaataccatgtgctttctgcggggtgggtcttcaatgcggatcttaaatttc

SEQ ID NO: 2140 - DNA, 483 bp, Homo sapiens
  MAP TO AL050329.9; EXPRESSED IN ADULT LIVER, SIGNAL =   1; EXPRESSED IN BT474, SIGNAL = 1.2; EXPRESSED IN HBL100, SIGNAL =   1; EXPRESSED IN PLACENTA, SIGNAL = 0.94; EXPRESSED IN HELA, SIGNAL = 1.3; EXPRESSED IN HEART, SIGNAL = 1.1; EXPRESSED IN LUNG, SIGNAL = 0.9
cataccagaggagaaatatttgaggtcttaaaggtatcattttaatagaatattattttctttgaaaacttgctgtatgttgaacttatggaacggatagagatggaaaacatgcaaagtttcagaaaatcagatattgaaaatttaatttagcctcatttttgacatagattttcttgttaaaaaaagggataaaagttttttggtgttctgttttccaggtttatggttggctgtgggagatgtgatgactggtttcatggtgattgtgttgggttaagtctttctcaagcacagcagatgggcgaggaagacaaagaatatgtctgtgtaaaatgttgtgctgaagaagacaaaaagactgaaatactagatccagatactttggaaaaccaagctacagttgaattccatagtggagataaaacaatggagtgtgaaaagcttggattatcaaaacacacaacaaatgatagaaccaaa

SEQ ID NO: 2141 - DNA, 472 bp, Homo sapiens
  MAP TO AL109808.2; EXPRESSED IN BONE MARROW, SIGNAL =  16; EXPRESSED IN HBL100, SIGNAL =  42; EXPRESSED IN HELA, SIGNAL =  78; EXPRESSED IN HEART, SIGNAL =  10; EXPRESSED IN BRAIN, SIGNAL = 7.6; EXPRESSED IN LUNG, SIGNAL =  31; EXPRESSED IN BT474, SIGNAL =  48; EXPRESSED IN ADULT LIVER, SIGNAL = 6.9; EXPRESSED IN FETAL LIVER, SIGNAL =  11; EXPRESSED IN PLACENTA, SIGNAL =  23
caccaattcttcccaggttggcacctccagtcaccatacacaggttaccagtgtcgaacctgatgaagtcagtaatcttgccagtctccaaatcaatctgaatggtgtcattcaccttgatgaggggatcagggtagcagatggtacgagcatcatgagtcaccagatgagggattccttttgtgcgcacaaatattttttctcacttttcacaacttgtacttggcctcctcaggtgtaatacgatgtacagcaaagtgacccttggtgtcacagatcagacagaaattctctcccatcttgtcaatgctgatgacatccatgaatccagcagggtaggttatatcagtgcggaccttgccatcgatcttaatgaaccgctgcatgcaaatcttctttacttcctctcctgtcagggcatacttaagtctgttccttatgaaaatgatgagggggagacactctctcaact

SEQ ID NO: 2142 - DNA, 471 bp, Homo sapiens
  MAP TO AC008123.9; EXPRESSED IN BT474, SIGNAL =  55; EXPRESSED IN BONE MARROW, SIGNAL =   2; EXPRESSED IN LUNG, SIGNAL = 2.8; EXPRESSED IN ADULT LIVER, SIGNAL = 1.8; EXPRESSED IN FETAL LIVER, SIGNAL = 1.4; EXPRESSED IN PLACENTA, SIGNAL = 3.1; EXPRESSED IN HEART, SIGNAL = 1.6; EXPRESSED IN HELA, SIGNAL = 5.9; EXPRESSED IN HBL100, SIGNAL = 5.9; EXPRESSED IN BRAIN, SIGNAL = 1.3
ccccaagtagtaaaaacaacagctttgatttataaggtgaggctcctttccaggaggtccagagcagaagatactgttgctaggcttggatctatttttacaattggttttaggtattgaccaatatcctgccaacaaaggtggttctaggtgaatcctcttgattgttttttacatgtggtatgaatcacttagccctcccacactaaagatggaggatccctgatcagaaaatataaagaagccatatatgtctccatctgtgttttaaaatccttactttttccaacagtgtctgctgcacagagctttacatccccgggagcctctacccccaattcagcagcatatttggaatatgctgaatcctcccgctgaggtgacaacgaaaagtcagattcctctctctaaaataaagaccctttttcctctgattgaagccaagaaaaaggatcaagtgactgctcagga

SEQ ID NO: 2143 - DNA, 474 bp, Homo sapiens
  MAP TO AC010092.1; EXPRESSED IN PLACENTA, SIGNAL = 2.6; EXPRESSED IN HEART, SIGNAL = 1.4; EXPRESSED IN BRAIN, SIGNAL = 1.4; EXPRESSED IN BONE MARROW, SIGNAL = 1.2; EXPRESSED IN LUNG, SIGNAL = 9.7; EXPRESSED IN BT474, SIGNAL = 2e+02; EXPRESSED IN FETAL LIVER, SIGNAL = 1.1; EXPRESSED IN ADULT LIVER, SIGNAL = 1.3; EXPRESSED IN HBL100, SIGNAL = 3.7; EXPRESSED IN HELA, SIGNAL = 4.5
gaacctattccttcaggcagctgcgattgtagggaatagttaaccctgccagggcctctatctggaaatcagccaaggttgtgatttgtgttacctcctcaacttcagtttccttaatgaaatgtaaataaaaatagccctttgacaatgcctgctgtcctttcagtgctgggaggatgtatgatctatgccgtttttgtcctaggtctgccacctcttccttccatgcctccccgaaacttacctggcattgcacctctccccctgccatccgagttcctcccgtcattccccttggttccagagagctcttctgcagcaagctcaggagagctgctgtcttccctcccgcccaccagcaacgcaccctccgaccctgccacaactactgcaaaggcagacgctgcctcctcactcactgtggatgtgacgccccccactgccaaggcccccaccaccgttgaggacagagtc

SEQ ID NO: 2144 - DNA, 484 bp, Homo sapiens
  MAP TO AC010140.1; EXPRESSED IN BT474, SIGNAL =   2; EXPRESSED IN BONE MARROW, SIGNAL = 2.5; EXPRESSED IN LUNG, SIGNAL = 4.1; EXPRESSED IN BRAIN, SIGNAL = 5.1; EXPRESSED IN ADULT LIVER, SIGNAL = 7.7; EXPRESSED IN FETAL LIVER, SIGNAL = 1.9; EXPRESSED IN PLACENTA, SIGNAL = 8.5; EXPRESSED IN HEART, SIGNAL = 2.4; EXPRESSED IN HELA, SIGNAL =  19; EXPRESSED IN HBL100, SIGNAL = 3.4
ttgtacaccttgaaggcgaggttaattaaatcctgttgtggggtttgagggccagaatttaattttttgagttttatttaatgtcaggagcagattgggtaataaaatgtattttgagaataagatggccttttgaccttttagggtctagggctataaagtatctcagcgttgctgccaaatgagtcatgaactgggctggatttttatatttgatgaaaaagagcctaaatgctatctgatttggaataaagaaaagggagcattaaccttgactatggctttagctccagccacctttttaagagtaaattgctgggcaggtgggggatggctagtcacagaatgaaactgtaagctggaccaggtgtgaggaggggaggtgataaaaggattattgggtggaggagcggaggctgaggaagaattgggacctagctcggcctggtgaggagcagtctggggaggaggggagaggtcagat

SEQ ID NO: 2145 - DNA, 473 bp, Homo sapiens
  MAP TO AC010872.2; EXPRESSED IN FETAL LIVER, SIGNAL = 7.8; EXPRESSED IN ADULT LIVER, SIGNAL =  30; EXPRESSED IN BT474, SIGNAL = 1.3; EXPRESSED IN HBL100, SIGNAL =   1; EXPRESSED IN HEART, SIGNAL = 0.9
gcagctcactgttcagcatctggtcaatggttctgatgatctttactttcatttctacaaagtcaattgtaaaggaaggaatgtggaaggtgttaaggatggtaaattctggtgtggaaaacctggatgggatttttatattttttaagtctttgaagtttatctgaactgatggaatcctcaaatctgttagggggactataaaatcaggtgtctggaaggtagctttctgaagagcctgaagactgacttcaaaggcaggcatggtcccaaggatggtcttgatttcaggaacagtgaacccttgctctaccaatgctttcatacgtttagcccaatcttggatagaatattgctctgcaaagtcagtaaggttcttagcagcaagagtccaccaatcagaaatgtaggtgacaagtgtgctataaacctggcctaccagagacaggtatcgttgaagttcctgctgaatg

SEQ ID NO: 2146 - DNA, 472 bp, Homo sapiens
  MAP TO AL049637.32; EXPRESSED IN PLACENTA, SIGNAL = 1.3; EXPRESSED IN BRAIN, SIGNAL = 1.1; EXPRESSED IN BT474, SIGNAL = 2.6; EXPRESSED IN HEART, SIGNAL = 0.99; EXPRESSED IN HELA, SIGNAL =   4; EXPRESSED IN HBL100, SIGNAL =   2; EXPRESSED IN LUNG, SIGNAL = 3.5; EXPRESSED IN BONE MARROW, SIGNAL = 0.91
cagctaggaaggaagatctagtacctaatttcttacataggctactgggtacatatctgctggcctgggaagccatactttctccaaaagctaaggagagaatggtgtgcagaacaaagaaggactcctgtttgtcttgtagttgcctgcaccatgggacttttcttgaactactttgttcagctttaatgatggcacatctcccacctggatatacttcctgagataggtatgggaacttacgtctctcctaggaaaggtgctcagtaacttgtactcatcccatggaaatcctttggaagctacaaaatcaaagacaatctggagcttgttgctggccaggaaacgccgctccaagaactcgccactgggggtccggatccgcagtttgctcacaggctcagcattttcttcctttggctcaggaggcagggcttgctctaaggacagccggatggcctagggagagcaa

SEQ ID NO: 2147 - DNA, 471 bp, Homo sapiens
  MAP TO AL049629.13; EXPRESSED IN HBL100, SIGNAL = 5.4; EXPRESSED IN HELA, SIGNAL =  24; EXPRESSED IN PLACENTA, SIGNAL =  33; EXPRESSED IN HEART, SIGNAL = 7.2; EXPRESSED IN BRAIN, SIGNAL = 3.7; EXPRESSED IN BONE MARROW, SIGNAL = 2.5; EXPRESSED IN LUNG, SIGNAL = 8.9; EXPRESSED IN BT474, SIGNAL = 7.4; EXPRESSED IN ADULT LIVER, SIGNAL = 3.9; EXPRESSED IN FETAL LIVER, SIGNAL = 2.2
cctggctaagatagaggggctctgggagactttgaagaccagtcctgtttgcagggaagccccacttgaaggaagaagtctaagagtgaagtaggtgtgacttgaactagattgcatgcttcctcctttgctcttgggaagaccagctttgcagtgacagcttgagtgggttctctgcagccctcagattatttttcctctggctccttggatgtagtcagttagcatcattagtacatctttggagggtggggcaggagtatatgagcatcctctctcacatggaacgctttcataaacttcagggatcccgtgttgccatggaggcatgccaaatgttccatatgtgggtgtcagtcagggacaacaagatccttaatgcagagctagaggacttctggcagggaagtggggaagtgttccagatagcagggcatgaaaacttagagaggtacaagtggctgaaaatcg

SEQ ID NO: 2148 - DNA, 470 bp, Homo sapiens
  MAP TO AP000507.1; EXPRESSED IN PLACENTA, SIGNAL =  24; EXPRESSED IN HBL100, SIGNAL =  53; EXPRESSED IN HELA, SIGNAL =  47; EXPRESSED IN HEART, SIGNAL =  17; EXPRESSED IN BRAIN, SIGNAL = 5.7; EXPRESSED IN BONE MARROW, SIGNAL =  32; EXPRESSED IN LUNG, SIGNAL =  58; EXPRESSED IN ADULT LIVER, SIGNAL =  15; EXPRESSED IN BT474, SIGNAL =   8; EXPRESSED IN FETAL LIVER, SIGNAL =  11
cctccactcagatcaggagcagaagtccctgttccccgctcagagactcgaactttccaatgaataggagattatcccaggtgcctgcatccgctggtgtctgggttctgtgccccttccccaccccaggtgtcctgtccattctcaggctggtcacatgggtggtcctagggtgtgccatgagagatgcaaagcgcctgaattttctgactcttcccatcagaccccccaaagacacacgtgacccaccaccccatctctgaccatgaggccaccctgaggtgctgggccctgggcttctaccctgcggagatcacactgacctggcagcgggatggcgaggaccaaactcaggacactgagcttgtggagaccagaccagcaggagatagaaccttccagaagtgggcagctgtggtggtgccttctggagaagagcagagatacacatgccatgtacagcatgaggg

SEQ ID NO: 2149 - DNA, 456 bp, Homo sapiens
  MAP TO Z98200.8; EXPRESSED IN BT474, SIGNAL = 1.4e+02; EXPRESSED IN FETAL LIVER, SIGNAL =  20; EXPRESSED IN ADULT LIVER, SIGNAL =  18; EXPRESSED IN HELA, SIGNAL = 1e+02; EXPRESSED IN PLACENTA, SIGNAL =  40; EXPRESSED IN HBL100, SIGNAL =  55; EXPRESSED IN HEART, SIGNAL =  11; EXPRESSED IN BRAIN, SIGNAL =  12; EXPRESSED IN BONE MARROW, SIGNAL =  26; EXPRESSED IN LUNG, SIGNAL =  34
agactgtcttcgctgagcacatcagtaatgaatgcaagaggcgtttctataagaactggcataaatctaaaaagaaggcctttacgaagtactgcaagaaatggcaggatgaggatgtcaagaagcagctggagaaggacttcagcagcatgaagaaatactgccacgtcatccgcgtcattgcccacacccagatgcgcctgcttcctctgcgccagaagaaggcccacctgatggagatccaggtgaacggaggcaccgtggctgagaagctggactgggtctgcgagaggctcgagcagcaggtaaatgtgaaccaagtgtttgggcaggatgagatgatcgacgtcattggggtgaccaagggcaaaggctacaaaggggtcaccagtcgttggcacaccaagaagctgccctgcaagacccaccgaggcctgtgcaaggtggcctgtattg

SEQ ID NO: 2150 - DNA, 466 bp, Homo sapiens
  MAP TO AC008015.4; EXPRESSED IN BONE MARROW, SIGNAL = 1.5; EXPRESSED IN BRAIN, SIGNAL = 1.4; EXPRESSED IN LUNG, SIGNAL = 1.1; EXPRESSED IN ADULT LIVER, SIGNAL = 1.3; EXPRESSED IN BT474, SIGNAL = 2.3; EXPRESSED IN FETAL LIVER, SIGNAL = 1.5; EXPRESSED IN HELA, SIGNAL = 1.7; EXPRESSED IN PLACENTA, SIGNAL = 1.5; EXPRESSED IN HBL100, SIGNAL = 1.8; EXPRESSED IN HEART, SIGNAL = 1.5
gacacacaaaaactgatcccggttttgtgagaaagagttgcctgaaagccctcaaggtgctcagcctgacctttttttgtttgcattcacaggatggggagatcgacctgaaactcctcaccaaagtgctcgcgccggagcacgaagtccgggaggtacagtggtggcagcaattccccggtctctcagctctggcattcccataaccagccgactcccgggctggcctgtgcctccctgaggcctggatgggagggagaagtcagctacagttgagggaaaaggcctttctttgtcttacccagcgaaacccttcttggcaggatgatgtcggctgggactgggaccatctgttcactgaggtgtcctcagaggtcctcactgagtgggacccactgcagacggagaaggaggaccctgcggggcaggccaggcacacctgagcccgtcacccatgctctagaca

SEQ ID NO: 2151 - DNA, 465 bp, Homo sapiens
  MAP TO AL121760.1; EXPRESSED IN PLACENTA, SIGNAL = 8.8; EXPRESSED IN HBL100, SIGNAL = 3.2; EXPRESSED IN HELA, SIGNAL =  12; EXPRESSED IN HEART, SIGNAL = 3.8; EXPRESSED IN BRAIN, SIGNAL = 5.4; EXPRESSED IN BONE MARROW, SIGNAL = 6.3; EXPRESSED IN LUNG, SIGNAL = 6.3; EXPRESSED IN ADULT LIVER, SIGNAL =  10; EXPRESSED IN BT474, SIGNAL = 2.8; EXPRESSED IN FETAL LIVER, SIGNAL = 3.1
aaaactcaccaaccaagcaagtaattacactgaacccccttgggcactcttgaattgtagatgtcctgggtcccccaattcttagtcctttaatacctgtttttctccttctcttattcagacctcgtgtcttccgtttagtttttcaattcattcaaaactgtatccaggccatcaccaatcattccatacaacaaatgtttcttctaacaaccccaccatatcaccccttaccacaaaatcttccttcagctcaatctctcccactctaggttcccatgctgcccctaatcccgctcgaagcagccctgagaaacatcgtccattatctctccgtaccaccccctaaaaatgtttgctgccccaaaacttcaatactattttatgttatttttcctattgatataagaagacaagaatgtcaggcctctgagcccaagctcagccatcatatcccctgtgacc

SEQ ID NO: 2152 - DNA, 455 bp, Homo sapiens
  MAP TO AL009030.4; EXPRESSED IN BT474, SIGNAL = 2.9; EXPRESSED IN ADULT LIVER, SIGNAL =  11; EXPRESSED IN FETAL LIVER, SIGNAL = 2.6; EXPRESSED IN HELA, SIGNAL = 7.5; EXPRESSED IN PLACENTA, SIGNAL = 5.6; EXPRESSED IN HBL100, SIGNAL = 4.5; EXPRESSED IN HEART, SIGNAL = 2.3; EXPRESSED IN BRAIN, SIGNAL = 3.6; EXPRESSED IN BONE MARROW, SIGNAL = 6.6; EXPRESSED IN LUNG, SIGNAL = 4.5
ttgtcctcacttgcaacaggggcttcgggtgggcctcccgtttctaaagcacccactatggacgcacagcaggacagacccaagtcccaagactgcctgggcctagtggcccccctagcatctgctgcagaggtccccgctacagctcccgtgtctgggaagaagcacagaccaccaggacccctgttctcctcctcagatccccttcctgccaactcttcccactcccgggactcagcccaggtcacctcgatgattcctgcccccttcacagctgcaagcagggatgccggcatgagaagaacaaggtcggctcctgcagctgccgcagcagcccctcccccctccacattgaaccccacgtcggggtcactactcaatgcagtggatggaggcccctcacatttcttggcctcagccacagctgcagcacgtgcccagaggtcagaagtgag

SEQ ID NO: 2153 - DNA, 465 bp, Homo sapiens
  MAP TO AC010874.1; EXPRESSED IN BONE MARROW, SIGNAL =  11; EXPRESSED IN LUNG, SIGNAL =  18; EXPRESSED IN BT474, SIGNAL =  47; EXPRESSED IN FETAL LIVER, SIGNAL = 5.6; EXPRESSED IN ADULT LIVER, SIGNAL = 7.3; EXPRESSED IN HELA, SIGNAL =  85; EXPRESSED IN PLACENTA, SIGNAL =  17; EXPRESSED IN HBL100, SIGNAL =  38; EXPRESSED IN HEART, SIGNAL = 7.5; EXPRESSED IN BRAIN, SIGNAL =   6
cgtgcagaagctttctaacttgttgtgatgccatttgtctatttttcctttggctatctgtgcttatagagtattactgaagaaatttttgccctaaacaatgtcctggaaaattttcctggtagttttcttttcttttttctttgtttcaagttgtaatcaaagcttgtatataagattactttattcctgcatcttctcaattgtttcttccttgtatttgcccttttgctttcctacttggcaagatttggctttccgttcacggatatttttgcggtctttgtccacttttagcctagtgataaccaccttgctggggtgaatgcctacgtggacagttgtgccattagccttttcccactgcacccgttcaatgtatgtagcatatttcttcctgtaaaccttgactactttgccaatttgttgacctttatagtgtcctcgtacaacctgaacttcatc

SEQ ID NO: 2154 - DNA, 454 bp, Homo sapiens
  MAP TO AL109806.7; EXPRESSED IN BONE MARROW, SIGNAL = 1.1; EXPRESSED IN BRAIN, SIGNAL = 1.3; EXPRESSED IN LUNG, SIGNAL =   2; EXPRESSED IN ADULT LIVER, SIGNAL = 1.1; EXPRESSED IN FETAL LIVER, SIGNAL = 1.2; EXPRESSED IN HELA, SIGNAL = 1.6; EXPRESSED IN PLACENTA, SIGNAL = 1.3; EXPRESSED IN HBL100, SIGNAL = 0.98; EXPRESSED IN HEART, SIGNAL = 0.98
ttggccttctaagtgcattgctatatgtcaccagtggtagcttgagtttttttgtcttgtgatttctttcccaaagctataaaagtggcctgtaatcaatagtaaagtcttgtcaatagcatgtttctgaattcattttaggaatagtttgtatcaaggaatcattttcccacttctttggttcaatgttctcttgtttcaagtcaaggaaacagaatgataccagtaagaaagcaaacactccctagcggttcagtctcatattgaaatgactctgctgttgaaaatgccagtgtggctctataggaacttctgcctgcctcagcacttgaagtctgtgccgccgctctaagcaggtaaccacaagcgggtctgtcgagggttcgaatttgttggcaaacagagaaggcgactgaatgagccacggcaggtctcctggtccgtatacgcagat

SEQ ID NO: 2155 - DNA, 464 bp, Homo sapiens
  MAP TO AC008014.5; EXPRESSED IN FETAL LIVER, SIGNAL = 1.3; EXPRESSED IN HELA, SIGNAL = 1.2; EXPRESSED IN HEART, SIGNAL = 1.3; EXPRESSED IN LUNG, SIGNAL = 3.5; EXPRESSED IN BRAIN, SIGNAL = 1.4; EXPRESSED IN BT474, SIGNAL = 1.3; EXPRESSED IN ADULT LIVER, SIGNAL = 1.6; EXPRESSED IN PLACENTA, SIGNAL = 1.8; EXPRESSED IN HBL100, SIGNAL = 1.5; EXPRESSED IN BONE MARROW, SIGNAL = 1.4
tctccccaaatatgctctggatttgggctctcagctttcagagtgctgatttattgtgttacattgcacagcttattataaagctaactcttattcttactataaccctcctgcttaattaattcaagaacatttagttccaggtactaagattagggaaggcggtctgaacctccttggcctgagcttcctatttccacgtgaaaagacctccactagtttcaccctccaggcactcccacctaataatactgagataagaggctggtcagccaggtgtgtctcagccccttcctctttccacagattattgcctgctcctccaagcccttcactgtagaatggaagcctgtgattttcctggcatcatgcatgactgagaaggtcagtgtggctaattctgagcttcaacatcaggaaacccgtagttcttcacactgagccgcctcctgcagcacagtcat

SEQ ID NO: 2156 - DNA, 452 bp, Homo sapiens
  MAP TO AC011481.1; EXPRESSED IN BONE MARROW, SIGNAL = 1.7; EXPRESSED IN HELA, SIGNAL = 5.5; EXPRESSED IN BRAIN, SIGNAL =   2; EXPRESSED IN LUNG, SIGNAL = 3.6; EXPRESSED IN BT474, SIGNAL = 7.2; EXPRESSED IN ADULT LIVER, SIGNAL = 3.1; EXPRESSED IN FETAL LIVER, SIGNAL =   2; EXPRESSED IN PLACENTA, SIGNAL = 4.1; EXPRESSED IN HEART, SIGNAL = 1.8; EXPRESSED IN HBL100, SIGNAL = 4.4
gaacatttgctgatggatggaaacccacagagaatgtgaacctcacagctgaagccaagagagaaactgacccgcaaggggatgctcccacaccgcggccctcccacctccttgcctcccgcccttaccctgctcacctatgactctgagccaggtcatccctcggacggaccccttggggaaggtggcaaactcgcaagtgtagttgccctcgtcctccaccgtgagcccgtggagggccagcgtggcgtcctggagctctgcctctgtgtcttgcccagtgctctgcttggcagagacgaaggacagccgctcgctgccaggcttcgggctggggaagctgggacccatcttagggtggaaggcggccacattctggtggttcgcaggtgcatctgggcgctgccaggtcaccagggagatgtacagtccaggaacaggtggcagcaggt

SEQ ID NO: 2157 - DNA, 463 bp, Homo sapiens
  MAP TO AC007238.3; EXPRESSED IN BT474, SIGNAL = 5.6; EXPRESSED IN FETAL LIVER, SIGNAL = 1.5; EXPRESSED IN HEART, SIGNAL = 1.9; EXPRESSED IN LUNG, SIGNAL = 3.1; EXPRESSED IN BRAIN, SIGNAL = 2.6; EXPRESSED IN ADULT LIVER, SIGNAL =   2; EXPRESSED IN PLACENTA, SIGNAL = 4.6; EXPRESSED IN HELA, SIGNAL =  11; EXPRESSED IN HBL100, SIGNAL = 5.9; EXPRESSED IN BONE MARROW, SIGNAL = 2.9
agcggaatgagttgttcctgccgggccgcatggcctatgtggtaggcctggatgatgagtaagctgacacagatatccccaccactcttatccgcagcaaggttgactgccccaccatggaggcccagaccatactgaccacaaatgatattgtcattagcaagcttacccagttgctttcatacctgaggcagggaacccgtaacaagaagcttaagaagaaggataaagggaagctggaagagaagaaacctgctgaggctgacaggagtattttcgaagacattggggattatacaccctccacaatcaagacaccttgggacaaggagcgggagagatatcgggaacgggagcgtgatcaggagacagagaccgtgaccgagagcgagagcgagaacgagatcaggagcgagaacgagatcgggaacgagaacgagatcgggaacgagagtgagagcag

SEQ ID NO: 2158 - DNA, 466 bp, Homo sapiens
  MAP TO AL031681.13; EXPRESSED IN BONE MARROW, SIGNAL = 4.5; EXPRESSED IN FETAL LIVER, SIGNAL = 5.1; EXPRESSED IN HELA, SIGNAL = 8.5; EXPRESSED IN BRAIN, SIGNAL = 6.4; EXPRESSED IN LUNG, SIGNAL =  11; EXPRESSED IN BT474, SIGNAL = 2.5; EXPRESSED IN ADULT LIVER, SIGNAL = 6.7; EXPRESSED IN PLACENTA, SIGNAL = 7.6; EXPRESSED IN HEART, SIGNAL = 4.6; EXPRESSED IN HBL100, SIGNAL = 4.2
ggtttgatgatcctctttaggctcagactcttctctttcttacctcatacccccaaagggccacggcaaccacaaaagcggctgttttcacatgcgtccgtgtgaagagaccaccaaacaggctttgtgtgagcaataaagctttttaatcacctgggtgcaggcgggctgagtccgaaaacagagtcagcgaagggagataggggtggggccattttataggatttgggtgggtaaaggaaaattagtcaaagggggctgttctctggcgggcaggggcgggggtcacaaggtgctcagtaggggagcttctgagccaggagaaggaatttcacaacgttaatcgctcggttaaggtggggcaggaacaaatcacaatggtggaatgtcatcagttaaggcaggaattggccattttcacttcttttgtgattcttcacttgcttcgggccatctggacgtatat

SEQ ID NO: 2159 - DNA, 456 bp, Homo sapiens
  MAP TO AL079333.7; EXPRESSED IN PLACENTA, SIGNAL = 3.1; EXPRESSED IN HBL100, SIGNAL = 2.4; EXPRESSED IN HEART, SIGNAL = 1.9; EXPRESSED IN FETAL LIVER, SIGNAL = 1.6; EXPRESSED IN ADULT LIVER, SIGNAL = 1.3; EXPRESSED IN HELA, SIGNAL =   4; EXPRESSED IN BRAIN, SIGNAL = 1.9; EXPRESSED IN LUNG, SIGNAL = 9.7; EXPRESSED IN BONE MARROW, SIGNAL = 1.3; EXPRESSED IN BT474, SIGNAL = 2.2
gaaaaatagacctggaaaatgggtcaaaatccaaaatccaatgagatgctggtaccaaggaaattacctaaaacaaaatttcatcagatgattaaaagtaaaatggaggtcaaagatacatcagaaaatgctaacagaaagaaagctggggccagattttaatattaggcaaaaatgaattcaaggcctaaagcacacaggataaggacggctgcgtgaatgtctttgcttccaatgcatcatcacaaacttgtttcttactcttcttatctcttccctaagcctttcaagctcatctactcctcttatcatttcttcagggtccaaatgcctaacgggtgtgtcctctttaaatccctggccaggctgattcggccctcctctggggtttccttctgcttcctggcttacgccttcttcggaaggttgaggatttccttctgcctcctgtggtac

SEQ ID NO: 2160 - DNA, 455 bp, Homo sapiens
  MAP TO AL079307.2; EXPRESSED IN BT474, SIGNAL =   3; EXPRESSED IN HEART, SIGNAL = 0.92; EXPRESSED IN LUNG, SIGNAL = 1.5; EXPRESSED IN BRAIN, SIGNAL = 1.5; EXPRESSED IN ADULT LIVER, SIGNAL = 1.9; EXPRESSED IN FETAL LIVER, SIGNAL = 0.94; EXPRESSED IN PLACENTA, SIGNAL = 1.7; EXPRESSED IN HELA, SIGNAL =  33; EXPRESSED IN HBL100, SIGNAL = 2.2; EXPRESSED IN BONE MARROW, SIGNAL = 1.6
atgcaagatgggggagttgagaagggtcacagaagaaattaggaatttccacatccttgaagcaggtcatttgtaaggcaatcaaattgtacagctgggcatctaaaagactgagggaaaaaaaaaagacaacaaaagtagaaagccacagaaacacgggttcatgatggctgaatgatatagagggtgacatttggctacaaactggtcataggccatcacactcaggagtatgtctgtcttccatgcctccaaaaatggcaaagagagacatctgagtcaggcagcctgcataggagatgactctgctgtgagattggatgtccacagtcatcttggggactgtggtggaggtgaaactgatgtcaggcaaggacaggttggagaggaagaagtacatgggggtgtggaggtgggagtcagggctgatggccaggatgatgagcaggttcccc

SEQ ID NO: 2161 - DNA, 455 bp, Homo sapiens
  MAP TO AC008063.1; EXPRESSED IN PLACENTA, SIGNAL = 3.8; EXPRESSED IN HBL100, SIGNAL = 1.1; EXPRESSED IN HEART, SIGNAL = 1.3; EXPRESSED IN BONE MARROW, SIGNAL = 1.1; EXPRESSED IN FETAL LIVER, SIGNAL = 1.2; EXPRESSED IN HELA, SIGNAL = 1.1; EXPRESSED IN BRAIN, SIGNAL = 0.95; EXPRESSED IN LUNG, SIGNAL = 0.89; EXPRESSED IN ADULT LIVER, SIGNAL = 1.3
tggcctatgaagtctgtgtttgataactatcttcaaagacaaaactgacaagtatctttgaaggaaatatacaaccatggtagttgtgttgctaagttttagaggactcattctggacaccccataggctggcacagtttaaggctcatgattgggaaggatgcatacttctccacggagaagagaaatgtaagcattcctcatttgattccagaaaaccatgaaagctaacaatttggtatttttcataggtatgcaggcccatgtagtcaaaaagcagacactgtcttcagactgaactgggccacttaccttgcaagcacagaaaacattatagtagctagctttgatggcagaggaagtggttaccaaggagataagatcatgcatgcaatcaacagaagactgggaacatttgaagttgaagatcaaattgaagcagccaggtgagtgac

SEQ ID NO: 2162 - DNA, 464 bp, Homo sapiens
  MAP TO AL121778.2; EXPRESSED IN PLACENTA, SIGNAL =  38; EXPRESSED IN HBL100, SIGNAL = 1.3e+02; EXPRESSED IN HEART, SIGNAL =  13; EXPRESSED IN FETAL LIVER, SIGNAL =  19; EXPRESSED IN ADULT LIVER, SIGNAL =  24; EXPRESSED IN HELA, SIGNAL = 1.5e+02; EXPRESSED IN BRAIN, SIGNAL = 8.8; EXPRESSED IN LUNG, SIGNAL =  25; EXPRESSED IN BONE MARROW, SIGNAL =  31; EXPRESSED IN BT474, SIGNAL = 1.7e+02
acgtcggtctgggtgttaagtgctccaaggaggtggccaccgccatccgtggggccatcatcctggccaagctctccattgtccccgtgtgcagaggctactggggcaacaagatcggcaagccccacaccgtcccttgcaaggtgacaggccgctgcggctctgtgctggtgcgcctcatccctgcacccaggggcactggcattgtctccgcacctgtgcctaagaagctgctcatgatggctggtatcgatgactgctacacctcagcccggggctgcactgccaccctgggcaacttcgccaaggccacctttgatgccatttctaagacctacagctacctgccccccgacctctggaaggagactgtatttaccaagtctccctatgaggaattcactgaccacctcatcaagacccacaccagagtctccgcgcagcggactcaggctccagctgtg

SEQ ID NO: 2163 - DNA, 454 bp, Homo sapiens
  MAP TO AC010149.1; EXPRESSED IN BT474, SIGNAL =  32; EXPRESSED IN HBL100, SIGNAL =  14; EXPRESSED IN HEART, SIGNAL = 3.4; EXPRESSED IN LUNG, SIGNAL = 7.9; EXPRESSED IN ADULT LIVER, SIGNAL =   5; EXPRESSED IN FETAL LIVER, SIGNAL = 7.8; EXPRESSED IN PLACENTA, SIGNAL = 7.1; EXPRESSED IN HELA, SIGNAL =  29; EXPRESSED IN BRAIN, SIGNAL =   6; EXPRESSED IN BONE MARROW, SIGNAL = 8.8
tttttgctgaattaggctttcctttagctcgatatgcagcaatatcctttttgtatttttccttcagtttgcagccttcttttcataaaactgttgtcagctgcagcggtgttattccacatccctgccagtttcttcacaacatcatcaatggacaggccaggatgttctcctttgatttttgggcgatactcagagcagaacaggaaaaaggccaaaggaggcctcttgggtgcattgggatccttgaacttctatttttctccccttaggagggatataggttttcattctcttcataatggccttgtccgcctttgccatatcttcaaattttcctttctctttagcaaaaatggtcttccatgtctctgagcacttctttaaaaactctgagaacttgactgaagcatctgggttcttcttcttatgctcctcctgacaagtttgcaca

SEQ ID NO: 2164 - DNA, 464 bp, Homo sapiens
  MAP TO AL020996.3; EXPRESSED IN BONE MARROW, SIGNAL = 1.3; EXPRESSED IN BT474, SIGNAL = 3.4; EXPRESSED IN HBL100, SIGNAL = 1.3; EXPRESSED IN HEART, SIGNAL =   3; EXPRESSED IN LUNG, SIGNAL = 1.2; EXPRESSED IN BRAIN, SIGNAL = 1.5; EXPRESSED IN ADULT LIVER, SIGNAL = 1.6; EXPRESSED IN FETAL LIVER, SIGNAL = 1.1; EXPRESSED IN PLACENTA, SIGNAL = 2.9; EXPRESSED IN HELA, SIGNAL = 3.1
tgagccttcttgtaaaatccctactagcctcatatttggttggggtgaccaaacccaataaatgtagtgttgctctttcctcaaactggggccccaggcactggcaagcaggtagtcagcaagctttatgaatgacataacatatggtactactaagaacttactatgtaagtatgttgcattacataattggccatgggcaactctgagtaaatagataccagagctcctcatcagatacttacagatcttgactctgtttcattcggtgaaagtccttcaggatacccatcatgtctgcaaagctgctggccttggacaaagagacgcagtcatcctcttcagacgaactgcaggcagctttgtgttctggtttgcaacattcagggctggcagaacaaagcagggggactgatggaagctcagggacctccacctctgtctcctcggtgatgtcactaatg

SEQ ID NO: 2165 - DNA, 453 bp, Homo sapiens
  MAP TO AB020871.1; EXPRESSED IN BONE MARROW, SIGNAL = 3.8; EXPRESSED IN HBL100, SIGNAL = 2.8; EXPRESSED IN HELA, SIGNAL =  20; EXPRESSED IN HEART, SIGNAL = 3.2; EXPRESSED IN BRAIN, SIGNAL = 7.2; EXPRESSED IN LUNG, SIGNAL = 4.3; EXPRESSED IN BT474, SIGNAL = 2.8; EXPRESSED IN ADULT LIVER, SIGNAL = 9.8; EXPRESSED IN FETAL LIVER, SIGNAL = 3.6; EXPRESSED IN PLACENTA, SIGNAL =  12
ttagcctagccctcatgtctgcgtgcagcggctgctgccgccgtaatattatagaggccctaaaaatcacaaactatgctcaactcactttctacttttcacattacttccaaaatatattttcttcctcatacctgatgcatatactttctgctccccggctccttcagctgtactcactctttgttaagtctcccacaattaccattgttcctggcacggacttcaatccggcctcccatattattcctgataccacacctgacccccatgactgtatctctctgatccacctgacattcaccccatttccccatatttccttctttcctgttcctcagcctgatcacgcttaatttattgatggcggttccaccaggcctaatcgccacacaccagcaaaggcagtctatgctacagcacaagccactagcccgcctcttagaacctctc

SEQ ID NO: 2166 - DNA, 451 bp, Homo sapiens
  MAP TO AL033383.24; EXPRESSED IN BT474, SIGNAL = 4.2; EXPRESSED IN PLACENTA, SIGNAL = 2.5; EXPRESSED IN FETAL LIVER, SIGNAL = 1.2; EXPRESSED IN ADULT LIVER, SIGNAL = 1.2; EXPRESSED IN HEART, SIGNAL = 1.1; EXPRESSED IN HELA, SIGNAL =   5; EXPRESSED IN HBL100, SIGNAL =   2; EXPRESSED IN BRAIN, SIGNAL = 1.3; EXPRESSED IN LUNG, SIGNAL = 1.1; EXPRESSED IN BONE MARROW, SIGNAL = 1.2
cattagcactgtaattttgtgcagtcttggcaatttaaaacagtctacagtgaaatttcacgtaagacacaaaacagattaactaacatctctaaaagaaatatcacccttggtgttaattcaaatatatcatgcttcctcaaatttgctggagaaatatttataagtttatatacattaataaactgctgtgaaatttcttcagtctttgtatttactcaaacccttggagtttcttcatcttgtttaaattttttcctggatgaaggcgtgctgtagggcctggttgatgctaattcgtttagctgggtccaacatcagaatctggtccaacaagtcctttagctggtgtactttcttacgttggtcttcaggaagtctctggcacccaatcaagtcagccaacaggtccttagttggattaatggtgctcataacagtaactttctcc

SEQ ID NO: 2167 - DNA, 463 bp, Homo sapiens
  MAP TO AC011004.1; EXPRESSED IN FETAL LIVER, SIGNAL = 1.2; EXPRESSED IN ADULT LIVER, SIGNAL =   2; EXPRESSED IN BT474, SIGNAL = 1.5; EXPRESSED IN PLACENTA, SIGNAL =   1; EXPRESSED IN HBL100, SIGNAL =   1; EXPRESSED IN HEART, SIGNAL = 1.3; EXPRESSED IN BONE MARROW, SIGNAL = 0.98; EXPRESSED IN BRAIN, SIGNAL = 1.1
gcctgaaacaggcacacttaacaacagccgcagcaatgacaaaaacctcatgagaagatgcctgggtcaagggtcttacttccagcagcttccctgcaaatccagtgcaaataaacataggctctcctttgcagtttgttgcagtggaatcttgtctgttgcatgctgaagcgtaggatgttaggcctcttctgacatcacagcagagcgtttgcatgttcatgttgaatgtgttggtttggtttatctgtgccctgaatttggcatcatgaacttgcactcttggttcagttggaggcggaggtggcccagagccgtgtggatctgtgctggtgtcaccactgatggtggcaaagggaagagtgatgctgaggaggaagcaggagaatcctgaaggtcgaaggccatggggcccggctgccataatagccatagcgtctggggcactgaccaggagaagggt

SEQ ID NO: 2168 - DNA, 449 bp, Homo sapiens
  MAP TO AL109748.1; EXPRESSED IN BONE MARROW, SIGNAL = 3.4; EXPRESSED IN BT474, SIGNAL = 3.5; EXPRESSED IN HBL100, SIGNAL = 2.9; EXPRESSED IN BRAIN, SIGNAL = 3.4; EXPRESSED IN LUNG, SIGNAL = 1.2; EXPRESSED IN ADULT LIVER, SIGNAL = 2.5; EXPRESSED IN FETAL LIVER, SIGNAL = 2.9; EXPRESSED IN PLACENTA, SIGNAL = 3.1; EXPRESSED IN HEART, SIGNAL = 2.3; EXPRESSED IN HELA, SIGNAL = 4.2
gtgctgtctacttggcccacacatgtgtcccgaggagttgtggcatgcccgctgccctggtcagagctggccaccatcttccagctgcatctgccgggccagcgtctgcccaatggctaacagggggctggctctgtaggccggactggccagcagctcctgaaaccgggtcctttcttcctcgagaaactgctgtctctgggctgcactcatccggctgagctctgagggccagggcttgttgctctccctgctgcaggcctggcgccggctgccagcctcaagccccagtagctcaggcagggcatccctgagcgggtgcaggtcccccaccaccatcctggccctctacctccgctcctccctgtgcttctgctcagccagttttatggcttcgattttctgcaaccattgctcacgcctcagcttcattttctccttgggcaaaa

SEQ ID NO: 2169 - DNA, 448 bp, Homo sapiens
  MAP TO AL080274.10; EXPRESSED IN PLACENTA, SIGNAL = 3.7; EXPRESSED IN FETAL LIVER, SIGNAL = 0.98; EXPRESSED IN HEART, SIGNAL = 2.6; EXPRESSED IN HELA, SIGNAL =  11; EXPRESSED IN HBL100, SIGNAL = 2.3; EXPRESSED IN BRAIN, SIGNAL = 2.3; EXPRESSED IN LUNG, SIGNAL = 1.5; EXPRESSED IN BT474, SIGNAL = 3.8
aggcaagttggaaccagatgtgcactttggagctcaagctgcttcaggaagtgagttttcaagcatagaatataagttcagggatctgccctccctgtaccccagtgccattggtgctatctgaggagcactgaaactggacagtcactttgccacactgaacttctgtcatgccttcttgtccaaagtagctgagttcattgccatccagtatcacactggctgtgtagaaggtgtctggctcgatctgcactgggtattcaaaccatacgggaaaggtattgctggacccatctgagaagtacttgctcaagttctgccccaggacaacgccctgccgcttaagttcaatcttggcactgtattctgcagaaccacagctggagccatacagcccaaagccagcaatgaacactcttttatcaactgcaaactggatgctgtcaca

SEQ ID NO: 2170 - DNA, 385 bp, Homo sapiens
  MAP TO AL034379.8; EXPRESSED IN BT474, SIGNAL = 7.5; EXPRESSED IN PLACENTA, SIGNAL =   3; EXPRESSED IN BONE MARROW, SIGNAL = 2.3; EXPRESSED IN ADULT LIVER, SIGNAL = 1.2; EXPRESSED IN FETAL LIVER, SIGNAL = 2.7; EXPRESSED IN HEART, SIGNAL = 3.1; EXPRESSED IN HELA, SIGNAL = 4.2; EXPRESSED IN HBL100, SIGNAL = 5.2; EXPRESSED IN BRAIN, SIGNAL = 2.8; EXPRESSED IN LUNG, SIGNAL = 3.6
cctggagtcttccttgagggttactctaatgcccaccaattcctccctttgagcaaattagcccgttcacttggacctaatgactttcttgccatcagcaacagaaagagtctgcagcaatcctaaagagtttttattctaggcaattcccttcacagcaatggtcatgggagctgcgggggtgggatccctgccactgacctgtgccggtttttattctttcgctttttatggctgctgtggtgactccctgaggaagtagaagaagcagccttctgaggtttcactccctgcacagatccatccagatcctcagggtcctcctggctgggctcattttcctgattgtggaagtctggagaagtgtcactttccgtcccacttc

SEQ ID NO: 2171 - DNA, 469 bp, Homo sapiens
  MAP TO AC006946.18; EXPRESSED IN BT474, SIGNAL = 2.3; EXPRESSED IN PLACENTA, SIGNAL = 4.6; EXPRESSED IN BONE MARROW, SIGNAL =   5; EXPRESSED IN BRAIN, SIGNAL = 5.7; EXPRESSED IN ADULT LIVER, SIGNAL = 3.9; EXPRESSED IN FETAL LIVER, SIGNAL = 4.9; EXPRESSED IN HEART, SIGNAL = 5.2; EXPRESSED IN HELA, SIGNAL = 6.4; EXPRESSED IN HBL100, SIGNAL = 2.7; EXPRESSED IN LUNG, SIGNAL = 3.1
tctccacctttgaaactggggaaatccgaaagggagacataggctgagtgcaggtccgagtcccatccttaacttagtgatgtctcagacctgttaaaagctttgtaataacaaatgcatgcttcccctcttcttactccttccttaggcctggaggaaacgctggtttatcctgcggaggggccagactagcagtgacccagatgttctggaatactacaagaatgatggctccaagaagcccctgcgcaccatcaacctgaacctctgtgagcagctggatgttgatgtgactctgaacttcaacaagaaggagattcagaagggctatatgtttgacatcaagaccagtgagcgtaccttttacctggtggctgagaccagggaggacatgaatgagtgggtccagagcatctgtcagatctgtggcttcaggcaggaggaaagcacaggtatgggagcacacaca

SEQ ID NO: 2172 - DNA, 467 bp, Homo sapiens
  MAP TO AC007089.2; EXPRESSED IN PLACENTA, SIGNAL = 1.3; EXPRESSED IN HELA, SIGNAL = 1.3; EXPRESSED IN HEART, SIGNAL =   1; EXPRESSED IN BRAIN, SIGNAL = 1.5; EXPRESSED IN BT474, SIGNAL = 2.7; EXPRESSED IN HBL100, SIGNAL = 5.8; EXPRESSED IN LUNG, SIGNAL = 1.9; EXPRESSED IN BONE MARROW, SIGNAL = 1.4; EXPRESSED IN ADULT LIVER, SIGNAL = 1.3; EXPRESSED IN FETAL LIVER, SIGNAL = 1.1
ttcctctggtggttttcctgcatatccctctacctagcacagtgccttgcacatagcaggcactcaataaaaggtactactggaattgaactggctacaaagttcaacccaagggcggcacactgcacacactcagtgtatccgttatcccatcaaagcaatgtatctgcctcttgactttgcaagaccaacactattccccccaacaccatttaactcacagagagcagtgtccctgccgacagctctcatccttggagaaggctctgcccataaggcctggacctacctgacagcgaggatgtgcacaggctgggagcgctgcaccctctgcctcggggacacctgtggctggatggaccgaggagggcctgaagccgaggctggctgcgggcatgctggccattctgcaggaggggcaccgtgtctgactgcatgctgcaggccgagtacaggctctccaggga

SEQ ID NO: 2173 - DNA, 457 bp, Homo sapiens
  MAP TO AC007218.2; EXPRESSED IN ADULT LIVER, SIGNAL = 2.6; EXPRESSED IN PLACENTA, SIGNAL = 3.9; EXPRESSED IN BRAIN, SIGNAL = 2.4; EXPRESSED IN FETAL LIVER, SIGNAL = 1.6; EXPRESSED IN BT474, SIGNAL =   1; EXPRESSED IN HEART, SIGNAL = 1.6; EXPRESSED IN HELA, SIGNAL = 5.1; EXPRESSED IN HBL100, SIGNAL =   2; EXPRESSED IN LUNG, SIGNAL = 2.7; EXPRESSED IN BONE MARROW, SIGNAL = 1.8
aattcctgttgtggggtttgagggccagattctaatttttgaagttttttcctaatgtcaggagtggattgggtgataaaatgcatactaagaataaggcggccttctggcccctctgggtctagggtggtatagcatctaatggttgctgctaagcgggccatgaactgggctgggttttcatctttaccttgggtagtttttttaagtttgtcataattaacagctttgtaagctgcttttttaagcccttcaactaggcaggaaaccatgtaatctcacctagctatacctggggaatttgcctggtagttccactgggggatcctctcggggaactgctctaatgccttcctggaggtctggctcatgaagccgacggttatcagcgtgagattgggatacaggaaaaactctttcccgttcatctggggagagggtagaagtcaggatgaca

SEQ ID NO: 2174 - DNA, 448 bp, Homo sapiens
  MAP TO AC000026.3; EXPRESSED IN PLACENTA, SIGNAL = 2.3; EXPRESSED IN BRAIN, SIGNAL = 1.4; EXPRESSED IN ADULT LIVER, SIGNAL = 1.7; EXPRESSED IN FETAL LIVER, SIGNAL = 1.6; EXPRESSED IN BT474, SIGNAL = 2.4; EXPRESSED IN HEART, SIGNAL =   1; EXPRESSED IN HELA, SIGNAL = 2.3; EXPRESSED IN HBL100, SIGNAL = 2.3; EXPRESSED IN LUNG, SIGNAL =   1; EXPRESSED IN BONE MARROW, SIGNAL = 1.6
tgacaggcctctgctgattccctcacaaaggccggggtctcccttccctccaggccttaccacagactgttcccttggtctggagcccctatccgcttttgttcagctactgaggtcctgcgactcctctggaaagccttcctaggtacccaccaagcttgacttagctcctcttcctcggtgcccctgtggcccccagcttccctcatcactgctggcctgagccaattccacagccgaggccatttaaaggagcccacatgccagtctccataacttctctctgctcccgccaagacagaagacaagtgacttactgctttgggggccacatatgatcctgacagggtgcccacgccactggtcaggtcaaagaggtcactcaggccactgccgatgggtgctccaagattggctggtactgctgctgttggaggtgccacgaagt

SEQ ID NO: 2175 - DNA, 463 bp, Homo sapiens
  MAP TO AC006978.2; EXPRESSED IN PLACENTA, SIGNAL = 4.1; EXPRESSED IN HELA, SIGNAL = 5.5; EXPRESSED IN HBL100, SIGNAL =   5; EXPRESSED IN HEART, SIGNAL = 1.6; EXPRESSED IN BONE MARROW, SIGNAL = 1.6; EXPRESSED IN LUNG, SIGNAL = 1.5; EXPRESSED IN BRAIN, SIGNAL = 2.1; EXPRESSED IN ADULT LIVER, SIGNAL = 1.8; EXPRESSED IN BT474, SIGNAL = 5.3; EXPRESSED IN FETAL LIVER, SIGNAL = 1.7
taaattggatgggggaaagccacaaggaacagttctgaactccaggtgcatttgcagctgattttgaatgataagacccaaaacctctggaggcggcaggtgcacgggaatgaactaaatgttaaagtgtgcctattacaggaggagctacagctgctgcaggaataggactcctgtgtcagggaagtagtccaggccatgggtaagaagaaagtgttggtcaaggtgcatctcaaggacaagtttgtcatagatgtggacaaaaatatcagcatcagtgatgtgacacccagttccttggtggttctaagaaatgacagctacactttgcacaagatcctacccaacaaggtggactcattggtgtcactgatgatggtgaagaaagtaccagattcagcttatgaaatgattggtagactggataggcagatcaagaagatcaaagaagtgatcgacctgc

SEQ ID NO: 2176 - DNA, 455 bp, Homo sapiens
  MAP TO AB020867.1; EXPRESSED IN BT474, SIGNAL = 2.2; EXPRESSED IN FETAL LIVER, SIGNAL = 1.2; EXPRESSED IN PLACENTA, SIGNAL = 1.5; EXPRESSED IN HBL100, SIGNAL = 1.8; EXPRESSED IN HELA, SIGNAL = 2.2; EXPRESSED IN HEART, SIGNAL = 1.1; EXPRESSED IN BRAIN, SIGNAL = 1.1; EXPRESSED IN BONE MARROW, SIGNAL = 1.3; EXPRESSED IN LUNG, SIGNAL = 1.6
caacaaaatgaaataaatatgggcttcagagtttgataactaagtttaaatccttgttcctacattgaactgtctgtgaaagcttgagcaagttacttaaattttctgcaaatgaaagtaatgtcatctactatataggattattttaaggattaaataagtgtgacaatgtatatgaagtgctcaagtagtatagtgtgtagaacttgttaaagctaattttcctcccttttgtttggacatttttttattaatgcattttgaggaatatatgaaaaagttcacttttacatactcaaaaaatatttttgttccaaatgtaggtaacaccgtgattcacttagatcaagcattagccagaatgagagaatatgagcgtatgaagactgaggctgaaagtaactcaaatatgagatgcatctgcaggattattgaggatggagatggtgctggtg

SEQ ID NO: 2177 - DNA, 445 bp, Homo sapiens
  MAP TO AC007128.2; EXPRESSED IN BT474, SIGNAL = 2.6; EXPRESSED IN ADULT LIVER, SIGNAL =   5; EXPRESSED IN FETAL LIVER, SIGNAL =   3; EXPRESSED IN HELA, SIGNAL = 4.4; EXPRESSED IN PLACENTA, SIGNAL = 6.2; EXPRESSED IN HBL100, SIGNAL = 3.3; EXPRESSED IN HEART, SIGNAL = 3.5; EXPRESSED IN BRAIN, SIGNAL = 3.7; EXPRESSED IN BONE MARROW, SIGNAL = 4.5; EXPRESSED IN LUNG, SIGNAL = 5.1
ttccagaggtgacctggttcaccacttgggtgctgttaaaggcattcagtttcaaaagggaaatggagaataaaagttcagaaaacttgcagcctgacaatgtgatagaaaagaaaatcccattttctgaggagaaattcaagctggctgcagaaatttgcataagtaatgaggagccaaatgttaatccccaagacaatggggaaaatgtctcaagggcatgtcagaggtcttcacagcagcccctctcatcacaggcccagaggccaaggaggaaaaagtggttttgtgggctgggcccagggtgcctcgctgtgtgcagtctagggacttggtgtcctgcatcccagctgctccagccatgactaaaggggccaaggtacagctcagattgttgcttcagagggtacaagcccccagccttggcatcttccatgtggtgttg

SEQ ID NO: 2178 - DNA, 475 bp, Homo sapiens
  MAP TO AC007528.5; EXPRESSED IN BONE MARROW, SIGNAL = 2.3; EXPRESSED IN HELA, SIGNAL = 2.6; EXPRESSED IN BRAIN, SIGNAL =   2; EXPRESSED IN LUNG, SIGNAL = 1.6; EXPRESSED IN BT474, SIGNAL = 2.9; EXPRESSED IN ADULT LIVER, SIGNAL = 3.7; EXPRESSED IN FETAL LIVER, SIGNAL = 2.3; EXPRESSED IN PLACENTA, SIGNAL = 3.8; EXPRESSED IN HEART, SIGNAL = 2.4; EXPRESSED IN HBL100, SIGNAL =   9
cgttgggaaccctgagtaaggcaatttgaaggaactggaaactcaacaaatgagaaagaagaagtcaggatcacagactattgatataatcaaataataataataataacaaatacaagagaatactttctatgtaccagtgtgtccggaattgttccttccagtgggttcttggtctcgctgacttcaagaatgaagtcacggaccctcgtggtgagtgttacagttcttaaagatggtgtgtctggagcttgttccttcagatgttcctgagtttcttccttccagtgggttcgcttgacttcaggagtgaagccgcagaccttcgcagtgagcgttatagctcttaaaggtggtgcgtctggagttgttttttcttcccggtgggttcgtggtcttgctgacttcagaagtgaagctgcagaccttcgcagtgagtgttacagctcataaatgtagtgcggacccacagagt

SEQ ID NO: 2179 - DNA, 440 bp, Homo sapiens
  MAP TO AC002472.3; EXPRESSED IN HELA, SIGNAL = 4.9; EXPRESSED IN PLACENTA, SIGNAL =   6; EXPRESSED IN HBL100, SIGNAL =   5; EXPRESSED IN HEART, SIGNAL = 6.2; EXPRESSED IN BONE MARROW, SIGNAL = 3.6; EXPRESSED IN LUNG, SIGNAL = 3.5; EXPRESSED IN BRAIN, SIGNAL = 4.4; EXPRESSED IN ADULT LIVER, SIGNAL = 4.4; EXPRESSED IN BT474, SIGNAL = 3.6; EXPRESSED IN FETAL LIVER, SIGNAL = 3.7
ctgatgcctacagagccaccctgcacatagcacatagcttttccaccggtgggtgggcccgggaccctctcccagagccctctaggaaccctgcccccaacttgggacccaccagcaacgccaggtcctcgaaggtccctccagccttggccacgaggtccccaatgcggaacacgggacagtaggggctgaattgtggttcatagcggcagtgcttaaaataggtggggtcccaggtctccaaggcattggacctgggaggagtgggaaaggtcagatgaggtaggggacaaggagggtcttggggcagatgagacccactctgcttacttagagaagttgaacttgctgaaggtgactgtgtttttgatgaacagtgtgaagttctgggcctgggccagcaggggcctcctgcaggtggaagggaggtgacagcctct

SEQ ID NO: 2180 - DNA, 471 bp, Homo sapiens
  MAP TO AC007628.3; EXPRESSED IN BT474, SIGNAL = 5.2; EXPRESSED IN FETAL LIVER, SIGNAL = 1.6; EXPRESSED IN PLACENTA, SIGNAL = 3.1; EXPRESSED IN HELA, SIGNAL = 1.5; EXPRESSED IN HBL100, SIGNAL = 3.6; EXPRESSED IN HEART, SIGNAL = 2.2; EXPRESSED IN LUNG, SIGNAL = 1.3; EXPRESSED IN BONE MARROW, SIGNAL = 2.7; EXPRESSED IN BRAIN, SIGNAL = 1.7; EXPRESSED IN ADULT LIVER, SIGNAL =   2
aaagaaaccaaaaggccaggttttattgcatgatccatgcactgtgtccaagaaagcagctaactgtgaacacaggtttccagggctaggaggaggtaaagacaatcccctcgccccttttctttttaatgaaaggagccaatgagaacctgctggaagtaaattcagtgcttctggaaaatgccatattcctgcttcaggaagcccccagcctaccttttttactgcatgggcgccagacacaataaatcatgcattgtttccttccagcccttggactggctgatggtgacatgtccaagacaccctcaccattgtgtctgggtgtcaggctgggcaaaatcagttggtatagacctggtgagaaaaaacaaaatggagccgtatgtggccacttgaaagcaggaacatgtacagtgacacttctgagcgggagaaaaaagggcagaaaggtgagcgaggaagagaatg

SEQ ID NO: 2181 - DNA, 397 bp, Homo sapiens
  MAP TO AC009493.1; EXPRESSED IN HEART, SIGNAL = 1.3; EXPRESSED IN BONE MARROW, SIGNAL =   1; EXPRESSED IN FETAL LIVER, SIGNAL = 1.3; EXPRESSED IN ADULT LIVER, SIGNAL =   1
tctttctacctgggctggacgtgcctgggctctcctccctggccccgctcccacctctcccaggtctctaaacccctagagaacctgtgtcagtgttttgaatccctcagttgctctagcaggaaaactagacagattaggagctggggcacatttggctgaaagacagctcttcgctttcttcttatgctgcttccccttcctcttttcccaaatagatatataaacacatgtattttcctgtttaaattgagcgaattggtcccctgcctgtgccttgatttagccattgggctcagccttgctcctcccttccttactcggataggagccactgggatctggagctccagcttccaaattgaagctggcctcaggccaggtgaccttttctttg

SEQ ID NO: 2182 - DNA, 459 bp, Homo sapiens
  MAP TO AC009954.1; EXPRESSED IN BT474, SIGNAL =  47; EXPRESSED IN PLACENTA, SIGNAL =  53; EXPRESSED IN HBL100, SIGNAL =  69; EXPRESSED IN HEART, SIGNAL =  27; EXPRESSED IN FETAL LIVER, SIGNAL =  16; EXPRESSED IN ADULT LIVER, SIGNAL =  21; EXPRESSED IN HELA, SIGNAL =  45; EXPRESSED IN BRAIN, SIGNAL =  29; EXPRESSED IN LUNG, SIGNAL =  33; EXPRESSED IN BONE MARROW, SIGNAL =  21
ttcttcatgtttatccactgtgtggtattaaagaagaaagcaatgtgtataagaatagctggttcttccgtaattaatgtttaataaccccattattctccgaaggcatctgtctttgcacacctgacctgctgttccaccaagaaagttccacaaacacttagcagcagccagcctaacctgtttttctccttgctttccacagggtgccatgactcccggaatccctatctttagtccaatgatgccttatggcactggactgaccccacagcctattcagaacaccaatagtctgtctattttggaagagcaacaaaggcagcagcagcaacaacaacagcagcagcagcagcagcagcagcagcagcagcaacagcagcagcagcagcagcagcagcagcagcagcagcagcagcaacaggcagtggcagctgcagccgttcagcagtcaacgtc

SEQ ID NO: 2183 - DNA, 457 bp, Homo sapiens
  MAP TO AF170802.1; EXPRESSED IN PLACENTA, SIGNAL = 2.9; EXPRESSED IN BONE MARROW, SIGNAL = 1.8; EXPRESSED IN HBL100, SIGNAL = 1.4; EXPRESSED IN HELA, SIGNAL = 1.8; EXPRESSED IN HEART, SIGNAL = 2.1; EXPRESSED IN BRAIN, SIGNAL = 1.5; EXPRESSED IN LUNG, SIGNAL = 1.4; EXPRESSED IN BT474, SIGNAL = 1.7; EXPRESSED IN ADULT LIVER, SIGNAL = 1.8; EXPRESSED IN FETAL LIVER, SIGNAL = 2.3
tcaccatgatgccttccacagctcaaaagtcatttcctgcctgggctaagttagttgtaataggtgataatgcaatttcatttctccacatctctttcagaacaaagttcacagaaacctaaacaaattacaaggttggggtgatttgagcagtctacctcatgatagtcttctcttcaaattattagaccacttaggcttatctttggtattttgttccttattgattttaggagtcctatatttgctaaacttgaaatgcatggtaaaaaaatgtatctactgtccattttttttaggttgatacccaaagatcagtattactgtggtgttctctatttcactgggagtgatattttcaataagaatatgagggctcatgccctagaaaagggtttcacaatcaatgagtacaccatccgtcccttgggagtcactggtgagtgtccatgtgtgt

SEQ ID NO: 2184 - DNA, 470 bp, Homo sapiens
  MAP TO AC010088.2; EXPRESSED IN PLACENTA, SIGNAL = 1.9; EXPRESSED IN BONE MARROW, SIGNAL = 1.5; EXPRESSED IN HEART, SIGNAL = 1.1; EXPRESSED IN HELA, SIGNAL = 2.6; EXPRESSED IN HBL100, SIGNAL = 1.5; EXPRESSED IN LUNG, SIGNAL = 1.1; EXPRESSED IN ADULT LIVER, SIGNAL = 3.9; EXPRESSED IN BT474, SIGNAL = 1.1
ctggcctcactgtttatgggtagctgtagcagtggctgtcttagtgtcagaggctatcaaaataatacaaggaaaggatctcactgtctggactactcatgatgtaaatggcatactaggtgccaaaggaagtttatggctatcagacaaccacttgcttagataccaggtgctactccttgaggcactggtgcttcaaatatgtacatgcatggccctcaaccctgccgcttttctcccagaggatggggatccaatcaagcatgactgccaacaaattatcgtccagacttatgccacacaagataatctcttagaagtccccttaggtaatcctgaccttagcctatatactgatggaagttcatttgtgaagaatgggatacaaagggcaggttatgccatagttagtgatgtaactatacttaaaagtaagtgttttcccctagagaccagagcccagtaagcag

SEQ ID NO: 2185 - DNA, 457 bp, Homo sapiens
  MAP TO AF060568.1; EXPRESSED IN ADULT LIVER, SIGNAL = 1.1; EXPRESSED IN HEART, SIGNAL = 2.3; EXPRESSED IN LUNG, SIGNAL = 5.7
gcagctgacatttcctggaggcctacaggtgccaggtactgtgccagattgctttacttcgtcatctcatttgagcctcacaagacccatttcaagttggtactgttaggacatccattttacagatgaggagactgagtttacttgcccaagatcacctagcaagtaagagacagagctgcgctgtgaccccagggctgcctgaccctgaagcccctggtcttaacctctgcggcaaagttgtttccatcccctttccaggctgcccatttctcccagcccacagctcacgtggtacagattgcacgtttgcagatgctcaccctgaagctttggaagtcacggtctcaaaggtgcacgtggaagagctgccaacagtctatttcctgcacacaccaaactcgcaggtcttctaattacaccaaacaaacctttctgttttcaagcagctatgggc

SEQ ID NO: 2186 - DNA, 469 bp, Homo sapiens
  MAP TO AF146367.1; EXPRESSED IN BRAIN, SIGNAL =   2; EXPRESSED IN BT474, SIGNAL = 3.9; EXPRESSED IN LUNG, SIGNAL = 2.7; EXPRESSED IN BONE MARROW, SIGNAL = 1.9; EXPRESSED IN ADULT LIVER, SIGNAL = 2.6; EXPRESSED IN FETAL LIVER, SIGNAL = 1.9; EXPRESSED IN PLACENTA, SIGNAL = 3.6; EXPRESSED IN HEART, SIGNAL = 2.4; EXPRESSED IN HELA, SIGNAL = 4.1; EXPRESSED IN HBL100, SIGNAL = 7.8
gcttggaaaaggctcaagtgtaccaatcccaaaacaaataacaacatgctacccactaatcagttagtaaagattatcctgtaatgaccaggtatgaggagatgtgtgctttcatgcattgctgatgatgttatcaattaatacaatcctttttccctggaatttctctgggccataaagtggcttctgctgtggctatcccatgtccggtgtgaggagacagtggtatgactcatccctttgtgtccggaattggtgggttcttggtctcactgacgtcaagaatgaagctgcggaccctcgtggtgagtgttacagttcttaaaggcagtgtgtctggagtttgttcgttctgatgttcggacgtgttcagagtttcttccttctggtgggttcgtggtctcactggctcaggagtgaagctgcagaccttcgcggtcagtgttacagctcttaaggtggtgcgtct

SEQ ID NO: 2187 - DNA, 483 bp, Homo sapiens
  MAP TO AC009705.2; EXPRESSED IN PLACENTA, SIGNAL = 1.2; EXPRESSED IN HELA, SIGNAL = 1.9; EXPRESSED IN HEART, SIGNAL = 1.2; EXPRESSED IN BRAIN, SIGNAL = 1.1; EXPRESSED IN BT474, SIGNAL = 1.1; EXPRESSED IN HBL100, SIGNAL = 1.3; EXPRESSED IN LUNG, SIGNAL = 1.1; EXPRESSED IN BONE MARROW, SIGNAL = 0.95; EXPRESSED IN ADULT LIVER, SIGNAL = 2.2; EXPRESSED IN FETAL LIVER, SIGNAL = 1.1
  unsure 454
gaatgagctggaggtggaagataacgcagtagaaaggcattgagctgtgactaaagaggccaggtttctagtttgagctctaaccctatttcattatgtaaccatagccatataacccataaaaagtctttttcctaaaagacggggttggtctagactatttccgggggctcctttacttttagtagcctatgacacccacgctgtgaattcacaaactacgtttttctgacacaactttgtactacaaatcacctatataactgaattttcctactccaagtaaccaactctgaaatcccagcacttaccctcacctccaggttgtttgtatgggttgtacttaggttttggagcaactaccggggcaaactttttgggtggctgttgtgtagacactgaaatgctggggttcccaaaggaatgggtggtctccatccgtgcaggcacatgngccgaggggctcaccagtgcttttgggtg

SEQ ID NO: 2188 - DNA, 449 bp, Homo sapiens
  MAP TO AC010104.1; EXPRESSED IN BONE MARROW, SIGNAL = 1.3; EXPRESSED IN ADULT LIVER, SIGNAL = 3.9; EXPRESSED IN BT474, SIGNAL = 1.1; EXPRESSED IN HBL100, SIGNAL = 1.1; EXPRESSED IN HELA, SIGNAL = 2.7; EXPRESSED IN HEART, SIGNAL = 0.93; EXPRESSED IN PLACENTA, SIGNAL = 1.8
acatccttgggtttttgcacataactttatgatttccctgtgctatttaatgggggttcccccagaggttaggaactccctttctttccatattgcagcatgggcatgtaggattagataagcatattttctatctgcacacacatttattctttttccctttcccagttctaaggctcaggtaagtgccactagttttactaactgggcattggtccctggggaaagaagcttactttcaagtgctgttacatcactaactatggcataacctgccctttgtatcccattcaccacaaatgaacttccatcagtatataggttaaggtcaggattagctaaggggacttctaaaagatcctctcgggtagcataagtctgggctacaatttgttggcagtcatgctcaattggtttcccaacctctgggagaaaagtggcatggtgga

SEQ ID NO: 2189 - DNA, 439 bp, Homo sapiens
  MAP TO AF186995.1; EXPRESSED IN PLACENTA, SIGNAL = 3.9; EXPRESSED IN HBL100, SIGNAL = 1.7; EXPRESSED IN HELA, SIGNAL = 2.6; EXPRESSED IN HEART, SIGNAL =   2; EXPRESSED IN BONE MARROW, SIGNAL = 1.9; EXPRESSED IN LUNG, SIGNAL = 1.2; EXPRESSED IN BRAIN, SIGNAL = 1.8; EXPRESSED IN ADULT LIVER, SIGNAL = 2.2; EXPRESSED IN BT474, SIGNAL = 1.6; EXPRESSED IN FETAL LIVER, SIGNAL = 1.2
taggagccatttagggagggtcagaattttgtagcctccagctgcatgactcctaaaccataatttctaatcttgtggctaatgtcagtcctacaaaggcaatgtagttcccaggcaagaaggaggtctgctttgggaaagggctgctatcgtctttgttttaaaccataaactgagtttctcccaaagttagttcaacctacgcccaggaatgaacaaggacagcttggaggttagaagcaagatggagtcagttaagttagacctctttcactgtctcagtgccttttgcaaaggcagtttcatgaccatcacctgatgttcgcctgactttcctggtgaggcatgaggccctctcctgccctgttcctgcctgacgagcttcccactgtaacaaaaataaaacaattaactgtggatgacaaaattcttaaaatgg

SEQ ID NO: 2190 - DNA, 455 bp, Homo sapiens
  MAP TO AC010153.2; EXPRESSED IN HBL100, SIGNAL = 5.1; EXPRESSED IN PLACENTA, SIGNAL = 6.2; EXPRESSED IN HELA, SIGNAL = 4.9; EXPRESSED IN HEART, SIGNAL = 6.3; EXPRESSED IN BRAIN, SIGNAL = 3.8; EXPRESSED IN BONE MARROW, SIGNAL =   5; EXPRESSED IN LUNG, SIGNAL = 3.7; EXPRESSED IN ADULT LIVER, SIGNAL = 5.1; EXPRESSED IN BT474, SIGNAL = 3.7; EXPRESSED IN FETAL LIVER, SIGNAL = 4.5
tgtggttatgaagcaggcagaacaatcacatcacctaaattcttggccagaaatattccaatattctctttgtaggcaggatcctgtagaaatgccacataaattgtgtgctagatccagcttggtggcacagtgtcccttattggcagtgtccaagcaggagaggagagctgccatatcaggtaaatgatggaacccaaaatatgtcactatgcctcctcttgacagggcccaggcaagagagtcatatcatttggatacagtgtttagaaatgatacagttaccaaagaaaatcatgtacaggtgggagagaacagtcatgtaacctatgtgatgggccagaaatacgttacagtcacgcctgtggatattattaagataacacagtcaaatcatgaagatgcttataccaaggatttgtcaaaatctcattttgatgctatacctatgcaga

SEQ ID NO: 2191 - DNA, 475 bp, Homo sapiens
  MAP TO AJ239318.3; EXPRESSED IN BT474, SIGNAL = 3.3; EXPRESSED IN ADULT LIVER, SIGNAL = 2.4; EXPRESSED IN FETAL LIVER, SIGNAL = 1.4; EXPRESSED IN HBL100, SIGNAL = 2.4; EXPRESSED IN HELA, SIGNAL = 2.7; EXPRESSED IN PLACENTA, SIGNAL = 2.2; EXPRESSED IN HEART, SIGNAL = 1.5; EXPRESSED IN BRAIN, SIGNAL = 1.5; EXPRESSED IN BONE MARROW, SIGNAL = 1.5; EXPRESSED IN LUNG, SIGNAL = 0.96
aagggctttggaacttctcagtccaaccactgagctggtcatcaccggttgtcatataaaatccacttttcattggacatcacaatctgatcgagaaatggtttattattgttgtgtagaataagagaagatgacactacaaaaagtcaaatttttggattttcactcagctcatgaggcacccacttatcaagcttttttgcctttcctatttgcttcaaatactgaaccaccatagaatggttgacattgagttccttgacaacttctcatgtagttgtaaaaggatcagcttcaatgattgctctgaattggtcattgtcaatttccaatggccagccactgtgatcctcatcaaggctcttgtctcctttgcaaaatgtcttgaaccaccactgcactgtatgttcgttagcagtttctgggccaaatgcattgttgagtttgcaagttgtctctgctgctttatgaccca

SEQ ID NO: 2192 - DNA, 276 bp, Homo sapiens
  MAP TO AL033532.12; EXPRESSED IN PLACENTA, SIGNAL =   1; EXPRESSED IN HBL100, SIGNAL = 0.98; EXPRESSED IN HEART, SIGNAL = 1.3; EXPRESSED IN BONE MARROW, SIGNAL = 1.6; EXPRESSED IN BRAIN, SIGNAL = 1.8; EXPRESSED IN LUNG, SIGNAL = 1.1; EXPRESSED IN ADULT LIVER, SIGNAL = 1.2; EXPRESSED IN FETAL LIVER, SIGNAL = 1.2
ggtgggagtgcacattttgtgctcctaatcaggaaaattcagctgcatgaattcttggcagctctccaaattggcctcggggcttgtgaggactgtgggattcttctgttttaagcactgtaggtgtttatggtggcagtgggggtggtggggatcttctgcttactttttccctgcaatgggaagcctctcctcactctggggagatctaatccaggttgggaagatgggactgcagaggccagctgcctctatgctgccctattcgacttccaa

SEQ ID NO: 2193 - DNA, 455 bp, Homo sapiens
  MAP TO AL096765.4; EXPRESSED IN HELA, SIGNAL = 5.9; EXPRESSED IN PLACENTA, SIGNAL = 7.9; EXPRESSED IN HBL100, SIGNAL = 8.5; EXPRESSED IN HEART, SIGNAL = 7.6; EXPRESSED IN BONE MARROW, SIGNAL = 7.4; EXPRESSED IN BRAIN, SIGNAL = 5.7; EXPRESSED IN LUNG, SIGNAL = 4.9; EXPRESSED IN ADULT LIVER, SIGNAL = 5.6; EXPRESSED IN BT474, SIGNAL = 6.7; EXPRESSED IN FETAL LIVER, SIGNAL = 6.3
gacaccaactggccaacagccaaccaccccgcagacgccccagcccacttctcagcctcagcctacccctcccaatagcatgccaccctacttgcccaggactcaagctgctggccctgtgtcccagggtaaggcagcaggccaggtgacccctccaacccctcctcagactgctcagccacccttccagggcccccacctgcagcagtggaaatggcaatgcagattcagagagcagcgagaccgcgccagatggcccacgtgcaaatttttcaaaggccaatccaacaccagatgcccccgatgactcccatggcccccatgggtatgaacccacctcccatgaccagaggtcccagtgggcatttggagccagggatgggaccgacagggatgcagcaacagccaccctggagccaaggaggattgcctcagccccagcaactacagtctgg

SEQ ID NO: 2194 - DNA, 456 bp, Homo sapiens
  MAP TO AL096887.5; EXPRESSED IN PLACENTA, SIGNAL = 5.5; EXPRESSED IN HBL100, SIGNAL = 2.3; EXPRESSED IN HEART, SIGNAL =   2; EXPRESSED IN BONE MARROW, SIGNAL = 2.7; EXPRESSED IN HELA, SIGNAL = 4.4; EXPRESSED IN BRAIN, SIGNAL = 1.8; EXPRESSED IN LUNG, SIGNAL = 6.3; EXPRESSED IN BT474, SIGNAL = 1.8; EXPRESSED IN ADULT LIVER, SIGNAL = 5.2; EXPRESSED IN FETAL LIVER, SIGNAL = 1.2
tggtcttaccatgttcaccatcattctaaagcagctggactgacagaatggtggaatggccttttgaagtcataattacaatgtcaactaggtgacaatactttgcagggctagggcaaagttctccagaaaccatgtatgctctgaatcagcatccaatatatggtactgtttctcccatagccagaattcacaggcccaggaatcaaggggtggaagtggaagtggcaccactcaccatcacccgtagtgatacactagcaaaatttttgcttcctgttcccacgacattccgttctgctaacctagaagtcttacttctagagggaggaacactgccaccaggagacccaacaacaattccattaaactggaagttaagattgccacgtggacactttgggctccccctacctttaagtcaacaagctaagaagggagtttcagtgttggctg

SEQ ID NO: 2195 - DNA, 402 bp, Homo sapiens
  MAP TO AL031687.14; EXPRESSED IN HELA, SIGNAL = 1.1; EXPRESSED IN PLACENTA, SIGNAL = 1.1; EXPRESSED IN HEART, SIGNAL = 1.5; EXPRESSED IN BONE MARROW, SIGNAL = 1.2; EXPRESSED IN LUNG, SIGNAL = 6.9; EXPRESSED IN BRAIN, SIGNAL = 1.4; EXPRESSED IN ADULT LIVER, SIGNAL = 1.3; EXPRESSED IN FETAL LIVER, SIGNAL = 2.8
gcactggcacacagtaggtgctttgtgttcgtgaactaaactaatgaaatatgccgccaacactgcgctgggaagcaggaagtttgggtgctcagcgcgttagcctggagtggctgtgtccttaggcaagactgtcctcgaggatcctcagtttctccacccgtaacccaccgggttggtctgggtcagttctgcaatgcagcccaaacatccctgccgcccctgctgagacaacgtgtgaccttgggccaaccccgcctgccttggcctccctcgtgaaggcctcagtgtccaccagaccccacccactaaccggccctctgctccctcccgcagcgcctggacttcgaatcccagcccgtgcacaccgtgatcctggaggccctcaacaagttcgtggac

SEQ ID NO: 2196 - DNA, 450 bp, Homo sapiens
  MAP TO AL033378.6; EXPRESSED IN PLACENTA, SIGNAL = 2.4; EXPRESSED IN HEART, SIGNAL = 2.1; EXPRESSED IN BRAIN, SIGNAL =   1; EXPRESSED IN BONE MARROW, SIGNAL = 1.2; EXPRESSED IN FETAL LIVER, SIGNAL = 1.1; EXPRESSED IN ADULT LIVER, SIGNAL =   1
ttttagtccacaaagacacaaatcattatatgtactagagtgaactttccaaggagaaatcaaaatagttaaacaaggacagtagatttaaaggcaatgccttcctcataaaatcctactttcctctgcccagattcactgtggcaaaaagtaacatattccaggtacttatttaattgttttcacatgttccatttatttttgagaaacacacctttgaattatacctttgaattatacttctttgtacctttgaattaatgctatttttatttttctagaaaaatcaagatttggaggtgtttgtcactgacaaatcacaaaccatggcaaccaagtccttcttttccatgatcattttttggacgctagacaagatagatgcggcacaatttatacgaagaaaaatgcaatataaaatccaggtcatccaaggtgtgtgtgtgtgtg

SEQ ID NO: 2197 - DNA, 342 bp, Homo sapiens
  MAP TO AL034378.2; EXPRESSED IN BT474, SIGNAL = 1.3; EXPRESSED IN HBL100, SIGNAL = 1.3; EXPRESSED IN HEART, SIGNAL = 2.2; EXPRESSED IN LUNG, SIGNAL = 3.2; EXPRESSED IN ADULT LIVER, SIGNAL = 2.3; EXPRESSED IN FETAL LIVER, SIGNAL = 2.5; EXPRESSED IN PLACENTA, SIGNAL = 2.2; EXPRESSED IN HELA, SIGNAL = 2.1; EXPRESSED IN BRAIN, SIGNAL = 1.8; EXPRESSED IN BONE MARROW, SIGNAL =   2
cttcttcaaagatcgcccagtctagcccagaggtataataaaaccccaaactttcctttcaggactcatctttcatgagtaatatctttccgtgttaagtggtaggcacacaatggtgaaataaaacacagggctcagcgactccgatggcttggggtgtgggaggggaaggttgcctttatggtgtgagtttcctgtgcctcagctctcctggattgtggggctcatggcacacgggtgattgatgacaacatcactctccatcattcaattcgggagatccctaccaggggcatcttggccacctccgaggccatattgggctggaacctccattatctg

SEQ ID NO: 2198 - DNA, 492 bp, Homo sapiens
  MAP TO AL096770.14; EXPRESSED IN BONE MARROW, SIGNAL = 1.4; EXPRESSED IN BRAIN, SIGNAL = 1.5; EXPRESSED IN BT474, SIGNAL = 2.6; EXPRESSED IN HBL100, SIGNAL = 1.9; EXPRESSED IN HEART, SIGNAL = 1.6; EXPRESSED IN LUNG, SIGNAL = 1.1; EXPRESSED IN ADULT LIVER, SIGNAL = 1.5; EXPRESSED IN FETAL LIVER, SIGNAL = 1.7; EXPRESSED IN PLACENTA, SIGNAL = 1.7; EXPRESSED IN HELA, SIGNAL = 1.9
aggcttcagctaaaccagatgatcattttctttaactgctctcagcgagttgaatggccagccaaaatttctcaactgggttatttttgtttctacattcatgctaaaatgaggcaggaacatcaaaattgtgtattttattatttctgaaatggcttattctcatttgcactgatctgtttacttgaggtattgatatacaagctgtgaatgtggtaataaactttgacttttcaaagctagaagagacctatctccgtcatattggaagaccaggtcactttggccattttggcttagccatcaacttgatcacatatggcgatcacttcaacctgaaaggtattgaggagcagctgggaaaagaaataaaacctattccaagcaacattgacaagagcctgcatgtggcagaattccacagcaaggctgtagaaaatgagaagccttaataagcactctttgacaaactgtggaagccttgtttggatc

SEQ ID NO: 2199 - DNA, 479 bp, Homo sapiens
  MAP TO AL035448.28; EXPRESSED IN BONE MARROW, SIGNAL = 1.3; EXPRESSED IN BT474, SIGNAL = 1.8; EXPRESSED IN HBL100, SIGNAL = 1.9; EXPRESSED IN HEART, SIGNAL = 1.4; EXPRESSED IN BRAIN, SIGNAL =   2; EXPRESSED IN ADULT LIVER, SIGNAL = 1.2; EXPRESSED IN FETAL LIVER, SIGNAL = 1.1; EXPRESSED IN PLACENTA, SIGNAL = 2.6; EXPRESSED IN HELA, SIGNAL =  11
gctaaggacaaataaaaggttcccattttctatggcccatagacaaccctgtcacttgaatgttacagcttgcaaaaacatttttatctaagaggaaaacagctgtactgttttggaaaagatacaaggcaattttccattaccaataaaaagcttctgggaaaagaggaaacagatttgtgttcaaatacattacaggttttgcaaaagcagaaacttcaacacaggaaaacttttaaagtaaatagactagcgcggcacttacctctctctaatggtgggataaagaccctgccagtttggggccgggataaggttgttgttactgagattctgctggtggtactgctggacgctggtgctgctggagttggctggctttttacgggggaatatatcagcagccatcttcttctttttagtcttcaaggtaattatttcataacaaactggtggcaacttgctgctgttgctactgc

SEQ ID NO: 2200 - DNA, 485 bp, Homo sapiens
  MAP TO AL035588.21; EXPRESSED IN BT474, SIGNAL = 1.6; EXPRESSED IN ADULT LIVER, SIGNAL = 1.7; EXPRESSED IN HEART, SIGNAL = 1.7; EXPRESSED IN PLACENTA, SIGNAL = 2.1; EXPRESSED IN BONE MARROW, SIGNAL = 1.7; EXPRESSED IN FETAL LIVER, SIGNAL = 1.6; EXPRESSED IN HELA, SIGNAL = 1.9; EXPRESSED IN HBL100, SIGNAL = 1.4; EXPRESSED IN BRAIN, SIGNAL = 2.5; EXPRESSED IN LUNG, SIGNAL = 1.1
tgctgtaacaaatgagtggcttataaacaacaaaaatttattcctcacatttctggaggctggaagtctgaggtcaagtgtcagcatagccaggttttggtggcgactcttttcccagttgcagatggctgtctctcactgtatcctcatgtggtggaaagcagagagcttgctctcttcctcttcttataaggatgctcatcccatcatagcgatccaccctcatgacctaattacctcctgaaggcgccacctcctaataccatcctatgatggcttggtgtgtcaacatacgaattttgagggacacaaacatgtgcaccgcaggccagttggccattgtgtctgtcatttgcctatgtatcctcagacacattccttgccctttgtctgatctgctctgccctgccctgccctacagggatgatggcccttgcagcctctgtttctcgggctcttatttcagctggcttccatctgagttc

SEQ ID NO: 2201 - DNA, 470 bp, Homo sapiens
  MAP TO AL109623.8; EXPRESSED IN ADULT LIVER, SIGNAL =   1; EXPRESSED IN BT474, SIGNAL =   1; EXPRESSED IN HEART, SIGNAL = 0.99; EXPRESSED IN PLACENTA, SIGNAL =   1; EXPRESSED IN BONE MARROW, SIGNAL = 1.2; EXPRESSED IN BRAIN, SIGNAL = 1.2
agttggcagagtgaaaagccccgcccagagtgagccaagggtcagcttaaggttggggagactttacccatcttgcctctgatttcccaggaacctttagcattttctgatttctgtgtctgtgcttggaactgggagtggatgtgtaggtctgctctcaggaagaacagatatccagcttgtggtttagcttcctttttctggctaagagatccttggacaacctcaggggctaagtccctttgcctgggtatacctggggactccagcaagccccttctaggcaccccactgttcttcagtacctcatggacctgaggtttccgcttctgattatgctgtctctcaattgcctggacttggtctggtggggtctggggctttctgctttccttcttacattcagatttatcatacaacatcgggcctggagaaatgatgtcagaattagcccagaaagtctggagtgt

SEQ ID NO: 2202 - DNA, 471 bp, Homo sapiens
  MAP TO AP000344.1; EXPRESSED IN BRAIN, SIGNAL = 0.9; EXPRESSED IN FETAL LIVER, SIGNAL = 2.1; EXPRESSED IN ADULT LIVER, SIGNAL = 1.1; EXPRESSED IN BT474, SIGNAL = 1.5; EXPRESSED IN HEART, SIGNAL = 1.1; EXPRESSED IN PLACENTA, SIGNAL = 1.8; EXPRESSED IN HBL100, SIGNAL =   1; EXPRESSED IN HELA, SIGNAL = 1.1
gttggggaagacatttccagaaagaaaaaatcctgggggacggcccccagaaaattatagggagatgggaattttctacctggtcctgaagagcaggcaggaatggaaacaacaactgatcaacattcccagactctgaaaggcaggtgaatggcacagctcaccatggtacagttccatccacacacacctgggaatgccctctccatgaggaaacagaggcagaggaggcagccagtcagtagacaacatggatctccttggccatcaacctcgctgggctgtcgtcctgaagcggggtgctcagagactcacctctatgatactgagctgtgatcagcttagggatcacaaagaacacatctccaagcaagtccagaagactgtctcggatttcagtcagggagtgcttgtcatggaagtattcaccagccacaaggtgcaaataattgggcaggatgtgctgtaaaa

SEQ ID NO: 2203 - DNA, 953 bp, Homo sapiens
  MAP TO AC006466.3; EXPRESSED IN PLACENTA, SIGNAL = 0.97; EXPRESSED IN HELA, SIGNAL = 0.91; EXPRESSED IN BRAIN, SIGNAL = 1.2; EXPRESSED IN BONE MARROW, SIGNAL =   1; EXPRESSED IN FETAL LIVER, SIGNAL = 0.97; EXPRESSED IN ADULT LIVER, SIGNAL = 0.92; EXPRESSED IN HBL100, SIGNAL =   1; EXPRESSED IN HEART, SIGNAL =   1
cacactccctccttcctctggcagtggcacaatgaaggtgttatttacacctgattcttaatggttcattaaggcagggccttttagcacctctgttcacaaaacttgattggtgagacttgccttgaatactttgcaaggagagaatgggattcctgtgtttcttctcagttcccaggtagcctgttgtgatgactgtggctgtgtaggatattggagagactggagatgtgggagcacggatctccctcctcctctcaaatgcctctgcttgtttctgttctggaggtctccagtgtccccagcttatagtcctgatgccttctgggtcccccagagcccctctttaatgtttggggttgggaaggaggaggaagtgatcagcaagacccaaggagagcagcccctgacttttctcaccccgctgctcacctctgacttttctctctctctctttctctctgtttcagtctgggagaccgaaaccattggtaagaggaaccttggtgaggatagaccgctgtctttctgtccatccagcaggagcccagcctcaggagatcccaggctccggctgctgggattggggtgggggtggagtaagaggctcactgggtatcaggttctttcctccttccttcctcccctctccccgaccttggccattctggaggtcggggggcacaggaagatgcacaacacaagcacgacctcaggtccctcacaggcttgtttgggaggacaggacttaccaatggaggggctaagaaacaagctcacgcatgagtgtagctgcatatatgtgcatatgcccagacctgaacatgtgcatcagtccatgcagatattgacatccctgacagctaagaagccggaatgcacagtgagcaagagaacagaagagcaaatgatgcagcatgcaggcagaatagtgaagaagtcaggggaggctt

SEQ ID NO: 2204 - DNA, 477 bp, Homo sapiens
  MAP TO AP000350.1; EXPRESSED IN PLACENTA, SIGNAL = 3.6; EXPRESSED IN BONE MARROW, SIGNAL = 2.6; EXPRESSED IN HEART, SIGNAL =   2; EXPRESSED IN HELA, SIGNAL = 2.9; EXPRESSED IN HBL100, SIGNAL = 4.3; EXPRESSED IN BRAIN, SIGNAL = 1.9; EXPRESSED IN LUNG, SIGNAL = 1.5; EXPRESSED IN BT474, SIGNAL = 3.7; EXPRESSED IN ADULT LIVER, SIGNAL = 1.8; EXPRESSED IN FETAL LIVER, SIGNAL = 2.1
ttatggccatgaccacccccagggcatggagcaggaggtctgtgcaggatgagggctgggggcctgctagtcatgtgcttcctccttccactcccagtttccaggaaggccacccccagtgccctggttgtcctctcctgcatccggagatgtttggcttcaaagaagaaggggtgagggaggccggtccatgcccaagcatggtgcaatctcttggcatcccttccctctcctgatttcagagaagttgatgacgcctgagatgttttcagaaatcctctgtgacgatctggatttgaacccgctgacgtttgtgccagccatcgcctctgccatcagacagcagatcgagtcctaccccacggacagcatcctggaggaccagtcagaccagcgcgtcatcatcaaggtaggtgacttctcacccagcactggagccttcctggccctcagggtgggtgtcatcatggagcactg

SEQ ID NO: 2205 - DNA, 488 bp, Homo sapiens
  MAP TO AP000512.1; EXPRESSED IN FETAL LIVER, SIGNAL = 0.89; EXPRESSED IN ADULT LIVER, SIGNAL = 1.1; EXPRESSED IN PLACENTA, SIGNAL = 1.2; EXPRESSED IN BT474, SIGNAL = 1.3; EXPRESSED IN HEART, SIGNAL = 1.3; EXPRESSED IN HELA, SIGNAL = 2.3; EXPRESSED IN HBL100, SIGNAL = 1.7; EXPRESSED IN BRAIN, SIGNAL =   1; EXPRESSED IN LUNG, SIGNAL = 0.97; EXPRESSED IN BONE MARROW, SIGNAL = 1.3
ccaaatgcacatagtgaatgcacactttctgcagaagcctcagaattccccggtgtttcctgctcctgcctccatggatgtccctcctttgtgactgtgtttcatctatggcccctacttccttgacccccaagctgctgccagaatctatctgctggctgctttgtagccattatgccaaccagccttccccacatgaggaaacatccatcacacagtgatcactccccactccaccatatctgttcctatgtgtcttgctttgaactcatgctttccccttcctgtcccaggtacagctgttcagaggagatcctgacagtggctgccatgctctctgtcaacaactccatcttctaccgaccaaaggacaaggtcgtccatgctgacaatgcccgtgtcaacttctttctccctggcggtgaccacctggttctgctaaatgtttacacacaggtcactgggcttgggtgagtgggaatgagaga

SEQ ID NO: 2206 - DNA, 980 bp, Homo sapiens
  MAP TO AL034550.12; EXPRESSED IN HEART, SIGNAL = 1.1; EXPRESSED IN PLACENTA, SIGNAL = 3.4; EXPRESSED IN HBL100, SIGNAL = 6.1; EXPRESSED IN HELA, SIGNAL =  17; EXPRESSED IN BRAIN, SIGNAL = 1.7; EXPRESSED IN BONE MARROW, SIGNAL = 2.3; EXPRESSED IN LUNG, SIGNAL = 6.6; EXPRESSED IN ADULT LIVER, SIGNAL = 1.9; EXPRESSED IN BT474, SIGNAL = 4.5; EXPRESSED IN FETAL LIVER, SIGNAL = 1.1
tgacagcatgtcagaatccccacaagtaccacttacaaaagaccagagccatggctcgctacgcatgggatctttacatggtcttggaaaaaacagtggcatggttgatggaagcagccccagttctttaagggctttgaaggagcctcttctgccagatagctgtgaaacaggcactggtcttgccaggattgaggccacccaggctcctggagcaccccaaaagaattgcaaggcagtcccaagttttgactccctccatccagtgacaaatcccattacatcctctaggaaactggaagaaatggattccaaagagcagttctcttcctttagttgtgaagatcagaaggaagtccgtgctatgtcacaggacagtaattcaaatgctgctccaggaaagagcccaggagatcttactacctcgagaacacctcgtttctcatctccaaatgtgatctcctttggtccagagcagacaggtcgggccctgggtgatcagagcaatgttacaggccaagggaagaagctttttggctctgggaatgtggctgcaacccttcagcgccccaggcctgcggacccgatgcctcttcctgctgagatccctccagtttttcccagtgggaagttgggaccaagcacaaactccatgtctggtggggtacagactccaagggaagactgggctccaaagccacatgcctttgttggcagcgtcaagaatgagaagacttttgtggggggtcctcttaaggcaaatgccgagaacaggaaagctactgggcatagtcccctggaactggtgggtcacttggaagggatgccctttgtcatggacttgcccttctggaaattaccccgagagccagggaaggggctcagtgagcctctggagccttcttctctcccctcccaactcagcatcaagcaggcattttatgggaagctttctaaactccaactgagttccaccagct

SEQ ID NO: 2207 - DNA, 473 bp, Homo sapiens
  MAP TO AP000346.1; EXPRESSED IN BT474, SIGNAL =   1; EXPRESSED IN HBL100, SIGNAL = 0.98; EXPRESSED IN HEART, SIGNAL = 0.9; EXPRESSED IN PLACENTA, SIGNAL = 1.5; EXPRESSED IN HELA, SIGNAL = 1.9; EXPRESSED IN BRAIN, SIGNAL =   1; EXPRESSED IN LUNG, SIGNAL = 6.6; EXPRESSED IN ADULT LIVER, SIGNAL = 1.5
ggctcactctaggaggacaagttagaacatttgggaaaaaatgttataattgtggtcaaatcggtcatctgaaaaggagttgcccaggcttaaataaacagaatataataaatcaagctattacagcaaaaaataaaaagccatctggcctgtgtccaaaatgtggaaaagcaaaacattgggccaatcaatgtcattctaaatttgataaagatgggcaaccattgtctggaaacaggaagaggggccagcctcaggccccccaacaaactggggcattcccagttaaactgtttgttcctcagggttttcaaggacaacaacccctacagaaaataccaccacttcagggagtcagccaattacaacaatccaacagctgtcccgcgccacagcaggcagcaccgcagtagatttatgttccacccaaatggtctttttactccctggaaagcccccacaaaagattccta

SEQ ID NO: 2208 - DNA, 967 bp, Homo sapiens
  MAP TO AP000427.1; EXPRESSED IN HBL100, SIGNAL = 1.5; EXPRESSED IN HELA, SIGNAL = 2.3; EXPRESSED IN BRAIN, SIGNAL = 1.9; EXPRESSED IN LUNG, SIGNAL = 1.9; EXPRESSED IN HEART, SIGNAL = 2.2; EXPRESSED IN PLACENTA, SIGNAL = 2.8; EXPRESSED IN BONE MARROW, SIGNAL = 2.3; EXPRESSED IN ADULT LIVER, SIGNAL = 2.3; EXPRESSED IN BT474, SIGNAL = 1.1; EXPRESSED IN FETAL LIVER, SIGNAL = 2.2
cacagagcttgaatcccaggtattaagtgtaagtgggaacatttataaacacaccttaatagttatttacaaatatcattccaattccatactaataaatattatcgatactataatatcaagataataaggcagatattggagtacctctgcttgggataattcctctgagaaatggagtatcctccagggcatatgtaaaaagcaaaggtggataagcaattgtattaacaaagattttaacatcgaccattccagtggtcccagcgggagtgcggcagtagacttcattggggttgatggaaataatttgacaaggttcatccccaatagtgactgtagtgttgcctggatagaagccatttcctgtgatcaccagtgtagttccaccaccaatgcttccagaagttggtgatagagatgctactggggggctgctgacagtcaggtttcccagagccaagcctttacttcccaccacaacactaacagaatgatgtccaactgggagaggagtcacaagagcagtgatgttgttttcattaacctctattgctctgaactgttgatttccaatgaaaacagcaatgtcctccaaaacagtccccaaaccttctccttcaataagaacttttacagatcctatgacagagtttgggaagactcctgttatgtaaggagtgatgctttctaagtatgaaaaggtgcagtttccctggcactgggcaggcactccatgtattagaagatctacatccacaagctgttgggcagcaggggatgtttcacattcaatggccgtataattcactgatagaactttacatgggaaatgacccataaggacttttacacctgcagaagaaacggcaaatccagagccttttatggtcacgcttgtcattcctgtagttgatcctgcatttggcaacaccaggtcaatgtttggcaaaagtacaaatcgcct

SEQ ID NO: 2209 - DNA, 1492 bp, Homo sapiens
  MAP TO AP000512.1; EXPRESSED IN BRAIN, SIGNAL = 1.3; EXPRESSED IN BONE MARROW, SIGNAL = 1.6; EXPRESSED IN LUNG, SIGNAL = 1.7; EXPRESSED IN ADULT LIVER, SIGNAL = 1.3; EXPRESSED IN HEART, SIGNAL = 0.87; EXPRESSED IN BT474, SIGNAL = 2.4; EXPRESSED IN HELA, SIGNAL = 6.4; EXPRESSED IN PLACENTA, SIGNAL = 1.5; EXPRESSED IN HBL100, SIGNAL = 2.4
aggaccacatcttcctctgtgatagttccagagaggtgagtgccaaagagtcagacacctgagtcttcaaaatgaggaagaaccaggggctggaggatcaatctctaaaagagatgattatcatgagagttggggctggggaaccatacatattcattcactcagctgaatttttatggagcacatctgatgtgccaagtggaaaacaaattggaaacagaagaagaaatatgctaccttgtgtctcccctcaaggagctcacagttgagttggggtatcccttccagggaaataaattctatagactctcttttcttcccttcacagtgatgaagaggggcattccccggtcctgggcggccttgggccgccttttgccttcaatttgaacagtgacacagatgtggaagaaggtcagcaaccagccacagaggaggcctcctcagctgccagaagaggtgccactgtagaggcaaagcagtctgaagctaaagttgtaactgaaatccagcttgaaaaggatcagcctttagtgaaggagagggacaatgatacaaaagtcaagaggggtgcagggaatggggtggttccagctggggtgattctggagaggagccaacctcctggagaggacagtgacacagatgtggatgatgacagcaggcctcctggaaggccagctgaggtccatttggaaagggctcagccttttggcttcatcgacagcgacactgatgcggaagaagagaggatcccagcaaccccagttgtcattcctatgaagaagaggaagatcttccatggagtaggtacaaggggccctggagcaccaggcctggcccatctgcaggagagccaggctggtagtgatacagatgtggaagaaggcaaggccccacaggctgtccctctggagaaaagccaagcttccatggttatcaacagcgatacagatgacgaggaagaagtctcagcagcgctgactttggcacatctgaaagagagccagcctgctatatggaacagagatgcagaagaggacatgccccaacgtgtggtccttctgcagcgaagccaaaccaccactgagagagacagtgacacagacgtggaggaggaagagctcccagtggaaaatagagaagctgtcctcaaggatcacacaaagattagagcccttgttagagcacattcagaaaaggaccaacctccttttggggacagtgatgacagtgtggaagcagataagagctcacctgggatccacctggagagaagccaagcctccaccacagtggacatcaacacacaagtggagaaggaagtcccgccagggtcagccattatacatataaagaagcatcaggtgtctgtggaggggacaaatcaaacagatgtgaaagcagttgggggaccagcaaagctgcttgtggtatctctagaggaagcctggcctctgcatggggactgtgaaacagatgcagaggaggg

SEQ ID NO: 2210 - DNA, 449 bp, Homo sapiens
  MAP TO AP000511.1; EXPRESSED IN ADULT LIVER, SIGNAL =   2; EXPRESSED IN BT474, SIGNAL = 1.4; EXPRESSED IN FETAL LIVER, SIGNAL = 2.1; EXPRESSED IN HELA, SIGNAL = 1.5; EXPRESSED IN PLACENTA, SIGNAL =   2; EXPRESSED IN HBL100, SIGNAL = 1.4; EXPRESSED IN HEART, SIGNAL = 2.2; EXPRESSED IN BRAIN, SIGNAL = 1.9; EXPRESSED IN BONE MARROW, SIGNAL = 2.1; EXPRESSED IN LUNG, SIGNAL = 1.2
tctgacttaagcattctctctggtccttatatcaggctaggtgattctttccttctgagcgcaccaacttactcccctttctcattctggatttttccaaagcactgctgacatgattcccccctgccttcttgccaggctcccctatgaacccaccctgggtactcaccagacaaaaactcagtcctactgacaatccaacagcagccacaactgcagccagggaaatgaggatgatagcccagggctgtaaatatccacttggtttgatcacgtttgtgggtgtgtggctcatgctaactgtgtttgtgcccatggacaccgggcctgtttcctggaaggtgctgctggttggctcacgggtggatcctgtggtggtcctgacgccgtgggctgaggtggtagatgatgctcccatagtggatgtacccaggccagaggtgtttaag

SEQ ID NO: 2211 - DNA, 478 bp, Homo sapiens
  MAP TO AP000515.1; EXPRESSED IN BRAIN, SIGNAL = 1.4; EXPRESSED IN BONE MARROW, SIGNAL = 1.6; EXPRESSED IN ADULT LIVER, SIGNAL = 1.1; EXPRESSED IN FETAL LIVER, SIGNAL = 1.8; EXPRESSED IN HELA, SIGNAL = 1.1; EXPRESSED IN HEART, SIGNAL = 0.87
cccatatagacaaattcatggcttccatatgaagacaactttgatatattcaatctatgagtgacatggtatacttttagggagattaaaaactaagatactctggtatgcactatcaaatttcattggagatgtggttacttgagctgtggtggctacacttgcgatgaagcggaagaagagctctggtatgtaaggactgggatctgcattgtcatgttccattctgcattgataataaaatgtaccccacataccccgccccccaccacacacacagacacacacacacaaaacacaaacactcatgcttacccagtcatagtccctgcttgctgaaatttctgtaacgtaaagcacttgtgaaaataaaggaccagtcatcaccttgatgattctagagatggggacccgattcccagaagtcataggtcagaagggaaagactgctgaggacagacctccagtcacccaagag

SEQ ID NO: 2212 - DNA, 989 bp, Homo sapiens
  MAP TO AC007919.18; EXPRESSED IN HELA, SIGNAL = 3.5; EXPRESSED IN PLACENTA, SIGNAL = 1.8; EXPRESSED IN HBL100, SIGNAL = 3.6; EXPRESSED IN BRAIN, SIGNAL = 2.3; EXPRESSED IN LUNG, SIGNAL = 1.1; EXPRESSED IN HEART, SIGNAL = 1.4; EXPRESSED IN BONE MARROW, SIGNAL = 1.5; EXPRESSED IN ADULT LIVER, SIGNAL =   1; EXPRESSED IN BT474, SIGNAL = 2.9; EXPRESSED IN FETAL LIVER, SIGNAL = 1.3
tccagttcctagtcctgctttctgtagctgtaggtatcagtatagttggctaagataacaagaacagagagattggcccactctgggaaccaaatttacatgttttgcacttaagttagtcaaattcatttttaaaaattaggttatcataaagacttcagttatggaatagaaattccataactcgcaagtagaggggaatgggaggaagaattagtcaactaaaaagtgcatgtctttccaaagcaggtgtaggaggtcaagaggggctcgaggcttctggaagttttgctcctttacaggttttgatctagccacttgatgtaactattcctagtccggattcccactgagaagttggtgggccagctagtgaaaatcatacatccgtgaaagccatcctcaaagtgatccagggtcacctccacaccggcactctccaaacgcttggcatacatgatgccatcgtctctgaggacatcatgctcacacgtcagaatgtaggtctttgggaggagctgcagcactgcctggtctgcaatgagtggggcggagcgggcatccagcaactgaggaagctcctggacaatcctggcattgcctgtggtctgtacaacaggcttgtagttctttgtgaaggatgcaggcaagagggatgtccagtttagacgggccctgacagcagcagcctcttccacatcaagtgaagtgtgattgttaacgatcattgcctgcacaaagtcatagttgcctttgaagtagtccacccaatacttcaccatgacatagcggggcaggattggggtgttcacattttgctgataagatggtgtgttaaaatctaaagcttgaagaactggataaattaaagcttgtagtttgagcttattttttaggctggcatcttgagtaaactagagaagaggaagcaaatacattatttcattttgcatgccttcttttataggaaccataccctgtagagtagc

SEQ ID NO: 2213 - DNA, 451 bp, Homo sapiens
  MAP TO AP000550.1; EXPRESSED IN BT474, SIGNAL =   3; EXPRESSED IN HELA, SIGNAL = 1.4; EXPRESSED IN PLACENTA, SIGNAL = 2.5; EXPRESSED IN HEART, SIGNAL = 0.85; EXPRESSED IN HBL100, SIGNAL = 2.4
aagtttcaccctcaaccacctattatttagaagtgaacacagaaatttagtttccttgtgctatctgttgacccctaaaatatgctgggagttttgggattttttttaaagtcaaatgcatggcataaagcaaaattacactactaaagaactgagtcaggccagacgctggcaacgtgaagacagcttctccttacccactaggttcatctttgcactgttaactcccaaagtattgcttctcggtgctgggtgtgtggcattcatattccccggcatcccgggcctgaagatctgtgatgtgcaatagggttgggttcccctggactctttctatgaagatcttccctccgcggacgcgctgggtgtagatggcataggggaaggaagagtccatggtgctgacgatctgcacctctcgctctggcgacgaaggcaggtaaatggacca

SEQ ID NO: 2214 - DNA, 464 bp, Homo sapiens
  MAP TO AC007848.11; EXPRESSED IN PLACENTA, SIGNAL = 2.6; EXPRESSED IN HBL100, SIGNAL = 1.4; EXPRESSED IN HEART, SIGNAL = 2.4; EXPRESSED IN LUNG, SIGNAL = 1.8; EXPRESSED IN BRAIN, SIGNAL = 2.1; EXPRESSED IN BONE MARROW, SIGNAL = 2.8; EXPRESSED IN ADULT LIVER, SIGNAL = 2.3; EXPRESSED IN FETAL LIVER, SIGNAL = 2.1; EXPRESSED IN BT474, SIGNAL = 1.4; EXPRESSED IN HELA, SIGNAL = 1.9
agcatgcttactttcccaggaggaaaggctggggcatccccagggaagaggattctggtctccatggtaaactgtggagggaatccacaaagaagaaagctgtgggaacacttgaggaagcccacctaaagctatgcagctacctggatcagaattacctgtggtgaacaagcagtgaggaatgcttttgtttactctagggaaatactgccttagtatcagttcagcaatagaaaacctgggtcagccagtccttcccacttgtcttcacaactctcaggtcatccagtttggtttcccaacaaacctcccagcatcagcctcttcatgctcaaaaggagaaagactgaaagggaaactgagtggccagactccggccctgacgcagccttgggaagagatgttgctgtggcccccacgcacaactgggactttaatgactgagaccagcctaaccctggatt

SEQ ID NO: 2215 - DNA, 479 bp, Homo sapiens
  MAP TO AC007898.1; EXPRESSED IN BT474, SIGNAL = 1.8; EXPRESSED IN HELA, SIGNAL = 1.7; EXPRESSED IN PLACENTA, SIGNAL = 2.3; EXPRESSED IN HBL100, SIGNAL = 1.9; EXPRESSED IN LUNG, SIGNAL = 1.8; EXPRESSED IN BRAIN, SIGNAL = 2.3; EXPRESSED IN HEART, SIGNAL =   2; EXPRESSED IN BONE MARROW, SIGNAL = 2.2; EXPRESSED IN ADULT LIVER, SIGNAL = 1.9; EXPRESSED IN FETAL LIVER, SIGNAL = 1.8
  unsure 117
  unsure 175
  unsure 268
atattcatggtggtccagggaatttcgtagaaaaaagagaggtctgtgctgattggattatgttcatgtctctcaatcttctgatcttgtcctagcacatttgggtgccggctgtgncccctgctcatcctcccccctcacctggcacggacgggtagcacacggcatgcagttnccatccatttctgttcgtgcacacaggccagaggagcctgcctctcacctgggagcccctcctagaagcaaaagctctgtgagattgcaaacnatttgggagaatagcatcgatacctacatgatgtttgtttcatactcggtcagttttattactccatacatggtgtttcccaacactttaaatccctttatatgatcagcaaagatcgtggttatgactacatggaggttgccactgctctgggtaaaggtcaagctctccttccatgcagcaagtgcaaacattagcctgctcccttctg

SEQ ID NO: 2216 - DNA, 472 bp, Homo sapiens
  MAP TO AC006205.7; EXPRESSED IN BONE MARROW, SIGNAL = 7.4; EXPRESSED IN FETAL LIVER, SIGNAL = 6.8; EXPRESSED IN ADULT LIVER, SIGNAL = 6.3; EXPRESSED IN BT474, SIGNAL = 4.5; EXPRESSED IN HELA, SIGNAL = 6.5; EXPRESSED IN HBL100, SIGNAL = 8.8; EXPRESSED IN BRAIN, SIGNAL = 5.7; EXPRESSED IN PLACENTA, SIGNAL =   9; EXPRESSED IN HEART, SIGNAL = 5.2; EXPRESSED IN LUNG, SIGNAL = 5.1
actgtgggacgctgaggtaggaggatcacttaagcccaggaggttgagactagcctgggcaacagggcaaaaccctgtctctacaaaaaataaaattagccaggcgtggtggtgcaggcctgtagttccagctactcaagaggctgaggtgggaggagcgcttgagcccaggaggttgaggctgcagtgaaccgtgagtgtgccactgcctccagcctggatgacagagtgagaccctgtctcaaaaaggaggaggaggagcagaaggaggaggaggaagaggatgaggagaaggaggaagaggaggaggaagtggaagaataagaggaagaaagaaaagaagaagaagaagcagcagcagcaacagcagcagcatcaccaacttatcagggaagggggcaaattatttatcaaataaattacaaatagcttaaataaaagtaaaaaagaaatgatagagggaaacttcctc

SEQ ID NO: 2217 - DNA, 464 bp, Homo sapiens
  MAP TO AC008012.8; EXPRESSED IN BT474, SIGNAL = 1.1; EXPRESSED IN HELA, SIGNAL = 2.3; EXPRESSED IN PLACENTA, SIGNAL = 4.1; EXPRESSED IN HBL100, SIGNAL = 1.5; EXPRESSED IN LUNG, SIGNAL = 1.6; EXPRESSED IN BRAIN, SIGNAL = 2.4; EXPRESSED IN BONE MARROW, SIGNAL = 2.4; EXPRESSED IN ADULT LIVER, SIGNAL = 2.4; EXPRESSED IN HEART, SIGNAL = 2.3; EXPRESSED IN FETAL LIVER, SIGNAL = 5.5
ccttcctgtctcctccttcctttcttcctgtctgacctttctccttcttccctttcttcctttcactagatagaagggatgctaagtcacttaagacaccgtgtcctcaagaagcttacagcccaattgagttggtaggaaaacacacagtaaccacagtaccagctagcatatactagaggtatacagtcagtgcagaaaaaagcatacacagagtgctatggaagtcaaaatagaaacattagcatacgttgggccaagagagatgttgagcctcttgaaagcagactgcttatccctgcctttctctggcactgagtgagtatcctctgaaccctcattattctcaacaggtgaagcacaaatcctcctggcagatgggaagaatgccacctgtgccagcaatggcaacaacttcagatacaaaggatctgaatgtcaggaggaagtcacagggtaggtga

SEQ ID NO: 2218 - DNA, 484 bp, Homo sapiens
  MAP TO AC006391.7; EXPRESSED IN FETAL LIVER, SIGNAL = 1.7; EXPRESSED IN ADULT LIVER, SIGNAL = 1.8; EXPRESSED IN BT474, SIGNAL = 1.1; EXPRESSED IN HELA, SIGNAL = 1.4; EXPRESSED IN PLACENTA, SIGNAL = 1.6; EXPRESSED IN HBL100, SIGNAL = 1.6; EXPRESSED IN BRAIN, SIGNAL = 2.2; EXPRESSED IN HEART, SIGNAL = 1.2; EXPRESSED IN BONE MARROW, SIGNAL = 3.1
catggaccctggtcaaactgttttttcgtaacagtagctttgacaggtcgaaaatgtcacaggagagaaacaatgttggaagatagaataatgcacccccctgccaaagataaccacaccctaatccctggaacctgccactgttaccattctccaggaaggctaatgtcgccgatcacaaaggtccttatagaagggaggcaggagagtcagagtcagagagggagatgggtaggtggaagcacagagagagagaaaagaagaataggaaggaaggaaggaagaagggaaggaaggaaggaaagaaggagaaggaggaggagaaggagaaggaggaggagaagaagaagaagaaaaagaaaaagaagaagaaggagaaggaagaagaagaagaagaaggaggaggaggaagaggaggaggaggggaagaagaagaaggaggggaagatgaaggagaaggaggggaaggggaaggagaaggaga

SEQ ID NO: 2219 - DNA, 468 bp, Homo sapiens
  MAP TO AC004834.2; EXPRESSED IN BT474, SIGNAL = 1.7; EXPRESSED IN HBL100, SIGNAL =   2; EXPRESSED IN HELA, SIGNAL =   1; EXPRESSED IN HEART, SIGNAL = 1.9; EXPRESSED IN LUNG, SIGNAL = 3.9; EXPRESSED IN BRAIN, SIGNAL = 1.1; EXPRESSED IN ADULT LIVER, SIGNAL = 1.2; EXPRESSED IN FETAL LIVER, SIGNAL = 1.1
cccaacttcctgtttccctcctttggtccatctttccaattgtccagaatctggactttcggtggttgagggcctcttctttatatagtccccaagcctcctgttccctggactgccagccaccccacattctcttatgcctttatgctagctgaagacatgcattgagttagccccctttaggccttcagactcaaccaatgatggtgtgccttgtatctcatttctcctcctcccagatcgctaccttgatttgctgttgcagccttttcaatgtctttacaagttcgctgttgttcttgttggcgtggtccagctggatttccatctcattcaggtccgtctccatcttcttcttgagccgaagtgcctctgcccggcccttggcctctgcctctaggctggcctgcaaggactcgattgcccgctggtggttcttcctgtaagtccaagcagagaagaccttgg

SEQ ID NO: 2220 - DNA, 466 bp, Homo sapiens
  MAP TO AC007878.2; EXPRESSED IN FETAL LIVER, SIGNAL = 1.5; EXPRESSED IN BT474, SIGNAL = 1.2; EXPRESSED IN HBL100, SIGNAL = 1.2; EXPRESSED IN HELA, SIGNAL = 2.1; EXPRESSED IN HEART, SIGNAL = 1.4; EXPRESSED IN PLACENTA, SIGNAL = 1.5; EXPRESSED IN LUNG, SIGNAL = 1.7; EXPRESSED IN BRAIN, SIGNAL = 1.4; EXPRESSED IN BONE MARROW, SIGNAL = 1.9; EXPRESSED IN ADULT LIVER, SIGNAL = 1.6
ctctctcagggatggtggaggaggtggaacaggagtcaagagaggcagaccagatacatttggtgtaactttacagaaatacatcataatttctgtctgatgtttttggtttttcatctctctagaaatgtttctatatggtaccaatcctcctttcaccatttgctttagtttcagtgcccacattataaaagggtccatgttgtaaaagaagtcaaaagcagtcttgaataatcagaactcttctgccaaattgtctaatgtcaatttgttttctggcactgctgcttcttatttgtccttattgtctggcactgatttggaagcacttatctccatcaaatcatcatcttttaattcctccgatgtggtatctatcttgaaaagattatgaatttctccagtatccatgtcttgaaaccctttaccccccatcttttttgccatgtccacagtatctttcatg

SEQ ID NO: 2221 - DNA, 467 bp, Homo sapiens
  MAP TO AC007922.1; EXPRESSED IN PLACENTA, SIGNAL = 5.5; EXPRESSED IN BONE MARROW, SIGNAL = 4.4; EXPRESSED IN LUNG, SIGNAL = 3.4; EXPRESSED IN FETAL LIVER, SIGNAL = 3.8; EXPRESSED IN ADULT LIVER, SIGNAL = 5.6; EXPRESSED IN BT474, SIGNAL = 6.1; EXPRESSED IN HBL100, SIGNAL =  16; EXPRESSED IN HELA, SIGNAL = 5.7; EXPRESSED IN HEART, SIGNAL = 4.1; EXPRESSED IN BRAIN, SIGNAL = 3.3
  unsure 432
  unsure 442
agaatcgtctcctccaagaagcaaatccttcaagttccagtttcacacctctcccatgacacctgcacttccagatcctggtacctattttgtaatgcagactagtctgatctgttaatctactagactaagctcaataagggcagggatcccatgtgtctcttcatcattatctccaagacacacagtaaacactcagacctgctgggtcaactgcaatgtcttcaagaagaaaaaaaaattatcatagtgtatctggaattggtgggttcttggtctcactgacttcaagaatgaagccgcggaccctcgcggtgagtgttacagctcttaaggcggcgcgtctggagttgtttgttcctcccggtgggctcgtggtctccctggcttcaggagtgaagctgcagaccttcgcagtgagtgttacagctncataaaagcnagtgtggacccaaagagtgagcagt

SEQ ID NO: 2222 - DNA, 484 bp, Homo sapiens
  MAP TO AC006452.2; EXPRESSED IN HBL100, SIGNAL = 1.1; EXPRESSED IN HEART, SIGNAL = 1.1; EXPRESSED IN PLACENTA, SIGNAL = 1.6; EXPRESSED IN BONE MARROW, SIGNAL = 1.1; EXPRESSED IN BRAIN, SIGNAL = 1.5; EXPRESSED IN ADULT LIVER, SIGNAL = 1.9; EXPRESSED IN BT474, SIGNAL = 3.3
gggaagggaagaaagaggtgcccactcctgcacccagcaggagagcagacggacaggaggattatctgccgtcctctacggtggagaggaggagtagtgatggggtgagaactcaggtcacagaggctaagaatggaatgaggccaggaacagagagcacagagaaggagaggaataaaggagcagtgaacgtcgggggacaggacccagagccggggcaagacctaagccagccagaacgggaagtggatcctagctggggccgaggccgagagccaagacttggcaagctacgctttcagaacgatcccctctccgtgctgaagcaggtcaagaaactcgagcaggctttgaaggatgggtcggcagggctggatccccagttaccagggacttgttactccccacactgccctcctgacaaggcagaggcagggtccacccttcctgagaacctgggaggcgggagtggctcagaagtcag

SEQ ID NO: 2223 - DNA, 455 bp, Homo sapiens
  MAP TO AC006977.3; EXPRESSED IN FETAL LIVER, SIGNAL = 1.1; EXPRESSED IN ADULT LIVER, SIGNAL = 1.6; EXPRESSED IN HBL100, SIGNAL = 0.97; EXPRESSED IN HELA, SIGNAL = 1.2; EXPRESSED IN HEART, SIGNAL =   1; EXPRESSED IN PLACENTA, SIGNAL = 2.3; EXPRESSED IN BRAIN, SIGNAL =   1
agggacattcagaccacagcaggggaaagcagggtacttgctgctttgcaagtgtgtccacatctaattaatagtacagttcttactcttggtgtgtccggtgatattaaaaattaatgtgccttatttagataagtaacataaaaatcacaaaatgtatgccttagatttatatgtatttataactagtctatttcctgaaaacagttgagacaccttgtaaaagttaccggtacgatagggccattccaacaaagctgtaaagtggtgataacacagtcataaagaagaggagatagctctgggagaaaaggtggcccagaaaccagctctgagcctcatggctgcaggcaaggtctgcaggttcctggtcctgattgcaggccatttgctgccttgagtggtggttacacaaggccagccctgggggtatcacccagaacacctagtacacg

SEQ ID NO: 2224 - DNA, 463 bp, Homo sapiens
  MAP TO AC009310.1; EXPRESSED IN PLACENTA, SIGNAL = 1.3; EXPRESSED IN BONE MARROW, SIGNAL =   1; EXPRESSED IN BRAIN, SIGNAL = 0.96; EXPRESSED IN ADULT LIVER, SIGNAL = 1.2; EXPRESSED IN FETAL LIVER, SIGNAL = 1.1; EXPRESSED IN HELA, SIGNAL = 0.95; EXPRESSED IN HEART, SIGNAL =   1
ggaaaatcacaatttcctagactgaaacaaccacagctggcagttgggaaaagcaatagaggtttttgattctaagttggcttaaggtccaaagcaatcccaaggaggttttgactctgaagtaattataattctggatgatttggaaagaattctaaacacatcccaagaataaggctaaattaaaaagctaccactgaaaataggtattatttacttgttttacacacactgaaatgtgctttctgtaaaagctgctccataagaatcatcagctgtattgcttactattgttcaggtggaggattctttttatactcctgggaagcagtttggtagaagaatcctgaatgcaatagcatccaagagggaaagtacccatctgtctgatgcagctgctatagttctagagttggtaagtgaggcaggcatcagaggggtgtggcaacacccagcttttgta

SEQ ID NO: 2225 - DNA, 470 bp, Homo sapiens
  MAP TO AC009413.1; EXPRESSED IN PLACENTA, SIGNAL = 4.9; EXPRESSED IN BONE MARROW, SIGNAL = 3.1; EXPRESSED IN LUNG, SIGNAL = 3.6; EXPRESSED IN BRAIN, SIGNAL = 2.3; EXPRESSED IN BT474, SIGNAL = 1.7; EXPRESSED IN FETAL LIVER, SIGNAL = 2.4; EXPRESSED IN HEART, SIGNAL = 3.2; EXPRESSED IN HELA, SIGNAL = 2.5; EXPRESSED IN HBL100, SIGNAL = 2.6; EXPRESSED IN ADULT LIVER, SIGNAL = 4.2
ttctggatacagtctgcaggtctttataaatatagtctaactctctcgttttacagacaagcaacaaactctgagaggaggtcaagtgacttcaaaggtcacacaagtaaagaattctaaactgggtttggaactcatgttttccagcatatgtctttttaaattatcttttgtctctttaatgctaaaaacccagaataagccttcacaaaaatatcctagcataaattcttaatggtgagggataatctttcttctcactccccatcagtgcacatagtgcgaatgagacagaagtgtgggatgaaacagatgaggaggatggagcagcacatgtgtgggtgaggcagaaacaaggcagaagggctttgaatgtggcagatccatcagatacacccctgaagcctgcagacaggatggtctctgggaggatgtgctcgaagaaaatgactggctctgaaagtgagtgg

SEQ ID NO: 2226 - DNA, 470 bp, Homo sapiens
  MAP TO AC009421.1; EXPRESSED IN BONE MARROW, SIGNAL = 1.5; EXPRESSED IN LUNG, SIGNAL = 1.4; EXPRESSED IN BT474, SIGNAL = 1.7; EXPRESSED IN ADULT LIVER, SIGNAL = 3.1; EXPRESSED IN HELA, SIGNAL = 3.3; EXPRESSED IN PLACENTA, SIGNAL = 2.9; EXPRESSED IN HBL100, SIGNAL = 1.6; EXPRESSED IN HEART, SIGNAL = 1.3; EXPRESSED IN BRAIN, SIGNAL = 1.3
  unsure 47
  unsure 81
  unsure 89
  unsure 122
  unsure 139
  unsure 175
  unsure 236
  unsure 244
  unsure 257
  unsure 407
ggcctccatttaaagtagaaacttgtggagatcaggtaattaatggnagttttagctcagatctgacttgcagtgggtccnagtgggtnccctgaattcatcctgtggtcatttccccagtngccagaatgcataattnggcatggacatatttagcagctggcagaacccccancattggccccctaactggtagagtgagggatattatggtgggaaaggcaaaatggaagctnattagagnctgcctctacctnagaaaaatggtaaataaaaaacaatattgcatctctggagggatggtggagattagtgccaccatcaaggacttaaaagatgcaggagtggtgattcccaccacatccccgttcaactctcctatttggcctgtgcagaagacagacggnctcttggagaatgacagtggattatcataagctaagccaggtggtgactccaattgcagctgt

SEQ ID NO: 2227 - DNA, 474 bp, Homo sapiens
  MAP TO AC009440.1; EXPRESSED IN HELA, SIGNAL = 1.5; EXPRESSED IN PLACENTA, SIGNAL = 2.1; EXPRESSED IN HBL100, SIGNAL = 1.3; EXPRESSED IN HEART, SIGNAL = 1.9; EXPRESSED IN BONE MARROW, SIGNAL = 2.2; EXPRESSED IN BRAIN, SIGNAL = 1.8; EXPRESSED IN LUNG, SIGNAL = 1.4; EXPRESSED IN ADULT LIVER, SIGNAL = 2.1; EXPRESSED IN BT474, SIGNAL = 1.1; EXPRESSED IN FETAL LIVER, SIGNAL =   2
tcctcttccttatccctccctaattcatattttcccacacatggttacattttttccctgctatacagaccacctagttttagtcagtcaggaagatggacgtgggactgatctcccacctccttggctgtagcacccaattaaagccttcttccttggaaatacccattgtctcagggattggctttgtgtggggtgagcagcagaactagactgaattcctggtgttttgttaacactgtatttgcattacagtgattgtctctacatacagatgagatacatgagacactgagaaatggataccactgaggtcatggccaggaggtggcagtgcaaagattcctacccaagcttcctcatctgtgaacagaacaggaaggcctcggtaaataggtacatgttgacaagcaacaacctactcaaaactcatctttttgtattaatgcatcatgtgactccctcgtttggact

SEQ ID NO: 2228 - DNA, 476 bp, Homo sapiens
  MAP TO AC009415.1; EXPRESSED IN LUNG, SIGNAL = 1.3; EXPRESSED IN BRAIN, SIGNAL = 1.2; EXPRESSED IN ADULT LIVER, SIGNAL = 1.6; EXPRESSED IN PLACENTA, SIGNAL = 1.5; EXPRESSED IN HBL100, SIGNAL = 0.99; EXPRESSED IN HELA, SIGNAL =   2; EXPRESSED IN BONE MARROW, SIGNAL = 1.5; EXPRESSED IN BT474, SIGNAL =   1; EXPRESSED IN FETAL LIVER, SIGNAL = 1.2; EXPRESSED IN HEART, SIGNAL = 1.1
agaaccctctcttggggtgcttgccaccacaggggtgcttgcatcaccacacccccagtgccaggtggctcagaacagagagatactctgtttgggaaaaagtaaggggaaagaacaggagtctttgcctggtaatccagagaattcttctggatcttatccaagatcatcaaggtggtaccaataaaaccacagtgttataaggcttggggcccaagtcccttcaatatctggaaaaccttcccaaaaaggacagggactaacacatccagaccgtaaaaaatgcaaaaaatacctacctcttcaatgctcagacaccaaagaacatctacaagcatcaacaccatccaggaaaacatgacttcaccaaataaactaaataaggcaccagagagcaatcctgaagaaacagagatatgtgatctttcagacagagaaatagctattttgaagaagctcaaagaaatccaagataa

SEQ ID NO: 2229 - DNA, 397 bp, Homo sapiens
  MAP TO AC009476.2; EXPRESSED IN FETAL LIVER, SIGNAL =  14; EXPRESSED IN ADULT LIVER, SIGNAL = 3.8; EXPRESSED IN HELA, SIGNAL = 4.1; EXPRESSED IN BONE MARROW, SIGNAL = 6.1; EXPRESSED IN LUNG, SIGNAL = 2.1; EXPRESSED IN BRAIN, SIGNAL = 7.5; EXPRESSED IN BT474, SIGNAL = 1.5; EXPRESSED IN PLACENTA, SIGNAL =   7; EXPRESSED IN HEART, SIGNAL = 3.2; EXPRESSED IN HBL100, SIGNAL = 2.8
tttctgaggacaatttcagtgtgataacctatcgttgaaaacacacatattgtcacatacaatccttcttcaaagtttgcatgagtggacacacacacacgcacacacacacacgcacgtacacacaggaagctccattactattctgcttgctctatcaaggataatttgttggaaatgtttatataactcatccttacagtatattgaaacaataatcctttcttgtagcctggagggtaaaaacacactggtggtgttagatttggtgttctctgaaggtggcattgttctttcattcagaaatctggaaaggatggttcttatacttgaaacacatgtgtcaggtaagaaggagaaaaaactcagttttagcatcagaaccttgagttctttt

SEQ ID NO: 2230 - DNA, 467 bp, Homo sapiens
  MAP TO AC010106.1; EXPRESSED IN FETAL LIVER, SIGNAL =   1; EXPRESSED IN HBL100, SIGNAL = 1.1; EXPRESSED IN HELA, SIGNAL = 1.5; EXPRESSED IN HEART, SIGNAL = 0.93; EXPRESSED IN BONE MARROW, SIGNAL = 1.6; EXPRESSED IN ADULT LIVER, SIGNAL = 1.9; EXPRESSED IN PLACENTA, SIGNAL = 1.9; EXPRESSED IN BRAIN, SIGNAL = 1.5
acttctgtcatttcatccaattcagcctggttaaaaagaccagtgtattagtcagggtttgttagagtgatagaattaataggatagatttatatataaaggggagtttatatcacagggcatggtaataagaagaggcactctaatgaatctcctgtattccatgcataatctttcttacctctgttgcagagtagtagactgatagaatcttgatagtctgagtcaatcatcccagccaacactgtacctcccttcttaggctgttggtgtaaaggtaggagaagtgcaaagtgtccaggtggcaatcttaatttccagtttaattgaatcattgctatgtttcctggtggcagcattcctccctctgaaactaagacctctaggccagcagaacataatgtcacagaaacaggaagcaaatatgttgttagtgggtcactaggggtgatggtgagtgttgccac

SEQ ID NO: 2231 - DNA, 469 bp, Homo sapiens
  MAP TO AC010879.1; EXPRESSED IN HELA, SIGNAL = 1.4; EXPRESSED IN HEART, SIGNAL = 0.95; EXPRESSED IN PLACENTA, SIGNAL = 0.97; EXPRESSED IN BONE MARROW, SIGNAL = 0.9; EXPRESSED IN ADULT LIVER, SIGNAL =   1; EXPRESSED IN FETAL LIVER, SIGNAL = 0.98
catcttggattactagcctccagaactgtgagaaataaatgtcagttttttacaacccacctcccaccccatcccagattatgttatttcatcatagcagcctgaatgacctaagacagaaattggtcctgagagtgtggtattgagataacagacacctacaaattcagaagcagctctggaattgggtaataagtagaatctgaaagagttttgaagtgtatggtcgacagagcctatgaagccatgagtagaacgtcgaaggtgattctaatgagagctcaggaaaaagataagggctgcagagaaaaccttaatcatcgtaaggaagacctatgcaactttgaacagaatgacactagaaatatggacagaaaactccatttatatgagccatcagaggcaaatgagaaatatgccattgcacaatgaaagaaaggtgatcattgctacaaatgtggacagcagt

SEQ ID NO: 2232 - DNA, 468 bp, Homo sapiens; identical to SEQ ID NO: 1153
  MAP TO AC010092.1; EXPRESSED IN PLACENTA, SIGNAL = 1.5; EXPRESSED IN BONE MARROW, SIGNAL = 1.5; EXPRESSED IN LUNG, SIGNAL = 1.1; EXPRESSED IN BRAIN, SIGNAL = 1.6; EXPRESSED IN FETAL LIVER, SIGNAL = 2.6; EXPRESSED IN BT474, SIGNAL = 1.2; EXPRESSED IN HEART, SIGNAL = 1.5; EXPRESSED IN HELA, SIGNAL = 1.4; EXPRESSED IN HBL100, SIGNAL = 1.1; EXPRESSED IN ADULT LIVER, SIGNAL = 1.5

SEQ ID NO: 2233 - DNA, 461 bp, Homo sapiens
  MAP TO AC010102.1; EXPRESSED IN BRAIN, SIGNAL = 2.9; EXPRESSED IN BONE MARROW, SIGNAL =   3; EXPRESSED IN LUNG, SIGNAL = 1.1; EXPRESSED IN BT474, SIGNAL = 2.1; EXPRESSED IN ADULT LIVER, SIGNAL = 2.3; EXPRESSED IN FETAL LIVER, SIGNAL =   2; EXPRESSED IN HELA, SIGNAL =   2; EXPRESSED IN PLACENTA, SIGNAL = 2.5; EXPRESSED IN HBL100, SIGNAL = 4.8; EXPRESSED IN HEART, SIGNAL = 2.3
gtttgtgcacctgccattgctgcccctgggctcctaacctttctgccaccatgttgaatagccttcaggggcttccatttcttggaggcacatcccaacatttcagaaccatgaacaggggagcatgcaatcagctgagcgtatatatgcgcacatatcctggctgccaggaaatggggaggtgatttatctgcaccctgtctcagggtagaactgcatactagacagtttccccgagctatgatggtattatcatgttggagagggagaggaggaggaaggagaaaggagaaggaggacaaagaggaggaggaggaagagaaggagaaaaggagaaggaggaagaaaaagaaggagaaggaggaggagaaaaggaaaaagagaagggggaagaaggagaaggagaaaaaggagggcaaggagaaagagaaagggaagaaggaggaggaggatggggagta

SEQ ID NO: 2234 - DNA, 431 bp, Homo sapiens
  MAP TO AC010898.1; EXPRESSED IN PLACENTA, SIGNAL = 1.2; EXPRESSED IN HEART, SIGNAL = 1.1; EXPRESSED IN ADULT LIVER, SIGNAL = 0.98
accccttgtcaacttgaacccacacatatctcctgagatcatacacaatctttgaataaggaaaataataaggtcacaagtatgcctaatataatacaactattcttcacacaactggaaatgcagaaatccccaacccaaataccataacgtaaagttaataatacttaagtgctaatgcaaagtcaataaatcttataacacataatgaaggaaaaaggaaataaagatattttcttagtatgagtgtataaacacaaaaaaatttttttaacaaaagaagaaggaaatacagttacagccctcgcttttgcagctgatcaagtggttgtacctggtattgatgactaccttcttctactaccctttctatattccctttggtttcagcaagcacctgagcatattttgagattggccagagtgagaca

SEQ ID NO: 2235 - DNA, 468 bp, Homo sapiens
  MAP TO AC010903.1; EXPRESSED IN ADULT LIVER, SIGNAL = 4.9; EXPRESSED IN BT474, SIGNAL = 1.8; EXPRESSED IN FETAL LIVER, SIGNAL = 1.6; EXPRESSED IN PLACENTA, SIGNAL = 5.3; EXPRESSED IN HELA, SIGNAL = 4.3; EXPRESSED IN HBL100, SIGNAL = 2.1; EXPRESSED IN HEART, SIGNAL = 1.9; EXPRESSED IN BONE MARROW, SIGNAL = 1.8; EXPRESSED IN LUNG, SIGNAL = 1.4; EXPRESSED IN BRAIN, SIGNAL = 1.8
gctggtattgatgactaccttcttctactacccattctgtattccctttacctttagcaagcacctcagcaggttatttttttttttttcctggtggagcaacccaaaccttcattcctgaagggtctgggccatttgtagtcctgcatggattgggcagttgtagttttccattgaccttaattacagggccctaatggatctcctgtattccatgcatactcttccttacctctgttgtagagtagtagactgatttcatcttgacagtccaggtcaatcaccccagccaacactgtaactctcttcttagcctgttgacttaaaggtatgaggagcccaaagtgtccaggtggcaatcttaacttccagtttaatggaatcgttgttgtacctcctggtggcagcattcctccctctggaactaagacatctacaccagcagaatgtaatgctgcaggaacatgg

SEQ ID NO: 2236 - DNA, 454 bp, Homo sapiens
  MAP TO AC010966.1; EXPRESSED IN HEART, SIGNAL = 4.6; EXPRESSED IN BRAIN, SIGNAL = 3.4; EXPRESSED IN BONE MARROW, SIGNAL = 3.3; EXPRESSED IN LUNG, SIGNAL = 2.7; EXPRESSED IN BT474, SIGNAL = 2.8; EXPRESSED IN ADULT LIVER, SIGNAL = 4.2; EXPRESSED IN FETAL LIVER, SIGNAL = 4.6; EXPRESSED IN HELA, SIGNAL = 4.2; EXPRESSED IN PLACENTA, SIGNAL = 4.9; EXPRESSED IN HBL100, SIGNAL = 3.9
  unsure 58
  unsure 356
  unsure 399
gtttcttctgttctggccccactaagtgctaattttgggatggaagagtatgggcagnttggcttcagaagaaatgcaagagaaatacaatctaaaccttttttttctttttaagatcacactcacaaatttggtgtcagttaatgagaggttggtgtacacacctcatccagagaacccagaaatgtgagtcatctcctgtgggattgacacattgaatgccacgggtgagggcagggcagaccctcctctctctcagggctggtcagccccttttcttcttgctcttttgcaggaccgtgctcacacaagaagccatcatcactgtgaaggggattagccttggtagttatttnggaaagtttaatggccaatacgatatcatccaatgcaaagaanggtatgtatctcaatcctaggagtcctgtgtgtgctctagttgttaagtgccaga

SEQ ID NO: 2237 - DNA, 494 bp, Homo sapiens
  MAP TO AL080313.13; EXPRESSED IN FETAL LIVER, SIGNAL = 1.2; EXPRESSED IN HEART, SIGNAL = 1.1; EXPRESSED IN BONE MARROW, SIGNAL = 0.95; EXPRESSED IN BRAIN, SIGNAL = 0.96
tgggacctgaacacacctgattctatatcatttcatgctcatgtttgtgccctgcccaggaatccccaaacccacctgcttcagtctttgctgagaatttacagtgacaatttatgggactctctttaggagaatgacaagttgcaggtgaactcttggaacaaatgtggattgtcttgtcttcatttggaatgtatgacaaactcatagggccatgtcagaatgcagagtgactgggggcttcaggaccccgtggggatgtggggggcattgtgtgtctgccttgttttgatccattctgctgctccagataatggcattggctgtaccagtggcccagatccttcacctgcagaagagcttcccagagaggagcaagccttcctgccgtcacctctggtgtcatcctataggacattaaaaccaactcaagattgtgttgaaaactgttttccttttgaggatgctaataagaacaagatcatatcaacggg

SEQ ID NO: 2238 - DNA, 493 bp, Homo sapiens
  MAP TO AL049691.17; EXPRESSED IN BRAIN, SIGNAL = 1.2; EXPRESSED IN BONE MARROW, SIGNAL = 1.3; EXPRESSED IN ADULT LIVER, SIGNAL = 1.3; EXPRESSED IN BT474, SIGNAL = 1.2; EXPRESSED IN FETAL LIVER, SIGNAL = 1.1; EXPRESSED IN PLACENTA, SIGNAL = 0.97; EXPRESSED IN HBL100, SIGNAL = 4.5; EXPRESSED IN HELA, SIGNAL = 1.1; EXPRESSED IN HEART, SIGNAL = 1.5
taccgtaagttgggtctggcctgtggtagctttgccttttcacagagagggctgagattctgagagggctatattttggcactcatatacagagggttggcatcctctactggtggtccgtcagtgacttgttcaacttcatgtgactttggtctccatgtctatcctcatggattctgatccatatgggcctttggcattgcttggaccacaggagatggacagaatacttcataggaattttcaaagtttatatggactcacttccaggtggagggacctgtgaattgcttctgggaatagcatcatcttccttgcctcctcttcctccttttttccttcttctccttgttctcctcttccatctccatccttctcctcctccttgtccttcccctcctccttctcctcctcttcaacatcatcatcatcatcatcatcatcatcatcatcatcacaacaaacacttacttgctgttcgctatgttcaagg

SEQ ID NO: 2239 - DNA, 486 bp, Homo sapiens
  MAP TO AC011289.1; EXPRESSED IN HEART, SIGNAL = 4.4e+02; EXPRESSED IN LUNG, SIGNAL =  44; EXPRESSED IN BRAIN, SIGNAL = 1.6e+02; EXPRESSED IN BT474, SIGNAL = 1.7e+02; EXPRESSED IN ADULT LIVER, SIGNAL = 2.5e+02; EXPRESSED IN PLACENTA, SIGNAL =  64; EXPRESSED IN HBL100, SIGNAL =  57; EXPRESSED IN BONE MARROW, SIGNAL =  90; EXPRESSED IN FETAL LIVER, SIGNAL = 1.2e+02; EXPRESSED IN HELA, SIGNAL =  92
tgttgaggttgaacaccaatgtctgtttcctcaaggttttgaaaatggtgcacagaagggcctgctttttgctgaaatcatgcacatggatagtgggaacacttgcattcttaacaatcacctggtatgacttaggaagtggcagcaacctgggagcaatctaggatgatgtcctgataggggtttgctttcctgagtagccactgcccaagtttgcttctctgtttgtgggaacttatttttcaggctgacttaaatagttaccaatttggagtaatattgctcctcttcagggatatttagccatgtctggggacatttttcattgtcaaaactggaagtggcagagtgggagtggtgctgctggcatttgttgggaacaagtgagggatgccacttaagataccacaaagcagaggattgccctccacaataatgttccagcccccgatgacaatattgtcaaggctgagaggacccagatag

SEQ ID NO: 2240 - DNA, 484 bp, Homo sapiens
  MAP TO AC011348.1; EXPRESSED IN BONE MARROW, SIGNAL = 1.2; EXPRESSED IN BRAIN, SIGNAL = 1.2; EXPRESSED IN FETAL LIVER, SIGNAL = 1.1; EXPRESSED IN ADULT LIVER, SIGNAL = 0.98; EXPRESSED IN HEART, SIGNAL =   1
attccctgagacagtgagccatagaccagctctgtaccaggacccggcccagctgccacgcgctagtgactgagcgcaggctgtgctttgcaaggggttgatagaatgtttcttggataaatattcctgccaaagttagtttttgagccatggctcgtaaatatacagtattccagggaaaaagtacagaatgtcctcctggggttgacaagcaaatagtttcataaataacccttttgacacgtgtaagatgttaacatttctgaggttttgggcaggggcaaatgtggatttgattgctcgattcagtctggagccacaactggacttggatgttatttcttgggggcccatggaaatgttttttttggcttgcgagcccttgtcctgcttgtcggccctgaggacaaaggcttcctcttggaagattctgggccagtgcagggtaccgcacaggtgaatccgaccagaccagcaatcaagg

SEQ ID NO: 2241 - DNA, 487 bp, Homo sapiens
  MAP TO AL121572.4; EXPRESSED IN FETAL LIVER, SIGNAL = 2.4; EXPRESSED IN HELA, SIGNAL = 2.3; EXPRESSED IN LUNG, SIGNAL = 5.8; EXPRESSED IN BRAIN, SIGNAL = 2.9; EXPRESSED IN BT474, SIGNAL = 2.1; EXPRESSED IN ADULT LIVER, SIGNAL = 2.3; EXPRESSED IN PLACENTA, SIGNAL = 3.5; EXPRESSED IN HEART, SIGNAL = 2.4; EXPRESSED IN HBL100, SIGNAL = 3.2; EXPRESSED IN BONE MARROW, SIGNAL = 2.5
tgcatgtagccatcaagctgctgatggtggttgcttcatgaaaatgggatttacgatgaagtgtttttgcttgtccttcacagatttgaatattctaagagatttctcaaaaagctgatattcataatttgagaagcaatcaagaacaaacgtgtactgaaacagttggtgcaaaatccttattgaccacagatggaattcagtaatttatatttcttcgaaacatagaaaaacggaatactgagatctggtggggggccggcggcagtctgggagcggcgcgccatgtacaccatcatcaacgggcccagcaagttggtcgcgcagcgccgcacaggtctcacgcagcagcaggtgaagggccagctccaggagctcctgaaaagccggcagcccgcgccgccgaccttgcagccccagcgggcgcagcccttcgcgcagccgctgggaccctggcccctgtcgagtgcagggccaaggcttgtgt

SEQ ID NO: 2242 - DNA, 399 bp, Homo sapiens
  MAP TO AC011343.1; EXPRESSED IN PLACENTA, SIGNAL = 1.1; EXPRESSED IN BONE MARROW, SIGNAL = 2.6; EXPRESSED IN FETAL LIVER, SIGNAL = 1.7; EXPRESSED IN ADULT LIVER, SIGNAL = 1.8; EXPRESSED IN HBL100, SIGNAL = 0.94; EXPRESSED IN HELA, SIGNAL = 1.2; EXPRESSED IN HEART, SIGNAL = 1.1; EXPRESSED IN BRAIN, SIGNAL = 1.8
ttatgcacccatgtttgctgcagcattatcctcaatgttgtggaagcaacctaaatgtcagatgagtgaataaagaaaatgtgatatatacactatatacacacaatggaatattagccttaaaaaggaaggaaattctgatgcatgctacaacatggatgaaccttgaggacattatgctaagttaaataagtcagtcacaaaaaggcaaatacaatatgatttcacttacatgagataagtagttgaattcatagaaacagagagtagaatggggctgggggaggcggaatggggagttgttgttcaatgggtctgcagtttcattcatgtaagatgaacaagttctacagatctgctgtacaaagaagtccatagagttaacaatgctgtaatgtg

SEQ ID NO: 2243 - DNA, 479 bp, Homo sapiens
  MAP TO AC011364.1; EXPRESSED IN BT474, SIGNAL = 1.2; EXPRESSED IN HBL100, SIGNAL = 1.1; EXPRESSED IN HEART, SIGNAL = 0.9
ttgacccatgagacaggtccggtttttttttttcttttaaattttttacaaacagtacaatgtctagtaaatctgaccaaatcagatacctctatttatttttttctaaaaccttgaactggaacaaaattagaccccacataatccttatttataatattactcaatgtgtgcaaatagtaatgatgttaactaacattcatagggcaatgctatgtgtattatctcatgtattcctcaaacacacctatgaagtaggtgctattttaattcctattttacaagcaaggaaaagttgacagctaaataacttttgccaaggtcacgcggccattagaaggcaaagtgaacattttaatcatttgaatccaggtccacttgattcccaagctggtgctctcagctctctggctctcctgtgttctcagcatcagcgacagctgcagtttattgggcatacattgtgaggcagtcacagg

SEQ ID NO: 2244 - DNA, 479 bp, Homo sapiens
  MAP TO AL078582.7; EXPRESSED IN PLACENTA, SIGNAL = 3.6; EXPRESSED IN BRAIN, SIGNAL = 3.5; EXPRESSED IN BT474, SIGNAL = 1.6; EXPRESSED IN FETAL LIVER, SIGNAL = 3.4; EXPRESSED IN ADULT LIVER, SIGNAL = 2.5; EXPRESSED IN HEART, SIGNAL = 3.5; EXPRESSED IN HELA, SIGNAL = 2.9; EXPRESSED IN HBL100, SIGNAL = 2.8; EXPRESSED IN LUNG, SIGNAL = 1.8; EXPRESSED IN BONE MARROW, SIGNAL = 5.5
cactatcagcatccccaaccagagaggtacattggttacagctgatgaatctacatcgacacgtcattatcacccaaagtgcatagtttgcattggcgttgggcattttagggcttttgacacatgtatgcactattgtaatatacagaataatttcactgccctaaaaatcctctgtgctcctcctattcattcctccctccaccccattcctggcaactactgatctttttactgtctccacagttttgccttctccagaatgtcatatacttggaatcataaggtttgtagccttttcagattggcttctttcactcagtgatatgcatttaaggttcttccatgtctttttatggcttgatagctcatttctttttatcattgaatactactactccattgtctggattatacacactttatttatacattcacctactgaaggatgtgttggttgcatccaagttttggcaatt

SEQ ID NO: 2245 - DNA, 471 bp, Homo sapiens
  MAP TO AL049794.13; EXPRESSED IN PLACENTA, SIGNAL = 1.4; EXPRESSED IN BONE MARROW, SIGNAL = 0.96; EXPRESSED IN BRAIN, SIGNAL = 1.2; EXPRESSED IN BT474, SIGNAL = 1.1; EXPRESSED IN FETAL LIVER, SIGNAL = 1.6; EXPRESSED IN HEART, SIGNAL = 1.2; EXPRESSED IN HELA, SIGNAL = 0.97; EXPRESSED IN HBL100, SIGNAL =   1; EXPRESSED IN LUNG, SIGNAL =   1; EXPRESSED IN ADULT LIVER, SIGNAL = 1.2
aagtgtcaagtacaagcacagagcaagtgtttcacgcatgttgaccttgttcattatctgaagtgtgggaaggacatccatccctctgctagagatgttcagcagaaagctgaaaatgtgggtttaggtctcaggtgatttgaggatcgacatttggaaatcttttgcacataaaccacaatttaaggatgttacgtgagaagaaaagggagccagggattggacattgggatatgcccctctttaggatttcagggagaagattggcttgcagtccgtaaaggagaaccagcacagcaaatggtcatggcaggaaagggagaagagcatcctgaaggaggtggtgggggttagtgtcaaatattgccaggatgatgagaataagatggtgtccttggtcttgaagacaaggctagttgataaccttcccaacagtacttttaaggagagtcaatgattcagaagttggca

SEQ ID NO: 2246 - DNA, 471 bp, Homo sapiens
  MAP TO AL109953.6; EXPRESSED IN BONE MARROW, SIGNAL = 1.9; EXPRESSED IN LUNG, SIGNAL = 1.5; EXPRESSED IN ADULT LIVER, SIGNAL = 2.5; EXPRESSED IN BT474, SIGNAL = 3.5; EXPRESSED IN FETAL LIVER, SIGNAL =  21; EXPRESSED IN PLACENTA, SIGNAL = 2.2; EXPRESSED IN HBL100, SIGNAL = 3.7; EXPRESSED IN HELA, SIGNAL = 3.4; EXPRESSED IN HEART, SIGNAL =   2; EXPRESSED IN BRAIN, SIGNAL = 2.4
taaaaggaaagcagatgggggtcaatttgagtcatgcaggttgtaagaaatgtgagttttcacttctgtggtcctggactttatccttgaccaccaggtaacaatgattgtccccttgagctcaccaccacctccaggactgcctgtgtcacatgagccacccagaccccaaggactgttaggctgtggccctccttaatcttttcctcctgacagggtcatggccaggatgctggtgcagaccatccacacaggcacccagaagatccaagacattgaggccaagcagaacattgaagagaagatggtagctcccagctacaccagctttagcatttaccgtcccattacaaaagaaaaaagctctctgaggtgggcaggaaagaaatttgaggagatcccaactgcacacattagagcatcctacaacaacacacagatccaggtaatctctgccactaatcagcccct

SEQ ID NO: 2247 - DNA, 472 bp, Homo sapiens
  MAP TO AL117192.1; EXPRESSED IN HEART, SIGNAL = 5.1; EXPRESSED IN LUNG, SIGNAL = 4.8; EXPRESSED IN BRAIN, SIGNAL = 5.1; EXPRESSED IN ADULT LIVER, SIGNAL = 4.1; EXPRESSED IN PLACENTA, SIGNAL = 6.8; EXPRESSED IN HBL100, SIGNAL = 5.8; EXPRESSED IN HELA, SIGNAL = 6.3; EXPRESSED IN BONE MARROW, SIGNAL = 6.4; EXPRESSED IN BT474, SIGNAL = 4.2; EXPRESSED IN FETAL LIVER, SIGNAL = 4.5
tgctgctagtgttttgctatcacatacagtttggtaattaacagggcagagccggaaacatattgcacacttgagcctgtctgtggggtgatgaggtgggatcatggagccagggttttcaggaggaacagtcacttgacaaccaatgctctgatttgtgttccctcctcctgtctcccatgtcccttccttctccctcttcccctttggcttcatcattcaatttctgaactttctggttatggcaggactttaggaacttgcttcttggggaatcgaggttgttggtgcctttgctctgcacgagtttcccagtgaaaaatgagccccgacaggttgttttattttcccgagaggctgtggtggtgcatgtgggattccaccaccagaggggatgcagttttccgctgccacctcctggtccttccattgcactgaggccctggaggctggagaccaggccttccagctt

SEQ ID NO: 2248 - DNA, 457 bp, Homo sapiens
  MAP TO AL035662.21; EXPRESSED IN HBL100, SIGNAL = 7.1; EXPRESSED IN HEART, SIGNAL = 3.9; EXPRESSED IN LUNG, SIGNAL = 3.3; EXPRESSED IN FETAL LIVER, SIGNAL = 4.1; EXPRESSED IN ADULT LIVER, SIGNAL = 5.9; EXPRESSED IN PLACENTA, SIGNAL = 6.4; EXPRESSED IN HELA, SIGNAL = 7.2; EXPRESSED IN BRAIN, SIGNAL = 6.4; EXPRESSED IN BONE MARROW, SIGNAL = 8.1; EXPRESSED IN BT474, SIGNAL = 4.9
gtggggacatcatggttttgctggcgaagatctacctccttggacttgtctggcccttttaggatcaggtcttgagaaagcagaagtcttggagtttagttgccccgacccatgtctagaaagcatcccacgttttagtttctcctttgcaatatggggatagaaattgtaccaaaccacaggatttctgcaaggatacttaaaataatgaatgtagatgctccacgtgcatgctgtgtgctctgtggtgagggggtggggatggcagtggtgatgacagtgttgttgggggccagggatgtgatggtaatattggtgattatgatgggggtaatagtagtaataggtgggctggtgattgtggttgtggtgactatggaagagatggtggtggtattggtgatggtgatattggtgatggtgatggggttggtggtggtggtgagggtagtgatgg

SEQ ID NO: 2249 - DNA, 453 bp, Homo sapiens
  MAP TO AL121766.1; EXPRESSED IN BONE MARROW, SIGNAL = 1.3; EXPRESSED IN LUNG, SIGNAL = 4.8; EXPRESSED IN FETAL LIVER, SIGNAL =   1; EXPRESSED IN ADULT LIVER, SIGNAL = 1.6; EXPRESSED IN HBL100, SIGNAL = 0.92; EXPRESSED IN PLACENTA, SIGNAL = 1.1; EXPRESSED IN HEART, SIGNAL = 1.1; EXPRESSED IN BRAIN, SIGNAL = 1.1
gaagtttatttgactcacagttctggaggctaggaagttcaagagcctgatgctgggaccttctttctgcttcattccatggtgagaggtggaagggcaacagagcacaagagcaagagggagcaagaaagggcttatctcacttttataacaaatccactcttgagataatgtacccatgtccatgataacaacattaatcgattcatgggggcagagccctcattaccgcatcacctcttaaagggaggacctacctctcaccactgttgcattagtcattaagttcccaacacatgaactatggggaacacattcaaaccataggaggcaacttctgcacagagtccatgatgggaagaatgccagcagaaacatccaacttccaggggtaacagtggtggattcaaaggaagggtccagtactttgtatgtgtggagtccagctgtgag

SEQ ID NO: 2250 - DNA, 457 bp, Homo sapiens
  MAP TO AF191252.1; EXPRESSED IN PLACENTA, SIGNAL = 3.3; EXPRESSED IN BONE MARROW, SIGNAL = 3.1; EXPRESSED IN BRAIN, SIGNAL = 1.8; EXPRESSED IN FETAL LIVER, SIGNAL = 2.3; EXPRESSED IN ADULT LIVER, SIGNAL = 2.5; EXPRESSED IN HEART, SIGNAL = 2.7; EXPRESSED IN HELA, SIGNAL =   2; EXPRESSED IN HBL100, SIGNAL =   2; EXPRESSED IN LUNG, SIGNAL = 2.2
gctgcctggctttaaaagagcagcttgttactgtcatcgtccatttccccctggagaaaggcttttgtggtcggtctgcatggcagtcacaccctgggtggtccatgaggcctcagatgaagtggcccgaggccactctgctctaggcccacagacaaggcgggaatagcagttgcaggctagaaaaggaagggccaaccagacattcacagagatgcaaccagagcaacacacagctgagtctcttaagtcttcagtcctgtgtaagttgaagcaagacatcagaaatctctcacctgagtaattccacacatgcacccactgctgtccaatgcagtgcttgctcagcagggagcacctcttggccaagcgtattggcagcccttctaccgtgaccagcgtcagggacgtctctaggcgccttttcagaatagctggcaacatagggagacccagt

SEQ ID NO: 2251 - DNA, 456 bp, Homo sapiens
  MAP TO Z98200.8; EXPRESSED IN ADULT LIVER, SIGNAL = 1.8; EXPRESSED IN BT474, SIGNAL = 1.1; EXPRESSED IN PLACENTA, SIGNAL = 1.5; EXPRESSED IN HELA, SIGNAL = 1.6; EXPRESSED IN HEART, SIGNAL = 1.1; EXPRESSED IN BONE MARROW, SIGNAL = 1.6; EXPRESSED IN LUNG, SIGNAL = 0.99; EXPRESSED IN BRAIN, SIGNAL = 1.3
tagaggatcatggtggacgggaggcgggactagattgcaactaccacgcagacagacagagcagtatgtggagactcgcactgtaaccttttgctccagaactactgcaggaataaaccaggaaagctgagaaaacccacagactctctgaagaaagcggatgactcctgtaggacactggagacaacccaaatactgtgaatgcccaagctgtggtagtgggaaaagagaactgtccacccctgaacacataccctcactggggaacctgaaggtctggatcacaggagaatattctgaccttacctggagctgagtcaatttagagagcagagcaaaatacaggggtaaaggaagcagcaggaaaagccctgtgggctctctgggtcccctgggtacccatttctgccttgtctcacaggggtccttgaggagggctgccagagaaaagaccac

SEQ ID NO: 2252 - DNA, 420 bp, Homo sapiens
  MAP TO AL035448.28; EXPRESSED IN LUNG, SIGNAL = 1.3; EXPRESSED IN BRAIN, SIGNAL = 1.2; EXPRESSED IN BT474, SIGNAL = 1.2; EXPRESSED IN FETAL LIVER, SIGNAL = 0.88; EXPRESSED IN PLACENTA, SIGNAL = 1.2; EXPRESSED IN HELA, SIGNAL = 3.9; EXPRESSED IN HBL100, SIGNAL = 2.1; EXPRESSED IN HEART, SIGNAL = 0.89
cactatacatgccacttgctcccaaattctacgtcaaggtgcgattataaatgctgcataattccatatgctttccacggaaagctaaagtgttcttttccgaaaacatttacaaggtaagcagcaccctctttcttcatcagtcttcttttctgttatgcagaacttaaatttaactgtgaaaccagcagggtacaaatacagcataaacaaactctttccaaacacacgaatgatgcttacttcagcatagcgagaaaagcagcaggttcgacatctggtatacggatttcatctttgtcctctgcaagttctccgtaaaacatcgcatggaacacagagctcccaacagctaaaacatactgtgtagaaagggaaatcttatttcatacactaaattgaaggcatttccagcaaatc

SEQ ID NO: 2253 - DNA, 493 bp, Homo sapiens
  MAP TO Z97832.10; EXPRESSED IN BONE MARROW, SIGNAL =   4; EXPRESSED IN FETAL LIVER, SIGNAL = 3.8; EXPRESSED IN HELA, SIGNAL = 4.5; EXPRESSED IN BRAIN, SIGNAL =   4; EXPRESSED IN LUNG, SIGNAL = 2.4; EXPRESSED IN BT474, SIGNAL = 3.1; EXPRESSED IN ADULT LIVER, SIGNAL = 4.3; EXPRESSED IN PLACENTA, SIGNAL = 4.3; EXPRESSED IN HEART, SIGNAL = 4.2; EXPRESSED IN HBL100, SIGNAL = 3.3
tattgcctctttctggaccccagatctcaggtccccttcaccttgcccttaagacaggaaggagtgggactggaggttgtggacggggagagaaaacctgagttggggttggggctccaggatcctctcccaggtcttttccctggctccataacattcggtcctctggccccctcaacgctctgtcccctgtttccctctgcccaggctctgggagccagatagagcactccctggtgttggtgctggcaacaccacctgctgcagctaccaggccttccttctcctgctccaggtggaatacctgctgaaaaaggtactcagcagcatgagcttggaggtgagcttgggtgagctggaggagcttctggcccaggaggcccaggtggcccagaccaccggggggctcagcgtctggcagttcctggagctcttcaattcgggccgctgcctgcggggcgtgggccgggacaccctcagcatggccatccac

SEQ ID NO: 2254 - DNA, 492 bp, Homo sapiens
  MAP TO AL049713.19; EXPRESSED IN HBL100, SIGNAL = 2.3; EXPRESSED IN HEART, SIGNAL = 2.5; EXPRESSED IN LUNG, SIGNAL = 3.4; EXPRESSED IN FETAL LIVER, SIGNAL = 2.1; EXPRESSED IN ADULT LIVER, SIGNAL = 2.5; EXPRESSED IN PLACENTA, SIGNAL = 2.7; EXPRESSED IN HELA, SIGNAL = 3.2; EXPRESSED IN BRAIN, SIGNAL = 1.9; EXPRESSED IN BONE MARROW, SIGNAL = 2.1; EXPRESSED IN BT474, SIGNAL = 2.3
aaaagccaagaaaaagcagaactacttaacctaaaacatagacctttcctataggcaagaaaaatttaaaaaataagtccttaagatacctacctatacattttgtcctgaaaatgtacttgcagacctgctttaagtgaaaaaagcttaaaatgtgggctatagctggaaaaatagaagaaagtaataattatgaatctaaattgtaaaactttacctgttttcttctttttatcagaagtagcatccaaagtagttaagggagtagagacgcttttataagcatcttgactatatccaggatcatcttcatcagaagaaaatgaagataaatgttccaagtttttaagttcattatcaactttatctgatggactgttaccgccagtttcagacactaaaggtgtgggtgttgtagatgaaggcttgggaagtggtgggggacaaaatgtacgaaccatctgggtccctggccgtctagtcctgttaggc

SEQ ID NO: 2255 - DNA, 491 bp, Homo sapiens
  MAP TO AC005948.6; EXPRESSED IN BONE MARROW, SIGNAL = 7.8; EXPRESSED IN HBL100, SIGNAL =  31; EXPRESSED IN HELA, SIGNAL =  11; EXPRESSED IN HEART, SIGNAL = 5.1; EXPRESSED IN LUNG, SIGNAL = 5.4; EXPRESSED IN BRAIN, SIGNAL = 6.7; EXPRESSED IN BT474, SIGNAL =  15; EXPRESSED IN ADULT LIVER, SIGNAL =  13; EXPRESSED IN FETAL LIVER, SIGNAL = 4.1; EXPRESSED IN PLACENTA, SIGNAL =  11
gctctaccaatcagcaggatgtgggtggggccagataagagaataaaagcaggctgccggagctagcagtggcaacccgctggggtccccttccacactgtggaagctttgttctttcgctctttgcaataaatcttgctactgctcactctttgggtccacactgcttttacgagctgtaacttaccgtgaaggtctgcagcttcactcctgaagccagcgagaccacaagcccaccgggaggaaagaacaactctagatgcgcggccttaagagctgtaatactcacctggaaggtctgcagcttcactcctgagccagcgagaccacgaaccccaccagaaggaagaaactccgaacacatccgaacatcagaaggaacaaactccagacgcgccatcttaagagctgtaacactcacggcgagggtccacggcttcattcttgaagtcagtgagaccaagaacccaccaattccggacacaatgtga

SEQ ID NO: 2256 - DNA, 470 bp, Homo sapiens
  MAP TO AL096678.8; EXPRESSED IN BRAIN, SIGNAL = 2.3; EXPRESSED IN BONE MARROW, SIGNAL = 1.4; EXPRESSED IN LUNG, SIGNAL = 1.5; EXPRESSED IN BT474, SIGNAL = 3.6; EXPRESSED IN FETAL LIVER, SIGNAL = 1.8; EXPRESSED IN ADULT LIVER, SIGNAL = 1.9; EXPRESSED IN HBL100, SIGNAL = 3.8; EXPRESSED IN HELA, SIGNAL = 3.6; EXPRESSED IN PLACENTA, SIGNAL =   3; EXPRESSED IN HEART, SIGNAL = 2.2
tctggtccaactctcccttgcataacacgtgggagcgcaggtaaaggagagcattcatcagcagctgctcccgagtgggacaggctttctggcccttgccttccagctcctttcctcctgagcgcttgaggattagcttcccaaggcctcgtagaacctcctcagacttcaccgagcacaaagtgtctgcatgagcatagtaagtcgggaaggtggggcccaccgatgggaaagccagcaaggctgtggccagggtccccagcctgtctgcaccaaccatactgctgtggagtgaggtgtggagctcagaggccaccagcctcatgccatgttgtaactgcaatatggatgcctgcagtgggctcacggcatctggatagaaggtgtactcctctgacagccgcttccggaactggtggtgtgactgctgccaagaggcctcctcctttagaaggctctgggctacttgg

SEQ ID NO: 2257 - DNA, 480 bp, Homo sapiens
  MAP TO AC005095.2; EXPRESSED IN PLACENTA, SIGNAL = 1.9; EXPRESSED IN BRAIN, SIGNAL = 1.1; EXPRESSED IN FETAL LIVER, SIGNAL =   1; EXPRESSED IN HEART, SIGNAL = 1.6; EXPRESSED IN HELA, SIGNAL = 2.3; EXPRESSED IN HBL100, SIGNAL = 2.2; EXPRESSED IN LUNG, SIGNAL = 1.2; EXPRESSED IN BONE MARROW, SIGNAL = 0.93; EXPRESSED IN ADULT LIVER, SIGNAL = 0.99; EXPRESSED IN BT474, SIGNAL = 4.9
cctgatgtgctttattacatatctgagttttttccaagttaaaatagatttaaaaaagaaataaactttccttatagtgcaaataggctaaaaaaaattgagttaaacttaatgggagaaagctcaacctcgtggcaaacacaggctaaaatatgctgaactggcttacaccaagaatttttatttccagtataagaaaatctatatttagcttatacaaattatttttgtatttaaaaaataaagtgattacttactatcataggaagtttacgactatccagatacagactcgtgtagccaacataaagcagaagggcagcaatgcagtacaggaacacaaagactgcaaaggtaacatagaattgtgcagaagaagagtaatcgcctatgaggacgtaatctttccaatttacatcacatatgtttacacctggaggtggctgaaatgatgcctcattcaacctattaaaataaatg

SEQ ID NO: 2258 - DNA, 469 bp, Homo sapiens
  MAP TO AL008723.8; EXPRESSED IN PLACENTA, SIGNAL = 1.8; EXPRESSED IN BRAIN, SIGNAL = 1.8; EXPRESSED IN BT474, SIGNAL =   3; EXPRESSED IN FETAL LIVER, SIGNAL = 3.6; EXPRESSED IN HEART, SIGNAL = 2.2; EXPRESSED IN HELA, SIGNAL = 3.2; EXPRESSED IN HBL100, SIGNAL = 3.7; EXPRESSED IN LUNG, SIGNAL = 1.5; EXPRESSED IN BONE MARROW, SIGNAL = 2.2; EXPRESSED IN ADULT LIVER, SIGNAL = 1.1
gcgttcctaagtctacccacccaagtaattttcttaccctgttttttgtttttttggagtgagggcttatttggcctccccaggacggactggagcatcagtagtgcctgagttcatcaaaggacagatgctcaagacaccttgatcaccattaggtggaactgaaggagccaaaaatgggcgcaatggctcctcagcagatacgctcctgaatgtatagacatgggaaccactttcagcatcaaaaaaggaaacgttctgcatgcccatatccagaaaaatccccactcgctgtaacttgcggtctacgaagaggaaagtcagcggcaccgtggtggcagagaggcggcctccatccctcaaactcacagtccagaatccaagctctgtggtcagctggatcctccctttgcggtgaacagattctctgcagactcccaggtcccattctgtgcttgttcccacgtcc

SEQ ID NO: 2259 - DNA, 476 bp, Homo sapiens
  MAP TO AL096700.6; EXPRESSED IN BRAIN, SIGNAL = 1.9; EXPRESSED IN BONE MARROW, SIGNAL = 1.9; EXPRESSED IN LUNG, SIGNAL = 0.94; EXPRESSED IN ADULT LIVER, SIGNAL = 1.8; EXPRESSED IN BT474, SIGNAL = 1.1; EXPRESSED IN FETAL LIVER, SIGNAL = 1.9; EXPRESSED IN HBL100, SIGNAL = 1.2; EXPRESSED IN PLACENTA, SIGNAL = 1.8; EXPRESSED IN HELA, SIGNAL = 1.8; EXPRESSED IN HEART, SIGNAL = 1.9
gtcccatagtccacaaccccgtccccatttcttcactgtttgctcattctggctttagaataagttcaggatcccttggtagttgaaagtgagatattgtttcttacatttatgatcttactcttccatatccttcagtatcttcatgattaggcagtttagtgagtttctaactggggctatttaatcagtgtgggttccccaacccttgccttaggtgggtcttaaaatgaacactcacaaccttctcctatattcttttaggcctgatctccgtggaagaatttcgtgccatgtggaaactttttagttctcactacaatgttcacattgatgattcccaagtcaataagcttgccaacataatggacttgaacaaagatggaagcattgactttaatgagtttttaaaggctttctatgtagtgcatagatatgaagacttgatgaaacctgatgtcaccaaccttggctaa

SEQ ID NO: 2260 - DNA, 480 bp, Homo sapiens
  MAP TO AC011506.1; EXPRESSED IN HELA, SIGNAL = 8.6; EXPRESSED IN PLACENTA, SIGNAL = 7.3; EXPRESSED IN HBL100, SIGNAL = 6.1; EXPRESSED IN HEART, SIGNAL = 7.1; EXPRESSED IN BRAIN, SIGNAL = 6.4; EXPRESSED IN BONE MARROW, SIGNAL = 7.5; EXPRESSED IN LUNG, SIGNAL = 7.5; EXPRESSED IN BT474, SIGNAL = 4.2; EXPRESSED IN ADULT LIVER, SIGNAL = 7.6; EXPRESSED IN FETAL LIVER, SIGNAL = 7.6
aaatacctcccattaggccccacctcccaacactgctgcatttgggattaagtttccaacacatgctgtttggggtacacactcaaaccataacacatacacatttgacccttgaacaatgtgagagttaggggcaccaacctccagtgcagttgaaaattcacatataacttttgacttccccaaaacttaactacgaatagcctactgttgaccagaagacttactaataacataaacagtagattaacatatattttgtatgttacatatattacatgctgattcttacaataagggaagctagagaaaagaaaatgttattaagaaagagaaaatatgtttactcttcattaagtggaagtggatcattatcaaggtcttcatccttgtcatcttcacaatgagtaggctgaccagaagaaggaaggggaggggttggtctttctgtctcaggggtggcagaggcagaagaaaatg

SEQ ID NO: 2261 - DNA, 470 bp, Homo sapiens
  MAP TO AC010724.1; EXPRESSED IN BONE MARROW, SIGNAL = 1.4; EXPRESSED IN LUNG, SIGNAL = 1.6; EXPRESSED IN BRAIN, SIGNAL = 1.9; EXPRESSED IN ADULT LIVER, SIGNAL = 1.5; EXPRESSED IN BT474, SIGNAL = 4.1; EXPRESSED IN FETAL LIVER, SIGNAL = 1.3; EXPRESSED IN PLACENTA, SIGNAL = 1.9; EXPRESSED IN HELA, SIGNAL = 4.5; EXPRESSED IN HBL100, SIGNAL = 3.4; EXPRESSED IN HEART, SIGNAL = 1.3
aggaggacatggctcagatgctggggcccctcagacggcctggcagctccccccagcggtgccctagcctctcactccctatggtgtctgtctgtcctgagaggtggatgaattgaagctctagtttctctacccgctccttcaggtccaccttctccttccataaagtcgctgtggagccaaaataatggggtcacatgtcaggagtcacctgccttgtcctgcccccccgccccccttgttggcccatgccaggacctactcacctgcagcttctccatggccccctgcagggcccggtgggtctccccaaacacagactcacccccactctctggggctggggccgctacctctggctttttctgggacgaggccactgggtgagccaggggctggcagcacaccctttgttcctcctgggcattggctccagcggagttgaaaaatgccacctgaagacaagaggt

SEQ ID NO: 2262 - DNA, 478 bp, Homo sapiens
  MAP TO AL034423.15; EXPRESSED IN PLACENTA, SIGNAL =   3; EXPRESSED IN HBL100, SIGNAL = 4.5; EXPRESSED IN HELA, SIGNAL = 7.3; EXPRESSED IN HEART, SIGNAL = 1.3; EXPRESSED IN BRAIN, SIGNAL = 2.3; EXPRESSED IN BONE MARROW, SIGNAL = 2.1; EXPRESSED IN LUNG, SIGNAL = 3.7; EXPRESSED IN ADULT LIVER, SIGNAL = 2.3; EXPRESSED IN BT474, SIGNAL = 7.7; EXPRESSED IN FETAL LIVER, SIGNAL = 1.6
tgaagagccaagtagggctgggttgagtctcacccaagtgtcagtaccaccgtttccttatcccagatagtaatggttcagggcacaaaagggaaaggcaggctgactggagggagggactctagcaggtaggtattccgcatgtaaggtattaggattagcagcaggttcagcttaaaaagtacatcttactccagtttgcaccttagcttaaccccggcatatagctattttgtttgagagtctgagagtaatttgcttttgtttgccttgttgtaggtggacccaagagccatatcagtgctagcaaaatggcagaattcatatagcatcaaagttgtcctgcaagagcttcggcgcctaatgatgtctaaagaaaatatgaaactccctcagccgcccgaaggacagtgttacagcaattaatcaaaaagaaaaaccacaggcccttccccttccccccaattcgatttaatca

SEQ ID NO: 2263 - DNA, 469 bp, Homo sapiens
  MAP TO AL035685.13; EXPRESSED IN FETAL LIVER, SIGNAL = 3.1; EXPRESSED IN HEART, SIGNAL = 1.2; EXPRESSED IN BRAIN, SIGNAL = 1.5; EXPRESSED IN BONE MARROW, SIGNAL = 1.1; EXPRESSED IN LUNG, SIGNAL = 2.6; EXPRESSED IN BT474, SIGNAL =   1; EXPRESSED IN ADULT LIVER, SIGNAL = 2.7
aaagtctctcctccaaggcagggcagttcagatgctctgatctcgtgtgcttccatgggctcctccccctggcaacacacggacgtcaggggagatgtggttctcaagtttgcacttttcctgaccactggggccttttccagtcaatgcttctgtggagtaaatacagttctgccttaagaacttaggggaggtgggtaaaggggagctttcaaagtggtttttctccgatcttgtccccgtgctgaacttcggactggtgctcccagggaggcttttgggggggctggagtccacactgtagagcagctgtccctcatcatctgtgtctgcgtcaatgtactggtggacacccgcctcaaagttgaacgctattgctgtgtgtttctcaggagaccgggggggtgtcttagcacttgctgtggtgtagatggaggactctgggctcagcacagccttgtccaaaagc

SEQ ID NO: 2264 - DNA, 467 bp, Homo sapiens
  MAP TO NM_006894.1; EXPRESSED IN BONE MARROW, SIGNAL = 1.6; EXPRESSED IN HELA, SIGNAL = 1.8; EXPRESSED IN LUNG, SIGNAL = 1.2; EXPRESSED IN BRAIN, SIGNAL = 1.4; EXPRESSED IN BT474, SIGNAL = 1.2; EXPRESSED IN ADULT LIVER, SIGNAL =   7; EXPRESSED IN FETAL LIVER, SIGNAL = 1.6; EXPRESSED IN PLACENTA, SIGNAL = 2.3; EXPRESSED IN HEART, SIGNAL =   2; EXPRESSED IN HBL100, SIGNAL =   1
tacttcccaatgttgcctcccatcaattttgttcttcagccatattggagatactctatgcctcagaaaaaaaaaatcttgggtcattttttccttccttatcaatttatatatggaccaataaaacaagagggaaatattacacttccaataattgtctctgttttccatacagagtcctgaggaaagagcctgtatttaacgatgagctcccagcaagcattctgtgtggcattgtgtccgtaaagcctaacgtgaaggaattcacagagacctcggccatttttgaggatgggaccatatttgagggcattgactgtgtaatctttgcaacagggtatagttttgcctaccccttccttgatgagtctatcatcaaaagcagaaacaatgagatcattttatttaaaggagtatttcctcctctacttgagaagtcaaccatagcagtgattggctttgtccag

SEQ ID NO: 2265 - DNA, 467 bp, Homo sapiens
  MAP TO AL033383.24; EXPRESSED IN PLACENTA, SIGNAL = 1.1; EXPRESSED IN HELA, SIGNAL = 3.2; EXPRESSED IN HBL100, SIGNAL = 2.6; EXPRESSED IN HEART, SIGNAL = 1.5; EXPRESSED IN ADULT LIVER, SIGNAL = 2.4; EXPRESSED IN BT474, SIGNAL = 6.4; EXPRESSED IN FETAL LIVER, SIGNAL = 2.4
taacatgcccaaaccaggtgtatttgacttgatcaacaaggccaaatgggacgcatggaatgcccttggcagcctgcccaaggtgagtttactagttactgtgcttttatttgctgtacttctaaagaagtttgtgcttctcattaagccattgtaaatggagtcttcaagatcttgatgtgcttctattctttcttcattgcaaggtgttagttattagtatagtaactttctcaaagtgcttattcattgaccatgggctgaggttgtttgtcatcgtccgttcaggaagctgccaggcagaactatgtggatttggtgtccagtttgagtccttcattggaatcctctagtcaggtggagcctggaacagacaggaaatcaactgggtttgaaactctggtggtgacctccgaagatggcatcacaaagatcatgttcaaccggcccaaaaagaaaaatgccat

SEQ ID NO: 2266 - DNA, 467 bp, Homo sapiens
  MAP TO AC005043.2; EXPRESSED IN FETAL LIVER, SIGNAL = 3.7; EXPRESSED IN HELA, SIGNAL = 2.2; EXPRESSED IN HEART, SIGNAL = 2.3; EXPRESSED IN LUNG, SIGNAL = 1.7; EXPRESSED IN BRAIN, SIGNAL = 1.8; EXPRESSED IN BT474, SIGNAL = 1.6; EXPRESSED IN ADULT LIVER, SIGNAL =   4; EXPRESSED IN PLACENTA, SIGNAL =   2; EXPRESSED IN HBL100, SIGNAL = 2.3; EXPRESSED IN BONE MARROW, SIGNAL = 2.7
tcctctccccttctcctctcgcttctccttttctcagtggagaccactcagagacagcaaatacaaccccccaaccctctcaggaacctctcagcataatgggagacaaaatccatgttacaggtgccattcacagtatgggggatttaaaggagggatgagccaggaaagactataaaggaaggtactttttgaattgaatgttgaaagaggagtgtgtgttcaaattaggacaaaatgtgggagaaggcagagggcgttctaggcaggctgaaggaactgcttcatcaaaggcttgaaggcatgaaacagcaatcccaggacttggtgggcagtaaggaagaggaaggaatcaagattgactcccacatttctggcctggtagaccaggtagatggtaatagctttcactgcaatttgggagcccaggagaagaagcagtttgaagaggagatgttgaaatgagc

SEQ ID NO: 2267 - DNA, 462 bp, Homo sapiens
  MAP TO AL035553.10; EXPRESSED IN BONE MARROW, SIGNAL = 3.1; EXPRESSED IN FETAL LIVER, SIGNAL = 5.6; EXPRESSED IN HELA, SIGNAL = 3.7; EXPRESSED IN BRAIN, SIGNAL = 3.6; EXPRESSED IN LUNG, SIGNAL = 2.9; EXPRESSED IN BT474, SIGNAL = 1.6; EXPRESSED IN ADULT LIVER, SIGNAL = 3.1; EXPRESSED IN PLACENTA, SIGNAL = 4.2; EXPRESSED IN HEART, SIGNAL = 4.5; EXPRESSED IN HBL100, SIGNAL = 2.8
ctcttgtgtgcgtgtgtgtgcactcttagaggggcacagttattcttacactactgactgatcaatttggggcacatttttaaaaggctccctatctttaacagcacgaagaccctgctttggagccactgttcaagtcaatggtgtgacccaacatgcaatgctccagctgttcctctacagccagcacctgcctgacagcttcttcaaaggccactgtcacattagtatcatctttggcactagtttctaaataagggtaatccccattctccatgcaccaggtttgtgcctcctcagtagtcacttgcctatcctctttgtctaccttgttacccagaactacaaaggggaaatgctcagggtccttcacatccgcatagtaaataaattctttctgccagttaccaagattctcgaagctctgccgatcatccacgctgaaggtcaagaggcagcagt

SEQ ID NO: 2268 - DNA, 448 bp, Homo sapiens
  MAP TO AC009945.1; EXPRESSED IN PLACENTA, SIGNAL =  16; EXPRESSED IN HBL100, SIGNAL =  54; EXPRESSED IN HEART, SIGNAL =  10; EXPRESSED IN FETAL LIVER, SIGNAL =  11; EXPRESSED IN ADULT LIVER, SIGNAL = 8.3; EXPRESSED IN HELA, SIGNAL =  45; EXPRESSED IN BRAIN, SIGNAL =  12; EXPRESSED IN LUNG, SIGNAL =  33; EXPRESSED IN BONE MARROW, SIGNAL = 7.9; EXPRESSED IN BT474, SIGNAL =  89
gcttctccaagacttcttcaatggaaaagaactgaataagagcatcagccatgatgaagctgttgcttatggctgtccaggcagccatcctgtctggagacaagtctgaaaatgttcaagatttgctgctcttggacgtcactcctctttcccttggtattgaaactgctagtggagtcatgaccatcctcatcaactgtaataccaccattcctaccaagcagacacagaccttcattacctattctgacaaccagcctggtgtgcttattcaggtttatgaaggtgagcgtgccatgtccaaggataacaacctgcttggcaagtttgaattcacgggcatacctcctgaaccccaaggtgttcctcagattgaagtcacttttgacattgatgccaatggtatcctcagtgtctctgctgtggacaaaagtacaggaaaagagaa

SEQ ID NO: 2269 - DNA, 461 bp, Homo sapiens
  MAP TO AP000351.2; EXPRESSED IN HBL100, SIGNAL =  10; EXPRESSED IN HEART, SIGNAL = 8.4; EXPRESSED IN LUNG, SIGNAL =   5; EXPRESSED IN FETAL LIVER, SIGNAL = 3.4; EXPRESSED IN ADULT LIVER, SIGNAL = 4.3; EXPRESSED IN PLACENTA, SIGNAL = 3.6; EXPRESSED IN HELA, SIGNAL = 7.3; EXPRESSED IN BRAIN, SIGNAL = 2.9; EXPRESSED IN BONE MARROW, SIGNAL = 3.9; EXPRESSED IN BT474, SIGNAL =  12
ccaaaatcaaaatgaaatgcagtgattaaaggacacaaggcctcagtgtgcatcattctcattgtggctttcaggcggctgtggaagacagggtggggatggtggcttcgggaggtgaggtgctctgggacttgggcaagtcttaggcaagccattcctgctttctgggcctggctcccatgggccattagaaatgaaaatgctttgtggactgctgaggacggtgcaagggtgaggtttcccagctcaccggatcatggccagcacccagggcatcagcttctgctttatggtggggtctgcaggtgggaagtccttggccttcagaatgacctcatgggcctcctggaagaggtcctcccccactgctgcctccacgcgctgccgccatgtggccagcttgggtcggccttcgaagacttggcagccagcacccacgggctgtggggaaaagggtacag

SEQ ID NO: 2270 - DNA, 461 bp, Homo sapiens
  MAP TO AC009963.2; EXPRESSED IN BONE MARROW, SIGNAL = 3.3; EXPRESSED IN HELA, SIGNAL =  20; EXPRESSED IN HEART, SIGNAL = 2.2; EXPRESSED IN LUNG, SIGNAL = 5.1; EXPRESSED IN BRAIN, SIGNAL = 2.1; EXPRESSED IN BT474, SIGNAL =  22; EXPRESSED IN ADULT LIVER, SIGNAL = 2.5; EXPRESSED IN FETAL LIVER, SIGNAL =   3; EXPRESSED IN PLACENTA, SIGNAL = 5.1; EXPRESSED IN HBL100, SIGNAL =  21
tagagaaggatctggacggcttgtgatttctctcccgagacagagatctctctcttctatctctagaaagggacctgctccagctgcgagagaggcttcttcttggaaatctgcgacgaggtggaagactcctcctatgataatcatctcaaggacgaggaccccaagagggaggtgggctacgatttctacttcttttatcaccattcgacagttccactcttacacagcggccacatggtgttcttccatctagttctcagaccacatcagctgcatctcggggatcttcaaattcaacaaaagcaaagccgcgagggtttctagcaacccacacgctttggagtggtccatactagccaaaagcccgttccagttcggtcttgttgccattgtttccaagattgcctacataaaccttacagtccaatggacaggaatcacgatgcatttcgacatct

SEQ ID NO: 2271 - DNA, 445 bp, Homo sapiens
  MAP TO AP000501.1; EXPRESSED IN BONE MARROW, SIGNAL = 1.8; EXPRESSED IN FETAL LIVER, SIGNAL = 1.2; EXPRESSED IN HELA, SIGNAL =   4; EXPRESSED IN BRAIN, SIGNAL = 1.2; EXPRESSED IN LUNG, SIGNAL = 6.3; EXPRESSED IN BT474, SIGNAL = 2.9; EXPRESSED IN ADULT LIVER, SIGNAL = 2.3; EXPRESSED IN PLACENTA, SIGNAL = 2.4; EXPRESSED IN HEART, SIGNAL =   1; EXPRESSED IN HBL100, SIGNAL = 2.8
cattgaagaggctgctggtagcagagaggagaggccagttcatggggattgtgaacattgttgcagttgcttccattcaaaggtaactcctcagcctttctcctttcaggtggtataagttgaaatccaaaccaggaaagaaggacaaggagcgaggagaaattgaggttgacatccagtttatgagaaacaacatgactgccagcatgtttgacctttctatgaaagacaagtctcggaatccatttggaaagctgaaggacaagatcaaggggaagaataaggacagtgggtcagacaccgcctccgccatcatccctagcacgacaccttcggtcgacagtgatgatgagtctgtggttaaagacaagaaaaagaaatcaaagatcaagaccttactttccaagtcaaatttgcagaagacgcctctttcccagtccatgtc

SEQ ID NO: 2272 - DNA, 460 bp, Homo sapiens
  MAP TO AC009787.1; EXPRESSED IN PLACENTA, SIGNAL = 9.4; EXPRESSED IN HBL100, SIGNAL =   8; EXPRESSED IN HEART, SIGNAL = 3.6; EXPRESSED IN FETAL LIVER, SIGNAL = 4.2; EXPRESSED IN ADULT LIVER, SIGNAL = 7.9; EXPRESSED IN HELA, SIGNAL =  30; EXPRESSED IN BRAIN, SIGNAL = 5.3; EXPRESSED IN LUNG, SIGNAL = 7.5; EXPRESSED IN BONE MARROW, SIGNAL = 5.5; EXPRESSED IN BT474, SIGNAL = 4.8
  unsure 198
  unsure 249
ccaggaatagtcagggaagcacataatttagttaaagtgtctcagcctaataagggaactgggcaggtggggataactaaaaaggagtgcttaaaagagtattgtccaagttggcagcagagttggggagttttaagaggtttagaagcctggctgtcaatacccacaacagttatggaggcaagggaaacaagcccnttgaaaagaagataatgtggagtgggtagcctccgtattgattaagaaggnggatgggcttaccttccactgtgagagttactggcagctcggcgtccgtgatggtctcgggggcttccgaggcgatcgggcagtgtcagtcttcagctgctaagccaagatctgggaaggagtcagtcagagagccttgggccagagttccaggggctctgggagtggctgccaggtgagttgaacagtcagattttcagtggggtcccac

SEQ ID NO: 2273 - DNA, 444 bp, Homo sapiens
  MAP TO AC011297.1; EXPRESSED IN BT474, SIGNAL = 1.5; EXPRESSED IN HBL100, SIGNAL = 0.98; EXPRESSED IN HEART, SIGNAL = 0.88; EXPRESSED IN LUNG, SIGNAL = 1.6; EXPRESSED IN ADULT LIVER, SIGNAL = 2.8; EXPRESSED IN PLACENTA, SIGNAL = 1.3; EXPRESSED IN HELA, SIGNAL = 3.6; EXPRESSED IN BRAIN, SIGNAL = 1.5; EXPRESSED IN BONE MARROW, SIGNAL = 1.2
gagtataacactccccagatgcaacttaatctagcactctatagtttaaattctttaaacatatatagaaatcagaccactacttctgcagaacaacattttactggtaaaaagaacagcccacatgggggaaaactgatttggtggaaagacaacaaaaataaaacatgggaaataggtaaggtgataacatgggggagaggtttttcttgtgtttcaccagaagaaaatcagcttcctgtttggatacccactagacatttgaagttctacaatgaacccatcagagatgcaaatgaaggtgcctccatagagacagaaaacctgcaatcgagcatcatcacctcgccaggtgaagaaaatggtgatatcaaaagaacagatgaagttgccatccaccaagaaagcggagccgccgacctgggcccagctaaagaagctgac

SEQ ID NO: 2274 - DNA, 459 bp, Homo sapiens
  MAP TO AL096700.6; EXPRESSED IN BT474, SIGNAL =  11; EXPRESSED IN HBL100, SIGNAL =  16; EXPRESSED IN HEART, SIGNAL =  10; EXPRESSED IN LUNG, SIGNAL = 9.1; EXPRESSED IN BRAIN, SIGNAL = 4.7; EXPRESSED IN ADULT LIVER, SIGNAL = 5.7; EXPRESSED IN FETAL LIVER, SIGNAL = 5.9; EXPRESSED IN PLACENTA, SIGNAL = 5.5; EXPRESSED IN HELA, SIGNAL = 8.5; EXPRESSED IN BONE MARROW, SIGNAL = 5.2
ctgctccctggaagctgtagtcgatggggggaagggtagataaatcaggcgaggacaggctggctcctggaggcatactccagcctcctgctctgagggccactgccagcaggatccagggagtggccagaaaaggggcagcagtggcgctgagccccgagcccaggcactgctacggtcacccttggttactcggtgattgattgatagggctgcatctgtcctctcactggtggttgcctgcctgtccctttggtagatgaccccgcatgagatcaagtttgctgtccatgtcgaatcggtgctgaaccgcgtgccgcagcccgagtaccggcagctgctggtggaagccatcatggtgctgacgctgctctcggacacggagatgaccagcatcgggggcatcatccacgtggaccagatcgtgcagatggccagtcagctgttcttgcaggacca

SEQ ID NO: 2275 - DNA, 436 bp, Homo sapiens
  MAP TO AL050336.7; EXPRESSED IN BONE MARROW, SIGNAL = 2.1; EXPRESSED IN HBL100, SIGNAL = 1.8; EXPRESSED IN HELA, SIGNAL = 2.1; EXPRESSED IN HEART, SIGNAL = 2.7; EXPRESSED IN BRAIN, SIGNAL = 1.9; EXPRESSED IN LUNG, SIGNAL = 1.6; EXPRESSED IN BT474, SIGNAL = 1.9; EXPRESSED IN ADULT LIVER, SIGNAL = 2.4; EXPRESSED IN FETAL LIVER, SIGNAL = 2.9; EXPRESSED IN PLACENTA, SIGNAL = 2.6
aggtttgggattaaggaaagagaagtcataccacacattgtttagatcatagccaaggaaatgatcgaaaatacgtgtaacacatttttcattaaaacaaaaaacaaaaaaccaaaaccctcgaagacattttatgcatataattttatttgctactgccacattgccattaagaatattgcctacacttcagtgcagggatgttctgagtctgtgcatcatgcagcgaaggcaccagtctccctctgtaaccttggtccttccctaaagtatgtagtcattggtgcagaatgtacagctgtgaaggtgactgtttctctaaaggctttggtgatgtaagcctgaagccaagcaggaggaaagcaattaaacatcaccttgattaagttataatgtaccaagagagttgcacgttgggcttggtgactgctttctt

SEQ ID NO: 2276 - DNA, 457 bp, Homo sapiens
  MAP TO AL034384.1; EXPRESSED IN BONE MARROW, SIGNAL = 1.3; EXPRESSED IN HBL100, SIGNAL = 1.3; EXPRESSED IN HELA, SIGNAL = 2.1; EXPRESSED IN BRAIN, SIGNAL = 1.1; EXPRESSED IN LUNG, SIGNAL = 4.4; EXPRESSED IN BT474, SIGNAL =   1; EXPRESSED IN ADULT LIVER, SIGNAL = 1.4; EXPRESSED IN FETAL LIVER, SIGNAL = 1.5; EXPRESSED IN PLACENTA, SIGNAL = 1.5; EXPRESSED IN HEART, SIGNAL = 1.8
agtgcatacaacatgccaggcactgcatacgtgctaattctattagtcctcttaacctttaccactctatgaataatatacaattattaatcccttttgcagatgagaaaattaaggcacagaaacgttaagtaactctcccacaattacaaagcatggaagtggcaaacccataattcaagtctagactctctttttccagagcctggactcttagccaccatgccaaagagctgtgctgtccactgctgtagccagcagtcacatgtaactatttaaattaataaaaaatttaaaaaacaagaattcagttcttcatttttactagccacatttcaagtgctacacacttcatgtggccagtggctaccatattgaacagcacagctctagagcattctattctttctgggatgattcagcatcaactcaggaagttctgttggatggtgatgct

SEQ ID NO: 2277 - DNA, 457 bp, Homo sapiens
  MAP TO AL009030.4; EXPRESSED IN BT474, SIGNAL = 4.5; EXPRESSED IN HBL100, SIGNAL = 6.4; EXPRESSED IN LUNG, SIGNAL = 2.7; EXPRESSED IN BONE MARROW, SIGNAL =   4; EXPRESSED IN ADULT LIVER, SIGNAL = 7.8; EXPRESSED IN FETAL LIVER, SIGNAL = 2.6; EXPRESSED IN PLACENTA, SIGNAL = 4.7; EXPRESSED IN HEART, SIGNAL = 2.3; EXPRESSED IN HELA, SIGNAL = 8.1; EXPRESSED IN BRAIN, SIGNAL = 2.5
agctgtgatcaggccattgcattccagcctgggtgacagagtgagaccatcacaaaaacaaacaaacaaacaaataaataaataaataaataaataaaaaatctgggcctcccaccaagggtgggaaacatcagaaagctcagaggaccacacctgcccgttcacctgtcctgggctcctgctgaagccagggctaccagatgggggcaaaagacctcccttacgcaagtcccaaaccaccattacctcccacgagtacagggaggcggggtgttcgtgcatcaggtacggccaccagaggttggcacccagcaccttcagctggccctgggtcccagcctggttgtccacgactttgttttctgcattcaaaagacacacttccaacttgaactggttactgcacttgacggagatctggtaattcaccagccctgcaggaggcaagagagaccag

SEQ ID NO: 2278 - DNA, 459 bp, Homo sapiens
  MAP TO AL121716.1; EXPRESSED IN BT474, SIGNAL = 8.3; EXPRESSED IN BONE MARROW, SIGNAL = 2.6; EXPRESSED IN LUNG, SIGNAL = 1.7; EXPRESSED IN BRAIN, SIGNAL = 1.1; EXPRESSED IN ADULT LIVER, SIGNAL = 1.4; EXPRESSED IN FETAL LIVER, SIGNAL = 2.8; EXPRESSED IN PLACENTA, SIGNAL = 2.2; EXPRESSED IN HEART, SIGNAL = 2.3; EXPRESSED IN HELA, SIGNAL = 4.7; EXPRESSED IN HBL100, SIGNAL = 8.7
tcaatatactgtttttcgggacagaaaactagattgtatgacttggcataagaaaaatatatattgaaaaaagtataagaaattcttgttgctactttattaaagctctagactaggtgagaaaccatggttttgttaacagatcaaggccttaaaagtatttagtggctttgttttttgaaattaacttagagtgtgtgtgaaatgtttagtataatgaactctgattgctaccatcttttgtttcagactgtgagcatgtgcagcctccacagtggctccagactctgatgaatgcttgcagccaagcaagtgatttcagtgttcagagtgttgctatttcactagttatggacctggtgggactgacacagtctgtggccatggtcactggggaaaacatcaacagtgtagagcctgcacaacccttaagtccaaaccagggaagagtagctgtgg

SEQ ID NO: 2279 - DNA, 442 bp, Homo sapiens
  MAP TO AL109801.5; EXPRESSED IN BRAIN, SIGNAL = 2.8; EXPRESSED IN BT474, SIGNAL =  17; EXPRESSED IN HBL100, SIGNAL =  20; EXPRESSED IN LUNG, SIGNAL = 4.3; EXPRESSED IN BONE MARROW, SIGNAL = 6.1; EXPRESSED IN ADULT LIVER, SIGNAL = 3.6; EXPRESSED IN FETAL LIVER, SIGNAL = 5.2; EXPRESSED IN PLACENTA, SIGNAL = 6.3; EXPRESSED IN HEART, SIGNAL =   3; EXPRESSED IN HELA, SIGNAL =  44
agagcaacccaatcttgccgggatcaaccctaaagggaccgggctacggggccaggaattgaagtgatgggttcaaagaggtagagttagccgggggtggagttaatgaggtctcttccctctttggggctcgacggagggaggaagctctgcttgaagcacatggggctggcccaccctgtagtcagaggtagcaagtaatgaggagtcctcctggagtgcctcagctttagctgggtaaggtagggcgttgtgccattgtggtcaaataacattgcacgttctgaactgtttctttactaggttaacgtccctaaaacccgccggactttctgtaagaagtgtggcaagcaccaaccccataaagtgacacagtacaagaagggcaaggattctctgtacgcccagggtaagatggattccgcataatttggtgttaatg

SEQ ID NO: 2280 - DNA, 411 bp, Homo sapiens
  MAP TO AC009962.1; EXPRESSED IN BONE MARROW, SIGNAL = 1.8; EXPRESSED IN LUNG, SIGNAL = 1.7; EXPRESSED IN BRAIN, SIGNAL = 1.9; EXPRESSED IN ADULT LIVER, SIGNAL = 2.4; EXPRESSED IN BT474, SIGNAL = 2.3; EXPRESSED IN FETAL LIVER, SIGNAL = 1.7; EXPRESSED IN PLACENTA, SIGNAL = 3.8; EXPRESSED IN HBL100, SIGNAL = 3.5; EXPRESSED IN HELA, SIGNAL = 7.7; EXPRESSED IN HEART, SIGNAL = 1.8
atgaaatttgcagaaatgccattacaaatatatcttaattgacacaaacttgatcaacaggaaagctaatttaaaagctctgtgaaaattattgaatacagtgaatcaaaagaacattctgtaaataattaatattcagacaaaatctcctctaacatatacctccaaataaatgaatgaaacacagattttacccacctcccgtatgacttgctgcaactcatcttgctccacatttttatgcatttcctcagcagctggcattgatgggagttttccatgcccttcttccacttcagatttaggtcctacaacttctggggctccttcagctgcatcaacttcctcagaactttccaaatctggaggtgtctgcacagagcctgttctagaaggagctgttggcgttag

SEQ ID NO: 2281 - DNA, 395 bp, Homo sapiens
  MAP TO AP000359.1; EXPRESSED IN HBL100, SIGNAL = 1.9; EXPRESSED IN HELA, SIGNAL =  13; EXPRESSED IN PLACENTA, SIGNAL = 4.2; EXPRESSED IN HEART, SIGNAL = 3.8; EXPRESSED IN BRAIN, SIGNAL = 1.7; EXPRESSED IN BONE MARROW, SIGNAL = 1.6; EXPRESSED IN LUNG, SIGNAL = 3.9; EXPRESSED IN BT474, SIGNAL =  20; EXPRESSED IN ADULT LIVER, SIGNAL = 1.7; EXPRESSED IN FETAL LIVER, SIGNAL = 0.98
cccactcaagtccattctccactcagctgtttgtgtggagctttttttttttttctcccaagtgttcaggtttattgacagcattaggggctacaagggagccctgggcatctgggggcgaggcctggcatttgcctggacagtggcccaggaagcggccaagaatggagtctcccccacccaagtttacttgaaagtgtggctctcgggtccaccccgcccaaagcctttaggcccaaacatggcggcgtagcaggggtggttgccgtagggtttgccttcatgctcagcgtggcccccggaagtcagcgtcttcccacatttctcacacttcaggcagggccgatgccagtccttgcctagagaggtcaccctctcggcgaagtacaccttgt

SEQ ID NO: 2282 - DNA, 457 bp, Homo sapiens
  MAP TO AC007115.1; EXPRESSED IN BT474, SIGNAL = 1.1; EXPRESSED IN FETAL LIVER, SIGNAL = 1.9; EXPRESSED IN ADULT LIVER, SIGNAL = 3.1; EXPRESSED IN HEART, SIGNAL = 7.4; EXPRESSED IN PLACENTA, SIGNAL =  12; EXPRESSED IN LUNG, SIGNAL = 7.4
tcctaagtaaatagctgtgcaaatgatactataatgtacctgattgtctttcaatacatttttaatgctctgcttcctgataacaaatgaaatattattttgcatcttttctctgtgctcactgtattgtggcatattatataagaaacgacacacagattaggcagtgctactcttcttaaatctctcatttgtttcctaggttccctggttgtgaaaatacatgagataaatcatgaaggccactatcatcctccttctgcttgcacaagtttcctgggctggaccgtttcaacagagaggcttatttgactttatgctagaagatgaggcttctgggataggcccagaagttcctgatgaccgcgacttcgagccctccctaggcccagtgtgccccttccgctgtcaatgccatcttcgagtggtccagtgttctgatttgggtgagtgggat

SEQ ID NO: 2283 - DNA, 497 bp, Homo sapiens
  MAP TO AC005227.2; EXPRESSED IN BONE MARROW, SIGNAL = 3.4; EXPRESSED IN LUNG, SIGNAL = 6.9; EXPRESSED IN BT474, SIGNAL = 1.8; EXPRESSED IN FETAL LIVER, SIGNAL = 2.2; EXPRESSED IN ADULT LIVER, SIGNAL = 4.2; EXPRESSED IN HELA, SIGNAL = 3.3; EXPRESSED IN PLACENTA, SIGNAL = 2.6; EXPRESSED IN HBL100, SIGNAL = 1.7; EXPRESSED IN HEART, SIGNAL = 2.4; EXPRESSED IN BRAIN, SIGNAL = 1.5
caggaactatctgctcaatgcatggcagccaggaccagcacactaaactcaaactagccttaaaacccttctcaaatgttgcttcgtctctgcaagacttctcccagatccaaaatccagaatgaaggcattcgattggtcaagcctaagtgaaatacccttgctctacctgctagggcaacagtccccaacttttttggcagcagggactggtttcatggaagacaatttttccatggactgggtgggtcggtgggggtgactttgggctgattcaaatacattacatttattgtacgctttattatcattacatactcaccatagtatcaaatcggtggtagccctgagcttgtttttctgcaactagacagtcccatctgtagacagtcccatctgggggtgatgggagacagtgacagatcatcaggcattagattctcataaggagcacacatcctagattcctcacatatgcagttcacaacagggcttgt

SEQ ID NO: 2284 - DNA, 470 bp, Homo sapiens
  MAP TO AC008080.1; EXPRESSED IN BT474, SIGNAL = 2.3; EXPRESSED IN FETAL LIVER, SIGNAL = 1.5; EXPRESSED IN HEART, SIGNAL = 1.5; EXPRESSED IN LUNG, SIGNAL = 1.4; EXPRESSED IN BRAIN, SIGNAL = 2.1; EXPRESSED IN ADULT LIVER, SIGNAL = 1.5; EXPRESSED IN PLACENTA, SIGNAL = 1.6; EXPRESSED IN HELA, SIGNAL = 1.9; EXPRESSED IN HBL100, SIGNAL = 1.6; EXPRESSED IN BONE MARROW, SIGNAL = 1.6
gctgaaatcttataaatacggcacagttaacttgcaaaaggagcttagtgttctcggggcagtccaagttgaacaacacataatttggcacaatttggcgggcctgagttgaagaccaatacaagactgagaaagcatagaggctttattatttctaagtgagttcacgtagtgtacacgggttgagctgatcagaactcccacccaaccctccctctgccccatccaaggcgtttattccttatgctttcataagtgtcgcattcacagcacaacgtttctctttcccaaataggcatgttgttgtttcaaattaacatctgtgcttactgcagaatagtgaatgccatcttcttttgccccgctgaccctgatggtgtcactgaggctttcaaagcagagtgaccaggcacagctatagttttctgcagtatcaggaaaggggtggaggaggggagggcttcactatc

SEQ ID NO: 2285 - DNA, 471 bp, Homo sapiens
  MAP TO AC008173.1; EXPRESSED IN BONE MARROW, SIGNAL = 1.7; EXPRESSED IN HELA, SIGNAL = 5.3; EXPRESSED IN BRAIN, SIGNAL = 1.5; EXPRESSED IN LUNG, SIGNAL = 3.2; EXPRESSED IN BT474, SIGNAL = 1.5; EXPRESSED IN ADULT LIVER, SIGNAL = 4.8; EXPRESSED IN FETAL LIVER, SIGNAL = 1.1; EXPRESSED IN PLACENTA, SIGNAL = 4.1; EXPRESSED IN HEART, SIGNAL = 1.2; EXPRESSED IN HBL100, SIGNAL = 2.1
tggaatggccttttgaagtcacaattacaatgccaaataggtgacaacgctttgcagggctggggcaaagttctctaaaaggccatgtatgctctgaatcagcatccaatatatggtactgtttctcgcatagccatgattcatgggtccaggaatcaaggggaggaagtggaagtggcaccactcaccatcaaccctactaatccactaagaaaatttttgctacctgttcctgcaacattgcattctgctggcctagaggtattagttccagagggaggaacactgccaccaggagacacaacaacgaatccattaaactggaagttaagattgccacctggacactttgggctcctcctacatttaagacaaaagactaagaagggagttacagtgttggatggggtgattgacccagactatcaagatgaaatcagtctattactccataacagaggtaaggaagag

SEQ ID NO: 2286 - DNA, 471 bp, Homo sapiens
  MAP TO AC009402.2; EXPRESSED IN PLACENTA, SIGNAL = 9.4; EXPRESSED IN HELA, SIGNAL = 9.7; EXPRESSED IN HBL100, SIGNAL =   8; EXPRESSED IN HEART, SIGNAL = 9.4; EXPRESSED IN LUNG, SIGNAL = 9.5; EXPRESSED IN BONE MARROW, SIGNAL = 8.8; EXPRESSED IN BRAIN, SIGNAL = 6.9; EXPRESSED IN ADULT LIVER, SIGNAL =  10; EXPRESSED IN BT474, SIGNAL = 5.5; EXPRESSED IN FETAL LIVER, SIGNAL = 7.8
atgaagggctaggtgtggtggcttacacctgtaatcccagcattttgggaggccaagacagaacaatcatttgaggaaaggagttcgaaaaaaaaacccaaaccccaaaatctatttcctatgattgttagaagattaaatgagataatgtatgtaacatgtctgggcagtgctgataaatagcaggttttattaaacattggcttcctgtcctcttgaagcccatagtatgggtgttcttaatttctgaaaaggacaaaggtggtttacctaaactttttgctgcctccacacacgctcacactcacattcacacacattcacactcacatggaggtaatgagaaacatattctttctggggctactgattttaacccagacctctttgttatacttgcctgttggtaaatggctctgatggcaaatgaaagtaaagtagagaaataattactgtgggcatgcaattttt

SEQ ID NO: 2287 - DNA, 454 bp, Homo sapiens
  MAP TO AC009474.1; EXPRESSED IN BONE MARROW, SIGNAL = 2.4; EXPRESSED IN BT474, SIGNAL = 1.4; EXPRESSED IN HBL100, SIGNAL = 2.1; EXPRESSED IN BRAIN, SIGNAL = 2.1; EXPRESSED IN LUNG, SIGNAL = 1.8; EXPRESSED IN ADULT LIVER, SIGNAL = 4.3; EXPRESSED IN FETAL LIVER, SIGNAL = 1.9; EXPRESSED IN PLACENTA, SIGNAL = 3.2; EXPRESSED IN HEART, SIGNAL = 1.5; EXPRESSED IN HELA, SIGNAL = 3.5
tgaagggcgataggattttcaaaatggtaaatgagaattggcttcaactgaaagtctccatctgcattatcccctaacaagagattcagcctgtcctttgaagctaggcattggcttctctctagctaagaaagtcctagatggcatcttccaatagaaggctcttctgtctacattgaaaagctgttgtttagtgtaaccaccgtcatcaatgatcttagctagatctcctggataacctgttgccacttctatatcagcacttgctgcttcaccttgcacttttatgttatgaagatggtgtctttccttaagcctcatcaaccaacctctgccagctttgaaattttcttccgcagtgtcctcacctctctcagccttcacagaattgaagagagttagagccttgctctggaataggctttggcttaagggagtgtcgtggttggtttga

SEQ ID NO: 2288 - DNA, 466 bp, Homo sapiens
  MAP TO AL008582.11; EXPRESSED IN PLACENTA, SIGNAL =   1; EXPRESSED IN FETAL LIVER, SIGNAL = 1.1; EXPRESSED IN HEART, SIGNAL =   1; EXPRESSED IN HELA, SIGNAL = 3.5; EXPRESSED IN HBL100, SIGNAL = 3.5; EXPRESSED IN BRAIN, SIGNAL = 0.91; EXPRESSED IN ADULT LIVER, SIGNAL = 1.1; EXPRESSED IN BT474, SIGNAL = 2.4
tccttccagtggtaataagaggacaaagtacttaaccaatcccactacctctgttttgaatcacaaattcctgggtgactaaaataaattcctagagttaaagttaaatggggaaggtgactaccagaaaataaacaccaactttattaatataatagcaacagaaagagtttccaatttctcaaaaggaaaataatatgagactagtgggctatgatgatgcctgtgaatagccagctactgtaccccactgtagctggacaagtgttaaacaagtaaatgcctttcaagagggcagagccctgcccccccaccccccccccaaaaaaaacgggaaatgcctacatttcttgttctgatagcttcccaccacacaccaaaggttcctcaaggacagctgccaccagagctgctgcaagaacatgtttttcactgggcgtcgcttcacagtcagttcctcaagcag

SEQ ID NO: 2289 - DNA, 485 bp, Homo sapiens
  MAP TO AC010684.1; EXPRESSED IN BT474, SIGNAL = 5.5; EXPRESSED IN PLACENTA, SIGNAL = 1.1; EXPRESSED IN BONE MARROW, SIGNAL = 1.3; EXPRESSED IN ADULT LIVER, SIGNAL = 1.2; EXPRESSED IN FETAL LIVER, SIGNAL = 1.6; EXPRESSED IN HEART, SIGNAL =   1; EXPRESSED IN HELA, SIGNAL =   6; EXPRESSED IN HBL100, SIGNAL = 5.1; EXPRESSED IN BRAIN, SIGNAL = 1.3; EXPRESSED IN LUNG, SIGNAL = 1.9
aagaacctggaaagttgccctctaagtcagagaatattgtacctattccttaatatgtccccagtggtatctccctcatctcacccaatcagcacagaaagttcacttaactaaaaaagggttttgtgtgcataggtacataaactatcattaaaagcaacttgaacacaaagctgaaagcctgacctagacatttacagaaacagcaccttttctgaaagccttagtttcaactctcctccctgctcacacctgttccccaagtccccgtctctaatacttacagtggccgcaggggacccagttcatcacaaaccaccagatgttcagcatcgaggcatggtggtagacgtgcaggaccgtgatctggtggttgttcttgcgcaggatgaagaagaaagtgtccataaattctatgagtttggagaagtagtaccaccagaggacacggataatctaagaggaaagggtcaaagatttaaggc

SEQ ID NO: 2290 - DNA, 475 bp, Homo sapiens
  MAP TO AC010891.1; EXPRESSED IN ADULT LIVER, SIGNAL =   1; EXPRESSED IN HEART, SIGNAL =   1; EXPRESSED IN PLACENTA, SIGNAL = 1.4; EXPRESSED IN BRAIN, SIGNAL = 1.2; EXPRESSED IN BONE MARROW, SIGNAL = 1.3; EXPRESSED IN FETAL LIVER, SIGNAL =   1
acaccctctttcgctaatggagttagaagagcagtttccagcgaccacctcacagtcgcgaaacacctcttcctccagcgcgacctgaacaaggaaatggctagcagggtccctgaggtcaagactttcagggtcctgcagcgggtttttatagtcagcctttttcccaataccaagccagctctgcctgtaccattatccactgcagaggcaggctgacagctctgacaacctgacttgagtctgcctcacaaatgcacttgcgctagtctcagcgcacctggtctgattgtgagctctgtctagcatcacaataaatgtcaccattgccttgcaagaagcatctgcatcttggtggaaaaggagacctccgtggagaagtgtcagcggtgtcttctcgtctgtcttctctgtgaaatccacagatagtctcatgatcctaggagagggcagacgttagccagcgtgaaggaac

SEQ ID NO: 2291 - DNA, 480 bp, Homo sapiens
  MAP TO AC010680.2; EXPRESSED IN HEART, SIGNAL = 4.3; EXPRESSED IN LUNG, SIGNAL = 1.2
tctattttatccttaaaatccaacctctttttactacagtgagtttggctgaagttgctgtttttccgctgtcattcaaggcctcacagacatactctccttgatggtcttcggtatttactttgtcgatgactagcgtatatgtattttgatcttgtaaacacttgaacttttcatctgaaggcaccagtttattctcaaaataccaattcacctctttagcatttgttatggatgttgtgaggtgtacaatatcaccttcctcagaaacagtgtccactaaaggtgtatgtatcatggggccatcctctttgattaagccaccctcagcttcctgtatctttactgtagcaacctcctcagtaccactttcagaggaagactcctctttttcctctgatggtttcagactctcatcttgtttttcgtcagagacaacagctgaagcaacccctttagtgacaggtgtggcatccaaat

SEQ ID NO: 2292 - DNA, 484 bp, Homo sapiens
  MAP TO AC010722.1; EXPRESSED IN HBL100, SIGNAL = 1.5; EXPRESSED IN HELA, SIGNAL = 2.5; EXPRESSED IN HEART, SIGNAL = 2.2; EXPRESSED IN ADULT LIVER, SIGNAL = 2.9; EXPRESSED IN PLACENTA, SIGNAL = 2.2; EXPRESSED IN BRAIN, SIGNAL = 1.9; EXPRESSED IN LUNG, SIGNAL = 1.5; EXPRESSED IN BONE MARROW, SIGNAL = 2.5; EXPRESSED IN FETAL LIVER, SIGNAL = 2.1; EXPRESSED IN BT474, SIGNAL = 0.98
ccaaagccctttcaaatacctggaaagcattcccagaaaggatgggtataaataattccagacagtgaagagtacaataaatacctaactcttcaatgcctaaacactgaagaacatctattagcactaacaccatccaggaaaacgtgatcgcaccaaatgaactaaataagtcacccaggacaaagcctagataaacagatatgcaacctttcaaacagagttcaaaatagctgtgttgaagaaactcaaagaaattcaagataatgtggagaaggaattcaaaattctatcagagaaatttaacaaagagattgaaataactaagaataatgaagcagaaattctgaagttaaataataaaatagatacactgaagaatgtgtcagagccttttaatggcagaatgaatctagcaaaagaaaaagttagtgagcttgaagacagggtatttgaaaatacacagaggagacaaaagaacaaa

SEQ ID NO: 2293 - DNA, 476 bp, Homo sapiens
  MAP TO AC010874.1; EXPRESSED IN BT474, SIGNAL = 1.3; EXPRESSED IN ADULT LIVER, SIGNAL = 3.7; EXPRESSED IN FETAL LIVER, SIGNAL = 0.97; EXPRESSED IN HELA, SIGNAL = 4.2; EXPRESSED IN PLACENTA, SIGNAL = 2.9; EXPRESSED IN HBL100, SIGNAL = 1.4; EXPRESSED IN HEART, SIGNAL = 1.5; EXPRESSED IN BRAIN, SIGNAL = 1.4; EXPRESSED IN BONE MARROW, SIGNAL = 1.7; EXPRESSED IN LUNG, SIGNAL = 3.1
cccagaggtgaggttcagagtgtgacacacgaggaggtacactacactccaaaagaactgattgagttttctaatttttataagcagaaatctggagaacaggcatgggaatggatattaaaggcgtgcaataatggtggaaggaacatagaattggatcaggctgaatttattgatttgggcccactaagcaggggctttgcattcaatgttgcagtttggggaattaaaaaaggttccaatagtttatttgcttggttagctaaaatgtggattaaaagatggcatattgtgaatgagctggaaatgcctgatcttccttggtttaatgtggaggaagggatccaaaggcttggtgagatttggatgcaggagtggattagtaaatttagacctactcatcctagctgggagggttcagaagatatacccttgaccaatattttgttaaatagatttgtgaggacagtacctgc

SEQ ID NO: 2294 - DNA, 443 bp, Homo sapiens
  MAP TO AC011302.1; EXPRESSED IN BRAIN, SIGNAL = 2.7; EXPRESSED IN BONE MARROW, SIGNAL = 3.3; EXPRESSED IN LUNG, SIGNAL = 2.7; EXPRESSED IN BT474, SIGNAL = 3.1; EXPRESSED IN FETAL LIVER, SIGNAL = 3.3; EXPRESSED IN ADULT LIVER, SIGNAL = 3.8; EXPRESSED IN HELA, SIGNAL = 2.5; EXPRESSED IN PLACENTA, SIGNAL = 3.1; EXPRESSED IN HBL100, SIGNAL = 2.6; EXPRESSED IN HEART, SIGNAL =   4
cgccatggtagagtatttgggaaactgacatcttaattgtttttctttttttctgtagttttgatagtagaatcaaggtgtttgccaacaggaccctggtggtgaaatcaatgacagacaaagacgccggagattacctgtgtgtagctcgaaataaggttggtgatgactgcgtggtgctcaaggtggatgtgatgatgaaaccggccaagattgaacacaaggaggagaacgaccacaaagtcttctacaggggtgacctgaaagtggactgtgtggccactggacttcccaatcccgagatctcctggagcctcctggatgggagtctggtgaactccttcatgcagtcagatgacagtggtggacgcaccaagcactatgtggtcttcaacaatgggacactctacttcagtgaagtggggatgagggaggaaggagac

SEQ ID NO: 2295 - DNA, 455 bp, Homo sapiens
  MAP TO AC011425.1; EXPRESSED IN BONE MARROW, SIGNAL = 0.93; EXPRESSED IN BT474, SIGNAL = 0.99; EXPRESSED IN ADULT LIVER, SIGNAL =   1; EXPRESSED IN HELA, SIGNAL = 0.93; EXPRESSED IN PLACENTA, SIGNAL = 0.97; EXPRESSED IN HBL100, SIGNAL = 0.97; EXPRESSED IN HEART, SIGNAL = 0.97; EXPRESSED IN BRAIN, SIGNAL = 0.96
ccagggaagaattgatgctgcacttcaagcccaaagacaatctgctggcagaattccccctctttttcaggggaggtcagtcttttaaagccttcgagtaattggatgaggcccagtgacattatggagagtcatctgctttactcagtctactgacttaaatgttaatctcatctacaaaaataccttcagagaaacaactagaataatgtttgacttaccatctggatactgtggcctagccacattgacacataaaattaactgctctggtattcttgttttacctacccttggtggtgatgagttgcaactgaaggagacccatttcctgaccacactgagccaatgtttttatttgtctggttctttctctagcctggtcctgctccatccctatggagagctagatgacctcaggtatatagaatctcgcctcttgcaggcatgtttct

SEQ ID NO: 2296 - DNA, 463 bp, Homo sapiens
  MAP TO AL109855.6; EXPRESSED IN HELA, SIGNAL =   1; EXPRESSED IN PLACENTA, SIGNAL = 3.1; EXPRESSED IN HBL100, SIGNAL = 2.4; EXPRESSED IN HEART, SIGNAL = 1.5; EXPRESSED IN BONE MARROW, SIGNAL = 1.1; EXPRESSED IN LUNG, SIGNAL = 1.8; EXPRESSED IN BRAIN, SIGNAL = 1.3; EXPRESSED IN FETAL LIVER, SIGNAL = 1.5; EXPRESSED IN ADULT LIVER, SIGNAL = 1.7
attaggagggaacccagagcctcccattctgggagtgaggatagcttgtgagggccactgagggtgacagggaggaaggtcaagctgagtcataatatcctgcagtgattccaggagactttagagatttttttcaaaagaaaaagaaaaaagaaaacaagaaaagaaaggcaaatactacttcaaagtcaagagcctacttttacaattgctttgaaagaaaaataactaaaaacaaaccaaatgttttctcaaataaaatgcttccctatcagtcacttgggtgaaaagtcagccttaccttgacatattgaacgagacgctcactgacattcactttgtaagtctctatgcccagctccttagacaagcgtaagattctgttttgggttggtcccacataagctccaccaacatctacgtaatcaacatgctcattctgcaaaaagagaaaaattggtca

SEQ ID NO: 2297 - DNA, 444 bp, Homo sapiens
  MAP TO AL118516.6; EXPRESSED IN PLACENTA, SIGNAL = 2.2; EXPRESSED IN HBL100, SIGNAL = 1.1; EXPRESSED IN HEART, SIGNAL = 1.5; EXPRESSED IN BONE MARROW, SIGNAL = 1.5; EXPRESSED IN FETAL LIVER, SIGNAL = 2.1; EXPRESSED IN HELA, SIGNAL = 1.3; EXPRESSED IN BRAIN, SIGNAL = 1.5; EXPRESSED IN LUNG, SIGNAL = 0.99; EXPRESSED IN ADULT LIVER, SIGNAL = 1.6
gagctctctgggtctctccccataaggacacttattcctgtggctcagggccccaccctcatgacttaattcaacttcagttacctcgttatagtccctgtctctagacacagtcacgctctgggagaggccttcaacatacgaatttgaggatacagttcagtctcgaatagttagcatatctttttcaactcatcttttaacccaaggtaaacccatggatttgttttaggttctagaagtaagaataaccacatcccctgccaccctgacccttagcatctcgggggtcagggcagtatgggaaacaggaccatgggctttggggtggcgcatgtcaggtcctgtccgggcttcgacatttactaacacagtgacctgggcagtgtcttcatctgtagaatggggtaatgtcagaggcctccatagtgtttgggaggcgtg

SEQ ID NO: 2298 - DNA, 467 bp, Homo sapiens
  MAP TO AL121748.1; EXPRESSED IN BT474, SIGNAL = 1.1; EXPRESSED IN HBL100, SIGNAL = 1.8; EXPRESSED IN HEART, SIGNAL = 2.3; EXPRESSED IN LUNG, SIGNAL = 3.4; EXPRESSED IN ADULT LIVER, SIGNAL = 2.7; EXPRESSED IN FETAL LIVER, SIGNAL = 3.1; EXPRESSED IN PLACENTA, SIGNAL = 2.6; EXPRESSED IN HELA, SIGNAL = 2.2; EXPRESSED IN BRAIN, SIGNAL = 2.7; EXPRESSED IN BONE MARROW, SIGNAL = 2.8
ctccacaagaacgggctgccctttcccatcaaagcgaaccaaacagcaaactttctcagagcgtgggatcttagaaaacatgggttctccacagtttcactgaggttggttaacaaaatcagttttttctggttcacaccttctactacccttcatccactcaccattgctgacttcatgctcactcgtcttgctactagattcacagggaacgtggttgcattcttgcccaaagaaagtacaaatatgataaaagatttcaaaaacctttatatctttttcttattttttattttttagagacaggatctcattatgttgcccaggctggcctcgaactcctgggctcaagtgatcctccaggcttagcttcccaagtagctggaactagaggtgtgcaccacgctgcctggctcaagacttatatttctgaaacacctgttgtctccagaactgaacacagtgcc

SEQ ID NO: 2299 - DNA, 463 bp, Homo sapiens
  MAP TO AL035668.15; EXPRESSED IN BONE MARROW, SIGNAL = 1.9; EXPRESSED IN BRAIN, SIGNAL = 1.6; EXPRESSED IN BT474, SIGNAL =   1; EXPRESSED IN LUNG, SIGNAL = 1.6; EXPRESSED IN ADULT LIVER, SIGNAL = 1.7; EXPRESSED IN FETAL LIVER, SIGNAL = 1.6; EXPRESSED IN PLACENTA, SIGNAL = 1.9; EXPRESSED IN HEART, SIGNAL = 1.7; EXPRESSED IN HELA, SIGNAL = 1.7; EXPRESSED IN HBL100, SIGNAL = 1.2
tccatgctccaacactttctctatgagctgtgctacaactgtttctgcttctctggttaaagacggttctgtcttcccttgcctggatctaagctgcttgcctctcattaacagagtccaacctcagcctgtgtgttgccaccacccactttcctagttccttccctttcctctgacagacacacctttatactgtagggctgacttccttttggaccccaagaatctgctagctagttgctcccagccatgggaataaaagcagagctcccttttggaactccatggtcatcgtcataaacaagaacctcccagacatcagtggtggaatgggggcctgttcagctcttggaaacaaaggctttattctgaatcttttcccgactgataaccagtctgtcattctaagtgggaagggtgggggtggcagggcattgaagagaggggaggagagtacagagca

SEQ ID NO: 2300 - DNA, 468 bp, Homo sapiens
  MAP TO AL049634.8; EXPRESSED IN PLACENTA, SIGNAL =   3; EXPRESSED IN HELA, SIGNAL = 2.4; EXPRESSED IN HEART, SIGNAL = 2.9; EXPRESSED IN BRAIN, SIGNAL = 3.2; EXPRESSED IN BT474, SIGNAL = 1.8; EXPRESSED IN HBL100, SIGNAL = 2.3; EXPRESSED IN LUNG, SIGNAL = 2.6; EXPRESSED IN BONE MARROW, SIGNAL = 3.8; EXPRESSED IN ADULT LIVER, SIGNAL = 3.1; EXPRESSED IN FETAL LIVER, SIGNAL = 2.8
cattctctggaggcagaaggcaaggtccagccctgtgcctggacaagtcactcaaattgtgagttccctcatctgtggaaccaaagggctgggtcagctttggaaacacaagagctgtagagccgcagactggggatgccttctgtcccatcatttacaagccgtggagcctcgagcgactgccatgacatctccaagcctcaactcatgtgatctggagaaagggtgacatcagttcatgaaagggtggctgctcagccaccaccacacctggctgttgctccaagaatggataatgtaattattgagttattgtcacacaccaggggacaaaggaggcccacgctgtactcaccgcgcacagacagctcagtgcctgctccagacttaaactccacgtcgtcagggctccctttccggaacttcacacagtagtaggtgccggcgtctgctggggtgatgttactg

SEQ ID NO: 2301 - DNA, 449 bp, Homo sapiens
  MAP TO AL117672.1; EXPRESSED IN HBL100, SIGNAL = 0.97; EXPRESSED IN HELA, SIGNAL = 1.1; EXPRESSED IN PLACENTA, SIGNAL = 1.2; EXPRESSED IN HEART, SIGNAL = 1.7; EXPRESSED IN BRAIN, SIGNAL = 1.7; EXPRESSED IN BONE MARROW, SIGNAL = 1.2; EXPRESSED IN LUNG, SIGNAL = 0.94; EXPRESSED IN BT474, SIGNAL = 1.8; EXPRESSED IN FETAL LIVER, SIGNAL = 1.2; EXPRESSED IN ADULT LIVER, SIGNAL = 1.4
acctagcactgccctctcaccttaagcagacagaagtattggctttgaagttggaaaacctaacaaagcttctgcctcagaaacccagaggagaaaccatccagaatattgatgactgggaactgtctgaaatgaattcagattctgaaatctatccaacctatcatgtcaaaaagaagcatacaaggctaggcagggtgtctccaagctcatctagtgacatagcctcttcactaggggagagcattgaatctgggcccctgagtgacattctttctgatgaggagtccagtatgcctctcgctggcatgaaaaagtatgctgatgagaagtcagaaagagcttcatcctctgagaaaaatgagagccattctgccactaaatcagctttaattcagaaactgatgcaagatattcagcaccaagacaactatgaagccatatgggaa

SEQ ID NO: 2302 - DNA, 383 bp, Homo sapiens
  MAP TO AP000122.1; EXPRESSED IN ADULT LIVER, SIGNAL = 2.8; EXPRESSED IN PLACENTA, SIGNAL = 2.7; EXPRESSED IN BRAIN, SIGNAL = 2.1; EXPRESSED IN FETAL LIVER, SIGNAL = 2.3; EXPRESSED IN BT474, SIGNAL = 1.4; EXPRESSED IN HEART, SIGNAL = 2.5; EXPRESSED IN HELA, SIGNAL = 2.3; EXPRESSED IN HBL100, SIGNAL = 1.9; EXPRESSED IN LUNG, SIGNAL = 1.9; EXPRESSED IN BONE MARROW, SIGNAL = 3.2
tgactcatgctctcagtggccctcgaaggcaccaggtgaaagaagagggtcagacaaccactagccacagctgtggcagcctcggttcaaaaatgtaaaatctgccatgcaggcagtttcaaagacttaacctatgcccttgtataattattatttttacttcttttatagcaacgttcattttctaacctgaaggtggttcaggtgatgttctaatctgcttttgagtttgaaaatgcatctaccagatgattcatggtggctgccgaggtggtgaataccgaggatcccaaaatgaaaaattacggagggaaacttagaaaagtagtactctctcacagccagagtggtgctggtgaccctccagtccaggctaaaacagg

SEQ ID NO: 2303 - DNA, 455 bp, Homo sapiens
  MAP TO AP000313.1; EXPRESSED IN PLACENTA, SIGNAL = 4.5; EXPRESSED IN HBL100, SIGNAL = 3.4; EXPRESSED IN HELA, SIGNAL = 4.1; EXPRESSED IN HEART, SIGNAL = 3.8; EXPRESSED IN BONE MARROW, SIGNAL = 4.3; EXPRESSED IN LUNG, SIGNAL = 3.8; EXPRESSED IN BRAIN, SIGNAL = 4.8; EXPRESSED IN ADULT LIVER, SIGNAL = 4.5; EXPRESSED IN BT474, SIGNAL = 2.8; EXPRESSED IN FETAL LIVER, SIGNAL = 6.6
gtccatgccacacacagctgccgcactgatcccctgaaacacagccaagaccttcccagctccgcagccagcgcctcctcgactggacttccccacctgttagggctgaactgtgtccctcagattcacacgttgaagcccaggacatcagaatatgacttcgtttggagataaattctttaaagaggtgatgaagtgaacacgaggctgttagggtgagccctaattccatctgatgggtgctcttaataagagggggaaatgtggacacacagacgctggagatgtgcatgcacagaggaaagaccctgccgaggagagaggcctcaggaggaaccagccctgttgtcaccttgatcttggactttgtatctttagaaccatgaggaagtatatgttgtttaagcggctgggtctgtggcctttgttatggtcgcctgagcagattagcgcac

SEQ ID NO: 2304 - DNA, 458 bp, Homo sapiens
  MAP TO NM_007104.1; EXPRESSED IN BONE MARROW, SIGNAL = 1.9; EXPRESSED IN LUNG, SIGNAL = 1.7; EXPRESSED IN PLACENTA, SIGNAL = 3.6; EXPRESSED IN BRAIN, SIGNAL = 2.4; EXPRESSED IN ADULT LIVER, SIGNAL = 2.7; EXPRESSED IN FETAL LIVER, SIGNAL = 1.9; EXPRESSED IN BT474, SIGNAL =   3; EXPRESSED IN HEART, SIGNAL = 1.8; EXPRESSED IN HELA, SIGNAL = 3.9; EXPRESSED IN HBL100, SIGNAL =   4
agccaggccttctccctccctcaacttcatggtgcaggcaagggacatggggagcacagggtgggggtctcccgaggcctgatctctaacggggcctggttttcagccctttgtgatccacgacatcgagacattgtggcaggcagagaaggggctggtgtggaagcagttggtgaatggcctgcctccctacaaggagatcagcgtgcacgtcttctaccgctgccagtgcaccacagtggagaccgtgcgggagctcactgagttcgccaagagcatccccagcttcagcagcctcttcctcaacgaccaggttacccttctcaagtatggcgtgcacgaggccatcttcgccatgctggcctctatcgtcaacaaggacgggctgctggtagccaacggcagtggctttgtcacccgtgagttcctgcgcagcctccgcaaacccttcagtgata

SEQ ID NO: 2305 - DNA, 969 bp, Homo sapiens
  MAP TO AL031669.12; EXPRESSED IN LUNG, SIGNAL =  13; EXPRESSED IN ADULT LIVER, SIGNAL = 7.5; EXPRESSED IN PLACENTA, SIGNAL = 9.8; EXPRESSED IN BRAIN, SIGNAL = 4.3; EXPRESSED IN BONE MARROW, SIGNAL = 8.7; EXPRESSED IN FETAL LIVER, SIGNAL =   9; EXPRESSED IN BT474, SIGNAL =  70; EXPRESSED IN HEART, SIGNAL = 5.7; EXPRESSED IN HELA, SIGNAL =  65; EXPRESSED IN HBL100, SIGNAL =  48
aagattttgaacaaagaaatgaggaatatcaagatcagagtgtatttacatgccatttttctccagggaagaggaaagtgaattaataggaatgagggtttttaaaaggtggatgttttatttgctgctacttctaacacctcagaatcatggtaaaagacaaagtttgatggttacttttattgttaaactgaaagatttccttgccactgacaaactaaataccaagtactcgacgaattaccccacttaatcctaatcttatgatgtgaggcatgttatgattacttccatttaaatgacagaaaaacaaggctggcttttgtcttccagctcaaaggaggccaaggtgcaacttctttcagtcgtcctgaatcggattcatctgacacaagctgcctccaccatgctgctgaagtttgaccccaatgagattagagtcgtatacctgaggtgcaccgggggtgaagtcgatgccatgtctgcactggctcccaggataagacccctgggtctgtctcccaaaaaggttgatgatgacattgccaaggcaactagtgactggaagggtctaaggattacagtgaaactgacgattcagaacagacaggcccagattgaggtggtaccttctgcctctgccctaatcatcaaagccctcaaggaaccaccaatagacagaaagaaacagaaaaacattaaacacagtggaattatcacttttgatgagattgtcaacactgctcgacagatgcagcaccaatctttagccagagaactctctggaactattaaagagctcctggggactgactactgcccagtctgtgtctgcaatgttgatggccaccaccctcatgacatcatggatggcatcaacagtgttgtggtggaatgcccaactagttaagaagcacaaaggaaaaatttccataaaggttcatttgacaaggctgaacttacccaaaa

SEQ ID NO: 2306 - DNA, 960 bp, Homo sapiens
  MAP TO AP000511.1; EXPRESSED IN BT474, SIGNAL =   1; EXPRESSED IN FETAL LIVER, SIGNAL = 0.98; EXPRESSED IN HBL100, SIGNAL = 2.4; EXPRESSED IN HEART, SIGNAL = 0.98; EXPRESSED IN BRAIN, SIGNAL = 1.5; EXPRESSED IN BONE MARROW, SIGNAL = 1.2; EXPRESSED IN LUNG, SIGNAL = 1.5; EXPRESSED IN ADULT LIVER, SIGNAL = 1.1
ttttcaccaaaactctccctctattactgttcctcccacttctgccatgtctcttttcctagactcattattccctgtaactctgacccctaatgtatcctcaattccctatcccataggttgatttctgtggggcacatctgtcccttaccaagaagatcaggccaaggaacaccaggaggagaatcacagccaccaggaccacaataactatggcccatgcagggaatgaatcattctctcccatctgtccagcgtggatacctttctgtgagccatctttattgaggtatggatggctctcgtttcctgtggcttctgatgtgatagaactcagcttcgttctagatgtaatgagggtgaaagaaccagtgggcacctgatgagtaacttcagttttatttagatgagaagaggtagtagtgagagatttgtctcctgtgaccttgactgaaggttttatagtctttgtgactgctgctgttttttctgggttttctgtggactttactggggcttttatggtctcagtggtcagtgtggtgttccccaggttttctgtaggcttttctgggactggtgtgtttttccctttggtgcatatggtcttctctgagtatagcgtaggcttttctggggttcttgtggttttctctgtggttgacgtggtcttttctgggtgttctgtggacttttctgtgacttgtgtcatcttctcatgggccaatgtggtcctttttgcatgttttataggctctgctggggctggtgtgatcacattggctgatgtagccctatctctatgttctgtagactctgctgcagatgaggtgatcttgtcattgggtgatgtggtcctttctccatgttctgtaggctttgctagggatggtgtgatcttctcattggccgacgtagtttttgctccatgttctgtaggcccttctggggatagtgtga

SEQ ID NO: 2307 - DNA, 942 bp, Homo sapiens
  MAP TO AL050329.9; EXPRESSED IN BRAIN, SIGNAL =   3; EXPRESSED IN BONE MARROW, SIGNAL = 3.7; EXPRESSED IN LUNG, SIGNAL =   6; EXPRESSED IN BT474, SIGNAL = 6.5; EXPRESSED IN FETAL LIVER, SIGNAL = 5.1; EXPRESSED IN ADULT LIVER, SIGNAL = 3.8; EXPRESSED IN HELA, SIGNAL =  18; EXPRESSED IN PLACENTA, SIGNAL =   4; EXPRESSED IN HBL100, SIGNAL =   5; EXPRESSED IN HEART, SIGNAL =   2
ttgcacaaaactcaccatcagtagaaaacatacagacttctcaagcagaacaagcaaaacccttacaggaggatattttaatgcaaaatattgaaactgtgcacccatttcgaagaggatcagcagtagcgacatctcattttgaagttggaaacacatgtccatcagaatttccttctaaaagcatcacctttacttccagaagcaccagccccagaacaagtacaaacttttcacccatgaggccacagcagcccaaccttcagcatctcaagtctagcccacctggatttccatttccagggcctcctaattttcccccacaaagcatgtttggatttccaccacatttgccacctccattacttccccctccaggctttggctttgctcaaaatcccatggttccctggccacctgttgttcatctcccaggtcagccacagcgtatgatgggtcctctctcacaagcatcaaggtatataggcccgcagaatttttaccaggttaaagacattcggaggccagaaaggcgccatagtgacccttggggtaggcaagaccaacagcaactggataggccatttaataggggtaaaggggaccgccagagattttatagtgattcacaccatttgaaaagagagcgacatgaaaaggaatgggagcaagaatctgaaaggcatagacgcagagacagaagccaagacaaggacagagacagaaaaagcagggaggaagggcacaaagataaagagagggcacggttatcacatggtgatcgaggaacagatggaaaagcaagcagagatagtaggaatgtagacaagaagccagataaacctaaaagtgaagactatgagaaggacaaagaacgagagaaaagtaaacacagagaaggagaaaaggacagggataggtaccacaaagatagggaccaca

SEQ ID NO: 2308 - DNA, 471 bp, Homo sapiens
  MAP TO Z98044.10; EXPRESSED IN PLACENTA, SIGNAL = 1.4; EXPRESSED IN HBL100, SIGNAL =   2; EXPRESSED IN HEART, SIGNAL = 1.4; EXPRESSED IN BONE MARROW, SIGNAL = 2.3; EXPRESSED IN BRAIN, SIGNAL =   2; EXPRESSED IN LUNG, SIGNAL = 2.6; EXPRESSED IN ADULT LIVER, SIGNAL = 2.4; EXPRESSED IN BT474, SIGNAL = 1.5; EXPRESSED IN FETAL LIVER, SIGNAL = 1.7; EXPRESSED IN HELA, SIGNAL = 1.6
cattgggatgtccttcgccctgagggcaccaccagctggcctgccactttaggctggtaggaggccagggagacaggggaatgccatccttgcctccgagcaccctgggggaaatcccacctcaagtcccctccactccacccaagggcgtctgcatttggaaagctgctcccggcgaagtgggcagcccagtgccccatgcccagccccagggcccacctgcgaaggtcggcgtcaggctgtggaagctgtctggcttctgcagctctctgcgcacctgctcactgtaagactggtactggcccacgacggcactgcccctctgcaggccccgcagcgcctggaagacctgaagcttgtgccgcagcacagcctccgcactgctgacattgtggggcagctccatggccacgagggtgaggacctccgtcagatggttctggaggacgtcgcgaatgacaccgtactcct

SEQ ID NO: 2309 - DNA, 993 bp, Homo sapiens
  MAP TO AL031963.11; EXPRESSED IN BONE MARROW, SIGNAL = 6.3; EXPRESSED IN LUNG, SIGNAL =   6; EXPRESSED IN BT474, SIGNAL = 2.4; EXPRESSED IN ADULT LIVER, SIGNAL = 8.4; EXPRESSED IN FETAL LIVER, SIGNAL = 3.3; EXPRESSED IN HELA, SIGNAL =  18; EXPRESSED IN PLACENTA, SIGNAL = 7.1; EXPRESSED IN HBL100, SIGNAL = 4.1; EXPRESSED IN HEART, SIGNAL = 2.3; EXPRESSED IN BRAIN, SIGNAL = 5.2
cttggcatccgtgatggtccgggggctcccgaggcgatcaggcagcgtcaatcttcagctgctaagccgagcagatctaggaaggagtcagtcagagagccttgggctagagcttcaggggctctaggagtagctgctggatgagctgggcagtctgatttccagtgggtccctgcacagatggcttgggagcaatcctgggctgtgggcattccttggcctagtggccagatttctggcacttgaaacaagatcctgatggaggaagtcttgtaagaatgcttgactgctgtggcttaggtgtgtgcggcttaggcattttgaagttcttgtgtgctggaggtgtggctgggttttgtctcacggcagaggcaagtaattgtaactcagaaatgcgttgccgtctggctgcctcctctctattattgtacaccttgaaggcaaggttgattaattcctgttgtggggtttgagggccagattctaatttttgaagttttttcctaatgtcaggagcggattgggtgataaaatgcatattaagaataaggcggccttctggcccttctgggtctagggcggtaaagtgtgtaagggttgctacaaagcaggccatgaactgggctgggttttcatctttaccttgggtagtttctttaagcttgtcataattaacagctttgtaagctgcctttttaagcccttcaactaggcaggaaatcatgtaatctcgcctagctatacctggggaatctgcctgatagttccattggggatcctcttggggaactgctctgatgccttcctggaggtctggctcatgaagccggtggttatcagcgtgagagtggactagagaaaaaactctttccctttcatctggggagagggtagaagtcaggatgacatttaggtcactccaggttaaattgtaggacagagttagatatcggaattcctgtatatgtttagtggggtctgatgagaaacagc

SEQ ID NO: 2310 - DNA, 955 bp, Homo sapiens
  MAP TO AF162757.1; EXPRESSED IN BONE MARROW, SIGNAL =  13; EXPRESSED IN FETAL LIVER, SIGNAL =  10; EXPRESSED IN HELA, SIGNAL =  16; EXPRESSED IN HEART, SIGNAL = 7.6; EXPRESSED IN BRAIN, SIGNAL =   8; EXPRESSED IN LUNG, SIGNAL = 6.3; EXPRESSED IN BT474, SIGNAL =  19; EXPRESSED IN ADULT LIVER, SIGNAL = 7.6; EXPRESSED IN PLACENTA, SIGNAL =  11; EXPRESSED IN HBL100, SIGNAL =  21
ctacagctgacggtccattgaccgcaccatccttagggagaactgtagcctcctgcccaggcttttcagagacttctgatccagcctctacagctgaggcctctgcagcctctgttgtcacctccggtgactcttcagcaggtggcacttcttgacctaccagttactcaagaaccacctttcctgccttttcagaggtaactaccttctcctctggctcgtccccacccacatctactggcttgactgttgggtctaaagactctgctgctacctccactgcagtgccctgcttttctagaatcaccacaggctgctcttctgaaacttcttttggcttctcctctatgctcacaattacctctctgtgcttctcccaacctcctttttctctgcactctttttggacatcagtttcagaaactgatttttcttcctcaacatctggtacttcctgttctggcttcccagaagtgacctcagcttcatttggtccttctggtgctcctcctccttttgccccttcagagatttcagttaaccaacctagagtcaagtcaactttttcctgtggctcctctgcagattcacttatatccatatcttctcttccacccttctccatttcacagtcctgttctttatcagtttcaggctttgcgaaagacttgtcttctgtttttttggcttcttctttttctcccatggagtcataaacctgttctctcaactctttccttgcttcctcatctatgctatcattattttctaccagagattcatcttctgttttttctccttcttcctcttccacatgcacaccatccaaggtgtttcccaatacaccattctcgattctctccactttatctgcagatgtagaaggagcaggaacatcttcaattttgttggcagaaaccagctccgcagcgatggcggcagtggctgtggactc

SEQ ID NO: 2311 - DNA, 445 bp, Homo sapiens
  MAP TO Z98752.9; EXPRESSED IN BT474, SIGNAL = 1.3; EXPRESSED IN HBL100, SIGNAL = 1.2; EXPRESSED IN HEART, SIGNAL = 0.92; EXPRESSED IN ADULT LIVER, SIGNAL = 1.5; EXPRESSED IN FETAL LIVER, SIGNAL = 1.1; EXPRESSED IN HELA, SIGNAL =   1; EXPRESSED IN BRAIN, SIGNAL =   2; EXPRESSED IN BONE MARROW, SIGNAL = 1.9
tatagcttccccctcccttccccactgccctcttcctaccatggcctctggctccgactcctcctctgatgggctctggtattccctgcgcttcctcttcttcatgggtttgaggagctcagaagcgctggtagagcctgaggagttctccactatgactgacctgaggaaggccagccttagggaaagaaccacccgccctgcaccacccagcccctctcctaacccctgaacaggaatgaggctttgggggctgaaggtagagcaagtagggctgcgacctcctccccttaccgctcctggaacagctgagggcagccatcattagaggaaccaagatctggacccgcggcttggtgaggcccgcacgcctggcactgacaggtgctatcatcctctggggggtcctgattgggatcttctggaggattctgggggtggtcct

SEQ ID NO: 2312 - DNA, 454 bp, Homo sapiens
  MAP TO AC007028.2; EXPRESSED IN BT474, SIGNAL = 2.9; EXPRESSED IN PLACENTA, SIGNAL = 1.8; EXPRESSED IN ADULT LIVER, SIGNAL = 1.7; EXPRESSED IN FETAL LIVER, SIGNAL =   2; EXPRESSED IN HEART, SIGNAL = 1.7; EXPRESSED IN HELA, SIGNAL =   2; EXPRESSED IN HBL100, SIGNAL = 3.8; EXPRESSED IN BRAIN, SIGNAL =   3; EXPRESSED IN LUNG, SIGNAL = 0.98; EXPRESSED IN BONE MARROW, SIGNAL = 2.7
gccttgggaggttctgtgcaggctgctcaggccgcgtctcgagggttcggccgcatgtcagggtgaccacggaggccgccattcccgactaccggccggggtcgtgatcagctctgcccggacctccctgagcaccagggcaatgcggggagcttgtggagatgtcgcccctgccctggacaccggtcagggcccagagaggatcaggctgcgaagggcagcacaaggaggggcagcgagggctgatgctccacggagccggtgggagccaggagcaggcagcagctctgatctctcaggcggctccagctgctctaatcagggcagtgggctcggactctgtgctcttggaggtcaaggaacaggaaggagccctgccttccccgggcgtggctgcagccacccaaaccgcggctgaagacacgggcctctcgctccatgaagccggcagaag

SEQ ID NO: 2313 - DNA, 474 bp, Homo sapiens
  MAP TO AC007218.2; EXPRESSED IN PLACENTA, SIGNAL = 0.98; EXPRESSED IN HELA, SIGNAL = 1.1; EXPRESSED IN HEART, SIGNAL =   1; EXPRESSED IN BONE MARROW, SIGNAL = 0.97; EXPRESSED IN BT474, SIGNAL = 0.99; EXPRESSED IN HBL100, SIGNAL = 0.96; EXPRESSED IN BRAIN, SIGNAL = 1.2; EXPRESSED IN LUNG, SIGNAL =   1; EXPRESSED IN ADULT LIVER, SIGNAL = 0.98; EXPRESSED IN FETAL LIVER, SIGNAL = 1.1
gcttctgaatcactcagtctgcaaaatatcctaggatcttctctctttctccttctccttttcttcctccctgggttcaattacgcacagccagagcttccagagtagagatagcagcagcctccaagcaaacagcaaagcatccatttatcattccttcctttccaggtattttcttctgactaaggagaggagtactttcctatgcaatgtgaacctcatatcccctcccatcctctttctccaattctaagaggttgaagtcccattcttgtgagagatgtacttcctggtcacactcagagtcagtccacagggaggagagtgtgatggctgatggggtgtggagctgaacatacactccttgttggtgctgattgagagttatttctctttgcatctgtgtcaaagggaatcaggaaagaggcttaggtttgcagcaggaggaagaggaggaggagacagcgaagagaa

SEQ ID NO: 2314 - DNA, 461 bp, Homo sapiens
  MAP TO AC007318.2; EXPRESSED IN BRAIN, SIGNAL = 9.5; EXPRESSED IN BT474, SIGNAL =   5; EXPRESSED IN LUNG, SIGNAL =  11; EXPRESSED IN BONE MARROW, SIGNAL = 9.3; EXPRESSED IN ADULT LIVER, SIGNAL =  13; EXPRESSED IN FETAL LIVER, SIGNAL = 6.9; EXPRESSED IN PLACENTA, SIGNAL =  10; EXPRESSED IN HEART, SIGNAL =   9; EXPRESSED IN HELA, SIGNAL =  11; EXPRESSED IN HBL100, SIGNAL = 7.6
caccttttgccatgattgtgagggttctgcagccacgtggaactgtaagtccaataaacctctttttttgtatgtctttatcagcagcatgaaaaccaactaatacagcaaattggtgcccgcagagtggggtgctgctgaaaagataccaaaaatgtggaagtgagtttggaactaggtagcaggaaaaggtgggaacagttgagaggactcagaagaggacaggaaaatgtgggaaagtttggaactccctagagacttgttgaatggctttgaccaaaatgctgataatgatatgaacaatgaaatttgggctgaggtggtctcacacagagatgaagaacttgttgggaactggagtgatatggtttggctgtgtccctattcatatctcaacttgaattctatctcccagcattcccacgtgttgtgggacggacccagggcgaggtaattgaatc

SEQ ID NO: 2315 - DNA, 456 bp, Homo sapiens
  MAP TO AC007089.2; EXPRESSED IN PLACENTA, SIGNAL = 2.6; EXPRESSED IN HBL100, SIGNAL =   2; EXPRESSED IN HELA, SIGNAL = 2.3; EXPRESSED IN HEART, SIGNAL = 2.9; EXPRESSED IN BONE MARROW, SIGNAL = 2.5; EXPRESSED IN LUNG, SIGNAL = 1.6; EXPRESSED IN BRAIN, SIGNAL = 3.3; EXPRESSED IN ADULT LIVER, SIGNAL =   3; EXPRESSED IN BT474, SIGNAL = 1.5; EXPRESSED IN FETAL LIVER, SIGNAL = 2.8
cagaatctttgaaaaggcataaaagccagtggtcaagaagtaactgacagcaaaggcaaaagagatgaaggctaagctggaaagtggagatgaagcctgatgatatactcagtggaagcccagaaagtctcaggaatgagaactaccattcacctctggaaatgggaaacgtagagtccaaaacaagaagattaatcggaagtgtcaggaatagctgggccccatttcatcccgggtcctctccccagctccatcagctaggtgacttcttttctggaagcagggacacaggtctctggaccaggatcagcagacacagccatgcctttagtcccagaaagatttggtggatcacatgctagctgccatatgaatcccaccaccatccccagcagctcctggagcagcacctccaacagaactgaaagaggctcctgcagagctgagaagagaccc

SEQ ID NO: 2316 - DNA, 477 bp, Homo sapiens
  MAP TO AC007283.3; EXPRESSED IN HBL100, SIGNAL = 6.3; EXPRESSED IN HELA, SIGNAL = 7.6; EXPRESSED IN HEART, SIGNAL = 8.8; EXPRESSED IN LUNG, SIGNAL = 4.9; EXPRESSED IN ADULT LIVER, SIGNAL = 6.9; EXPRESSED IN PLACENTA, SIGNAL = 7.1; EXPRESSED IN BRAIN, SIGNAL =  10; EXPRESSED IN BONE MARROW, SIGNAL = 9.4; EXPRESSED IN FETAL LIVER, SIGNAL = 7.4; EXPRESSED IN BT474, SIGNAL = 3.7
tgtggctccatcattcattcattgtgtgctcttaggctggttactcactgctccatgcctcggttttcccagctctaaaataggaaccataacagtccccatcttaggggttgccgagagcattaaaggatgtatattgggtcaagcacttagaacactggctacactgttctgctgaccatcatttttagtattagtatgactactctcatcccctcatccttaactatcactatttttcagggaagggatgcaggcccttacctgctctcaatccctgcatcttgctttgcacctgctctctattcccaaatcttcctgtgtctgtttccttcttatcatttagtctcacctgaaatattacctccaccaagaaactaccattatcctgttttgatttgttcatggcagggatcacttcctgaaattgcctctttttgttagagacaggatctcgctctgttgcccaggctagaa

SEQ ID NO: 2317 - DNA, 474 bp, Homo sapiens
  MAP TO AC007375.4; EXPRESSED IN ADULT LIVER, SIGNAL =   3; EXPRESSED IN BT474, SIGNAL = 2.4; EXPRESSED IN FETAL LIVER, SIGNAL = 7.3; EXPRESSED IN PLACENTA, SIGNAL = 4.5; EXPRESSED IN HBL100, SIGNAL =   2; EXPRESSED IN HELA, SIGNAL = 2.2; EXPRESSED IN HEART, SIGNAL = 2.9; EXPRESSED IN BRAIN, SIGNAL = 4.5; EXPRESSED IN BONE MARROW, SIGNAL = 3.1; EXPRESSED IN LUNG, SIGNAL = 1.9
tgtaacagagcccctatctttgatatgtctgtgaaattcagttaaagtatacttcaaggataaccgaggctttgagatatagggcaatttcgaagttgccttatatatgagatatagagatagtaaaaaaaaaaaaaaacttggggagggggtgatcattttctgcccttccctctacctccccgcaacaagtggtggccacgctggctcctgaggcacgtccttgtctgtgtgtctcttccagggacgaggatctgattaacaagtgtggggacgacgcacgcatctacatcgtgttccagtaccacctcatcatctttgtgctcatcatctgtatcccctccctgggcatcattttgcccatcaactatactggatctgttctgggtaggcaaagctcagctggccctggggcagcagctggacctgagaggcagccaggcaagccagtcagggctggggttgagggtctag

SEQ ID NO: 2318 - DNA, 477 bp, Homo sapiens
  MAP TO AC007378.2; EXPRESSED IN BRAIN, SIGNAL = 1.4; EXPRESSED IN BONE MARROW, SIGNAL =   1; EXPRESSED IN LUNG, SIGNAL = 1.5; EXPRESSED IN BT474, SIGNAL = 1.1; EXPRESSED IN FETAL LIVER, SIGNAL = 0.89; EXPRESSED IN ADULT LIVER, SIGNAL =   2; EXPRESSED IN HELA, SIGNAL =  11; EXPRESSED IN PLACENTA, SIGNAL = 9.7; EXPRESSED IN HBL100, SIGNAL = 3.6; EXPRESSED IN HEART, SIGNAL = 1.2
tgaattctcttattactgttgacagacttaaaccacttgaacctcacgtcctaatattagctcttttgccattgtcttctgtttccatgcatggaatattttcttcactattctcttaataagaatagagcgagatgctcttcacagttcatctcttctatcccttaaagcaaacagcaccaggctttcaagagttggaaagattgcagatgaataatgtgttctgattttgtgtcatttcccagatgactttgtggtgcagaagccagagctcagtactccctccatttgccacgcccctggaggagaatactttgtggaaggagaaacgtggaacattgactcctgtactcagtgcacctgccacagcggacgggtgctgtgtgagacagaggtgtgcccaccgctgctctgccagaacccctcacgcacccaggattcctgctgcccacagtgtacaggtaagcgacaccatgc

SEQ ID NO: 2319 - DNA, 448 bp, Homo sapiens
  MAP TO AC007599.1; EXPRESSED IN BT474, SIGNAL = 0.96; EXPRESSED IN FETAL LIVER, SIGNAL = 1.1; EXPRESSED IN PLACENTA, SIGNAL = 1.5; EXPRESSED IN HELA, SIGNAL = 1.6; EXPRESSED IN HBL100, SIGNAL = 1.2; EXPRESSED IN HEART, SIGNAL = 1.2; EXPRESSED IN BONE MARROW, SIGNAL = 1.6; EXPRESSED IN BRAIN, SIGNAL = 1.3; EXPRESSED IN ADULT LIVER, SIGNAL = 2.2
ggaaattcaaatttaaaccccgatcatatgccacttcacatgcatcagacttgtgtaacaagagttagataaccctacttatcagtgaaggatacaaagcattgataattctctgccctcttgaggtgggcataagttcttgtaactaatttggagagcaatttgacaatatctagtaaaattgaaggtgcacttggtgtacaattcaccagttcagcgtttagatgataccctagtgttatggtgttatgggatccttggggtgttgcttttctggccagaaacctctgtggccagtggcacctttgcccaagttttgctccagtccactgggctcattccacttggctcatgctaccaggctggatcccatgcctgccaaggatgagccagatgtggagtggtgaggggtgtatgagcaagtgtagggtctggacactgcacagtc

SEQ ID NO: 2320 - DNA, 468 bp, Homo sapiens
  MAP TO AC007721.7; EXPRESSED IN HELA, SIGNAL =  11; EXPRESSED IN PLACENTA, SIGNAL = 1.7; EXPRESSED IN HBL100, SIGNAL = 1.5; EXPRESSED IN HEART, SIGNAL = 1.7; EXPRESSED IN BONE MARROW, SIGNAL = 1.6; EXPRESSED IN BRAIN, SIGNAL = 1.2; EXPRESSED IN LUNG, SIGNAL = 1.2; EXPRESSED IN ADULT LIVER, SIGNAL = 1.6; EXPRESSED IN BT474, SIGNAL = 4.3; EXPRESSED IN FETAL LIVER, SIGNAL = 1.7
aggaattccaggtgtccctcttccagacactggtgctcctcatgttcaacgagggagatggcttcagctttgaggagataaaaatggccacggggataggtacgaaaactgcagagtgcatagctccatgagttgttcttaaagcatgtatttgttttaagataagacatagacttggtagcatgattggtttactgttgttgagtctcattcgtttaacgccagcctttgcctgcatttgcttcccattcagaggatagtgaattgcgcagaacgctgcagtccctggcctgtggcaaagcacgtgtgctgattaaaagtcccaaaggaaaggaagtggaagatggagacaagttcatttttaatggagagttcaagcacaagttgtttagaataaagatcaatcaaattcagatgaaggaaactgtatgtataaactttctctttttacttatagggggtttagca

SEQ ID NO: 2321 - DNA, 468 bp, Homo sapiens
  MAP TO AC009492.1; EXPRESSED IN PLACENTA, SIGNAL = 1.5; EXPRESSED IN HBL100, SIGNAL = 1.4; EXPRESSED IN BONE MARROW, SIGNAL = 1.7; EXPRESSED IN FETAL LIVER, SIGNAL = 1.3; EXPRESSED IN HELA, SIGNAL = 2.4; EXPRESSED IN HEART, SIGNAL =   1; EXPRESSED IN BRAIN, SIGNAL = 2.6; EXPRESSED IN LUNG, SIGNAL = 5.3; EXPRESSED IN BT474, SIGNAL = 0.98; EXPRESSED IN ADULT LIVER, SIGNAL =   2
tgagaggaaggaaaaattgggaagtctaaatggaagctgaaatcttctgagcatttgctttctaacttgtagaggctaaaattagaccttggaaaaggttagttttcttctctttaccacccctttttagagtgtgaggagaaattcctcccattctcctgacctgtaggatatggctaataacagtcctgtctcatgaaagatgatgtgaggactgaaataatgtatgtaaagcactcaaaagatgccaagtatccaacaagcttttaataaatgttcactaagaggtgggtgatgatgaagatggtgttgatggtgaagatgatgatggtggtgatgatggtgatggtgatgatgatgatgatgacaatggtgatgatgatggtggtgatgatgatgatgatgttggtgatggtgataatgattcctcaattttcctaactctactttttggttggattctcaagc

SEQ ID NO: 2322 - DNA, 445 bp, Homo sapiens
  MAP TO AC009185.2; EXPRESSED IN PLACENTA, SIGNAL = 2.6; EXPRESSED IN HBL100, SIGNAL = 5.1; EXPRESSED IN HEART, SIGNAL = 2.2; EXPRESSED IN BONE MARROW, SIGNAL = 2.5; EXPRESSED IN FETAL LIVER, SIGNAL = 2.5; EXPRESSED IN HELA, SIGNAL = 4.3; EXPRESSED IN BRAIN, SIGNAL = 2.1; EXPRESSED IN LUNG, SIGNAL = 2.9; EXPRESSED IN BT474, SIGNAL =  19; EXPRESSED IN ADULT LIVER, SIGNAL = 1.8
cgagaaggaagctggcataggccacaccccatcctcctctctgaagctatgcttatagcttgtgacattatgtagcaaaccaaataatatttaaggtcgccttcagctcctttagggatgggggatctatcccgttaacagatcctcaaagtcatgttgttgctaatctatattagttatccctcctgcctcatccttctgagagggttcctttctctagggaaggagggaggtcctcaaattgtatacgacaatgcatggggaagcacttcctccactgacctctttccagcagtgattcataatctggtagacgtgtgtggaggccagccggggcttgtacaaccgaaatccggtactgatgtcttccaccacctctgagttgcttcggttttcatacgggattttgccttcactgaaaacttcccacatcagcacacctaca

SEQ ID NO: 2323 - DNA, 473 bp, Homo sapiens
  MAP TO AC009294.6; EXPRESSED IN PLACENTA, SIGNAL = 0.93; EXPRESSED IN HEART, SIGNAL =   1; EXPRESSED IN LUNG, SIGNAL = 7.1; EXPRESSED IN BRAIN, SIGNAL = 1.1; EXPRESSED IN BONE MARROW, SIGNAL = 1.1; EXPRESSED IN FETAL LIVER, SIGNAL = 1.1
tgtagtttgttccttttcattgcttatattattccagtgtaccaaagtatcctaatttatccatccattgtacatttggtagatatttgagtaatttctttttaggtgttattggaaacaatgatgctcttaacattcttgtaatgcacatgaaataatttctctggaatatgtaccttataatttctgggaactgaaataaatatttctatatgtacattatatgtatatatttacttatttatatttttaggaaaagtatatatttctaaaggactagtgttcagaataggcttctattgtccttctctccatcagtggattggttttactcttgtaaacagtgatgagtccctttttgcattggttgccagaatagtaaaagctacacatgttgccagactgtgctccatagagcatcatagacataggggctgggtggatggggtggctctggacctgctgaagaagga

SEQ ID NO: 2324 - DNA, 479 bp, Homo sapiens
  MAP TO AC008123.9; EXPRESSED IN BT474, SIGNAL =   8; EXPRESSED IN ADULT LIVER, SIGNAL = 5.2; EXPRESSED IN HEART, SIGNAL =   3; EXPRESSED IN PLACENTA, SIGNAL = 5.2; EXPRESSED IN BONE MARROW, SIGNAL =   4; EXPRESSED IN FETAL LIVER, SIGNAL = 3.4; EXPRESSED IN HELA, SIGNAL =  13; EXPRESSED IN HBL100, SIGNAL =  10; EXPRESSED IN BRAIN, SIGNAL = 3.8; EXPRESSED IN LUNG, SIGNAL = 4.5
gtaaccaccaccaccacaggaactccccgagctgcttccaccaaaactgcaccctttaatgggttcataatttgattgtttttgtctgctaaaatttccagaatcattatagttcccaccaccaccatagttaccactgccagaatttcctccttcattgtaaccatcatatccttcaccactatccccatacccgccattgtggttttcatatcctggttcaccatctccatagcccccactactgctgtaggcaggcccaccaccattgttgcccaccgtcacctccacatccattatatccaccattacaccctccataaccacctctgctgccaccacctctacttctaccaccagagcctcctctttcaccaaagtttccaccacagccaaaattacttgcaccacttccagagtttcctccacaacccataaagttgtcagatccacctccatcacctctgtgatcctgcaga

SEQ ID NO: 2325 - DNA, 469 bp, Homo sapiens
  MAP TO AC009532.2; EXPRESSED IN FETAL LIVER, SIGNAL = 1.3; EXPRESSED IN ADULT LIVER, SIGNAL = 1.1; EXPRESSED IN HEART, SIGNAL = 0.88; EXPRESSED IN PLACENTA, SIGNAL = 2.2; EXPRESSED IN BONE MARROW, SIGNAL = 0.93; EXPRESSED IN LUNG, SIGNAL = 0.89
  unsure 110
  unsure 131
  unsure 138
  unsure 424
gacatctggggaaaatttatatgctttatttgatttttggttctttgtttttgttggaagagttatgtggtcagcctaaagtctggcctgcaaacatattgtccaatttnaaatgaatccattaaggtggntgatgtncttaatgtattagagcatgcatgtgctggcatcactctgaaataaaggtatccagtgtactgtgccaatatgtaccatggccaaaaagtgttatctatcgttatgtgtgagagtctctcactttaatttcatgtttctgcctaaaggtatgtgaaggccttcccttttacaaacaagaatcagcagaaggaaatgatcgaaaccaaagtagtaaaggaggagaaggccaatgatagcaaccctaatgaggaatcaaagaaaactgataaaaacccagaagagtccnaagagtccaagcaaaactaccgtgcgatgcctggaagctgaagtt

SEQ ID NO: 2326 - DNA, 468 bp, Homo sapiens
  MAP TO AC010165.1; EXPRESSED IN HBL100, SIGNAL = 3.2; EXPRESSED IN HELA, SIGNAL =   2; EXPRESSED IN BRAIN, SIGNAL = 4.8; EXPRESSED IN LUNG, SIGNAL = 4.4; EXPRESSED IN HEART, SIGNAL = 2.9; EXPRESSED IN PLACENTA, SIGNAL = 2.6; EXPRESSED IN BONE MARROW, SIGNAL = 2.6; EXPRESSED IN ADULT LIVER, SIGNAL = 1.5; EXPRESSED IN BT474, SIGNAL = 2.8; EXPRESSED IN FETAL LIVER, SIGNAL = 2.2
aaattcttgaaaacaggcaaatgaaaaatctgttggatctgcctttgtctgtatgtctgttctgtctatatgtttgcatgtatcatgtagaagcaatatttcactaccaaactatatgaaagagctctaatctattggcttaaagtaagtttatccaacccatgcttgtggcccagcatggctttgaatgtaacacaacacaaatttgtaaactttctttaaacagtatgttttttgtgatttttttttagatcagctattttagtgttagtgtattttgtgtagcccaagaaagttcctcctcctcctcctccttctcctcctcctcctcctcctcctcctcctccttcttcttcttcttcttcttcttcttcttcttcttcttcttcttcttcttcttctcctcctcctcctcctccttcttcttctttctcttcttcttcttctccttccaatgtagccaaggga

SEQ ID NO: 2327 - DNA, 492 bp, Homo sapiens
  MAP TO AC009896.2; EXPRESSED IN BT474, SIGNAL = 4.3; EXPRESSED IN PLACENTA, SIGNAL =   1; EXPRESSED IN HEART, SIGNAL = 0.96; EXPRESSED IN HBL100, SIGNAL = 1.5; EXPRESSED IN HELA, SIGNAL =   4; EXPRESSED IN BRAIN, SIGNAL = 0.91; EXPRESSED IN LUNG, SIGNAL = 1.8
  unsure 171
  unsure 220
tgcattttgcattcagtaaaataaactatttacatatcacccatttaatatgacaaatttgggacaaaagaataggaaatctaaaatatgaatattgttttaaaattctaattcttcatgagttaaagaaggccattcttttattattagaatgacatattttattatatntttacttactttaaaaaacctatcagtaagatgtttctttttgcttttncaggaaccgcggggaaaggcgaatgggtgcttttgaatgtgttcgtaaagtgtatcagacagatggactaaaaggattttataggggcatgtctgcttcatatgctggtatatcagagactgttatccattttgttatttatgaaagtataaaacaaaaactactggaatataagactgcttctacaatggaaaatgatgaagagtctgtgaaagaagcatcagattttgtgggaatgatgctagctgctgccacctcaaaaacttgtgcca

SEQ ID NO: 2328 - DNA, 474 bp, Homo sapiens
  MAP TO AC009946.1; EXPRESSED IN BONE MARROW, SIGNAL = 2.2; EXPRESSED IN LUNG, SIGNAL = 3.8; EXPRESSED IN ADULT LIVER, SIGNAL = 1.5; EXPRESSED IN FETAL LIVER, SIGNAL = 1.7; EXPRESSED IN BT474, SIGNAL =   1; EXPRESSED IN HELA, SIGNAL = 0.96; EXPRESSED IN PLACENTA, SIGNAL = 2.9; EXPRESSED IN HEART, SIGNAL = 1.3; EXPRESSED IN HBL100, SIGNAL =   1; EXPRESSED IN BRAIN, SIGNAL = 1.8
aggcaggatacagacatgggaatgctaatttccagtccagagccttgcctttaccatgtgtgtcagttactaggctattgtctctttgctccaaccccatccttccgcacttagctttggatgctggggttgtgctatggactgaatatttgtgtccctccccaaatccatgtgttgaagcctaatcctcagtgggatggaattaggaggtggggaagtaattaggtcaggagagtggagccctcataagtgggattagtgccttcataagagacaagagacagcttgcatcctcgtgctctgcaatccactgtatgagcgtagaatgagaagacagctgtctgcaaagaagagtgtcctcatcagactctagatcagctggcaccttgatcttggacttctcagcctccataactgtgaaaaataaatgttatttgagatactcattctgtggtattttgttatagtagccca

SEQ ID NO: 2329 - DNA, 481 bp, Homo sapiens
  MAP TO AC009787.1; EXPRESSED IN HEART, SIGNAL =   3; EXPRESSED IN PLACENTA, SIGNAL = 3.3; EXPRESSED IN HBL100, SIGNAL = 2.8; EXPRESSED IN BRAIN, SIGNAL = 3.3; EXPRESSED IN BONE MARROW, SIGNAL = 3.9; EXPRESSED IN LUNG, SIGNAL = 3.5; EXPRESSED IN ADULT LIVER, SIGNAL = 2.8; EXPRESSED IN BT474, SIGNAL = 1.8; EXPRESSED IN FETAL LIVER, SIGNAL = 3.7; EXPRESSED IN HELA, SIGNAL = 2.9
  unsure 271
acacacaggacagagcctggctcatcacaaaatggcaaatgctgtggaacatgtattaagcaccatgctctacctcaaagcactacatgtattaaatcatcaatttgcacaacactctgccacccccgagaaaagtaccattttaatccccattttcatggaggattagactgaggacttaggtggcttgtttacagtcacatagccagtaaaggggcaaagctgggattcaaacccagcagtcagatagtggagccctggcgagcaaggnagatgaacggggctctcaggcacacccccctttccctgatgctcacagccactcttcatatctccagtctttggtggcccctgtgccgtcatcagaatctgccccttttgagtgatttttcattattcggcagctctcttcatttccatcttattacaggctggaccaggactcatctcctaggagacagtaagtgattctgtccggttt

SEQ ID NO: 2330 - DNA, 479 bp, Homo sapiens
  MAP TO AC010135.1; EXPRESSED IN BT474, SIGNAL = 1.8; EXPRESSED IN FETAL LIVER, SIGNAL = 3.3; EXPRESSED IN HELA, SIGNAL =   5; EXPRESSED IN PLACENTA, SIGNAL = 3.7; EXPRESSED IN HBL100, SIGNAL = 2.2; EXPRESSED IN BRAIN, SIGNAL = 3.6; EXPRESSED IN LUNG, SIGNAL = 2.2; EXPRESSED IN HEART, SIGNAL = 3.3; EXPRESSED IN BONE MARROW, SIGNAL = 3.9; EXPRESSED IN ADULT LIVER, SIGNAL = 5.5
aggagaacaaaggaaggaggaagtaacttgtgagatgttgagaaagttaaaaacacttttaaataaggaagaagaacacactatgacctaacgcttgcttggaccagtataagcatgccagggcaaatatttatgctaaattgtgggagctaagaacataaaatacattgattcattatggttagcagacatttaagaatgttagcacaggtctttgaataaatattgcttctaagagaagttactatttattcctaaatggggaggaaagtctttgaagaggaacctctactttacttcttacaaacttgaagtcaagtccactcccatgagcttcagattgtcttccactagcagctgcctgaggcaattttgggaagctctttccagcaaaatcagcagctcttggtgacaataggtggccattgaactctttgcaacatttccaaggaataattgctcaagccaattttgtccca

SEQ ID NO: 2331 - DNA, 480 bp, Homo sapiens
  MAP TO AC010141.1; EXPRESSED IN ADULT LIVER, SIGNAL = 0.94; EXPRESSED IN FETAL LIVER, SIGNAL = 0.93; EXPRESSED IN HEART, SIGNAL = 0.94; EXPRESSED IN LUNG, SIGNAL = 1.3; EXPRESSED IN BRAIN, SIGNAL = 1.1
caaatcccccatttcttgtgcctgtcaaatggatgcctgaattgcccctgcaccataatttgtatttggactggctcacagcatttctctcccataattaacaggtggacaagcctggatcattccctcaccgtaattggctgttgggctgttgaagcttccctttaccatagtcaatggtaggccgtgaaacaatgggagtggcaagccatgtctcagtctccctttccaaaaattcataaggctgaggtggaggtggctgttctgcaccttcctctaaaggcgcagtagggggaactgtttctttcataagtttttggaggttagtatgtacaccttcccatttctcccccttttttaaactagactgtgatggttgactgtgctgattatcagactcctgattattaaacttttttatgtcaccctgaaacttctcctcctccttctcagtgtggaagggctccagtgctgttttaa

SEQ ID NO: 2332 - DNA, 463 bp, Homo sapiens
  MAP TO AC009884.2; EXPRESSED IN HBL100, SIGNAL = 1.3e+02; EXPRESSED IN HEART, SIGNAL = 0.85; EXPRESSED IN LUNG, SIGNAL = 0.93; EXPRESSED IN BRAIN, SIGNAL = 1.4; EXPRESSED IN BONE MARROW, SIGNAL = 1.6; EXPRESSED IN ADULT LIVER, SIGNAL = 1.4; EXPRESSED IN FETAL LIVER, SIGNAL = 1.3; EXPRESSED IN HELA, SIGNAL =   1
gagtaggctccttcttttgccatttccccttttgccacagatgacacagcaagaaggcccttaccagatgccagtcctttggtcttggacttcccagcctccagaatggtgagacaatacttttctgttcaacataaattacctagtctgtggtattttgttatagcagcacaaaatagactaagacaggctttaactgctttctgatattttctgcaggatctgagtctttgttttctgctcaacaagctgctgagcagcaatcccagccccagggcccagagcaccttcctctgggagtccagcctcaggactgtgctctgcctgcccctactgcacaggcctcagagccacccacctcaactctggttcagccacagtcagaagcaagtaagatgctgtgctacactgatgagctctacgaatctgcttttcgttttcaggacctttccatttggctcct

SEQ ID NO: 2333 - DNA, 458 bp, Homo sapiens
  MAP TO AC010680.2; EXPRESSED IN HEART, SIGNAL = 2.3
cctggggaaagactgcatagaagtgtccgccgatctcacaagttgtatttgcttgggtaaatgtggagtcgatattccccctttatagcttctaactaaaagatactaatatcttcaaagttcctgaagctcctaaagaagttgtacttgaaaagaaagcatctgtggctgtgccaaaaaaccggaagccccacgtgcaaaaggtatttattccctctcctctgctaagaaaaacttatcgtctgtacccctcacaatcactgtaatatataccttcaccattcataaattataaaaatactaatatctttcaagtgcctgaagctgctcaagaagttgtcccagaaaagaaaattcccaaggcaccaatcaaaaaaccagaagcccccgcagttacaggtacatgtcagctcaaccttatcctgcagaagaaatctctcttccattcctgaaaacaa

SEQ ID NO: 2334 - DNA, 481 bp, Homo sapiens
  MAP TO AC011406.1; EXPRESSED IN BONE MARROW, SIGNAL = 1.2; EXPRESSED IN FETAL LIVER, SIGNAL = 1.3; EXPRESSED IN HBL100, SIGNAL = 0.94; EXPRESSED IN HEART, SIGNAL =   1
acccactgcaagaaaccaacgcacccaaaacatcacacttcacaggacacagaggaacagcgtgtctcttttcttataaatgactcatctgtgcaacatgactaattctttaaatcctaaatactgagagtaaactctttttaaggtagtttacagattgagtcttttttttaaagcaagcaagaaagaaaattaaaaagggaaatcatatatatttgttttgacctcacctcttgtggaatgtgaaatttatccaccactttgagctcataatacatctgtattccacattttaccagctccagttctgttaggggtaagtcactgaagtgaaatttattaatttcgtatttatctgcatctggcagctccgcttgctgtataaggaatagagtcaggtgattaggaaacatgaagtgtttctgggtgcccacctcctgtccagccctgtccccatcctgggtctgctggaaggatcaga

SEQ ID NO: 2335 - DNA, 478 bp, Homo sapiens
  MAP TO AC011416.1; EXPRESSED IN HBL100, SIGNAL = 0.98; EXPRESSED IN PLACENTA, SIGNAL = 1.1; EXPRESSED IN LUNG, SIGNAL = 2.2; EXPRESSED IN BRAIN, SIGNAL = 1.3; EXPRESSED IN BONE MARROW, SIGNAL = 0.99; EXPRESSED IN FETAL LIVER, SIGNAL = 0.96; EXPRESSED IN ADULT LIVER, SIGNAL = 1.1; EXPRESSED IN BT474, SIGNAL = 1.4; EXPRESSED IN HEART, SIGNAL = 0.96
gcaaaaatgcctgagtttccttagggccaaatcgacaccacaagaggtatctgggcttaagcaatcttgtccctgccctgcctaagagggttgcctgctagtggaggagcacagccaaggagcgggagctgaaggtggagggggcagaagaactcgggttgtggtcatcacccacatcagatgcctgtgcaactggggcccctgctaggcctactgaagagcctgcccatgccctgcccttcagcagtgtccagacatctgccacaggcacagttggccatcccgtgtgcaccacagcagcagcagctaagcagatgcctgtcctttccttcatccctgctccaagaccccaacactccaggagatacagaaaagacgaaggaagagcgggaagcagaggagcaggagagaagcaatgtacacacaattcccccagggtaggaccactggcccctggtcacacctggactgacaggaa

SEQ ID NO: 2336 - DNA, 478 bp, Homo sapiens
  MAP TO AC011460.1; EXPRESSED IN FETAL LIVER, SIGNAL = 2.8; EXPRESSED IN BT474, SIGNAL = 2.5; EXPRESSED IN HBL100, SIGNAL = 1.3; EXPRESSED IN HELA, SIGNAL = 1.4; EXPRESSED IN HEART, SIGNAL = 0.98; EXPRESSED IN PLACENTA, SIGNAL = 1.2; EXPRESSED IN LUNG, SIGNAL = 1.1; EXPRESSED IN BRAIN, SIGNAL = 1.1; EXPRESSED IN BONE MARROW, SIGNAL = 1.2
acatatcaaattgggctggcaatgtcaagaaggaagaatgttacatttcaagaaacttgagtttcttaaaatacccaaaatttagtttcttatctgaaactatgaaagtttcgtttcatatctgtaacatcaaggtttttctcttacaagagggtagattacaccgtcttgtgtgggagcaagagaaggatctgagaatctaccacttcagagtactgcaggcattccaaagaggtaggcatctgagaaaggaaggccactgactaggcaccctctgagtgacacagggcagctgtcctcacccactgccaccaggttgctgtagttctccaacatcacatcccggtacaggtccttctgagcagcgcccaggagttgccactcctcccaagtgaagtccacagccacatcctccagtgttatggattcctgtaataacagtcctgtttaataaagtgatgtctttttgatgatgtgg

SEQ ID NO: 2337 - DNA, 480 bp, Homo sapiens
  MAP TO AC011482.1; EXPRESSED IN HEART, SIGNAL = 0.96; EXPRESSED IN PLACENTA, SIGNAL = 0.96; EXPRESSED IN BONE MARROW, SIGNAL = 1.3; EXPRESSED IN LUNG, SIGNAL = 5.5; EXPRESSED IN BRAIN, SIGNAL = 0.91; EXPRESSED IN FETAL LIVER, SIGNAL =   1; EXPRESSED IN ADULT LIVER, SIGNAL =   1
ggagccatgatgtagaaggctctggtatatgggaaaaaacatatttttcagagacccttgactattacaagaattttttaaagtagttaaaacaaactcattagggaggaaaaacaagtagagaagtaaaggtttgcacgtaaaaatgcatggcatttcagaaggcagagtggacacagctcttgatatgagacatgtttagttgaaaaaaaaaagccattttttcctccttctcctctggaattcttgctcagatgaaattttctgcacaaattacacctgcatctcgagaatatgcctttaaaggtgtcagcaccacccatttacctgctaccaccacacccactggcaggaccaagacctgcagaaacattccatccatttctgtcctttatactagtagagattcaggaacaatgagcttctctatgaaaataaaaatataagtttcttcttttctgtcctcagatgccctcctct

SEQ ID NO: 2338 - DNA, 472 bp, Homo sapiens
  MAP TO AC011192.1; EXPRESSED IN HEART, SIGNAL = 1.4; EXPRESSED IN PLACENTA, SIGNAL = 1.6; EXPRESSED IN BRAIN, SIGNAL = 1.2; EXPRESSED IN BONE MARROW, SIGNAL = 1.1; EXPRESSED IN LUNG, SIGNAL = 7.5; EXPRESSED IN FETAL LIVER, SIGNAL = 9.7; EXPRESSED IN ADULT LIVER, SIGNAL = 0.91
caccctcccaatgcacacaatattacatgaaacatctgcctaagtaacctagtctccaaaggttggttctgaaagatcaacaaatagagacttaggagcttagagaaaaacgaaaaaaaaaaaagttatttcagaatatcttacatttacccctcatgctgatctgtatcctctttttttcacagtttgcaaatattgactaagttcaagggcagtggtttaaggtctaacttcagagttagcatgaggtgacatacttaagatggtgcaatcctgtcctaatgaagaacatgttagatcccaaggttggtttatgggcagttcttgttcttgtcccagttgatatttgttttatcaagtcaggaactatttttgtcatcattgttaatcttcctcttgccagatctgttttggccgagggcatgcacttgaggtatgttagaagaatggagtgcagtattgtgggaaagaa

SEQ ID NO: 2339 - DNA, 498 bp, Homo sapiens
  MAP TO AL117356.1; EXPRESSED IN BT474, SIGNAL = 1.1; EXPRESSED IN HBL100, SIGNAL = 1.2; EXPRESSED IN HELA, SIGNAL = 1.8; EXPRESSED IN PLACENTA, SIGNAL =   1; EXPRESSED IN BONE MARROW, SIGNAL = 1.9; EXPRESSED IN LUNG, SIGNAL = 7.4; EXPRESSED IN ADULT LIVER, SIGNAL = 1.7; EXPRESSED IN FETAL LIVER, SIGNAL = 1.5; EXPRESSED IN HEART, SIGNAL = 1.4; EXPRESSED IN BRAIN, SIGNAL = 1.5
gggcctctctattccttgaaacacaacagtattgaaaattaggccaattaataacctcacaaaagacccctaagcatccaagtgaaagaagagtttcacgtctctcactttaagtcaaaagctagaaaggattttagtgaggacggcatgatgaaagctgagataggctgaaatctagacctcttgcatcaaacagccaagtcatgaatgcaaaaggaaaagttcttaaaggaaatgaaaagtgctactccactgaatccacaaatgatgagaaaatgaaacagacttattgctgatatggagaaaattttagtggtctggatagaagatccaaccagccacatcattcccttaagcctgagcaaggctctaactcttttcaattctgtgaaggctgagaaaggtaaggaagctgcaagagaaagtttgatgctagcagaggatgcttcatgaggtttaaggaaagaagctgtctctataacgtgagtgcatggtgaa

SEQ ID NO: 2340 - DNA, 466 bp, Homo sapiens
  MAP TO AC011201.1; EXPRESSED IN FETAL LIVER, SIGNAL = 3.3; EXPRESSED IN BT474, SIGNAL = 2.5; EXPRESSED IN HBL100, SIGNAL = 4.7; EXPRESSED IN HELA, SIGNAL = 3.4; EXPRESSED IN HEART, SIGNAL = 3.6; EXPRESSED IN PLACENTA, SIGNAL = 4.2; EXPRESSED IN LUNG, SIGNAL = 7.2; EXPRESSED IN BONE MARROW, SIGNAL =   7; EXPRESSED IN ADULT LIVER, SIGNAL = 4.1; EXPRESSED IN BRAIN, SIGNAL = 3.4
gttgatacagggccacaaggcctaaagtatttactacctggccctttgcacaaaagtcagctgtcgtctgatgtaaagaatatacccagggccaggtgcagtggctcagcctgcaatcccaagactttgggaggccaaggcaagaggagggttgcctgagccagggatttgagaccagcctgggcaacacagtggcaccccgtctctacaaaaaaatattaattagctgggcatggtggcacacactcaccacacctggctaacttaccagccaggacccagggtaggataggactgatgggcgggtgtcagtgcaggtgccgtaagcagagccatcctttccaggtgacactgcatggcatggctgctaaccctgaaacttgcattcttgaaaaacttccctgggtccaacttgtttttcagtcttttgcctcttttgcatagaaggagtgaactatgggcagct

SEQ ID NO: 2341 - DNA, 465 bp, Homo sapiens
  MAP TO AC011474.1; EXPRESSED IN HBL100, SIGNAL = 2.6; EXPRESSED IN HELA, SIGNAL =   2; EXPRESSED IN HEART, SIGNAL = 2.4; EXPRESSED IN PLACENTA, SIGNAL = 2.8; EXPRESSED IN BONE MARROW, SIGNAL = 3.6; EXPRESSED IN BRAIN, SIGNAL = 2.7; EXPRESSED IN LUNG, SIGNAL = 1.1; EXPRESSED IN ADULT LIVER, SIGNAL = 2.4; EXPRESSED IN BT474, SIGNAL = 1.9; EXPRESSED IN FETAL LIVER, SIGNAL = 2.5
actggggactggatgacaaggttggggaacagctttgtagaaagcagaggaaagcatactgggaagtggggagagccatgcaaaggccccggggtgtggcgagcaccgtgtaccctgaaaatggtgagctgtgcgtctgggactgcaggagtgggtgcagggggcgtggaggatacatgattgctgaagctgctgccaggaatgggcgtccatgtggctttacgtccctggactcgcttgtcctgtctgggcattgggtccccaacagccccctgctacccaggtaccaaagctggagaggagtcatggggacgggcagacatctccactcaagtagctgaaggcttgccataatcagaagagtcaacctgctgcgtgtggccccagagagatgggactgattgtgggaggtgagtttgggagtgtttagcagctgcagatatttgggaatgagaggggtcatct

SEQ ID NO: 2342 - DNA, 500 bp, Homo sapiens
  MAP TO AL096869.1; EXPRESSED IN ADULT LIVER, SIGNAL = 1.1; EXPRESSED IN BT474, SIGNAL = 1.4; EXPRESSED IN FETAL LIVER, SIGNAL =   1; EXPRESSED IN PLACENTA, SIGNAL = 1.1; EXPRESSED IN HBL100, SIGNAL = 1.3; EXPRESSED IN HELA, SIGNAL = 1.1; EXPRESSED IN HEART, SIGNAL = 2.8; EXPRESSED IN BRAIN, SIGNAL =   3; EXPRESSED IN BONE MARROW, SIGNAL = 0.95
tcacaaataaattggtttggttctaaaaagcatgcttttaataaattccctgtgttctgaataaaattggccactctaatgctttcagcctgaccacaaatagtcacatcgtgcttgcatttgcgttagtggtgagacttgtgcaaagcaacaccttgagccaggagttctggaatcccgctttccttggaccacacatgtggatgttccctttctgaaatgagtacagctgcttctgggtctaagcccaccacttgtcttgctgggatggggactctgtggcttgagccgtggtgttttctccctttgtctccccactgcagactactgttttccaaagtgaagttgcagtcactctgccgaggcccggacgaggcactgctgacttgtaagcacatgctgcagatatggaaatcctgctacaacctcaccaaccccaggtaagaggccagcagggcctgctttgcgtggcttttgcatgggtccctgcctatcagtgc

SEQ ID NO: 2343 - DNA, 494 bp, Homo sapiens
  MAP TO AF166112.1; EXPRESSED IN ADULT LIVER, SIGNAL = 2.1; EXPRESSED IN BT474, SIGNAL = 1.4; EXPRESSED IN FETAL LIVER, SIGNAL = 1.8; EXPRESSED IN PLACENTA, SIGNAL = 1.7; EXPRESSED IN HELA, SIGNAL = 1.6; EXPRESSED IN HBL100, SIGNAL = 1.9; EXPRESSED IN HEART, SIGNAL = 2.1; EXPRESSED IN BONE MARROW, SIGNAL = 2.5; EXPRESSED IN LUNG, SIGNAL = 1.3; EXPRESSED IN BRAIN, SIGNAL = 2.1
gcaagtgttattgaagctactctttcttgtgtcatattcaaattaggtcagataccctttataaggataaaatgggataatacatgcaaagataaactgtgttggttttctgtccccctcaaatctcttctgggttttgatatctcttcttggatgctgagtcaaatgtggtcggagagccttccagcccctggtctctgtgtccttgcctgtccccccatctccttgcatggaccctgacgtctgcacccggcttctctgcaggtgcccactggctggtgatgacattctggcttgtcgcccagcagagtgacatcattgacagcacctgccactggaggctgttcaacctgctcgtgggggccgtgtacatcctctgctacctcagcttctgggacagcccttctagaaataggatggtcacgttctacatggcaagtggcacttttctttatcctaacttttacagtgtatacagcaagtggggtgtgtgt

SEQ ID NO: 2344 - DNA, 485 bp, Homo sapiens
  MAP TO AL096869.1; EXPRESSED IN ADULT LIVER, SIGNAL = 7.3; EXPRESSED IN BT474, SIGNAL = 4.1; EXPRESSED IN FETAL LIVER, SIGNAL = 8.3; EXPRESSED IN PLACENTA, SIGNAL = 9.4; EXPRESSED IN HELA, SIGNAL = 8.2; EXPRESSED IN HBL100, SIGNAL = 5.7; EXPRESSED IN HEART, SIGNAL = 8.1; EXPRESSED IN LUNG, SIGNAL = 4.8; EXPRESSED IN BONE MARROW, SIGNAL = 6.6; EXPRESSED IN BRAIN, SIGNAL = 8.4
gggagaagggaaagacttggagcagtattggcagctacgtagagaaacagggtctcctgtatcactctatcagtcagaatgtcttttgaaggtggcttctgctttcatgtttgtggttaatatcctggggctgccataaagatttggcttaaaatgtgaatgaggcacaatgtgaaacaactcaatatttgaagagaagcagacattgaaaagatggcttctttcgcgcgtgtgtgtgtgtgtgtgtgtgtgcgtgtgcatgtgtgtatgtaaaaccttttttggttttgttttaaaccagatcccagaggctctggggtatgtccgccaagctcttcagcttcaaggtgacgatgccaactccctgcacctccttgccctcctgctgtcagcacagaagcattaccatgacgctctgaacatcatcgacatggccctgagtgaatacccagaaaatttcatgtaagtgatcctgggctttggtt

SEQ ID NO: 2345 - DNA, 484 bp, Homo sapiens
  MAP TO AF182108.1; EXPRESSED IN HEART, SIGNAL = 4.5; EXPRESSED IN LUNG, SIGNAL = 6.1; EXPRESSED IN BRAIN, SIGNAL = 4.4; EXPRESSED IN BT474, SIGNAL = 2.1; EXPRESSED IN ADULT LIVER, SIGNAL = 7.1; EXPRESSED IN PLACENTA, SIGNAL = 6.3; EXPRESSED IN HBL100, SIGNAL = 3.5; EXPRESSED IN BONE MARROW, SIGNAL = 5.9; EXPRESSED IN FETAL LIVER, SIGNAL =   5; EXPRESSED IN HELA, SIGNAL = 6.5
acattggtgggcaatctagctttcatttcaagtttgcctactgtccaggtgtccactgaacataagccagtcccaactactaaaaaacaaacaaacaaaaaacacctaacaacaacaacaaaaaaactaatccaccctgttcctaaaaaccaccacatcatgttgctaaagagtatcttttagccaataaaaacttccttatatacttctatgtgacttttaaaatgtaattgcttttatttaaattcaaatggcataaaaggtcctgcattagttaattttgtttgtttatagatattttgtttctaggagtttcaccaaacgtttgggctgcagccagccaagagctatacttgggctgcctcccagttctgaatactgtggacccaagcccaaatttcaaggtcaagggactagagaccactgggctgtttggaactattagaattgagacagaaagggccccagtgacctcagcagtgaa

SEQ ID NO: 2346 - DNA, 474 bp, Homo sapiens
  MAP TO AL050317.9; EXPRESSED IN HELA, SIGNAL = 2.3; EXPRESSED IN HEART, SIGNAL = 3.3; EXPRESSED IN LUNG, SIGNAL = 3.3; EXPRESSED IN BRAIN, SIGNAL = 2.5; EXPRESSED IN BT474, SIGNAL = 1.4; EXPRESSED IN ADULT LIVER, SIGNAL = 2.3; EXPRESSED IN PLACENTA, SIGNAL = 2.6; EXPRESSED IN HBL100, SIGNAL = 1.8; EXPRESSED IN BONE MARROW, SIGNAL = 2.9; EXPRESSED IN FETAL LIVER, SIGNAL = 3.8
ccacagtgggtccacaaaagcaggggcttggcagctgagacggtgagctgatgaggccacccatgataggtgggtgcttagtgcacacctagacaatgtgtaagtgctcagtgaatctgagctgtttttaagcagctatcgcccactgggacccaggacgtgcagaatgggctcatcctccctccctccgcctctcctgttcccattgcagccccacctcttccattgctgtgtggctgagagttaccctgagtgtcagttttctcatctacaaaatagaaagagtaatagtcccaacctcacagagtctccctggggagtaaatgaaacagggtgtgtagtagcctactttggacgtagtaaaggctcagtgagatcatcattgtcattcctcttatcaccaagggcacccaggggttggggaggcactgaggcaggaagaggaggggagggtcccacatccttcctcagcct

SEQ ID NO: 2347 - DNA, 473 bp, Homo sapiens
  MAP TO AL035407.15; EXPRESSED IN HEART, SIGNAL = 2.9; EXPRESSED IN LUNG, SIGNAL = 2.4; EXPRESSED IN BRAIN, SIGNAL = 3.3; EXPRESSED IN FETAL LIVER, SIGNAL = 2.5; EXPRESSED IN ADULT LIVER, SIGNAL = 3.2; EXPRESSED IN PLACENTA, SIGNAL = 2.6; EXPRESSED IN HELA, SIGNAL = 2.3; EXPRESSED IN HBL100, SIGNAL = 1.8; EXPRESSED IN BONE MARROW, SIGNAL = 2.9; EXPRESSED IN BT474, SIGNAL = 1.4
tgaggtctcaaacccctgggctcaagcgatccttccatctcagcctcagaatagctagtacaatgggaaaacatcactgtgcccagctaattttcatttgtttgtttgtttctttgtagagacagtgtctcgctatgttgcccagcctgatctagaactcctgggctcaagcaagcctcccaccttggccttccaaagtactgggattacaggtgtgagttaccaagcctggccaagactgagttgttaaattcagctgaacaaagcctgggtcccccacttcctagggatcagcccctgtgaggaaagctgcatcagcatctaataccctcaaagatgatcattctgaaaagaaatatcttgaagggcttctgcatcatcaaacatttcaccacatgcaaaaagagtttgaaaaaattgagttttcctggctcataattggacagtacagtctggaggtgtgaaaacttttt

SEQ ID NO: 2348 - DNA, 485 bp, Homo sapiens
  MAP TO AL035661.16; EXPRESSED IN FETAL LIVER, SIGNAL =  22; EXPRESSED IN ADULT LIVER, SIGNAL = 7.2; EXPRESSED IN HELA, SIGNAL = 3.6; EXPRESSED IN BRAIN, SIGNAL = 8.3; EXPRESSED IN LUNG, SIGNAL = 3.4; EXPRESSED IN BONE MARROW, SIGNAL = 5.8; EXPRESSED IN BT474, SIGNAL = 3.4; EXPRESSED IN PLACENTA, SIGNAL =  18; EXPRESSED IN HEART, SIGNAL = 4.8; EXPRESSED IN HBL100, SIGNAL = 3.1
cagcaggactccacacacaggattcagaattcacctgctctgacctgtccaagttcaattccaaatgtggaaaggacacaaaacaaaagcgtgggtgcaagcatttgtgttacagtaagtgttccaacatgcttgtcgtataggagttttatcttcccagtcaggactcaagctcaccaaataccacagaggaaccctgggcacctctagggaacccaaattgagaaccacaacccgagaagcctcagagccagctaacttgatatgacctcgcctcaaactgtgcaaagcgaggtaacccacctgctccagcgggacgtccagatcccccatgtggaccttgttgtctgtcctgtgagccaccaggacatgctgcacggtggggcagtgcttcacagcctcatccactattttcttcagctccaccacgcgcccaccccggagtccttggttgaaggtgataaccaccttgcacttggctaaca

SEQ ID NO: 2349 - DNA, 483 bp, Homo sapiens
  MAP TO AJ239326.3; EXPRESSED IN HEART, SIGNAL = 0.84; EXPRESSED IN BRAIN, SIGNAL = 1.6; EXPRESSED IN BT474, SIGNAL = 1.3
atgacaacccacggaatagccctattttattttacagctttggaaactggggttagagaagcaagtagccccaaatcacacaggggcatagggctgagcgtggattcacgtcagctgggctaaagccagagccggtgctttggctttatccaattgtgttaggactctgtgctactgatcaatgagctatcgatgaatatcagaaaatcgattgattaaggacacctgacagtgaggtcttaggagtcacttttcctcttggtacagatgaatacctacaacagagagaaggacaaagctgtcctgcagtgccgggctcacctgcgccaccgcctgcagcctttgcttcctgactcagcctaactcccaatgtcagaataaatgcaggagagggcagtttggtgataaaaggagaggaactatacttggaaatgatatttttctgcatatttagaaccaaaaaccccactggttcattgatct

SEQ ID NO: 2350 - DNA, 474 bp, Homo sapiens
  MAP TO AL035448.28; EXPRESSED IN BT474, SIGNAL =   1; EXPRESSED IN HBL100, SIGNAL = 1.7; EXPRESSED IN BRAIN, SIGNAL = 0.97; EXPRESSED IN FETAL LIVER, SIGNAL = 0.92; EXPRESSED IN ADULT LIVER, SIGNAL = 0.93; EXPRESSED IN PLACENTA, SIGNAL = 1.5; EXPRESSED IN HEART, SIGNAL = 1.1; EXPRESSED IN HELA, SIGNAL = 0.99; EXPRESSED IN BONE MARROW, SIGNAL =   1
ttctgcagcatcacataattaccattaacaagatttgtctctgaagctgctcttttgtaagaactgcaaggaagggggctattgcagcacagtaagagacaaattacatttcccattgtaagtttgcagcgaaacattgtaagtatcttgaacaatagggtacacacattaaaatcttcttatgccagaggaagtctatattttataaaaccatacacctgctacttatgctgaaaagttgaagaaaactgggtctgaatcagtgacttatagtggtgcttctcaaactttggggtgcatcaggatcacctgggggctcattcaaacacagatttctggaccccagctgcccccagagattctgattctgcaaatcttgagcagcctgagattctgcagttctatgaagcttccaggtagtgtcaatgctggtgctaggctgaccatagtataggactgctggcttggaggata

SEQ ID NO: 2351 - DNA, 481 bp, Homo sapiens
  MAP TO AF130418.2; EXPRESSED IN BT474, SIGNAL = 2.3; EXPRESSED IN HBL100, SIGNAL = 2.6; EXPRESSED IN BONE MARROW, SIGNAL = 2.9; EXPRESSED IN LUNG, SIGNAL =   2; EXPRESSED IN ADULT LIVER, SIGNAL = 5.5; EXPRESSED IN FETAL LIVER, SIGNAL = 2.8; EXPRESSED IN PLACENTA, SIGNAL = 3.5; EXPRESSED IN HEART, SIGNAL = 2.6; EXPRESSED IN HELA, SIGNAL = 3.5; EXPRESSED IN BRAIN, SIGNAL = 3.1
tttcagagaatctaattgtgaatcaacaatatcacataattcagatttggtagaatgtatatgcaaatatattttctgaaacagtgcaaacactaccctaaactaatgcaactgtattcatatcactttttgatatgcacacattctaatactttctactttcagcctactgataattaaggaaggactgaaaggaaaaagaaccctggttgctctattgaattagtccattttcacttgctgataaagacatacccgagactgggaacaaaaagaggtttaattggacttacagttccacatggctgaggaggcttcagaatcatggcaggaggtgaaaggcacttcttacatggtggcggcaagagaaaatgaggaagaagcaaaagtggaaacacctgataaacccattggatctcgtgagacttattcactgtcatgaaactaggatggaaagactggcccccattgttcaatgacc

SEQ ID NO: 2352 - DNA, 461 bp, Homo sapiens
  MAP TO AL079341.9; EXPRESSED IN BT474, SIGNAL =   2; EXPRESSED IN FETAL LIVER, SIGNAL = 2.6; EXPRESSED IN PLACENTA, SIGNAL = 2.5; EXPRESSED IN HBL100, SIGNAL = 1.6; EXPRESSED IN HELA, SIGNAL = 2.4; EXPRESSED IN HEART, SIGNAL = 2.8; EXPRESSED IN BONE MARROW, SIGNAL =   2; EXPRESSED IN LUNG, SIGNAL = 2.4; EXPRESSED IN BRAIN, SIGNAL = 2.6; EXPRESSED IN ADULT LIVER, SIGNAL = 2.5
aaaaatggttgattgggcactatttggtctgggaatccttctaaccctttaattttaaggtggctcctaaaggaaaaggtgattctcaaaaaataacaaagtctacaaggatgaaatcttcatagatattgaattgagagactgcaagactttgtcattatacttggttatatatttttcatagagcagaaaataccagtgttttctacaagtgaactaaattttcaaaaaaagtattacacacttaccgaaaatattggcacctggctgctaaaattaccctgtgggcaggaaaacgtttcttttccaccacgaatgtgacgtcgccatattcttccccaatcaacaaggcaccaatatgttcagacaaaatgtgcacatgatcaatttcccccactgcagtaaaggggcgaagagggtggctgttactcatcttgtggaatagacgatagtcgttgttc

SEQ ID NO: 2353 - DNA, 468 bp, Homo sapiens
  MAP TO AL096703.14; EXPRESSED IN ADULT LIVER, SIGNAL = 0.91; EXPRESSED IN BT474, SIGNAL =   1; EXPRESSED IN FETAL LIVER, SIGNAL = 1.1; EXPRESSED IN PLACENTA, SIGNAL = 0.98; EXPRESSED IN HEART, SIGNAL = 1.1; EXPRESSED IN BRAIN, SIGNAL = 1.1; EXPRESSED IN BONE MARROW, SIGNAL = 0.91; EXPRESSED IN LUNG, SIGNAL = 1.6
gcaaacctcacccctagacctctaggtctgaaaggtgtgaatgagaaatagccttccaagagcgataccagggggcggtgttccaagggaagaatgaggaccaggagagagcattcagggagtagaatgaggaatgaggtttgccattgaaagggattccaatgagaagggttcagaagaggctccgggcgagagggaggtggaaaacgatgcaatgggcagcattcggagcgggggccctggcgtgcaggagcacctggggctcctggcaacatgacgttgatatgacggtaaccatttttttttttttttggtatgcaatggtaggaatcttttttatgtatacttacttcacgaattgccccgaaagctcttaggtgagggccacaggtaggccttcctcttttaggaaacctaatattgtataaatcagtgtagcctggccggcggttcatcccatggcagcag

SEQ ID NO: 2354 - DNA, 467 bp, Homo sapiens
  MAP TO AL034429.1; EXPRESSED IN ADULT LIVER, SIGNAL = 5.5; EXPRESSED IN PLACENTA, SIGNAL = 7.2; EXPRESSED IN BONE MARROW, SIGNAL = 8.2; EXPRESSED IN LUNG, SIGNAL = 8.8; EXPRESSED IN BRAIN, SIGNAL = 6.3; EXPRESSED IN FETAL LIVER, SIGNAL = 5.6; EXPRESSED IN BT474, SIGNAL = 2.8; EXPRESSED IN HEART, SIGNAL = 6.2; EXPRESSED IN HELA, SIGNAL = 5.3; EXPRESSED IN HBL100, SIGNAL = 4.2
aaaaagaaggccaagtgcggtggatcatatctgtaatcccaggcactttgggaagccaaggagggaggatcacttgagtccaggagtttgagaccagcctgggaaacacagtgagactacatctctaaagaaaattttacaaagaaaattagccaggcatggtggtgcacacctatagtctcagctactcaagaggccaaggtggatcacttgagccaaggagttcaaggctgcagtgagctatgatcacaccaatggactcaggcctgggtgtcaagcaagactctgtttcaaaaaaaccaacaaaccaaaagaagaagaatcaagaagaagagaagaaggaggaggaagaggaggaggagaaggaggagaagaaggagaaggagaaggagaaggaggaggagaaggagaagaaggaagagaaggagaagaagaaagaaggaagaggaggaggaggaggaggaaga

SEQ ID NO: 2355 - DNA, 461 bp, Homo sapiens
  MAP TO AP000459.2; EXPRESSED IN HEART, SIGNAL = 4.7; EXPRESSED IN LUNG, SIGNAL = 3.2; EXPRESSED IN BRAIN, SIGNAL = 4.6; EXPRESSED IN ADULT LIVER, SIGNAL = 4.6; EXPRESSED IN PLACENTA, SIGNAL = 6.2; EXPRESSED IN HBL100, SIGNAL = 2.7; EXPRESSED IN HELA, SIGNAL = 4.4; EXPRESSED IN BONE MARROW, SIGNAL = 4.4; EXPRESSED IN BT474, SIGNAL = 2.6; EXPRESSED IN FETAL LIVER, SIGNAL = 5.4
ggaagttggctaaggaatggaaatgtttgtgtctttatctgaatgtgatgcctgagagaataatggcaaacaataacattcgctcaagaaatacaatcattttatttttgaaatattattgtttctgtagttttaagacatttttcaaattacatttcaataggtgtttggtactgagattctccaaaatctgctatctaataatggggtagcatcctgctgactgaataaaatgaatatcttagaatttttgtgtgtgtgtgtgagtttcaatcttgccttaatacaaggatttctctctctctgtttctcatagaaagttcacagaaagttgagcctttctccaagcaattgtgttcgacaggacaacttaggaatcaaattagaaaggctgcaccttgccataaccatgtgtcatctggtgctgccttttctggacagcacacacccacacaaaatgc

SEQ ID NO: 2356 - DNA, 460 bp, Homo sapiens
  MAP TO AL109653.9; EXPRESSED IN HELA, SIGNAL = 4.4; EXPRESSED IN LUNG, SIGNAL = 2.3; EXPRESSED IN BRAIN, SIGNAL = 4.2; EXPRESSED IN BT474, SIGNAL = 2.8; EXPRESSED IN ADULT LIVER, SIGNAL = 6.4; EXPRESSED IN FETAL LIVER, SIGNAL =   3; EXPRESSED IN PLACENTA, SIGNAL = 5.2; EXPRESSED IN HEART, SIGNAL = 3.3; EXPRESSED IN HBL100, SIGNAL = 3.4; EXPRESSED IN BONE MARROW, SIGNAL = 3.6
tgtcctggagacattttccccactgtcttgatgactaacattcggctcctcattacttatgaaaatttctgcagcaggcttgaatttctctgtagaaaatgggtttttcttttctactgcattgtcagactgcaaatttttcaaacttttatgctctgcttccccttgaacactttgctgcttagaaatttcatccaccagatatgctaaatgttttctctcaagttcaaagttccacagatctctagggtaggggaaaatgccaccagtatctttcctaaagtatagcaagaatcaccttcattccagttcccaacaatttcctcatctccatctgtgaccacctcagcctggacttcattgtccatatcactatcagcattttggtcaaagccattcaacaagtctccaggaatttccaaactttcccacatcttcttgtcttctgtgccctccaaac

SEQ ID NO: 2357 - DNA, 459 bp, Homo sapiens
  MAP TO AL034375.23; EXPRESSED IN LUNG, SIGNAL = 7.2; EXPRESSED IN BONE MARROW, SIGNAL =  14; EXPRESSED IN BRAIN, SIGNAL =  16; EXPRESSED IN ADULT LIVER, SIGNAL = 9.2; EXPRESSED IN BT474, SIGNAL = 2.2; EXPRESSED IN FETAL LIVER, SIGNAL =  13; EXPRESSED IN PLACENTA, SIGNAL =  11; EXPRESSED IN HELA, SIGNAL = 5.8; EXPRESSED IN HBL100, SIGNAL = 6.6; EXPRESSED IN HEART, SIGNAL = 8.3
ttgtggtcttggcccttaactgttgggatggcttgttacacagtatatgctaactgatacatccactttgttttctggttaacatctactcctcattcaagtctgaggatgaaagcttccctgatcccagaagatgccatgctggtctgcatccatggcaacctgtgggtaccattaggagagagctggtcatggtgtaaaggaattgcctgttttctcatttctttccccagtgactgaaagctcctttaactactgtaggtgcctagcctgtagcatatgtgtgtgcatacacacacacacacacacacacacacacactctctctctctttctgtaaatatttgctgaaagaagatacaagaatgtagatatccatcttcaggctttcttctatcctaaatttcaaagaattagactagactgtttttacctatcaccacctagacacggtaacca

SEQ ID NO: 2358 - DNA, 451 bp, Homo sapiens
  MAP TO AL110502.1; EXPRESSED IN HELA, SIGNAL =  32; EXPRESSED IN HEART, SIGNAL = 6.4; EXPRESSED IN LUNG, SIGNAL = 9.4; EXPRESSED IN BRAIN, SIGNAL = 3.6; EXPRESSED IN BT474, SIGNAL =  24; EXPRESSED IN ADULT LIVER, SIGNAL = 3.4; EXPRESSED IN FETAL LIVER, SIGNAL = 5.9; EXPRESSED IN PLACENTA, SIGNAL = 6.4; EXPRESSED IN HBL100, SIGNAL =  18; EXPRESSED IN BONE MARROW, SIGNAL = 5.3
cctacaggaaattccagggcccttttttaaaccagcagctgggagtttggatgcgtttgaaatgtgtgttgggagtagaatgagaaggattaggagtggaagagagatccttcaaagcactaatgtaatataagatagaaagaactgttgctgatttgattttattctgcatcctgtttagatttgctatatttttatggtgaaaatatatacatttagaattagccagctggactcactttagataatcccagttttgttggcaacatccagagcatcataatcaggagccagtcaaacatctgccttcttctctccctcaggcctgatcagggtgttgaccacatcagtgtcatagagcttctttacaacctgtttgatctggtacttgttgattttgacatccacaagtgtgttgttgtcttctatcttcttcatggctgacccagtg

SEQ ID NO: 2359 - DNA, 447 bp, Homo sapiens
  MAP TO AL078645.18; EXPRESSED IN LUNG, SIGNAL = 5.5; EXPRESSED IN FETAL LIVER, SIGNAL = 2.1; EXPRESSED IN ADULT LIVER, SIGNAL = 2.2; EXPRESSED IN PLACENTA, SIGNAL = 1.6; EXPRESSED IN HEART, SIGNAL = 2.5; EXPRESSED IN HELA, SIGNAL = 2.1; EXPRESSED IN HBL100, SIGNAL = 1.7; EXPRESSED IN BRAIN, SIGNAL =   2; EXPRESSED IN BONE MARROW, SIGNAL = 3.2; EXPRESSED IN BT474, SIGNAL = 1.4
aagccacattttctccatagctagagtcaaggaaggacacctgtcctcaacgtcaaacagtgatggaaagccacagaattcagagcatttgctgtaccacaggtacaaaaacaactgtcactttaccacttgcctttcacacacattggctctgtcttatctagattacttagaagatactagggaggccaagtcaggaagactgattgaacccaggagtttgagaccagcctgggcaacataatgagaccccatttcttaaaaaaaaaaaaaaaggaagaagagaaaaaaagaaagaagaaagaagaagaagaagaagaagaagaagaagaagaagaagaagaagaagaagaagaagaagaagaagacgacgacgacaatactaacagcccaactccagatgcttatcaagtcaatccagatgtaccgtgccctagtgaggtgaag

SEQ ID NO: 2360 - DNA, 498 bp, Homo sapiens
  MAP TO AC009640.2; EXPRESSED IN BT474, SIGNAL = 8.1; EXPRESSED IN BONE MARROW, SIGNAL = 1.9; EXPRESSED IN LUNG, SIGNAL = 3.3; EXPRESSED IN FETAL LIVER, SIGNAL =   2; EXPRESSED IN ADULT LIVER, SIGNAL = 3.8; EXPRESSED IN PLACENTA, SIGNAL = 2.8; EXPRESSED IN HEART, SIGNAL = 2.1; EXPRESSED IN HELA, SIGNAL =  13; EXPRESSED IN HBL100, SIGNAL = 9.6; EXPRESSED IN BRAIN, SIGNAL = 2.5
accgtggctacctagtgacctaggacgagcttaaccagacactgaaggagttcaaagtccagtttggggacaagccaagtgaggggcagcggcggcgcacggacctcaccgcgctggtggcccacaatgatgaccccaccgacaagatgtttgtgttctttccagaggagcccaaggtgggcatcaagaccctcaacgtgtactgccggcgcatgcagcaggagaacatcacgcgggtcctcatcatggtgcagcagggcatgacgccctccgccaagtagtgcctggtccacatggctcccaagtacatcctggagcagtttctgcagcagaaattgctcatcgacatcacagagtacgagctagtccctgagtacgttgtcatgaccaaggaggaggtgacagtgctgttggccctatataagctccgagagaaccagctgcccaggatccaggcgggggacgccgtggcgcgctactttgggataaagcatgggc

SEQ ID NO: 2361 - DNA, 474 bp, Homo sapiens
  MAP TO AL049692.11; EXPRESSED IN HELA, SIGNAL = 3.6; EXPRESSED IN PLACENTA, SIGNAL = 4.2; EXPRESSED IN HBL100, SIGNAL = 2.8; EXPRESSED IN HEART, SIGNAL = 3.9; EXPRESSED IN BRAIN, SIGNAL = 2.9; EXPRESSED IN BONE MARROW, SIGNAL = 3.6; EXPRESSED IN LUNG, SIGNAL = 2.7; EXPRESSED IN BT474, SIGNAL = 2.2; EXPRESSED IN FETAL LIVER, SIGNAL = 2.7; EXPRESSED IN ADULT LIVER, SIGNAL = 4.3
gtgtacgatgtgccttttgccttccaccatgattgtgaggcctccccagccacatggaactgtgagtccattaaacctctttttctttttaaattacacagtcttgggtatgtccttatcagcagcataaaaactgactaatatggtaaattggtaccagtagaatggggcgctgctgaaaagatacctgaaaatgtggaagtgactttggaactgggtaacaggcagaggttggaacagtttggagggctcagaagaagataggaaaatgtgggaaagtttggaactccctggagacttgctgaatggctttgaccaaaatgctgataatgatgtggacaatgtaatccaggctgaagtagtctcagatggaaatgaggaacttgttgggaactggagaaaaggtgactcttgttatgctttagcaaagagactggtggcgttttgcccctgccctggagatttgtggagctt

SEQ ID NO: 2362 - DNA, 483 bp, Homo sapiens
  MAP TO AL050317.9; EXPRESSED IN BT474, SIGNAL = 8.2; EXPRESSED IN FETAL LIVER, SIGNAL = 4.2; EXPRESSED IN ADULT LIVER, SIGNAL =  12; EXPRESSED IN HELA, SIGNAL =  13; EXPRESSED IN PLACENTA, SIGNAL = 7.9; EXPRESSED IN HBL100, SIGNAL =  23; EXPRESSED IN HEART, SIGNAL = 5.1; EXPRESSED IN BRAIN, SIGNAL = 4.6; EXPRESSED IN BONE MARROW, SIGNAL =   6; EXPRESSED IN LUNG, SIGNAL = 8.1
gccttggagaacctgtgtatccaaactctgtatctaactaatctgatggggacgtggagaacctttgtatctagctcagggattgtaaacgcaccaatcagcaccctgacaaaacagggcactcggctctaccaatcagcaggatgtgggtggggccagataaaagaataaaagcaggctgcccgaaccaccattggcaacctgtttaggtcttcttccacactgtggaaggtctgttcttttgctctttgcaataaatcttgctagtggtcactctttgggtccgcgctgccttaagagctgtaacactcaccgcaaaggtctgcagcttcactcctgagcccagcgagaccacgagcccaccgggaggaacgaacaactccagacgcgctaccataagagctgtaacactaaccgcgaaggtctgcagcttcactcctgagccagcgagaccacgaacccaccagaaggaagaaactccga

SEQ ID NO: 2363 - DNA, 472 bp, Homo sapiens
  MAP TO AC011121.1; EXPRESSED IN HEART, SIGNAL = 1.3; EXPRESSED IN LUNG, SIGNAL = 1.6; EXPRESSED IN BRAIN, SIGNAL = 1.1; EXPRESSED IN ADULT LIVER, SIGNAL = 1.6; EXPRESSED IN PLACENTA, SIGNAL = 1.1; EXPRESSED IN HELA, SIGNAL = 1.8; EXPRESSED IN HBL100, SIGNAL = 0.99; EXPRESSED IN BONE MARROW, SIGNAL = 1.1; EXPRESSED IN FETAL LIVER, SIGNAL = 4.3
tcagaagaagacacagtccaaactttgtaggaaaatacctgattagaatcactcttccaggggttatctagtaacatctggcagccagttctgttatttaataaatcctgctcacttcgacttttctgagatcgctgggccatatgatgaggagcagagctcaggcctgcatgggaagtggccctatgggaggctgttaggaagttattgcccagggtgatgggtgggagactctgcgttctgattggtggaagccccttacgggccagcggtttcttttctggtaagagatattttgaattgtctgaggttttcttcttaaattcaaccatagccacctgatcaccaggctgttcttggcagttggtacccacgatgctatcaaaggtggtgatgatgtcattgacttctgaggtgtcctcctctctgtatcggtccctgctgggatccttctgatgggctctctgctctt

SEQ ID NO: 2364 - DNA, 471 bp, Homo sapiens
  MAP TO AL110504.1; EXPRESSED IN PLACENTA, SIGNAL = 0.94; EXPRESSED IN HEART, SIGNAL = 1.2; EXPRESSED IN LUNG, SIGNAL =   4; EXPRESSED IN BONE MARROW, SIGNAL = 0.96
tgagacatcgcttcatgaccttctagtttttggacttgctgttgagaatgtcaacatcattctgattccttttctccgcactctacgcaccatggtttgaggattttctcaaccctggtgttgtgaagttttacaataatgtgcccagtatggtctattttccacttctcttctggccctttttatggagagacttgtgtccatgagtcccagataattttttgattttatatctttattactttctttcctttcattttatcccattagatacgggacaaaaaaatcagggcattaagtgaacgctatcctggcctccggaaaccctcgtcccctccagcgtcactaggtgtatgcattcgaagtagcacatttgaggattatttggggaatctggataacgttagagaaagatctctaaggtcagatgcttggggaggggtgtaccccacagcaatgggagtgtctcct

SEQ ID NO: 2365 - DNA, 473 bp, Homo sapiens
  MAP TO AL121753.1; EXPRESSED IN BT474, SIGNAL =   3; EXPRESSED IN HELA, SIGNAL =   1; EXPRESSED IN HEART, SIGNAL =   1; EXPRESSED IN ADULT LIVER, SIGNAL = 1.3
cccacttaaaccttcccaaggactctaagagacaggaactgttactgtctccactttagagaagaggaatctgatgtttgggaaagttaaagctagacagctaggaaatagtggggtcaagataagaatacagagcaatccaactccattgcctacctgtgttggaatagacactggaaggaatgtagctgccccttcctgtgccccacagctcaggctatctgcagaggcagaactaagaaatgctaatgtggtcttgagtaaacacaactcagagattccagttccagtggcagctagagacagccaccagatgggtcatcagtggccggttactaatacatcagatatccctagtagagccaagctccactcctgggaaaacctgaggttgagagtgggtgtaattatggtgggggaatgggaaaacagaagaaagttggtatggaaaacactgatgagcatgaaggtga

SEQ ID NO: 2366 - DNA, 472 bp, Homo sapiens
  MAP TO AC007308.13; EXPRESSED IN BONE MARROW, SIGNAL = 4.4; EXPRESSED IN HBL100, SIGNAL = 3.3; EXPRESSED IN HELA, SIGNAL = 3.8; EXPRESSED IN HEART, SIGNAL = 3.6; EXPRESSED IN LUNG, SIGNAL = 2.3; EXPRESSED IN BRAIN, SIGNAL = 3.7; EXPRESSED IN BT474, SIGNAL = 3.3; EXPRESSED IN ADULT LIVER, SIGNAL = 4.5; EXPRESSED IN FETAL LIVER, SIGNAL = 3.3; EXPRESSED IN PLACENTA, SIGNAL = 4.6
actctataagcccttccccccaacatcttaagagggacaagacaagtctttgtattaaagagaattctagtgaaacatttcacgttacttaagtttactccaactacaaagaagagggattttcttcgcaggggagcttaacagggtctttctcctctgctctttccccagtagcccaggcccacctgagagatgctggacacactgctggttttcctcttcagggtaccctcctgacagacagtcagcagattgctggggaggatggagcggaagtcattaaaggaacgccttcgaacaccttcaagctcttccaggacacggagggaatgaggagggattttgggaaagagctttgagaggagagactcttccatgttgctgtaacgcccaaatgctcgcgagattcctatcaggcatgggatagcatacttgcaaaggtattctagaagatcaagtgaaaacgttacaa

SEQ ID NO: 2367 - DNA, 456 bp, Homo sapiens
  MAP TO AP000040.1; EXPRESSED IN BT474, SIGNAL =   4; EXPRESSED IN BONE MARROW, SIGNAL = 5.3; EXPRESSED IN LUNG, SIGNAL =   6; EXPRESSED IN ADULT LIVER, SIGNAL =  10; EXPRESSED IN FETAL LIVER, SIGNAL = 5.4; EXPRESSED IN PLACENTA, SIGNAL = 5.6; EXPRESSED IN HEART, SIGNAL = 6.2; EXPRESSED IN HELA, SIGNAL = 5.9; EXPRESSED IN HBL100, SIGNAL =   5; EXPRESSED IN BRAIN, SIGNAL = 5.6
ataagcagagcagtcccgagggctcctggttggccatttttatggttatttcttgattatacgctgaacgaggggtggattattcatgagttttccagaaaatgggtgggcaattcctggaactgagggttcctccccttcttagaccatatagggtaactttctgatgttgccatggcatttgtaaactgtcatggcaccggagggagtgtcttttagcatgctaatgtactataattagcgtataatgagcacggaggaaaaccagaggtcactttcgtcgctatcttggttttggtggcttttgtctgacttatttaccacaatctgttttatcagcaaggtctttgtgacctgcctcttgtgctgacctcctatgtcatcctgtgacttagaatgcctgacctcctgggaatgcagcccagaaggtctcagcctcattttacccagccccta

SEQ ID NO: 2368 - DNA, 456 bp, Homo sapiens
  MAP TO AB020867.1; EXPRESSED IN LUNG, SIGNAL = 1.3; EXPRESSED IN FETAL LIVER, SIGNAL = 0.97; EXPRESSED IN HBL100, SIGNAL = 1.2; EXPRESSED IN HEART, SIGNAL = 1.4
tctgctatccatgtgattagattaggtccacttggataaatctccttcactgcaggtccttaatcacatctgcaaagttccatttgccacgtagggtaacatatgctcaagttctggggattaggacatgggcgtatttgggggtcattattctgcctcttgcaaactcacagagtttcctgcatcactgatggtattgttttgaaattcaatttctggttattcattgctagaagatagaaatataattgattttatacagagatcttgcatcgtgcaaccttgttaaactcacttattgattctagtaatttttaaaattttttgtagattccaaaggtttcctacatagacaatcatgtcatcttcaaaaaaaaaaaaaaacaattttacatcttccttttcaatctggatgccttttacttctttatcttgcctggttgcactggctgaaac

SEQ ID NO: 2369 - DNA, 465 bp, Homo sapiens
  MAP TO AL117352.3; EXPRESSED IN HELA, SIGNAL = 1.7; EXPRESSED IN HEART, SIGNAL = 0.98; EXPRESSED IN FETAL LIVER, SIGNAL = 1.3; EXPRESSED IN BT474, SIGNAL =   1
atgcccttctggtgaaagacatccaaggggccttgcacagttacaaagaaatcatcattgaagccactaaacatcgcaactctgaagagatgtggaggaggatgaacttgatgacgccagaagccctgggtaagctcaaagaagagatgaaaagttgtggggtaagtaactttgagcagtacacaggggatgactgctgggtgaacctaagttacacagtggttgctttcaccaaacagaccatgggcttcttggaagaggccctgaagctgtatttcccagagctgcacatggtacttttggagagcctggtggaaatcattttggttgctgttcagcatgtggattatagtcttcgatgtgagcaggatccagagaagaaagcttttatcagacagaatgcatcctttttatatgaaacagtcctccctgtggtggagaaaaggtttgaagaaggtgtgggga

SEQ ID NO: 2370 - DNA, 455 bp, Homo sapiens
  MAP TO AC011457.1; EXPRESSED IN BT474, SIGNAL = 2.5; EXPRESSED IN PLACENTA, SIGNAL = 1.2; EXPRESSED IN BONE MARROW, SIGNAL = 2.9; EXPRESSED IN BRAIN, SIGNAL =   2; EXPRESSED IN FETAL LIVER, SIGNAL = 2.2; EXPRESSED IN ADULT LIVER, SIGNAL = 2.7; EXPRESSED IN HEART, SIGNAL = 7.4; EXPRESSED IN HELA, SIGNAL = 2.7; EXPRESSED IN HBL100, SIGNAL = 1.1; EXPRESSED IN LUNG, SIGNAL = 3.1
ctgctgcatttgggattaagtttccaacacatgctgtttggggtacacactcaaaccataacacatacacatttgacccttgaacaatgtgagagttaggggcaccaacctccagtgcagttgaaaattcacatataacttttgacttccccaaaacttaactacgaatagcctactgttgaccagaagacttactaataacataaacagtagattaacatatattttgtatgttacatatattacatgctgattcttacaataagggaagctagagaaaagaaaatgttattaagaaagagaaaatatgtttactcttcattaagtggaagtggatcattatcaaggtcttcatccttgtcatcttcacaatgagtaggctgaccagaagaaggaaggggaggggttggtctttctgtctcaggggtggcagaggcagaagaaaatgcacatct

SEQ ID NO: 2371 - DNA, 464 bp, Homo sapiens
  MAP TO AL079333.7; EXPRESSED IN PLACENTA, SIGNAL = 1.3; EXPRESSED IN HEART, SIGNAL =   2; EXPRESSED IN BRAIN, SIGNAL = 4.4; EXPRESSED IN BT474, SIGNAL = 3.3; EXPRESSED IN HBL100, SIGNAL = 4.1; EXPRESSED IN HELA, SIGNAL = 1.5; EXPRESSED IN LUNG, SIGNAL = 3.5; EXPRESSED IN BONE MARROW, SIGNAL = 1.2; EXPRESSED IN ADULT LIVER, SIGNAL = 1.2; EXPRESSED IN FETAL LIVER, SIGNAL = 1.3
ttctaagtctttctggcccctacctccgcccctcactcccctcacaccccgttggccccttggggcgaatggatcctgtacatctctttgcatccaatgaaaaccacccattttctgttttttccttagctcctcctgagcccttgacacatctccacattctctcatcatctcctcactgctcagatgcctttcttgtaagtcctcctgagagtccttgggggaatcgtccgtccccctgtcggtttttctttttgctttccggggcacataatcttcagccgggcgcttttcggcggcccgcggctggctctctggcttggcctgggaggctggcttgccctcactttgtggcttgtcctcaccttcagacttgccctgcttttcctggtttccctcatcttccagttgtccctcatcacctggctctccctcatcctctcgctttccctcgcattctgtct

SEQ ID NO: 2372 - DNA, 453 bp, Homo sapiens
  MAP TO AC011242.1; EXPRESSED IN PLACENTA, SIGNAL = 0.99; EXPRESSED IN BRAIN, SIGNAL =   1; EXPRESSED IN BT474, SIGNAL = 1.5; EXPRESSED IN FETAL LIVER, SIGNAL = 2.6; EXPRESSED IN HEART, SIGNAL = 1.1; EXPRESSED IN HELA, SIGNAL = 1.7; EXPRESSED IN HBL100, SIGNAL = 1.2; EXPRESSED IN LUNG, SIGNAL = 1.9
tttctctgattggtgtaatatgccataacaatcacagaagatgtctaacaagaagatataaggaatcttcttccttgttttgctcttactgaggttttaataaattgctgtaattttccagtgaacaggttcatctacatcaaatgaatttcaagtcatgcataaaaatctaaagaagttgtttgtgatgttatcattaactataaatgggactaaggattccagtaataatcccaaacagcaactcacaggatgatccttcggcatattattccagatcttctgtctcatttcagaaactgctttagcatttgtctttcccagtttcattatcactttgtctacatggctttttgtggcttgcaagagattttccatggtgggccagagatcattaggttttgaaagatccagaacgagaacaagagaaaacgtcctaaagaaataaaaaca

SEQ ID NO: 2373 - DNA, 464 bp, Homo sapiens
  MAP TO AC007308.13; EXPRESSED IN PLACENTA, SIGNAL = 4.4; EXPRESSED IN BONE MARROW, SIGNAL = 5.1; EXPRESSED IN BRAIN, SIGNAL = 5.9; EXPRESSED IN FETAL LIVER, SIGNAL = 3.1; EXPRESSED IN BT474, SIGNAL = 2.1; EXPRESSED IN HEART, SIGNAL = 3.7; EXPRESSED IN HELA, SIGNAL = 5.1; EXPRESSED IN HBL100, SIGNAL = 3.6; EXPRESSED IN LUNG, SIGNAL = 4.7; EXPRESSED IN ADULT LIVER, SIGNAL = 2.7
ctgggcatatctccctacccccagcgtgcacaaacacacacacacatacacacacacacacacagtcacaaacctgggaaaaggctttactcttcaccctgacagaatcaattaagtcaagactcatctctgcagtgggtgcagtccccccaggcaacacagatccctgtctctcccacttacccacaccatcaagaagcatttgcaggtgccgtgactgtttgctcatgcctgcgtgtcatttcctcctcctgcagatgagctgtccatgggactgggtcgtctgaaggacatagccctggggatgcagacagaaattgaggagcaagatgacattcttgaccggctgacaaccaaagtggacaagttagatgtcaacataaaaagcacagaaagaaaagttcgacaactctgaagacagacggatttccactctattgtgatgaaaagatttgaaagatctt

SEQ ID NO: 2374 - DNA, 452 bp, Homo sapiens
  MAP TO AC008173.1; EXPRESSED IN ADULT LIVER, SIGNAL = 4.7; EXPRESSED IN BT474, SIGNAL = 2.5; EXPRESSED IN FETAL LIVER, SIGNAL = 1.7; EXPRESSED IN PLACENTA, SIGNAL =   3; EXPRESSED IN HBL100, SIGNAL = 2.1; EXPRESSED IN HELA, SIGNAL = 4.8; EXPRESSED IN HEART, SIGNAL = 2.2; EXPRESSED IN BONE MARROW, SIGNAL = 2.4; EXPRESSED IN LUNG, SIGNAL = 6.3; EXPRESSED IN BRAIN, SIGNAL = 2.1
taaaggctgtgagacccctgatttcccacttcacacctctatatttctgtgtgtgtgtctttaattcctctagtgccactgggttagggtctccctgaccgagctggtctcggcaagttgtgtccatcgtgggggctcgaatccagatcgaagtgtttctggagcgatggttggaatggaaaactagctggaggacacccgagtactcttaaagcaatcctcgtggtgagtaagaaggggagctaggaagtgtcagggtaacaatgggacaggtgtggggtctggttcatttcaccttggaagtttttcacactggtgatgaggaggaacaagagtatagtgaagtaacagaagacgttacagagcatgtttatttaccagctaaagctaaagtggcaaaggaagaagaggttcatctctactcttatgcactccctccttattattttgaa

SEQ ID NO: 2375 - DNA, 450 bp, Homo sapiens
  MAP TO AL109984.5; EXPRESSED IN HBL100, SIGNAL = 4.9; EXPRESSED IN HELA, SIGNAL =  24; EXPRESSED IN PLACENTA, SIGNAL = 3.6; EXPRESSED IN HEART, SIGNAL = 2.2; EXPRESSED IN BRAIN, SIGNAL = 2.2; EXPRESSED IN BONE MARROW, SIGNAL = 3.3; EXPRESSED IN LUNG, SIGNAL =  12; EXPRESSED IN BT474, SIGNAL =  14; EXPRESSED IN ADULT LIVER, SIGNAL = 4.1; EXPRESSED IN FETAL LIVER, SIGNAL = 2.4
actggggcagttaaggttggagccatccagcgctggctgaaggggcaaggggtctagctagctatgccaggtggcctggtggccagctgcataggacaccctggccaggagttcatcagggcctctggcgtggaggcccgctaggccctctggaagcagcggcaggaccacctctcaagtgtgaaggagactgagaagaactgggccgagcaatacctgaagatcacagggaagatcttagactaggcagaggacttcccagcatagagatgacatggatctccaggctgattgagaacaagttgagtgacgggaagaaggaggagctccagaagagcttaaacatcctaactgccttccagaagaagggggctgagaacgaggagttgtaaaaaggctctctatggttttccagggtttggtaggggtggggaggggagagttaacctg

SEQ ID NO: 2376 - DNA, 449 bp, Homo sapiens
  MAP TO AC008115.3; EXPRESSED IN ADULT LIVER, SIGNAL = 1.2; EXPRESSED IN PLACENTA, SIGNAL = 1.5; EXPRESSED IN BONE MARROW, SIGNAL = 1.4; EXPRESSED IN BRAIN, SIGNAL = 2.2; EXPRESSED IN FETAL LIVER, SIGNAL = 1.2; EXPRESSED IN BT474, SIGNAL = 1.5; EXPRESSED IN HEART, SIGNAL = 1.3; EXPRESSED IN HELA, SIGNAL = 1.1; EXPRESSED IN HBL100, SIGNAL = 1.6; EXPRESSED IN LUNG, SIGNAL = 1.6
cagaatggataacagcaagccacatttgattattcctacacttctggtgcccctccaaaaccgcagctgcactgaaacagccacacctctgccaagccaatacctgatggaattaagtgaggagcacagttggatgagcaaccaaacagaccttcactatgtgctgaaacccggggaagtggccacagccagcatcttctttgggattctgtggttgttttctatcttcggcaattccctggtttgtttggtcatccataggagtaggaggactcagtctaccaccaactactttgtggtctccatggcatgtgctgaccttctcatcagcgttgccagcacgcctttcgtcctgctccagttcaccactggaaggtggacgctgggtagtgcaacgtgcaaggttgtgcgatattttcaatatctcactccaggtgtccagatctacg

SEQ ID NO: 2377 - DNA, 455 bp, Homo sapiens
  MAP TO AL035553.10; EXPRESSED IN BT474, SIGNAL = 7.2; EXPRESSED IN FETAL LIVER, SIGNAL = 0.89; EXPRESSED IN ADULT LIVER, SIGNAL = 0.91; EXPRESSED IN PLACENTA, SIGNAL = 1.2; EXPRESSED IN HEART, SIGNAL = 0.99; EXPRESSED IN BRAIN, SIGNAL =  27; EXPRESSED IN BONE MARROW, SIGNAL = 0.91
tctccaggtcccagggtaagcaaggtgtggcgggaggggcatatgtttctggtcacatacaccctgtcttcacttatttcaacaaagataaggtgaaagcatgcaggaggaacctggtgattcctctagaaaatccctagccttgttaaggtgctcgctctggtgtatacctcacttatgtcgggaaagaagccaggtcttcaattaataagattccctggtctcgtttgtctacctgttaatgcaggatccatgccttccagtatgtcatctatggaactgcctctttcttcttcctttatggggccctcctgctggctgagggcttctacaccaccggcgcagtcaggcagatctttggcgactacaagaccaccatctgcggcaagggcctgagcgcaacggtaacagggggccagaaggggaggggttccagaggccaacatcaagctcat

SEQ ID NO: 2378 - DNA, 465 bp, Homo sapiens
  MAP TO AL049597.17; EXPRESSED IN LUNG, SIGNAL =  11; EXPRESSED IN ADULT LIVER, SIGNAL =  14; EXPRESSED IN BT474, SIGNAL =  65; EXPRESSED IN FETAL LIVER, SIGNAL = 7.5; EXPRESSED IN HELA, SIGNAL = 1.1e+02; EXPRESSED IN PLACENTA, SIGNAL =  12; EXPRESSED IN HBL100, SIGNAL =  12; EXPRESSED IN HEART, SIGNAL = 7.2; EXPRESSED IN BONE MARROW, SIGNAL = 9.4; EXPRESSED IN BRAIN, SIGNAL =   5
cgggccataagtttttgtttcttcagtttcttctgggatatctttttcttctgggcaacctccttttctggtttaggaacaatctgttccttttcagtaaggatcatctcaatgtgccagggagagctcatgtatgagttaatccgaccatgagctctgtaggtccggcggagcatcttaggtgctttgttcacttggatatactcaatgaccagagaatctacatctaaacccttaagttcagtattaccctctgcgtttttaaacatgtgcagcaaaaattcagcactctttttgggccaccgaccttgtgtccagccccactgcttggcctgcgcacacttgccaactccaccattgtaacgtcggaatggtatgcactgtttctgtaaagtgacatctttaagatacttcgtggcttttcgtatatgcatacccttgatggcctgagcagtttcacgagtg

SEQ ID NO: 2379 - DNA, 454 bp, Homo sapiens
  MAP TO AC009944.2; EXPRESSED IN FETAL LIVER, SIGNAL = 4.5; EXPRESSED IN HELA, SIGNAL =  38; EXPRESSED IN PLACENTA, SIGNAL = 5.3; EXPRESSED IN HBL100, SIGNAL =  18; EXPRESSED IN HEART, SIGNAL = 6.4; EXPRESSED IN BRAIN, SIGNAL = 6.1; EXPRESSED IN BONE MARROW, SIGNAL = 2.9; EXPRESSED IN LUNG, SIGNAL =  11; EXPRESSED IN BT474, SIGNAL =  24; EXPRESSED IN ADULT LIVER, SIGNAL = 4.2
  unsure 223
tccaagattttgctctgctggagcatttcccgggagatgtttggggaaagatccttaagagtcaaccataccacggacaaagccgacatactctggcatcaaatcatcaaagctgtccatgatccacacatgatggacacagagttgttcattttcctcttgttctaaaaaaggtcaaagggagcctgatgagggatgaacagcaatgccctgaattccaaantgaccttctacagggaattgcttgactgccaagtggtcttcccaggcactggtgaggctcttgtagaattctccacactcttcctgggtgatgtcatcagggtttctggtccaaatcggcttggtctggtttagttcttcccgatcagtgtatttctccttgatcttctttgttttcttcttattattcttatcagtgtcatcctcctcatcggaacccacatcttcagtc

SEQ ID NO: 2380 - DNA, 463 bp, Homo sapiens
  MAP TO AL109935.13; EXPRESSED IN HBL100, SIGNAL = 8.7; EXPRESSED IN HEART, SIGNAL =   4; EXPRESSED IN LUNG, SIGNAL = 7.2; EXPRESSED IN BONE MARROW, SIGNAL = 6.4; EXPRESSED IN BRAIN, SIGNAL = 1.7; EXPRESSED IN ADULT LIVER, SIGNAL = 3.3; EXPRESSED IN BT474, SIGNAL = 1.9; EXPRESSED IN FETAL LIVER, SIGNAL = 2.6; EXPRESSED IN PLACENTA, SIGNAL = 3.5; EXPRESSED IN HELA, SIGNAL = 7.1
ttcagctgctttatgttgagctccattgcatcgggggtacaaaagggcaatgctgctattctggattattggaaagactgggaagaagagaaattttaaaaaagagaatggatactttcatctttaaaacaaaacaaaaactctgatgtggatgttccaggcattctgtaaatgaattcttatgaaaaggttgagtcaggcaggtcttaggtaaaccataaaattacagtattttatgtgttttgtatttgtttcatcataggatatatgattggatgcctgaacaaccaaatatattccaagtggagcaattggaacgcctgaagcaggaattgccagagcttaagagctgtttgtgtcccactgttagccgctttgttccctcatctttgtgtggggagtctgatatccatgtggatgccaacggcattgataacgtggagaatgcttagtttttattgca

SEQ ID NO: 2381 - DNA, 449 bp, Homo sapiens
  MAP TO AL096702.3; EXPRESSED IN BONE MARROW, SIGNAL = 1.4; EXPRESSED IN BT474, SIGNAL = 2.2; EXPRESSED IN FETAL LIVER, SIGNAL = 0.95; EXPRESSED IN ADULT LIVER, SIGNAL = 1.4; EXPRESSED IN HELA, SIGNAL =   4; EXPRESSED IN PLACENTA, SIGNAL = 1.4; EXPRESSED IN HBL100, SIGNAL = 2.3; EXPRESSED IN HEART, SIGNAL = 1.2; EXPRESSED IN BRAIN, SIGNAL = 1.3
agcttgtgttctttccactgcagtatgctttcctagcagttagctttgtggctggtactagggcctgacttctgttacttttcaacccatagttcactttttctttttcttttttctttttctggctgatctgctacttacagtccctcttgggagcgccagttgggtctgggtgagggtgtgctgttcaacagtctgacagttctgtcaacaactccagactaataccctgtttttcttcactttctgtagagtttatatcccctgtatctatgtgttaaataagattgaccaaatctccattgaggaattggatatcatctataaggtgcctcactgtgtacccatctctgcccatcaccgctggaattttgatgacctattggaaaagatctgggactatctgaaactagtgagaatgtaagtctttgtggatagggtaatgttgc

SEQ ID NO: 2382 - DNA, 448 bp, Homo sapiens
  MAP TO AL035411.25; EXPRESSED IN PLACENTA, SIGNAL = 2.2; EXPRESSED IN HELA, SIGNAL =  30; EXPRESSED IN HBL100, SIGNAL = 3.4; EXPRESSED IN HEART, SIGNAL = 1.7; EXPRESSED IN LUNG, SIGNAL = 1.4; EXPRESSED IN BONE MARROW, SIGNAL = 1.8; EXPRESSED IN BRAIN, SIGNAL = 0.98; EXPRESSED IN ADULT LIVER, SIGNAL = 2.9; EXPRESSED IN BT474, SIGNAL =   5; EXPRESSED IN FETAL LIVER, SIGNAL = 1.2
aggatgtggctttggagaaggctgctaggatgcttgcgaacacgacatcaggggtctgggatgcattgatggcagagtggatcccccgtttcctgtagtactctatgagtggggtggtttgagtgtggtaggcttgccggcagattttcaaggccttttcattatcatctgatcaacggatcaagggttccccggtgatgtcatctttcatgggctcttttggagggttgaactcctcgtggtaggaacggccactcttggggtgatcagccttcctgtgattcttcggatcagcagagagtctgggatgctgaattcaatcacagaatcaagcttctctttcctcttctccatgaggtcatcgagcatttctgcctgcctcacagtccgagggaagccatccagaagaaaaccatttttgcacaagggggtctccaaattcttctca

SEQ ID NO: 2383 - DNA, 384 bp, Homo sapiens
  MAP TO AP000553.1; EXPRESSED IN BT474, SIGNAL = 3.3; EXPRESSED IN FETAL LIVER, SIGNAL = 1.4; EXPRESSED IN HEART, SIGNAL =   2; EXPRESSED IN LUNG, SIGNAL = 1.9; EXPRESSED IN BRAIN, SIGNAL = 1.1; EXPRESSED IN ADULT LIVER, SIGNAL = 1.4; EXPRESSED IN PLACENTA, SIGNAL = 1.6; EXPRESSED IN HELA, SIGNAL = 7.8; EXPRESSED IN HBL100, SIGNAL =   5; EXPRESSED IN BONE MARROW, SIGNAL = 0.99
catcaatctcaagccccttctcagtttagcagatagcttgctctagaaatacttttgggtggctgggttgtcctgaaggtggcagggcttcagttgatacttgaatcccttgaaataaattgatttttcagataaacaattaaaacattcctgtcttggccataggtttatgaaccatggtgtgttcattttgatctctctttccttccaggacaaccctccatatgataagggagccttcagaatcgaaatcaactttccagcagagtacccattcaaaccaccgaagatcacatttaaaacaaagatctatcacccaaacatcgacgaaaaggggcaggtctgtctgccagtaattagtgccgaaaactggaagccagcaac

SEQ ID NO: 2384 - DNA, 490 bp, Homo sapiens
  MAP TO AC006346.1; EXPRESSED IN FETAL LIVER, SIGNAL = 1.1; EXPRESSED IN HELA, SIGNAL = 2.1; EXPRESSED IN HEART, SIGNAL = 2.8; EXPRESSED IN LUNG, SIGNAL = 2.2; EXPRESSED IN BRAIN, SIGNAL =   1; EXPRESSED IN BT474, SIGNAL = 2.8; EXPRESSED IN HBL100, SIGNAL = 1.7; EXPRESSED IN BONE MARROW, SIGNAL =   1
tgggccatactaactaagctgtcatttctcatacatgaatctctaaaacaacctccccaaaaggtttattgtctcaattttgtttccttacaattggtcatgcacactaaatcacaactactttaaaaactacttttaaaagtgccagtcattgcctctctcaaccttctctgcactagggaagctcccttgccccagtctttcacccctgaaaatgtacacctgtgccaagtgtgttcccacctttctctgtttgagagcacctgtcaggtgctaagcccaccactctctgcagtagttctcaagcaaccagagacactaacagacgagagcttcagcagtttggcagccccacatcccccgacctcacttaaccctagtcacagcttccaaaccagcaccacttcaagggatattggcatagcagccaagttcattggggctaggacttccaaagtcaggacagctggctctggggctaaaattgcag

SEQ ID NO: 2385 - DNA, 461 bp, Homo sapiens
  MAP TO AB020871.1; EXPRESSED IN HBL100, SIGNAL = 1.1; EXPRESSED IN HEART, SIGNAL = 1.1; EXPRESSED IN BONE MARROW, SIGNAL =   1; EXPRESSED IN LUNG, SIGNAL = 4.7; EXPRESSED IN BRAIN, SIGNAL = 1.3; EXPRESSED IN FETAL LIVER, SIGNAL = 1.1
tggtaccaatcagcatcaggatctctgcaatatgcttatgccagtggactctatgcttcatgaaggcagaatatctatctttttatatacagttgcatttctagagcatagaaagatggactgatccactgtaggtacataataaataattgttgatggccaggatattagaatttcactgtttatataaattgcttattattctatgattttggaaaggacatttaaaacctctggaagtcagtttctctatcattgaaatgaagaaaatactagctactatgaaagtttttatagaattaaaatactgtacatcaagttctaggtacatagtagaaaataaacaaagaaaattattcttttccttctcctccttctcctcctcctcctctttctcttcctcctccttctccttctcttcctcttcttcctccttctcctcttcttctttcccactactt

SEQ ID NO: 2386 - DNA, 471 bp, Homo sapiens
  MAP TO AC007218.2; EXPRESSED IN BT474, SIGNAL = 5.9; EXPRESSED IN HBL100, SIGNAL = 5.5; EXPRESSED IN HEART, SIGNAL = 5.6; EXPRESSED IN LUNG, SIGNAL = 5.1; EXPRESSED IN FETAL LIVER, SIGNAL = 8.3; EXPRESSED IN ADULT LIVER, SIGNAL = 5.8; EXPRESSED IN PLACENTA, SIGNAL =   6; EXPRESSED IN HELA, SIGNAL = 4.9; EXPRESSED IN BRAIN, SIGNAL = 4.5; EXPRESSED IN BONE MARROW, SIGNAL = 5.4
tatttttctcatgtcccgcctgctgcacccactcccgtttcctttctgccttccttagtcatctaagtttgcaacacctggcttatgaatgcacaaaatctggatgctcttgtgacatgcccaagaaaggctggtaaggggaggaagtgcagaccccactgagacatcaagaacccaagcgcttttctaaacctgcttgcagtgcaagaaagtagccacccggtgtactgaccctgctgatggagaagagcaacccaggccggtcggagcacacgcccgtgaaacagaagcgcagcttccagtagaagaggtgctcccagatgaaggtgatgaggctaagggccatggcggcagccagcatgtagaatacgcccgccatgttgtcaatgtccagctggctgctcatcacctcgttcttctcgttgtggcagatcccagtgagccacagggtctccagctcctccatctcac

SEQ ID NO: 2387 - DNA, 490 bp, Homo sapiens
  MAP TO AC007318.2; EXPRESSED IN BONE MARROW, SIGNAL = 2.4; EXPRESSED IN HBL100, SIGNAL =   6; EXPRESSED IN HELA, SIGNAL = 7.2; EXPRESSED IN HEART, SIGNAL = 1.5; EXPRESSED IN BRAIN, SIGNAL = 1.7; EXPRESSED IN LUNG, SIGNAL = 8.3; EXPRESSED IN BT474, SIGNAL = 7.5; EXPRESSED IN ADULT LIVER, SIGNAL = 1.7; EXPRESSED IN FETAL LIVER, SIGNAL = 1.3; EXPRESSED IN PLACENTA, SIGNAL =   2
tgtgctaatgctcttcttttggaaacatttgtgttaaaggtaaggtcaatttattgatttaaaccacattgtatgtaaaaatgtattatccatgattaaactttctaagacattgttcttgatagaaaagattttctaacttgtggaataaaaagatttattttgcaagtgtcagaaatattaaaattaattattcccaagttttcttaaatattatgcaaaactttgatctacagctttgacataattttctaggatcttatggttggtgatgaggcaagtgaattacgatcaatgttagaagttaactaccctatggaaaatggcatagtacgaaattgggatgacatgaaacacctgtgggactacacatttggaccagagaaacttaatatagataccagaaattgtaaaatcttactcacagaacctcctatgaacccaaccaaaaacagagagaagattgtagaggtgagtttttatgcaggat

SEQ ID NO: 2388 - DNA, 480 bp, Homo sapiens
  MAP TO AC007458.13; EXPRESSED IN PLACENTA, SIGNAL = 1.4; EXPRESSED IN FETAL LIVER, SIGNAL = 0.87; EXPRESSED IN ADULT LIVER, SIGNAL =   1; EXPRESSED IN HEART, SIGNAL = 1.1; EXPRESSED IN HELA, SIGNAL = 0.99; EXPRESSED IN BRAIN, SIGNAL = 1.3; EXPRESSED IN LUNG, SIGNAL = 9.6; EXPRESSED IN BT474, SIGNAL =   1
ctgcttctcagtactccccgcttcttcctcacctacttcctcttcactggatttgtcaactcacctgtctttacgcaatagttacaatgccagcatttctctacattacatacttcagcgattctcttactggctttgcaaagtcacccaaacacgaatggaaatagtaaggtagagtttcagccatgagttgagttcatagctttagcaactgttaaatagctaatgtctactttctggagaataaatgctttgcaagaccctcggcaatgaaaccaaagaaagaatttaaatagcctcaccgaataattagtcagcttttcgaagtcatctcgtttctttttgttgctattgaaaaacttgacattcatgtcttccttgatggtctccacactcttttggatgctctggtcatctttaaagtttttaaaaagtttgaagtaaaaggagacaatttggctctgcattatttttctgtca

SEQ ID NO: 2389 - DNA, 467 bp, Homo sapiens
  MAP TO AC000026.3; EXPRESSED IN BT474, SIGNAL = 2.1; EXPRESSED IN LUNG, SIGNAL = 3.5; EXPRESSED IN ADULT LIVER, SIGNAL = 2.1; EXPRESSED IN FETAL LIVER, SIGNAL = 1.4; EXPRESSED IN PLACENTA, SIGNAL = 2.4; EXPRESSED IN HEART, SIGNAL = 1.9; EXPRESSED IN HELA, SIGNAL = 3.9; EXPRESSED IN HBL100, SIGNAL = 2.7; EXPRESSED IN BRAIN, SIGNAL = 1.7; EXPRESSED IN BONE MARROW, SIGNAL = 1.6
tgcactgtaggatgctgaccagcactcctagcctctgcccactagaagccggtagcatgcccccctcagctgtgaaaaccaaagtatctccagacaccaccaaatatccctcaggggggcaaagctgccactttggttaagctattctgggttaagctatttgagacttcctgcatggtgacaggtcagtttcctttgagagcccccattcccagcagaagaggctccccgaggggtacgcatggacgtgcgtgtggtgacctcagtaccttttctgcacgatgagattgatgttgcgcagggccacatactgcagctctggctcggctgacagcagtgtgaccaggggtggggccagcttcttgagcagtgtgccgtagtagtccaagtccttagacaacatctccatgaacttcatcagcaccttcacagcagagagcaccacagcggagttggcatgggagagc

SEQ ID NO: 2390 - DNA, 480 bp, Homo sapiens
  MAP TO AC006391.7; EXPRESSED IN PLACENTA, SIGNAL =   2; EXPRESSED IN BONE MARROW, SIGNAL = 2.2; EXPRESSED IN FETAL LIVER, SIGNAL = 1.9; EXPRESSED IN HEART, SIGNAL = 2.5; EXPRESSED IN HELA, SIGNAL = 1.6; EXPRESSED IN HBL100, SIGNAL = 1.6; EXPRESSED IN BRAIN, SIGNAL = 2.1; EXPRESSED IN LUNG, SIGNAL = 3.5; EXPRESSED IN BT474, SIGNAL = 1.6; EXPRESSED IN ADULT LIVER, SIGNAL = 1.8
ttctccatcagctctgctccttctcttcctgatctcttcttccgttctttcttctctgcctcctccctgccttccttctgcggtggagggtcaggggacatctcactggggtggcaccgaggcactcatatggctgtacgagaacctggacagagaggctcctgtggtcccgccttcctcctcctcccccacctctcccctcgcccctgggggaccaggattggggcagcaggggaaggtggccatgaagccgaggcggaagcgtttgttcatgaagcagtagatgatggggttgacgcaggaggaggtgtaggacaggaggaggatgaaggaaatgggggttcctgagaggcggcgctctgcggaggcggtgtcgtaggcccgccaggcgttggcgctgaagatgggcatccagcacaggaagaagaggaccacgatgacgatgagcatgcggatcacccttttcttggccatcaggtt

SEQ ID NO: 2391 - DNA, 475 bp, Homo sapiens
  MAP TO AC007158.5; EXPRESSED IN BT474, SIGNAL = 3.5; EXPRESSED IN PLACENTA, SIGNAL = 4.6; EXPRESSED IN BONE MARROW, SIGNAL = 5.7; EXPRESSED IN BRAIN, SIGNAL =   4; EXPRESSED IN ADULT LIVER, SIGNAL = 5.9; EXPRESSED IN FETAL LIVER, SIGNAL = 3.5; EXPRESSED IN HEART, SIGNAL = 4.4; EXPRESSED IN HELA, SIGNAL = 4.8; EXPRESSED IN HBL100, SIGNAL =   4; EXPRESSED IN LUNG, SIGNAL = 3.3
cttgttttctgtgccacctgcaggaccaacaccacatggaagctgccaaggcttggggctttcacccttggaaacaatgacctgagctgtaccttggccctttttagccatggccagagcagctggaacacagccttaaggctggacacaacagggggccctggacctggcccaggaaaccatttttccctcttggcctgtgatgggaggggctgctatgaaagtctctgacataccctgaagacattttccccaatgtcttggtgattaacatttgcctcctcattacttacacaaatttctgcagctagcttgatgttctcctcccaaaatgggtttttcttttctacttcatcgtcaggctgcaaaattttcctaacttttatgctttgtttcctcttgaatgctttgacacttagaaatttcttctgccagatactctgaatcatctctctcaaggtcaaagttccacaca

SEQ ID NO: 2392 - DNA, 464 bp, Homo sapiens
  MAP TO AC007241.2; EXPRESSED IN BRAIN, SIGNAL =  14; EXPRESSED IN BT474, SIGNAL =  25; EXPRESSED IN HBL100, SIGNAL =  26; EXPRESSED IN LUNG, SIGNAL =   5; EXPRESSED IN BONE MARROW, SIGNAL =  11; EXPRESSED IN ADULT LIVER, SIGNAL = 6.2; EXPRESSED IN FETAL LIVER, SIGNAL = 9.7; EXPRESSED IN PLACENTA, SIGNAL = 7.7; EXPRESSED IN HEART, SIGNAL = 8.8; EXPRESSED IN HELA, SIGNAL =  20
agcattaccaggccctgactgtggctgagcttactcagcagatgttttatgctaagaatatgatggctgcccctgtcatggctgctacctaatggtggctgccattttcaggggttgcatgcccatgagggaggtggatggacaaatgttcaacattcaaaataaaacagcagctactttgctgactggctcccccacaacgtaaaaacagccatctgtcacatcccaccccaggggctaaaaatgttggccaccttcatgggcaacagcattgttatccaggaaatcttcaagcatgtctcagaagagattacagcaatgttcaagtgcaaggtcttcctccactggtacacgggcgagggcttggatgagatggagttcactgaggctgagagcaacatgaatgacctggtgtctgaaaattagcagtaccaggatgccaaggctgaggaggaggagtttga

SEQ ID NO: 2393 - DNA, 436 bp, Homo sapiens
  MAP TO AC007425.16; EXPRESSED IN ADULT LIVER, SIGNAL = 1.6; EXPRESSED IN PLACENTA, SIGNAL =   1; EXPRESSED IN BRAIN, SIGNAL = 1.4; EXPRESSED IN BT474, SIGNAL = 0.97; EXPRESSED IN FETAL LIVER, SIGNAL =   1; EXPRESSED IN HEART, SIGNAL = 1.2; EXPRESSED IN HELA, SIGNAL = 1.2; EXPRESSED IN HBL100, SIGNAL = 1.1; EXPRESSED IN BONE MARROW, SIGNAL = 1.7
ttcaatgcttccattcctccccagattgtaaacctctttgaggatgacaatatctgtcttgttcactactatattcccagagcccgcctcacagaggtgcctggtttggggctgtcactttgtccagttccagggctcattcacatagcattcttcatgagtggcgccccctagagttgtgtgatatgacagctctgctgccatggtcagaaaccaatctggcttgctgtcatgtcagtgcctccccacgcatgtggattttttccctcccaaaaggctcaggaaccacagaacgtaaccctgatgaacctgactccaattaggagcttgcacttggctggtgagaatccccagacagccccgagggtgactcctcccgctccttgcagaatctgtagcctggtgttcattgtgctggctcaagggtcagatcaga

SEQ ID NO: 2394 - DNA, 499 bp, Homo sapiens
  MAP TO AB026898.1; EXPRESSED IN ADULT LIVER, SIGNAL = 1.9; EXPRESSED IN PLACENTA, SIGNAL = 1.2; EXPRESSED IN BONE MARROW, SIGNAL = 1.7; EXPRESSED IN BRAIN, SIGNAL = 1.3; EXPRESSED IN FETAL LIVER, SIGNAL = 0.99; EXPRESSED IN BT474, SIGNAL = 1.3; EXPRESSED IN HEART, SIGNAL = 1.2; EXPRESSED IN HELA, SIGNAL = 2.8; EXPRESSED IN HBL100, SIGNAL = 1.3; EXPRESSED IN LUNG, SIGNAL = 0.88
gagaggactttttgggggtgatggaagtgttctaaaacgattgtggtgatggttgcacaattctatatatggtacaaaaatcgccaaattgtacagttacagtgggtaaatgtagagaaatataaattatacctcacagagttgttaaaagtttaaaagcctagaaatatttgacttccgtttggaatagatatattcggagtagacacaaaacctgtacactacccaaaaactactttgaaaatatcaccctgaaaggctgaacttgctgtcagcagacctgcctccctttccacacaacttaagcaacactgtgtgtgtttttgttacagctctttccaacaactgatcctgtgggtactttgctccaagttccagaacagatctctgctcatctacctcagccagctgggcagattgctacacagccaactcaagtctctctcccacccaccgcagagccagcaaaaacagctcaggtaaagccggggatatggtt

SEQ ID NO: 2395 - DNA, 451 bp, Homo sapiens
  MAP TO AC007528.5; EXPRESSED IN BONE MARROW, SIGNAL = 1.5; EXPRESSED IN BRAIN, SIGNAL = 1.1; EXPRESSED IN ADULT LIVER, SIGNAL = 1.7; EXPRESSED IN BT474, SIGNAL = 6.1; EXPRESSED IN PLACENTA, SIGNAL = 1.1; EXPRESSED IN HBL100, SIGNAL = 4.7; EXPRESSED IN HELA, SIGNAL = 6.9; EXPRESSED IN HEART, SIGNAL = 0.85
cgaatacccatggcacaagtgatagccccaaaatacatgtgattcttgtcactcaccacactgaacttgagattatagttgccaccactctgaatgataggagggtaacacatttccacagtagaagggtctgccccagcaaggtattttttctcttcaacggccttttccacagactcagccagtttgctgtgtcaaactttctcatctgcatcaactatttccatgactctttccttgaagaatttgttgaagacttcagaagtgatgccagctgctttcttcattaatttgagctccccatcctcccttacagcgactgtatatgccacaactgcactgatatctattttgtcaaagccttctttgttgaggcagtcattccagctcttcatgaactctccagggaatttgtctttgctgaacactccaatcttcttgccattcttgc

SEQ ID NO: 2396 - DNA, 450 bp, Homo sapiens
  MAP TO AC007628.3; EXPRESSED IN HBL100, SIGNAL = 1.6; EXPRESSED IN HELA, SIGNAL = 1.6; EXPRESSED IN PLACENTA, SIGNAL = 1.9; EXPRESSED IN HEART, SIGNAL = 1.6; EXPRESSED IN BRAIN, SIGNAL = 2.7; EXPRESSED IN BONE MARROW, SIGNAL = 2.8; EXPRESSED IN LUNG, SIGNAL = 1.2; EXPRESSED IN BT474, SIGNAL = 1.4; EXPRESSED IN ADULT LIVER, SIGNAL = 1.9; EXPRESSED IN FETAL LIVER, SIGNAL =   2
cctctctgaaggaggaaggcactcttgtggctactcttccattcttccttgtagtacctgttgccttctttcttttccagctgcccccccaccactgcccacagccctggtcttcctggcaagcctctttcttattacccattctccctaaagttcatgcccattcctccatgggctgtcactttggaaggcaagtggctgagctgttccctggaagatataacagaaccatgctagagaccctgaactctaccagtgatggaggaatgaatctcaaaataagagtccaggctccatggctggcacatggggcaagtagaacctttgggattcatttgggtaaccccctaagggtgcctgaccacctctgcaagggccatgccattgttcatccccaggagaggtgaggcaggaaggggttggcaggagggtgagggtgcaagattggat

SEQ ID NO: 2397 - DNA, 481 bp, Homo sapiens
  MAP TO AC009488.1; EXPRESSED IN PLACENTA, SIGNAL = 2.6; EXPRESSED IN BRAIN, SIGNAL = 2.2; EXPRESSED IN ADULT LIVER, SIGNAL = 2.2; EXPRESSED IN FETAL LIVER, SIGNAL = 2.4; EXPRESSED IN BT474, SIGNAL = 1.3; EXPRESSED IN HEART, SIGNAL = 2.6; EXPRESSED IN HELA, SIGNAL = 2.5; EXPRESSED IN HBL100, SIGNAL = 1.9; EXPRESSED IN LUNG, SIGNAL = 3.6; EXPRESSED IN BONE MARROW, SIGNAL = 2.3
tctgactcatcagtggcaccatcaggattcaatcctaggttaggctgaaatgagcccatggtctttccactataccatgccatgtgctgcttgtttggattcctcagatccaaaacccaaaccatgtgccatcagcccagacctggctggagatcaatgtgccactcacaccagccttcacacccccgggccagctgtaagtcatgggtatcccaggctgagagaggcagagaaaaggagaaagcactgccctcaagctgtgttgcctccagtcccatttcccatgcccactcacagggatggagccaccatgggcatccttgcagccacactgacttctggggacacacttgtcttcactcagcacatagccgggctgacaaatgcagccctcagcgcaggcagaggggactttggcgccctcacaccggccatccaggtcccagcaggagggtgagcaggagggaaggcagttggtgta

SEQ ID NO: 2398 - DNA, 446 bp, Homo sapiens
  MAP TO AC009892.1; EXPRESSED IN BONE MARROW, SIGNAL = 3.4; EXPRESSED IN BRAIN, SIGNAL = 1.9; EXPRESSED IN LUNG, SIGNAL = 3.4; EXPRESSED IN ADULT LIVER, SIGNAL = 2.3; EXPRESSED IN BT474, SIGNAL =   1; EXPRESSED IN FETAL LIVER, SIGNAL = 3.2; EXPRESSED IN HELA, SIGNAL = 2.3; EXPRESSED IN PLACENTA, SIGNAL = 2.4; EXPRESSED IN HBL100, SIGNAL = 1.3; EXPRESSED IN HEART, SIGNAL = 2.3
gaatgagggttgggggtcccaagggagggagagacagagagagacaggggatgggcggggaggggagactcagagaaaacagagacagagagactaagggtcccagggagaggcctggggaggtctcagctcagaacaaggtggggcagcccctcacccatccttcttctctctaggacagttctatgacagaccctctctctcggtgcagccggtccccacagtagccccaggaaagaacgtgaccctgctgtgtcagtcacgggggcagttccacactttccttctgaccaaggagggggcaggccatcccccactgcatctgagatcagagcaccaagctcagcagaaccaggctgaattccgcatgggtcctgtgacctcagcccacgtggggacctacagatgctacagctcactcagctccaacccctacctgctgtctc

SEQ ID NO: 2399 - DNA, 447 bp, Homo sapiens
  MAP TO AF159227.2; EXPRESSED IN HBL100, SIGNAL =   1; EXPRESSED IN HEART, SIGNAL = 1.4; EXPRESSED IN BONE MARROW, SIGNAL = 1.1; EXPRESSED IN BRAIN, SIGNAL = 1.1; EXPRESSED IN ADULT LIVER, SIGNAL = 1.5; EXPRESSED IN FETAL LIVER, SIGNAL = 1.2; EXPRESSED IN PLACENTA, SIGNAL = 1.3; EXPRESSED IN HELA, SIGNAL = 1.5
atgtgtgtggatgtgaacgctaggccctgggagaaacaaagacgagcaagccaaggagtccaaggagggcctgttctgtgattaacaatgctcactgcctagaaggttgagactaggagaccagagactcagcctcccaggctgctgactaccagctagctgtggattaggagcacagcacttactcttttgcctttattttcttgacacacaaaatgaggcttaggcaaaacaattttaattcagtgggaaaaataccaaatcctgatcaggcaggcccactatctaggaacaaccaagtacctggtgactctgaagacatctaagcccagcacaatgaagtctgtaagatcgtagcaagagtcacagggaatggtaacgtctgcagtcccatctactttgccgaattctgaagacacctgaaaacaaccaaatggaacatgaaga

SEQ ID NO: 2400 - DNA, 494 bp, Homo sapiens
  MAP TO AC009954.1; EXPRESSED IN PLACENTA, SIGNAL = 1.2; EXPRESSED IN HBL100, SIGNAL = 1.7; EXPRESSED IN HELA, SIGNAL = 2.6; EXPRESSED IN HEART, SIGNAL = 1.5; EXPRESSED IN BRAIN, SIGNAL = 0.92; EXPRESSED IN BONE MARROW, SIGNAL = 0.91; EXPRESSED IN LUNG, SIGNAL = 7.1; EXPRESSED IN ADULT LIVER, SIGNAL = 3.3; EXPRESSED IN BT474, SIGNAL = 1.2; EXPRESSED IN FETAL LIVER, SIGNAL =   1
gtcccaggttgtccatcgggccttcacaatgcaaaatataactactttgatatacttcaggggctttaccaactccaactatgttaaattgagcgggtggaattggccacgcaaacagccagtgctgtagagaaatgattgaaatgtctgctcctgtatctaccaaacctttaaatttctttccctgaatagttatttcacaggtaagatgtttatcagtaatttgatttacccaataagcttctttgccttgtttatttgtgctttcaaatcctcctgttcgtttaatttaacttttccgtatttctacatacggcacaatcaggagctgtgctataagctctcctggctctgctttgcagggaacagaagtggatataacaatttgaatttccacattgtaatctgaatcaatgactcctgtttgtacttgtatcccttttaaatttaaactagaccttactagaagtaatcctatcatccctgctggcaat

SEQ ID NO: 2401 - DNA, 452 bp, Homo sapiens
  MAP TO AF060568.1; EXPRESSED IN PLACENTA, SIGNAL = 1.8; EXPRESSED IN HELA, SIGNAL = 1.7; EXPRESSED IN HBL100, SIGNAL = 1.6; EXPRESSED IN HEART, SIGNAL = 2.2; EXPRESSED IN LUNG, SIGNAL = 4.3; EXPRESSED IN BONE MARROW, SIGNAL = 1.7; EXPRESSED IN BRAIN, SIGNAL = 1.3; EXPRESSED IN ADULT LIVER, SIGNAL = 1.9; EXPRESSED IN BT474, SIGNAL = 1.1; EXPRESSED IN FETAL LIVER, SIGNAL = 1.9
actgctgtccatccctgaaccaaatgggctctctttcccaggactggcccttgccccacagatgatcatggggccacagtaaagtatggtcatgtgtgaagacaggtattgcttgtttattcaatggaggtgtggccgtggatccttaagttgtctttggaggtggtgaatacaggccgtcgcatccttctcatgcacagaatgtgccctactgtcccctgaagagggggcagggagaggcaaaggcctgatccagccccttgtctccacaggcgaccacccctacgagtgtgagttctgtggcagctgcttccgggatgagagcacactcaagagccacaaacgcatccacacgggtgagaaaccctacgagtgcaatggctgtggcaagaagttcagcctcaagcatcagctggagacgcactatagggtgcacacaggtaccgaaggcc

SEQ ID NO: 2402 - DNA, 480 bp, Homo sapiens
  MAP TO AF165423.1; EXPRESSED IN PLACENTA, SIGNAL = 0.96; EXPRESSED IN HBL100, SIGNAL = 0.95; EXPRESSED IN HEART, SIGNAL = 0.98; EXPRESSED IN BRAIN, SIGNAL = 1.2; EXPRESSED IN BONE MARROW, SIGNAL = 1.1; EXPRESSED IN BT474, SIGNAL = 1.5; EXPRESSED IN ADULT LIVER, SIGNAL = 1.5; EXPRESSED IN HELA, SIGNAL = 2.4
tccctgaaatgggaagaaaaccaaacatagtactatggaaatatatgaatatgctattgatgatgctgtcagaacaggcaaatttgagaagttgagaggggtcacagacaaaattagagatttccacattcttgatgatggtgaattgtaacacaatccaactgtgcagctgggaatccaacaggctaaggaaaaaggacaccaaaacgaagaagacacagaggtgaggattcacgatgactgggtagtgcagagggtgacagatggctacaaagcagtcataggccatcacagtcaggagcatgccttctatacatgcaaaaaggaccaagaaagacatctgcgtcaggcagcctgcatgagagatgactctgctatgcgactgcatgtccacaatcatcttgggaactgtggccgaggtgaaaccgatgtcagcccagcacaggttggagaggaagaagtatatgggggtgtggaggg

SEQ ID NO: 2403 - DNA, 473 bp, Homo sapiens
  MAP TO AL078621.19; EXPRESSED IN HELA, SIGNAL = 0.91; EXPRESSED IN HEART, SIGNAL = 0.94; EXPRESSED IN LUNG, SIGNAL = 2.7
cctctgtttccctttgcataacacaagggtaattgcatgtgcagaactgtgctctggtggaaataacagatttgagagcttcacgtgggctggtgtgtgtactcatagtgacatgagctgttttgttatgacgggttggtaatgctgatacccaatttccagacttgacccggaagctgtgtggctgtggagtgaaagggggaagggaagccacaggtggcttccaggttgtcagccttagggtgaaaaagtctgggacaagggagagatggagacgccatctgaccaccttgcctgttctgcttacagactcatggagagatttctcatggatggcttgtatccttcaaggtttgaagtactccttgttcctgtgggtcttcccacgctcatgtatcagtgtcccactgcccacccctttgtaccagcagcccaggaacaggaaggaggattgggtaagtgaacgcacaggt

SEQ ID NO: 2404 - DNA, 474 bp, Homo sapiens
  MAP TO AL034422.18; EXPRESSED IN BT474, SIGNAL = 3.2; EXPRESSED IN ADULT LIVER, SIGNAL = 1.5; EXPRESSED IN PLACENTA, SIGNAL = 4.6; EXPRESSED IN BRAIN, SIGNAL = 0.99; EXPRESSED IN FETAL LIVER, SIGNAL = 1.9; EXPRESSED IN HEART, SIGNAL = 1.8; EXPRESSED IN HELA, SIGNAL = 9.2; EXPRESSED IN HBL100, SIGNAL = 4.1; EXPRESSED IN LUNG, SIGNAL = 7.3; EXPRESSED IN BONE MARROW, SIGNAL = 1.2
ttgtgctttgctgtatttttcctataataaacattattatttatcagaaaaaaatcaataaatattaaatttcaaaatagctacttatgtcacaatgacaagacagagccaactagaaacagagaatgaaacagtaaaaccaaataatcttcattttaaaaatcattttcttacattcgactgtaggctttcgataccagtagatcaaatttacctaactggaatgtattaatctgttacactggctgcaggctaactttccaaaacaaagaggtcagcgccccaccaaaatatgatcaggacttaccctacaggggtgaaggatgtcttctggaggacagtggctctggaagcaacagatttagcatgttctagtttaacagtggcctgagtcagaggctgagacagaacattggtgacttgcaactggaaataaataaaaaattatttgttacaacaaaggctacaggagca

SEQ ID NO: 2405 - DNA, 470 bp, Homo sapiens
  MAP TO AL035553.10; EXPRESSED IN LUNG, SIGNAL = 1.4; EXPRESSED IN BT474, SIGNAL = 4.7; EXPRESSED IN HEART, SIGNAL = 0.96; EXPRESSED IN BRAIN, SIGNAL =  26
ctgcccaaaaacatcctctgaagcctctctaacccagggatcctcctcactcttcccctacccattccccccaccctccgttatactggggccagttatctagtagatactgccaattacccttggcagaggtgccctgctcactaatttcatttgaaggagagccctggaacctggttttaatgtctggcacacgccactccaggatctcccagtttgtgtttctacatctgcaggctgatgctgatttctaaccaccccatgtcaatcattttagtttgtgggcatcacctatgccctgaccgttgtgtggctcctggtgtttgcctgctctgctgtgcctgtgtacatttacttcaacacctggaccacctgccagtctattgccttccccagcaagacctctgccagtataggcagtctctgtgctgatgccagaatgtatggtgagttagggtacgggtgctttg

SEQ ID NO: 2406 - DNA, 486 bp, Homo sapiens
  MAP TO AL096887.5; EXPRESSED IN BONE MARROW, SIGNAL =   4; EXPRESSED IN LUNG, SIGNAL = 2.6; EXPRESSED IN BRAIN, SIGNAL = 4.1; EXPRESSED IN ADULT LIVER, SIGNAL = 3.9; EXPRESSED IN BT474, SIGNAL = 2.2; EXPRESSED IN FETAL LIVER, SIGNAL = 3.8; EXPRESSED IN PLACENTA, SIGNAL = 4.4; EXPRESSED IN HBL100, SIGNAL = 2.8; EXPRESSED IN HELA, SIGNAL = 3.3; EXPRESSED IN HEART, SIGNAL = 3.5
aatggccacgaaccacataggggtaacttaggatctctattattaaataaaatgttaaaaatacatttcttcagttacaccagccacatttcaagtgcttaattgccttgtgtggttaatttaaatcagttaaaattaaatacaattaaaaatatattttctcagttagaccagccacacttcaagtgctcaatagccacatgtggctagtggctgccacactgggcagagcagttcatagtaccttttgatcactgcagaaaattctattggatatgctagactagagaagcacagaaggctgtatggtggtgatggtggtgatggtggtggtgatgatgttagaggcggaaaaagaggagatgattctgccagtagaaagggagtcactgaacgtgtttgagacaaagagaagggagaacagcagcttcacaaggacattggtgggaaagagaaacgtttaaagggaaggctgtctgacatatg

SEQ ID NO: 2407 - DNA, 482 bp, Homo sapiens
  MAP TO AL033378.6; EXPRESSED IN HBL100, SIGNAL =   2; EXPRESSED IN HELA, SIGNAL = 2.5; EXPRESSED IN HEART, SIGNAL = 4.5; EXPRESSED IN ADULT LIVER, SIGNAL = 2.9; EXPRESSED IN PLACENTA, SIGNAL = 3.1; EXPRESSED IN BRAIN, SIGNAL = 2.8; EXPRESSED IN LUNG, SIGNAL = 3.3; EXPRESSED IN BONE MARROW, SIGNAL =   3; EXPRESSED IN FETAL LIVER, SIGNAL = 2.8; EXPRESSED IN BT474, SIGNAL = 2.1
tccagcagcaaggtttgacccggggcttacgctatcacccacagctgaggtcaagggcagtgttggaaaactggtaactaactaactctttctgtagaataatgaatgctcatcatagtaacgagctgcccttattggaccacacagatcagccccaaccctaccctaaaaatgccctcacttgcttagtgtaggagagaaaaaggcagtgaggtagtagcgtgtgacaagaatcagaagcgactgacttttaggttaatccgatccaggagatcctccacagacttgggctggggtggtcgtcctttccgacgcctcctggtggggcgtttgggtttctcctcgtcttcactgagcacgtccacgtagatgaacttgaacgtgccgactttgttgttcagcaggcccatccaggtccccatgggtggcttgctgattatatcgatgatatctcctttctgtggcccagggagcaaagatct

SEQ ID NO: 2408 - DNA, 492 bp, Homo sapiens
  MAP TO AL034380.21; EXPRESSED IN BT474, SIGNAL = 1.7; EXPRESSED IN ADULT LIVER, SIGNAL = 1.4; EXPRESSED IN HELA, SIGNAL = 2.2; EXPRESSED IN PLACENTA, SIGNAL = 0.98; EXPRESSED IN HBL100, SIGNAL = 1.3; EXPRESSED IN HEART, SIGNAL = 0.85; EXPRESSED IN BONE MARROW, SIGNAL = 1.3
agaatgcccacagactttccctagctttacacctcagtgggaccatagatacacggtaaacttactgctaatacctcatactaccagggaggtctctgcttcctgccttatcttctgggaaacctgtgctccccggtctatcaatattagactcagaaagcgggagaggggatgatgtccctgtgggatgcatggtaccacatgaagccagtgagtacctagaaaggggtttgtggaaaccacaggggcagtcaagtgtcaggcgcccactcacctgagtcaatccaccaatctccttcacagacacatagaggcgatagaggtccagaggtttcctacccacagcaggcagatttgtcatgcccatggccttctcctcagtgaaggccagataacggtccacccacatcttcctctcaggctcaccacccagctcatacaacttggtgatcttctcattggttgtagtagaagaactggatttctggaagg

SEQ ID NO: 2409 - DNA, 469 bp, Homo sapiens
  MAP TO AL034485.5; EXPRESSED IN BONE MARROW, SIGNAL = 2.9; EXPRESSED IN BRAIN, SIGNAL = 1.8; EXPRESSED IN LUNG, SIGNAL =   1; EXPRESSED IN ADULT LIVER, SIGNAL = 1.7; EXPRESSED IN BT474, SIGNAL = 4.3; EXPRESSED IN FETAL LIVER, SIGNAL = 1.7; EXPRESSED IN HELA, SIGNAL =  28; EXPRESSED IN PLACENTA, SIGNAL = 1.9; EXPRESSED IN HBL100, SIGNAL = 4.4; EXPRESSED IN HEART, SIGNAL = 1.4
aaatgcttgaaaaaccgcaggaggccacacggcacatgccccccaagctggaacggtgccacccacaccaacctccggtggggtcccccccttggcgggccactggcctatagggccacgggcggtggttctgaatagagcctttgggtttcccaggtgctcaggcgctcctgagacagctcacttgcttttggtgtacctgagggcggcattcgtgccctgggcctcggcgagcttgcccatcttccccggcagcagcagtcgcacggccatctggatgtcccgggaggtgatggtcacgcgcttggtgtaatgggccagctgaccagcctcggtggcgatgcggtccaatatgtcatggatcatagaatccatgacactcacggcctcctgggaaaggctgaggccctggtgaacctgcttcagcacccgggggaaatagggggtgaagctgtccccgaagctgtcc

SEQ ID NO: 2410 - DNA, 447 bp, Homo sapiens
  MAP TO AL096771.8; EXPRESSED IN BT474, SIGNAL = 2.4; EXPRESSED IN ADULT LIVER, SIGNAL = 4.1; EXPRESSED IN FETAL LIVER, SIGNAL = 3.1; EXPRESSED IN HELA, SIGNAL = 4.9; EXPRESSED IN PLACENTA, SIGNAL = 3.6; EXPRESSED IN HBL100, SIGNAL =   7; EXPRESSED IN HEART, SIGNAL = 3.9; EXPRESSED IN BRAIN, SIGNAL = 4.5; EXPRESSED IN BONE MARROW, SIGNAL = 3.4; EXPRESSED IN LUNG, SIGNAL =   2
tctgactaggcatatgagggcaaagttaagaggtaggaatcaaatagaattctaaagttttattgcatctatctattccacagacagaataggatggacaactcaaaaagaagaaatgggcaattttagacaaattgagtgtgagtccagcaagtcagaatctctaccaggatcaatgaatataatacttaaatacctactagacatttttaaaaaagattcccttttaatttctgttctagaacgtggttctcctcaagatttagttactaaagacatcactgacacatcaattggggcttattggacatctgctccaggaatggttcgcggttacagggtctcatggaaatcactttatgatgatgttgacactggagagaaaaatctgcctgaagatgcaattcatacgatgatagaaaatctgcagccagagaccaaatacag

SEQ ID NO: 2411 - DNA, 485 bp, Homo sapiens
  MAP TO AL035458.32; EXPRESSED IN BRAIN, SIGNAL = 1.7; EXPRESSED IN BONE MARROW, SIGNAL = 2.4; EXPRESSED IN LUNG, SIGNAL =   1; EXPRESSED IN BT474, SIGNAL = 1.2; EXPRESSED IN FETAL LIVER, SIGNAL = 1.7; EXPRESSED IN ADULT LIVER, SIGNAL =   3; EXPRESSED IN HELA, SIGNAL = 3.5; EXPRESSED IN PLACENTA, SIGNAL = 1.6; EXPRESSED IN HBL100, SIGNAL = 1.3; EXPRESSED IN HEART, SIGNAL = 1.6
ggtgagacttgcagctagggacagctttgtgacctggaaccagtctgcatgtgtcattgcttagtgccctaacctgctcccttggtcagttggggtatagtgtcccaccagctccaagaagcagaagagaggggcagaccctacgcccctggagatctaacccttggtgcagtccatccctatgggagggggaacatggcctgccaaagccccccttgggtcacaggaaatgcaagctcagcaccagttgctgaaggcagtaccaccaaagcccataaatagacatagagagaaggtcatctctctccccttacccttgtcctcagtgcactgttgtggacttgacagtggctgttcccaacagggctggggagcatgggcttacagaaaccacttcttgggcttctccggcagcttcaccttcactgaaggtgaataccctgaaggaaagtgctttttgtgattgactctccattgcttccacc

SEQ ID NO: 2412 - DNA, 472 bp, Homo sapiens
  MAP TO AL096862.14; EXPRESSED IN PLACENTA, SIGNAL =   2; EXPRESSED IN HBL100, SIGNAL = 1.3; EXPRESSED IN HEART, SIGNAL = 1.5; EXPRESSED IN BONE MARROW, SIGNAL = 1.9; EXPRESSED IN BRAIN, SIGNAL = 1.3; EXPRESSED IN ADULT LIVER, SIGNAL = 1.5; EXPRESSED IN FETAL LIVER, SIGNAL = 1.4; EXPRESSED IN HELA, SIGNAL = 2.2
gcaaccccaattgttataagagacatttaactgaaatccatcggcttcaaaggcacaaagaagtgcgttcttctgcacagtactgcattttcctctttggttataaaatgttaactggggaaatgtgagctctttattatctttggcaaacataattttccttttctgtcaagtgactgtaatgtcattttcttggtaacacctctggccttggaaagtttggcttaactttattgatctctttatacatttacaacaaaacaaacatattttgtttgtagaaatatgtcatttgttgctctttgtttgagctcagctggcgaatgggatgagaaaccgaattttaagaaaagaacaacagtgccatttgaacagctgcaggaatggatctctgaagcaaacagctgggccacataatatgtctcagactgagctcctttggcctcaaattggggcctgaaaataaaagaga

SEQ ID NO: 2413 - DNA, 475 bp, Homo sapiens
  MAP TO AP000513.1; EXPRESSED IN BT474, SIGNAL = 1.4; EXPRESSED IN PLACENTA, SIGNAL = 2.2; EXPRESSED IN HBL100, SIGNAL = 1.9; EXPRESSED IN HEART, SIGNAL = 2.6; EXPRESSED IN FETAL LIVER, SIGNAL = 1.6; EXPRESSED IN ADULT LIVER, SIGNAL = 2.4; EXPRESSED IN HELA, SIGNAL = 2.3; EXPRESSED IN BRAIN, SIGNAL =   2; EXPRESSED IN LUNG, SIGNAL =  12; EXPRESSED IN BONE MARROW, SIGNAL = 2.4
atgttgacggacctgaactggcaagagggtccattgatatcagctgtcaaacaggctcccaatgagcttgcttagttaaaagtcttgccaaatataaaatgcactgagctcccatgagggcaaaggcaaacagtcatgactgctggagacttgggttgctttagaattttccaaaattgcccacagatggcactgtaccccgtggcatctagagtaagtagccatcactgcactacagttccaccccttcaatacaggctttaccagcgggcgtgggatcgactgcagcagcacgagagtgtcgagttgccctcagagagggagcagggggccctgtgaggaaggaagcggcggggcccctcagtgaggggccggcaggaccaagagtccagctctttcctttccctcaccccgactacgtgaccaacaaaatgcaaaaacttacgatgttgatgggcaaagaagccttcaaaga

SEQ ID NO: 2414 - DNA, 999 bp, Homo sapiens
  MAP TO Z92542.2; EXPRESSED IN BT474, SIGNAL = 1.1; EXPRESSED IN HEART, SIGNAL = 0.87; EXPRESSED IN LUNG, SIGNAL = 9.9; EXPRESSED IN BONE MARROW, SIGNAL = 1.3; EXPRESSED IN BRAIN, SIGNAL = 1.2
tctctgaggcaggctacaagttttacaaataaaaatgaagttcaagaaacatagtaacctttaagtctaaatgttgtcttctgacattcaagcagacaaaagagttataaagagtttatagctcagctctcttcttagcagtcattctatcacaaacactcatatgagtaccaatataatgagagtatgttttaccagattatcatttagaaactgttttgacagcaagttagctgagcatttagcagtgccagaataatttcatcaaggccagtgctttgttacagagtgagttggtctaagaaacttaattgctgttgataggttacttgttattcgaaggcacatgcttgagagaattaatgtttttagtcttccaggtgttttgagtatttgttctttctttttaacaatactttttgtgtgtcagctattgagggaaactgatatacttcttttgtttttaacatagaaaccaagccggcaaaagtactgctttgcagtctcaccacagatctaacagcaaggacatccagaacctgagtgtaggcctgccccgggctgacgaaggtctccctgccaatgaaagcttcctaaatggaaaccttgctggagctagtcttagtccactgcacaccaaaacctaccaagcaagcagccagcctgggtctaccagcaaagatctcaccaacaacaacataccacaccttcttagcccaaaagaagccaagtcaaaaacagagtttgattttaatattgacccaaagccttcagaaggcccagggacaaagtacctcaagtcaaacagcagatctcagcagaaccgccactcattcatggaaagctctcaaagcaaagctgggacactgcagcccaatgaaaagcagagtcggcatagctatattgacacaattccccagtcctctaggagtccctcctacaggaccaaggccaaaagccatggggcactgagtgactccaagtctgtgagcaaccttt

SEQ ID NO: 2415 - DNA, 461 bp, Homo sapiens
  MAP TO AP000521.1; EXPRESSED IN BONE MARROW, SIGNAL = 9.5; EXPRESSED IN BT474, SIGNAL = 1.5; EXPRESSED IN HBL100, SIGNAL =  13; EXPRESSED IN HEART, SIGNAL = 4.2; EXPRESSED IN BRAIN, SIGNAL = 1.7; EXPRESSED IN LUNG, SIGNAL =  11; EXPRESSED IN ADULT LIVER, SIGNAL =   4; EXPRESSED IN FETAL LIVER, SIGNAL = 2.7; EXPRESSED IN PLACENTA, SIGNAL = 3.1; EXPRESSED IN HELA, SIGNAL =  12
caggatcagaaaacccaagggaagaggatgtgttgaggctggaccagttgtcctcctgaggtctgtcctcagcagggaccttcccctgacctgtgactgctgggagtcaggttcccatgaccacaatcaaggtgataaatttgtccttcattttcacaggtgctttacaaaagagtaagtgttgatagacagggcctctgaacagggtaaatgtgtgtggagatggtgcctcacaactaggcaagatatgagccaactcctacctggggcttgaaatccaccaatggaagaaggaaactcagagctcacccctttcctacctgggatcttattcctccacatcacagcagcgaccacagctacagtgaatacagcaacgagaagaaccaggccagcaatgatgcccacaacggggatgatgggctgggaagacagctctaagaaaggaggtgaacgtgagg

SEQ ID NO: 2416 - DNA, 471 bp, Homo sapiens
  MAP TO AP000346.1; EXPRESSED IN PLACENTA, SIGNAL = 0.99; EXPRESSED IN BONE MARROW, SIGNAL = 1.4; EXPRESSED IN FETAL LIVER, SIGNAL = 1.1; EXPRESSED IN HEART, SIGNAL = 1.1; EXPRESSED IN HELA, SIGNAL = 1.5; EXPRESSED IN HBL100, SIGNAL = 1.1; EXPRESSED IN BRAIN, SIGNAL = 2.2; EXPRESSED IN LUNG, SIGNAL = 2.4; EXPRESSED IN BT474, SIGNAL = 0.98; EXPRESSED IN ADULT LIVER, SIGNAL = 1.2
ttacctggcccaaaagactgctgaggtggggaaacccagctcttgcctcagcatctcgctgcatgaatgaatcagggaatccctgcagcagtgggacagggtggcacctccctttgagactctgcaggcaccagggtcaaaagagggctagggtgagagggggtgagaagaggcccccccaggctgttagaaattccgtgttggtggcctgccgagaagtaggtggccctggacgcacaagccatcagcctgctcctgaagctgctacactcatgcatgggcagggtgtgcctgaaggccaccaaggccctcaccatgctgccagaggcccctgagggctgcaaggtcctgcaggcccatatgcacaccttccgtgtcctggaggaggactctgacagcaaggcttatgagggcgaggccttatagaaggtgacccagatcgccatcgatgtcattgagtggaaaccctga

SEQ ID NO: 2417 - DNA, 475 bp, Homo sapiens
  MAP TO AP000351.2; EXPRESSED IN BONE MARROW, SIGNAL = 3.4; EXPRESSED IN BRAIN, SIGNAL = 3.3; EXPRESSED IN BT474, SIGNAL = 1.8; EXPRESSED IN LUNG, SIGNAL = 3.1; EXPRESSED IN ADULT LIVER, SIGNAL = 3.9; EXPRESSED IN FETAL LIVER, SIGNAL = 4.2; EXPRESSED IN PLACENTA, SIGNAL = 3.6; EXPRESSED IN HEART, SIGNAL =  17; EXPRESSED IN HELA, SIGNAL = 3.7; EXPRESSED IN HBL100, SIGNAL = 2.8
ttctctatcccaggctcaccctccgggtcctcccacaccgaagaatctttgtcaagtgtggagaactgtgatccttcctgattcataacattctgtgcttcctgttgccccgattgagtccaggcccccaggcctggttcccgcagcccccatggcagctctgcctgcctttcccgcctcaccagcctatcctcaagtgatggccccattggtcacagaggagtcctacctctgcccagggtctaaccctcctccaatccactccacacctgcatcatctccaccacggccaccaggtcagccagtgagatttggttcccggtgatgaacatcttatcctgcagaaaatactcctcaaagagctgcaggctgttcttcacctcttccactgcatgctccatcttctcagctgaaacttcctcccctgttatctttgggatcagcaactggccagggttgggaagaggagggaaga

SEQ ID NO: 2418 - DNA, 467 bp, Homo sapiens
  MAP TO AP000511.1; EXPRESSED IN BT474, SIGNAL = 1.7; EXPRESSED IN ADULT LIVER, SIGNAL = 2.3; EXPRESSED IN PLACENTA, SIGNAL = 1.7; EXPRESSED IN BRAIN, SIGNAL = 2.4; EXPRESSED IN FETAL LIVER, SIGNAL = 1.8; EXPRESSED IN HEART, SIGNAL = 2.1; EXPRESSED IN HELA, SIGNAL = 1.5; EXPRESSED IN HBL100, SIGNAL = 1.5; EXPRESSED IN BONE MARROW, SIGNAL = 2.7
atggtagagtccatggtgggcacagacttggtcacggagtctatagtattctgatagagtgtggtggaggctgtggtggacacagacgctgtagtggtcttagcaggcattacggtggctgtggagaacccagactgtgtggttgtcacaggagctttggtggagaccacagcagtctcagaacctgtggtcatggctgtggtcatggctgtagtcacttcagtggcagaggtggaagctctggtggtctcagagcctgtgctgctttcagaggctgtagcgaagactgtggtgggcacagatgatactgtgtggtgtccggtgttctcagagcctgtggtagaggttgtggtgggcacagatgctgtggtggtctcagcaggtgttggaggggctgtagagggcgcagactctacagttgtcccagaggcttttgtggagattgcagtggtcgcagagtctgtggt

SEQ ID NO: 2419 - DNA, 988 bp, Homo sapiens
  MAP TO AL121652.1; EXPRESSED IN PLACENTA, SIGNAL =  28; EXPRESSED IN HELA, SIGNAL = 1.3e+02; EXPRESSED IN HEART, SIGNAL = 2.3; EXPRESSED IN BRAIN, SIGNAL =   3; EXPRESSED IN BT474, SIGNAL =  38; EXPRESSED IN HBL100, SIGNAL =  17; EXPRESSED IN LUNG, SIGNAL =   6; EXPRESSED IN BONE MARROW, SIGNAL = 3.7; EXPRESSED IN ADULT LIVER, SIGNAL =  13; EXPRESSED IN FETAL LIVER, SIGNAL = 4.2
tcctttgaatttctgtggtatcagttgtaatgtctcctttttcatctctgtttttatgtatttgagtcctctccatttttcccttactctggctaaatgtttgtcaattttgtttatcttttgaaaaaaaccaactttttgtttcattggtcttttgtattgttttcctcatttcaaattcatttatttctgcttcaactttttttatttattttttttaacctctgaactttttattggcttcgggctccccaaaggataccctgcttctgctggcttaatgcctcagaattttggtgtcattggtctcagacaccactttgccatccactatctggcgggtctatctggcgggtggtggtcttttggatggtttgcatggagttgctgcagtccagggtatcaccaagattgaagtccttgccatcttccagcaggcggcggtaggtggcgatcgcagcctccagcttgaccttgatgttcagcagggcctggtactcctgggcctggcactgtccctctgcccaggtttgtgccagctctgactccaggtgtagcaggatcccattgagctgctccatctgcagggcatagcgggccactacctccctcaggctgttctccaaactggccttcagatttctcatggagtctaggttgatctccaagaactggactgtacgtgtcagctctgtgagcatcgccttagcagctccaacctcggtggactgtgtggtgaccactgtggtgctctcctcaatctgctgagacctgttattgtccagctcctctctgttcttctgagccacctcgtcatattgggcccagatgtctgccatgatcttggcgaagtcctgagatatgggggcatctaccaccacagtcaacccagagctggcaatctgggcttgtaggccttttacttcctcttcatggttcttcttcataagagcagctcctccttgaaagcctggatctctgtctccag

SEQ ID NO: 2420 - DNA, 409 bp, Homo sapiens
  MAP TO AC004019.11; EXPRESSED IN LUNG, SIGNAL = 4.9; EXPRESSED IN ADULT LIVER, SIGNAL = 4.1; EXPRESSED IN PLACENTA, SIGNAL =   5; EXPRESSED IN BRAIN, SIGNAL = 7.6; EXPRESSED IN BONE MARROW, SIGNAL =   6; EXPRESSED IN FETAL LIVER, SIGNAL = 6.6; EXPRESSED IN BT474, SIGNAL =  19; EXPRESSED IN HEART, SIGNAL =  17; EXPRESSED IN HELA, SIGNAL =  12; EXPRESSED IN HBL100, SIGNAL =  26
gaacagtatcattggagcatgacttaaaatggaaaaaaaaagactaaagtggtaattcttattgatgcgtgttgtaacatcaaacacgttttctagtatccctcgtattttttttttgggaggggcgcggcttattgagatattcacaaaccgtacaattaactcatttgaagtatacagttcagtggttttagtatatttagagtgcgcagccatgaccacagtcaattttagaacattttcaacaccccaaacctttcagcaggcacactccactcacgtttttccccatcctctggaaaccactgagctttgtgcctgtatggattttgcccactcttgacatttcctgtaagtggaatcacacagccccactttgtgcctgtatggatttgcccactctggacat

SEQ ID NO: 2421 - DNA, 452 bp, Homo sapiens
  MAP TO AC007728.1; EXPRESSED IN PLACENTA, SIGNAL = 3.2; EXPRESSED IN HBL100, SIGNAL = 2.7; EXPRESSED IN HELA, SIGNAL = 2.3; EXPRESSED IN HEART, SIGNAL = 4.1; EXPRESSED IN BONE MARROW, SIGNAL = 4.7; EXPRESSED IN LUNG, SIGNAL = 5.5; EXPRESSED IN BRAIN, SIGNAL = 4.2; EXPRESSED IN ADULT LIVER, SIGNAL = 3.4; EXPRESSED IN BT474, SIGNAL = 3.1; EXPRESSED IN FETAL LIVER, SIGNAL = 4.7
ttgtcacagactcctgctcccatgaaactgctcatggaactgctctgggtgcagggccatgtcttttccttcccacttcccaccagttttttcaaacctggggctatctttcccctccttgaatcttcaagggagagattggagcccctgcctcaacaatgcatagccccctgtgcccagtgacaccacacgctcctcaaggtgaactaattcccagcccctcaagcaagaagcaacctctccttctccccacatccagaggaccccaaggcaagcaaggcagaggccaacagcacacagacctacacgtactccatgtttcttccccttagacttgatttcttctaccaccaagcatgagggtgagacccagtctccctctgctcctctggcccccttctgtacccacaaaatccactgggggtctgagctggttcagtatagatgtgcaa

SEQ ID NO: 2422 - DNA, 473 bp, Homo sapiens
  MAP TO AC004902.2; EXPRESSED IN HELA, SIGNAL = 1.8; EXPRESSED IN HEART, SIGNAL = 0.96; EXPRESSED IN BRAIN, SIGNAL = 0.95; EXPRESSED IN LUNG, SIGNAL = 0.99; EXPRESSED IN FETAL LIVER, SIGNAL = 1.1
tgggtgatcagtgcagagacatgtcacaatgtccatgtaggcagagcctagacaagggttacatcacctgggtgatcattgcagagtgatgtcacaacgccctctgtaggcagacactagacaagagttacctcacctgagagatcagtgcagagatatgtcacaatgccctctgtaggcaaagactagacaagagttacatcacctgtgtgatcagtgcagatatatgtcactatgtccctgtggccagagcctagacaagagttacatcacctgggtgatcagtgcagagataagtcacaatgtctatcacaatgtctccagtaggcagagcctagacaagagttacatcacctgggtgatcacatcagagatatgtcacaatgccccctgtgggcagatcccagacaagagttgcatcacctcggtgatcagtgcagtgatatattaaaatgcccctgtaggcagagcct

SEQ ID NO: 2423 - DNA, 411 bp, Homo sapiens
  MAP TO AC007749.2; EXPRESSED IN BT474, SIGNAL = 1.4; EXPRESSED IN ADULT LIVER, SIGNAL = 2.5; EXPRESSED IN FETAL LIVER, SIGNAL = 2.4; EXPRESSED IN HBL100, SIGNAL = 2.1; EXPRESSED IN HELA, SIGNAL = 2.1; EXPRESSED IN PLACENTA, SIGNAL =   3; EXPRESSED IN HEART, SIGNAL = 2.9; EXPRESSED IN BRAIN, SIGNAL =   2; EXPRESSED IN BONE MARROW, SIGNAL = 2.2; EXPRESSED IN LUNG, SIGNAL = 4.8
actgtgtgccaggaactgtgctaattctttatattatgcccataaaacctgcttctgaagcattggggggtttgcacttgccgttccctctgtctggaatgcctccctatgcctaccttcatgaacctcttccctttactttccccatctctgttcaggtgtcacatttttagttattctttcctgaccgctcagtataaagtagctcacacctctacgttatcacactccctcttacctgctctatttgtctttatagccctgctcacaattatagtgtacatggatttcttaatgtgtgctttatcttccccctcccatcggaatataaactccttgagagcaaggatgatattttcccctgctgttttctcagtaccaagaagagtgcctggcacgtagtagctgttc

SEQ ID NO: 2424 - DNA, 476 bp, Homo sapiens
  MAP TO AC005082.2; EXPRESSED IN BONE MARROW, SIGNAL = 0.99; EXPRESSED IN LUNG, SIGNAL =  11; EXPRESSED IN BT474, SIGNAL = 2.3; EXPRESSED IN FETAL LIVER, SIGNAL = 2.1; EXPRESSED IN HBL100, SIGNAL = 3.5; EXPRESSED IN HELA, SIGNAL = 1.5; EXPRESSED IN HEART, SIGNAL = 2.7; EXPRESSED IN BRAIN, SIGNAL = 1.6
tgggcagcaggtaacaagaggtcacaaaaggtgcaatatttgactgacacagagagcgtcctcttggctatatttaaatttccggacatatggatagattctggttcatagcagtagttgatgttttaaagtttagatgttttttgttgctcttttgagcaattcttcgcagtcttctcacattaggaaacatctacaaagttaggacttcgcacttgattggccaaagcaattgcctttgtgcaaacagtattttatttgccccacagacatctgtaatttcttaccatggcccctacttcctccaagttcctcttggggaggactgcgtggatggactctgtgttcatacctgggtcagatgggatggtcagagcaggacaggcaaagagtggggagacagatcccaccaaagtcacagactgaaaaaaagttgagaaatgctgataagtaacaagcaaagcaaggaaattttt

SEQ ID NO: 2425 - DNA, 471 bp, Homo sapiens
  MAP TO AC006369.3; EXPRESSED IN PLACENTA, SIGNAL = 3.2; EXPRESSED IN HBL100, SIGNAL = 2.8; EXPRESSED IN HEART, SIGNAL = 3.7; EXPRESSED IN BONE MARROW, SIGNAL = 2.8; EXPRESSED IN BRAIN, SIGNAL =   3; EXPRESSED IN LUNG, SIGNAL = 5.8; EXPRESSED IN ADULT LIVER, SIGNAL = 5.6; EXPRESSED IN BT474, SIGNAL = 2.7; EXPRESSED IN FETAL LIVER, SIGNAL = 2.4; EXPRESSED IN HELA, SIGNAL = 7.1
gattgagagcaacagcagggtaatttcctctagacacggtggtcagaaaaattttcatgatacttaagctaagacctgaaggatgaaatagagctgaactgaaggcaggaacatttcgagtgagaatgagtggttttgagccactggaagaagagggaagggtggtgagagaagttggagaggtggccaggagccaggtaatgcagtgaaggggtggcctgcccctccacacctgtgggtattcccatcaggggggacgagagactgagaaaagaaataagacacagagacaaagtatagagaaagaacagtgggcccaggagactggcgttcagcatacggaggacctgcactggccccggtctctgagttccctcagttattattattttcactatctcagcaacgggaatgcagcaggagaacagggtgatagttgggagaaggtcagcaagaaaacatgtgagcaaa

SEQ ID NO: 2426 - DNA, 459 bp, Homo sapiens
  MAP TO AC007898.1; EXPRESSED IN ADULT LIVER, SIGNAL = 1.4; EXPRESSED IN FETAL LIVER, SIGNAL = 1.4; EXPRESSED IN PLACENTA, SIGNAL =   1; EXPRESSED IN HEART, SIGNAL = 0.97; EXPRESSED IN LUNG, SIGNAL = 1.3; EXPRESSED IN BONE MARROW, SIGNAL = 1.1; EXPRESSED IN BRAIN, SIGNAL = 1.4
  unsure 224
  unsure 260
  unsure 262
  unsure 358
cagggagatctgacacagacagaagatgggaaggctgtgtgaggacagaggccgcgacagcagcaatgcggccaccagccaaggaggcagtgaaggactgtaccccaaagcctccagtgggagcacagtcctgccagcaccttgagaccttctggcctccagactgggagagatgaactgtagtttgaagccctccagcttgtgcggatctgttacagccgccnacaggagactcaccagaccccacggcacagtttcancntaaatgacagagcctggctctctgcaagctgttaccaggacagctgtgtctcaggggagagaaagctctgggtctcccactgcaggggcagggatngccctattgctgacagtcccctcaaaagcccagcacctctgaggtcacagaccaaaaacaagctgaagacccattatgagagaaaacagtgcctgactcca

SEQ ID NO: 2427 - DNA, 448 bp, Homo sapiens
  MAP TO AC009474.1; EXPRESSED IN PLACENTA, SIGNAL = 2.2; EXPRESSED IN HBL100, SIGNAL = 1.7; EXPRESSED IN HELA, SIGNAL = 1.9; EXPRESSED IN HEART, SIGNAL = 2.1; EXPRESSED IN BT474, SIGNAL = 2.1; EXPRESSED IN BRAIN, SIGNAL = 2.1; EXPRESSED IN LUNG, SIGNAL = 1.6; EXPRESSED IN BONE MARROW, SIGNAL = 2.3; EXPRESSED IN ADULT LIVER, SIGNAL =   2; EXPRESSED IN FETAL LIVER, SIGNAL = 2.5
aagagagaagtatcagcacccagaagagaaaaaaagaattcaaaacaaaaactacagaggcagaaataacggagggcttcgccttgcaaaaagggttggacatcttctgatttttcaatgtttttcttcagttctatttaaaaacaaaacaagctccctcctcttcctcctcctccgccctctgcctttttttctttttcttttttttttttttttttttggtaagaacttttgttttctactattttccatctatgttgctgcaaaggacattgatgcagttggaggccattatcttaagcaaattaatgcagaaacagaaaatcaaataccacatgttctcacttataagtggaagctaagcattgcgtatatatggacaaaaagaggggaaccacagacacagggcctacttcagggtggagagagggaggaagttgaggattga

SEQ ID NO: 2428 - DNA, 480 bp, Homo sapiens
  MAP TO AC010850.2; EXPRESSED IN PLACENTA, SIGNAL = 4.2; EXPRESSED IN HBL100, SIGNAL = 2.5; EXPRESSED IN HEART, SIGNAL = 2.7; EXPRESSED IN BONE MARROW, SIGNAL = 2.1; EXPRESSED IN HELA, SIGNAL = 2.9; EXPRESSED IN BRAIN, SIGNAL = 3.3; EXPRESSED IN LUNG, SIGNAL = 3.6; EXPRESSED IN BT474, SIGNAL = 4.5; EXPRESSED IN ADULT LIVER, SIGNAL = 2.9; EXPRESSED IN FETAL LIVER, SIGNAL = 2.9
ccgaggactcagctctgcagggtgtgccctctctggtggcaggtggaagtccacagactcttcagccggtatccagcagtcacgtggctaaagctcccagtctgaccttcgcttcccccgccagtcctgtctgcgcatcagacagcactctccatgggttagagagcaactctcccctttcaccactgtccgctaattatagctcacctttatgggctgcagagcacctctgccgcagcccagatatcttttcagagcagcggcagagcaaacataggcgctttcagaataccctagtagtcctacataaatctggtttgctggagatcactttgaaaaccaaggagttgattcgtcagaatcaggcaactcaggtagaactagaccagctaaaggagcaaacccagctgtttatagaagccaccaagagcagggcccctcaggcttgggccaagctgcaggcatctttaacacctgggt

SEQ ID NO: 2429 - DNA, 459 bp, Homo sapiens
  MAP TO AC010877.1; EXPRESSED IN ADULT LIVER, SIGNAL = 3.1; EXPRESSED IN BT474, SIGNAL = 1.6; EXPRESSED IN FETAL LIVER, SIGNAL = 6.7; EXPRESSED IN PLACENTA, SIGNAL = 2.3; EXPRESSED IN HELA, SIGNAL = 2.6; EXPRESSED IN HBL100, SIGNAL =   2; EXPRESSED IN HEART, SIGNAL = 2.6; EXPRESSED IN LUNG, SIGNAL = 1.7; EXPRESSED IN BONE MARROW, SIGNAL = 2.1; EXPRESSED IN BRAIN, SIGNAL = 2.5
attattaccctgccttgggcatttctttatagcaacattaaatggactgagacagaaaatcattatttaaaaatgggataccactttttgccaaatatagctgaaaatgcagaagcagatttgcaactgggtaataggcagaggttgaaagagttgaaggaccaggctaggaaaagtttgtattgtaatgaatgggtgattctgatgagggctcacaagtccagaagacaagggaaagtttggagcttcttggggattggtaaactgtttctcgccaaaatgctgatagagaaagtaaaagacttgctgatgagatctcagatggaaatgatgaacttactgggaactggagcaaaagtcacccttgttactctgcagcagagaacctggctgtgtttccattgccctaggcttggtgggaagctgaacttaacggtgatgacctagggtagggggcag

SEQ ID NO: 2430 - DNA, 478 bp, Homo sapiens
  MAP TO AC010754.1; EXPRESSED IN BONE MARROW, SIGNAL =   3; EXPRESSED IN BRAIN, SIGNAL =   3; EXPRESSED IN BT474, SIGNAL = 2.1; EXPRESSED IN HBL100, SIGNAL = 2.1; EXPRESSED IN HEART, SIGNAL = 3.4; EXPRESSED IN LUNG, SIGNAL =   3; EXPRESSED IN ADULT LIVER, SIGNAL = 3.3; EXPRESSED IN FETAL LIVER, SIGNAL = 2.9; EXPRESSED IN PLACENTA, SIGNAL =   3; EXPRESSED IN HELA, SIGNAL = 5.9
  unsure 175
  unsure 221
  unsure 270
agcttagaaccaccaccacgaccacagaacacagtccttggtgttgcattgaaagacataagacacagcaccctgtcaaccaaccaaacattttacctgaagtttcctttaaagtctttgattgtcgtttacttactttcaacactatattatctaccaaagcattgcaatacangctactcacgtagctaaaggggccttcatgtccttactttcgcttngcatacatcagtgaagaaagcccctgtaggcggtctccaggaaaacccnagcaggttgatgattttgagcaggtttgggggcaccatggatatgcaaaggtgaaaaaggccatatccaaagctaacagcacctttcagtctgttcagagactcctcagacaccccttcagccacaatgtgattatcatttgcagcatcagaagtcaaggactcttcagttagcttcttctgatacagctcctgaagggcattgatgt

SEQ ID NO: 2431 - DNA, 479 bp, Homo sapiens
  MAP TO AC010966.1; EXPRESSED IN LUNG, SIGNAL = 9.7; EXPRESSED IN BT474, SIGNAL = 4.2; EXPRESSED IN PLACENTA, SIGNAL =  13; EXPRESSED IN BRAIN, SIGNAL =  12; EXPRESSED IN BONE MARROW, SIGNAL =  13; EXPRESSED IN ADULT LIVER, SIGNAL =  10; EXPRESSED IN FETAL LIVER, SIGNAL =  15; EXPRESSED IN HEART, SIGNAL = 9.8; EXPRESSED IN HELA, SIGNAL = 8.5; EXPRESSED IN HBL100, SIGNAL = 5.9
  unsure 71
  unsure 103
  unsure 127
  unsure 357
acacacacacacacacacacagagatgtatctgatgcctgcagaaagccattcagagcatgggtagtcacnaaaactatagactcttctggtgcatcttcccnatcagatgcttgtatagtatcccntgcatagtaccctctgagacagtggtcccagtgtttgagaagtcacttctccctctgcccttctaccttgcttgctctcatctcctggccttcatgtgtgctgtttactatgcctggaacacattttccatccactattttgcctcagcatttgggtctcagcttcgaagttacttctgggaagctgtgcatggtccctttggtggcttccacagcaccctgcacccacntggccacggcccttctaacacggtgctggatgacatgctcctacactgtcctccttactctcttgagttctgtgaaggcagagatcatgttcatctcattcaccatcgtaccgacagtgaga

SEQ ID NO: 2432 - DNA, 494 bp, Homo sapiens
  MAP TO AL109658.1; EXPRESSED IN FETAL LIVER, SIGNAL =   1; EXPRESSED IN BT474, SIGNAL = 1.9; EXPRESSED IN HBL100, SIGNAL = 1.3; EXPRESSED IN PLACENTA, SIGNAL = 1.1; EXPRESSED IN HELA, SIGNAL = 1.4; EXPRESSED IN HEART, SIGNAL = 1.4; EXPRESSED IN LUNG, SIGNAL = 4.7
tgtttgaagcagattcagcatagttgagatacggattcatagatctgctccaaaaaccttgtatgtccatttttcccctttgggcctgaggcagacctaagtggccaaataagaaataggtgtcggccatggctgaacaaacaagagaaaaggtggaggcagacaggtagccaccagagtagcctgctccctttggaggcccagcgatttttcaccacgggactgagaggtttcttctccccttttcccatcactgtcatttccatcttctctctgtggacctcagcatggccttttcttccacagggaggtgccagcagagcttcggaggctagctcacggtggacaggtgaacttggatatggaggaccatcgggacgaggactttgtgaagcccaaaggagccttcaaagccttcactggcgagggtcagaaactgggcaggtaaggggcagcacaggttagagccagactctgtcaatcacacctgccaa

SEQ ID NO: 2433 - DNA, 451 bp, Homo sapiens
  MAP TO AC011282.1; EXPRESSED IN FETAL LIVER, SIGNAL = 1.6; EXPRESSED IN ADULT LIVER, SIGNAL = 1.7; EXPRESSED IN PLACENTA, SIGNAL = 1.9; EXPRESSED IN HEART, SIGNAL = 1.9; EXPRESSED IN BRAIN, SIGNAL = 1.4; EXPRESSED IN BT474, SIGNAL = 1.1; EXPRESSED IN HELA, SIGNAL = 1.4; EXPRESSED IN HBL100, SIGNAL = 1.1; EXPRESSED IN LUNG, SIGNAL = 1.4; EXPRESSED IN BONE MARROW, SIGNAL = 1.5
ctggaactaaagggctgctgttcagattactttgtcagactcttgctatgctttagaattttgaccctgccctagagatctgtggaacttttaacttgagggagataatctagggtatctgatggaagaaatttctaagaagcaaagcatttaaggtgtgacctgggtgctgtgctcatcaaagcactctgttttatgcgttcacaaagagatggtttggaattggaacatatgtttaaagaggaagcagagcataaagggttagaaaatatgcagcctgatgatgtgatagaaaagaaaaacccattatcagaggagaaattcaagctggctgcagaaatttgcataagtaacgaggaaccatatgttatccaagataatggggaaaatgcctctagggcatgtcagaggtcttcatgtgacccctcccagcaaagacccagatgcctag

SEQ ID NO: 2434 - DNA, 489 bp, Homo sapiens
  MAP TO AL109752.4; EXPRESSED IN ADULT LIVER, SIGNAL = 1.1; EXPRESSED IN BT474, SIGNAL = 1.1; EXPRESSED IN FETAL LIVER, SIGNAL = 0.97; EXPRESSED IN HBL100, SIGNAL =   1; EXPRESSED IN HEART, SIGNAL = 0.93; EXPRESSED IN BRAIN, SIGNAL = 1.1; EXPRESSED IN LUNG, SIGNAL = 2.7
tgctgaagacttgcgaacagttcggagccagcgagagcgcgccagagagagcgagagtgagggagtgagtgcgaggggatctagaggagtcagggcgagaaagcgagggccggaggacccacgatagagacagagtgaccatggctgtctccgcatctccagtgatctctgcaacttccagcggcgccggcgtcccggggggcttattccgggccgaacccctgtactcgactcccagagagccccctcgtcttactcctaatatgatcaatagtttcgtggttaataaccacagcaacagtgccggaggcggcggcaggggcaacaccaacaccaacgagtgccgcatggtcgacatgcacgggatgaaggtggcttcgttcctgatggacggccaggaactgatctgcctgccgcaagtctttgatctttttctcaagcacctggtgggaggcttgcacactgtgtacaccaagctgaagagactgg

SEQ ID NO: 2435 - DNA, 488 bp, Homo sapiens
  MAP TO AC011301.1; EXPRESSED IN PLACENTA, SIGNAL = 1.1; EXPRESSED IN HBL100, SIGNAL =   1; EXPRESSED IN HEART, SIGNAL = 1.4; EXPRESSED IN BRAIN, SIGNAL = 1.2; EXPRESSED IN BONE MARROW, SIGNAL = 1.4; EXPRESSED IN BT474, SIGNAL =   1; EXPRESSED IN ADULT LIVER, SIGNAL = 1.6; EXPRESSED IN FETAL LIVER, SIGNAL = 1.2
gaaagatgctcggggaaagctgtgatccatgagaattgtttgtgtaggtgtgaaaggaaggaaaagagactgtctctatgactggcatctagaggcttgatatgcagttattgagtgaatgaatgaatgaatgagtccatttgctgggaatgctgcaggtcaaggaggtgcctgaagtggaatattggaaagacgacatcagacggtgcagacgacgggcctgagccagggccacgtgcagtgttggaagggatgtaccgggaggccccgctggtccagctgaatagacagctgctggcctttcttgagcatggggaggacgagtcgcaaacatgttttagaaaaaaacaagttaacggcagcttgagagagggcatggagggggcaggcagtgcagttgggagcaagctgggaggagactggcagtcgcctaagaagaaagggcttgggcagtggcctcaacagcatctgtggcttagtcccatcgt

SEQ ID NO: 2436 - DNA, 486 bp, Homo sapiens
  MAP TO AL049652.13; EXPRESSED IN PLACENTA, SIGNAL =   1; EXPRESSED IN HBL100, SIGNAL = 1.7; EXPRESSED IN HELA, SIGNAL = 3.1; EXPRESSED IN BONE MARROW, SIGNAL =   2; EXPRESSED IN BT474, SIGNAL = 1.7; EXPRESSED IN HEART, SIGNAL = 0.89; EXPRESSED IN BRAIN, SIGNAL = 1.7; EXPRESSED IN LUNG, SIGNAL = 3.3; EXPRESSED IN ADULT LIVER, SIGNAL = 1.1; EXPRESSED IN FETAL LIVER, SIGNAL =   1
gttgtgttcccctaaccctgggccacagggagcttttccttggtccatgtgttcagtatgggaactgagcaagggtcctgtggcagccgtcccctccccacacgtggcctggagccgccccttctatggcaggagcaggtttggtgcccctctgggccagggctgtgtggtatggctgccaggccctgttagatgctcctgtgtgttagggtgccgcctgggggctgtgtgctatctcatgagggcgctgggtgacctaacctgtctagctctctatcccatggacagccctgagccgggaggagctggaagcactcttcctcccctatgacctgaagcggctggagatgtattcacggaatatggtggactatcacctcatcatggacatgatcccggccatctctcgcatctatttcctgaaccagctgggggacctggccctgtctgcggctcagtcggtatgctatctgttgcttgcgtgga

SEQ ID NO: 2437 - DNA, 481 bp, Homo sapiens
  MAP TO AL117349.1; EXPRESSED IN BONE MARROW, SIGNAL = 1.6; EXPRESSED IN LUNG, SIGNAL = 1.3; EXPRESSED IN BRAIN, SIGNAL = 1.4; EXPRESSED IN FETAL LIVER, SIGNAL = 3.3; EXPRESSED IN ADULT LIVER, SIGNAL = 1.8; EXPRESSED IN HELA, SIGNAL = 1.2; EXPRESSED IN PLACENTA, SIGNAL = 2.7; EXPRESSED IN HBL100, SIGNAL = 0.95; EXPRESSED IN HEART, SIGNAL = 1.6
caacctcaccagacacatgccacctgccccttcacctacttcaaacatctgatgtaagaataataaattgctgcagaggccactgaaatccaaagcggcatgggggctggggcactgctcagacacactaggtccaaggttcaatcctctttgttgccagctattcacgacctcgtgtgcaaacgaacaaagcctttcagatggcattcatccaactcacttgcaggctgatggtacaaaatctttatctgtgatgggaggtggcggggtgggtaggggttgcaacatgcaagagcttccagaaggagagaaaggacctgaaaggctgctgatttgcaagcctgacttggtttacgtggagggaaatgacaggaacacttacaagacactttgccagagccccaggcattctgtcccatggggcatctccagttccgtggccctgaccagctgcttccactcttgtgaataccaggctccc

SEQ ID NO: 2438 - DNA, 471 bp, Homo sapiens
  MAP TO AL117186.1; EXPRESSED IN LUNG, SIGNAL = 2.6; EXPRESSED IN BRAIN, SIGNAL = 2.3; EXPRESSED IN BT474, SIGNAL = 1.6; EXPRESSED IN ADULT LIVER, SIGNAL = 2.8; EXPRESSED IN HEART, SIGNAL = 2.5; EXPRESSED IN PLACENTA, SIGNAL = 2.3; EXPRESSED IN BONE MARROW, SIGNAL = 4.3; EXPRESSED IN FETAL LIVER, SIGNAL = 2.8; EXPRESSED IN HELA, SIGNAL = 1.6; EXPRESSED IN HBL100, SIGNAL = 2.1
tggggagtagtgagaggcaccaatgtggataaccaagaagttagctgaatgggcttgcatcatagacagagcactccggtcatggagccccgagggggcaagcatggtggaagggtgactatttgtatagccatcctggtaagagatggtggtggcttccgtcacctctcaggggaccagaaaggggacagtgaggaatgttcttggcccttaaatgtgaccatgttgagtagagattcattgttcatcccccaggcctctcccgtcgccattttgggcatcttgtcctggtccctgcccctctgcctcaggtggaattcccaggacacatggccaggggggctctttcacctctgacgctttggccgtgtgtgatcctacaggcaaatcttctacaggaagaagaagggagccatgaagatttctcccagctcctgaggaactttgggcagtggttgcaggtggaaaact

SEQ ID NO: 2439 - DNA, 470 bp, Homo sapiens
  MAP TO AL079351.1; EXPRESSED IN FETAL LIVER, SIGNAL = 0.97; EXPRESSED IN ADULT LIVER, SIGNAL = 1.1; EXPRESSED IN HEART, SIGNAL =   1; EXPRESSED IN PLACENTA, SIGNAL =   1; EXPRESSED IN BRAIN, SIGNAL = 1.1; EXPRESSED IN BONE MARROW, SIGNAL = 1.2; EXPRESSED IN LUNG, SIGNAL = 3.6
acgccttttaggatgggaactgtgcattattttatgtggactaaactttctctccgctcattccacttcatttgcgaaattcccatggataggaactcctctcggtatttcagtgtttctgaattgcttctgtgccttctcattttacattggtataaaacactgcagagggaggattctttcctaggaaggatgctaccaatctgtaggacaggccagggactggggttatgtttcagaatggggtgaatctgggagcaggcactgccacaactcctgcctctgtgagcatgtcaaaagcagtgccgaagcctgaggctggcctctcagggaggcggacgattaggaaggggttagggaatgaaacaacaacatcagtgggcaggaaggacatcagcctcttctggagcaactctgcctgaaagtgcagcaggtggtccagactggggtgtggaggaaggaggagaggt

SEQ ID NO: 2440 - DNA, 472 bp, Homo sapiens
  MAP TO AL035691.17; EXPRESSED IN FETAL LIVER, SIGNAL = 2.6; EXPRESSED IN ADULT LIVER, SIGNAL = 1.6; EXPRESSED IN PLACENTA, SIGNAL = 1.8; EXPRESSED IN HELA, SIGNAL = 1.1; EXPRESSED IN BT474, SIGNAL =   1; EXPRESSED IN HEART, SIGNAL = 1.3; EXPRESSED IN HBL100, SIGNAL = 1.1; EXPRESSED IN BRAIN, SIGNAL = 2.4; EXPRESSED IN LUNG, SIGNAL = 2.5; EXPRESSED IN BONE MARROW, SIGNAL = 2.1
acagggctggctaaagtttgcagcaggagaaaataattagaaaataaaccgagcatgctgtgaggcagcccgggccaacataataaagatggggagaaggcaggggtggcaccgggtgccagggcagggtggggaaggagggaagaggagaggagcacactccatccccggggggagatcggggtctgcctgaagaggctcacacgctctgacgatttgggaaaatacctttaccccaactaattttcctcccttcctctcccctctttccctgggaatctttgttaaaagggcccctgaggaaaaccagtgccagagccctttgctcaggacggatgatcttgctcacagggacatccctagagaaagttcgcattgagtcacaggtgaaaatgtacgagcacttcgtggatgactcgctcgatccgacgtgagagctcatctccgcttcaggtgtgtgtactcctgtccg

SEQ ID NO: 2441 - DNA, 478 bp, Homo sapiens
  MAP TO AF186193.1; EXPRESSED IN ADULT LIVER, SIGNAL = 5.1; EXPRESSED IN BT474, SIGNAL =  23; EXPRESSED IN FETAL LIVER, SIGNAL = 5.5; EXPRESSED IN HBL100, SIGNAL =  20; EXPRESSED IN HEART, SIGNAL =  11; EXPRESSED IN PLACENTA, SIGNAL = 7.4; EXPRESSED IN HELA, SIGNAL =  22; EXPRESSED IN BRAIN, SIGNAL = 5.2; EXPRESSED IN BONE MARROW, SIGNAL = 8.1; EXPRESSED IN LUNG, SIGNAL = 7.1
ggaaggaaggtcggggtggggaggggtctgggtgttgcctgaggagttaacgtcctaagccgatatgggaacctcgcaggcagaagcttcaggtggggacatccgcgtggccagaccagtggccaccggtgggtgccgagagagttgtaccgggaggctggatgttgaatgctgtgctcgcaacttcgcgggttgcctagagcgagggggttcgcattgtttcttactgtgctgacggcctgatgctgcttccccttgcagcccagctcaacattggcaatgtgctccctgtgggcaccatgcctgagggtacaatcgtgtgctgcctggaggagaagcctggagaccgtggcaagctggcccgggcatcagggaactatgccaccgttatctcccacaaccctgagaccaagaagacccgtgtgaagctgccctccggctccaagaaggttatctcctcagccaacagagctgtggt

SEQ ID NO: 2442 - DNA, 470 bp, Homo sapiens
  MAP TO AL050342.29; EXPRESSED IN BONE MARROW, SIGNAL = 5.4; EXPRESSED IN LUNG, SIGNAL = 1.3; EXPRESSED IN ADULT LIVER, SIGNAL = 2.4; EXPRESSED IN BT474, SIGNAL = 2.3; EXPRESSED IN FETAL LIVER, SIGNAL = 2.3; EXPRESSED IN PLACENTA, SIGNAL = 2.4; EXPRESSED IN HBL100, SIGNAL = 2.4; EXPRESSED IN HEART, SIGNAL = 2.4; EXPRESSED IN HELA, SIGNAL = 2.5; EXPRESSED IN BRAIN, SIGNAL = 4.5
tttcctcctcttctccgtcctcctccccctccccctccttcttctccttcttcttctccttcttcttctcctcctcctccttcttctcttcttcttcttcttcttcttcttcttcttcctcttcctcttcctcttcttcttcttcttcttctcctcctcctcctcctccttctcctcctccccctccttctccttcttcttctcttttttttttttgtgtgtgtgagacagtcttgctctgttgcccagggtggcctcaaatgcctgagttcaagcaatgcactcaccttggcctcccaaagtgctacaggcatgagacactgtgcccacctcaacagatttgctccttataaggacatcagtcattgaattaggactcaccctaatccagtgtgacctcatcttacctttagcacaattgcaaggaccctatttccaaataaggttacatttatacggactgtgggtca

SEQ ID NO: 2443 - DNA, 470 bp, Homo sapiens
  MAP TO AP000403.1; EXPRESSED IN HEART, SIGNAL = 2.2; EXPRESSED IN PLACENTA, SIGNAL = 2.7; EXPRESSED IN HBL100, SIGNAL = 1.2; EXPRESSED IN BRAIN, SIGNAL = 1.4; EXPRESSED IN BONE MARROW, SIGNAL = 1.2; EXPRESSED IN LUNG, SIGNAL = 2.2; EXPRESSED IN ADULT LIVER, SIGNAL = 1.8; EXPRESSED IN FETAL LIVER, SIGNAL = 1.1; EXPRESSED IN HELA, SIGNAL = 1.3
tacccactttcaccaaccaccattattcaacatagttctggaagtcctagctagagaaattagacaagagaaataaataaaggccatccgaattggaaagaaagaagtcaaattatccttgtttgtagataataggatcttacatttggaaaaaccaattccactgaaaaactattagaactgataaacaaattcagtaaagttgcatacctgtatctacgtatctcacaaatatactggaagcagaaccagagacaggaataaagatatacctgaattttggtggaaatgtttttcaggaaaaaactgaagcgggatagagaagagaaaaataagaacaaagatattttgatccacagggaaaagaccctggagaatgcattactcccagaagatggttccttttttaggccagagggtgagatgttggaaaccatatactgttaatcagggctaaaggtcactccctg

SEQ ID NO: 2444 - DNA, 457 bp, Homo sapiens
  MAP TO AL035705.14; EXPRESSED IN HEART, SIGNAL = 2.1; EXPRESSED IN BRAIN, SIGNAL = 0.91; EXPRESSED IN LUNG, SIGNAL = 8.7; EXPRESSED IN FETAL LIVER, SIGNAL = 1.5; EXPRESSED IN HELA, SIGNAL = 1.8
gcatattactagaaaaagttgggcttaatactcaactcaggagctcagagcagcttataatatagaaaaatggcttctacaaatgatcttattacattataatttcctaccttccattcaaaatccagctgcttcatagctcggtaaacttcagccataatgtcatacggtttgctctgacttcggattccaagatgccacttggcttttttcacagctaaagatttgggcttagtcgtattcagtgcatccaatggacatcttgctttggggctgtctgctataagaggtggcatcctttctggatgaggtttcaggcctgggggaatatgcatggcactatcatccataaaagaaccagatggaggactagaggcgaggtagaactcactggcttggttcattattctccgattgtcaatgataagatgataagccactgcaagctggtcttgag

SEQ ID NO: 2445 - DNA, 456 bp, Homo sapiens
  MAP TO AL110504.1; EXPRESSED IN LUNG, SIGNAL = 1.4; EXPRESSED IN BRAIN, SIGNAL = 2.3; EXPRESSED IN BONE MARROW, SIGNAL =   2; EXPRESSED IN ADULT LIVER, SIGNAL = 2.3; EXPRESSED IN BT474, SIGNAL = 3.7; EXPRESSED IN FETAL LIVER, SIGNAL = 1.7; EXPRESSED IN HELA, SIGNAL = 4.4; EXPRESSED IN PLACENTA, SIGNAL = 1.7; EXPRESSED IN HEART, SIGNAL = 1.6; EXPRESSED IN HBL100, SIGNAL = 2.9
acaccgacaggcttcagaaccctggcagggatgaaacaggcagcagggctggagccgggcagagagccccctcctggttctcagaggcagcctgtccttggagcacctttgttttcaggctccccaccgacaagcagtcggactgcgagtttcggcgaacaccccctgcttccggtgttccctgtgctcgcttagaaatgggaacagtgctcaggtgttgccgccacctggaaagcctgctctacccagggcctgctttagcccactcaccacggctcgcttaacctgtcggggagaactgggctgcggagagggtttcttgggctgttgggctggctgctgctgctgggctggttgctgggggtccttctgctggggctgggatggttcggagctttgagacggctgtgactgctgtacttgcggcacttgtggtgtaggctgaagagatggggg

SEQ ID NO: 2446 - DNA, 454 bp, Homo sapiens
  MAP TO AL008718.23; EXPRESSED IN BRAIN, SIGNAL = 1.1; EXPRESSED IN BONE MARROW, SIGNAL = 1.1; EXPRESSED IN ADULT LIVER, SIGNAL =   2; EXPRESSED IN BT474, SIGNAL = 1.1; EXPRESSED IN FETAL LIVER, SIGNAL = 1.5; EXPRESSED IN HELA, SIGNAL =   1; EXPRESSED IN PLACENTA, SIGNAL =   1; EXPRESSED IN HEART, SIGNAL = 1.3; EXPRESSED IN LUNG, SIGNAL = 4.3
ttgagctaaggaatctgggagtggccaactaggagtctcacttcttttctatgaagagatctgaacccctggcctgttggtcccttggaatgcaggccgtacaggggatccaggccctttgttgtggcttaaatggaggttgctaggtggagagggctccacaaaaattgctatataaattgcatgctttgtacaaatgatagtgtttctcctgtccaggccactgccactggatcacttttgtatctaagtcctcaataaactccatgtctcattcactggctctgggtctcttcttcggcctcttggacatggtgccattcttattggagtcaataggggcctggcgcaccatgttgtcagctccacgagggcagtgctggttttcccgctatgtcctcggctccttacacagcgggtgttcagcagatattgttcagtgctcctgccagtc

SEQ ID NO: 2447 - DNA, 463 bp, Homo sapiens
  MAP TO AL035705.14; EXPRESSED IN PLACENTA, SIGNAL = 3.2; EXPRESSED IN HBL100, SIGNAL = 1.9; EXPRESSED IN HEART, SIGNAL = 3.1; EXPRESSED IN LUNG, SIGNAL = 7.8; EXPRESSED IN BRAIN, SIGNAL = 2.5; EXPRESSED IN BONE MARROW, SIGNAL = 2.1; EXPRESSED IN ADULT LIVER, SIGNAL = 3.3; EXPRESSED IN BT474, SIGNAL = 1.3; EXPRESSED IN FETAL LIVER, SIGNAL = 2.7; EXPRESSED IN HELA, SIGNAL = 2.4
agcctgtgtcctgcctgtagagtttcagactcagaacattcaggtagtttcagcttaagccacttcaataatttcttattatccctttttaattggacttcagggacacaacagggccactgattggcctgtttttcacaaggagcagtgaatttactgagtttttctcttcttttttgttttcaaatattcctccttaaaaaaaaatctcacctataacttctatttattgagcactttccatagataaagagttgtaccttatgtcctctctctcattttacaactcccagctacaaccacccatgaagtacagtaagtgctttgtgcgctctctgaccatggagagtcaggtgaagtcatccagggtgatgcaactggatcagcagcaccagggcttgacctggtcagcctggatccagagcacagcctctcaactatcaccccaggctgccttaatgag

SEQ ID NO: 2448 - DNA, 453 bp, Homo sapiens
  MAP TO AL033532.12; EXPRESSED IN FETAL LIVER, SIGNAL =   1; EXPRESSED IN HEART, SIGNAL = 1.1; EXPRESSED IN LUNG, SIGNAL = 4.8; EXPRESSED IN BONE MARROW, SIGNAL = 0.99; EXPRESSED IN ADULT LIVER, SIGNAL = 1.3
gaaggtgaacgtgaagagccattttttgaccatgtagttggaagtcccatgcaatagaaagcagaaaatccctaaggtgaagctgggtcacaaaagatcagaactgcccaaggctgttccaagtctgtttgacgctgaagcagcccaagctacctaatgaactgtgaagccactacacccagccccagctagtcaacccctttttggttaagtcctgtagcagagttgccttcgcatgttgtaaaaagcaatcctaacttgacacacaggttgaaagtgagaagagaggagctgaggaaggcaaactgtgctgtgatgaatatgatgatgcagtcagctcagctgctggtaaggattggtgccaccacgtcttcatctgcccatctatctccttctcccatccaccctgtcccattctcctcaacccccagggcaaacactgctgcaacccta

SEQ ID NO: 2449 - DNA, 457 bp, Homo sapiens
  MAP TO AL031658.10; EXPRESSED IN PLACENTA, SIGNAL = 1.2; EXPRESSED IN HBL100, SIGNAL = 1.2; EXPRESSED IN HEART, SIGNAL = 1.4; EXPRESSED IN LUNG, SIGNAL = 3.5; EXPRESSED IN BRAIN, SIGNAL = 1.8; EXPRESSED IN BONE MARROW, SIGNAL = 2.2; EXPRESSED IN FETAL LIVER, SIGNAL = 1.5; EXPRESSED IN ADULT LIVER, SIGNAL = 1.4; EXPRESSED IN BT474, SIGNAL = 1.2; EXPRESSED IN HELA, SIGNAL = 1.3
agacaggccctggtcaaatcctggggcagtgcagcaccttcgttggatagctctgagcaattgacttaatctttctaagccccagtttcctcatctgtgaagtggggataattcttgactagcaagctctttctgggtcaaagttactcttactgttgctattttgtgggccagagcatggaggctgcagggtggctggtggatgtgtggggctgggaggggagcggggctgtgagcaggagctaatggccgcctgtccttcccgccacccagctgacccggaagaactacatggtgaagaacctgaagcggttccggaagcagctggagcgtgaggcaggaaagctggaggcagccaagtgtgacttcttccccaaaacctttgagatgccttgcgagtaccacctgtttgtagaggagtttcgcaaaaacccaggaatcacctggatcatgaagc

SEQ ID NO: 2450 - DNA, 455 bp, Homo sapiens
  MAP TO AF172274.1; EXPRESSED IN BT474, SIGNAL = 4.8; EXPRESSED IN HBL100, SIGNAL = 3.1; EXPRESSED IN HELA, SIGNAL =  15; EXPRESSED IN PLACENTA, SIGNAL = 1.5; EXPRESSED IN HEART, SIGNAL = 1.8; EXPRESSED IN LUNG, SIGNAL = 1.1; EXPRESSED IN BRAIN, SIGNAL =   2; EXPRESSED IN BONE MARROW, SIGNAL =   2; EXPRESSED IN ADULT LIVER, SIGNAL = 1.5; EXPRESSED IN FETAL LIVER, SIGNAL = 1.1
gctgaatgtaccctgaaggcttctgcatgctacagatgtacattttcaccctctctcacccagcgtgagttctcacaaatctcctatgggatgagaacacctcgtcttcccacagtttttacaggaattggacttttcccaagttacttggattcttttgcacccagtaagatgcgggctcacagaggctttctcctacacccgtgagatctgtttctggtctgagtaatcctgtttctttaaagcaggcgtgctcactggagccttttccacatggacgactcaaagagcttctctccccggttagttttcacgtggctcctgaaggaataatgttcgctgaaggctttcccgtagacaaggcattcatagggcttctccccggtgtggatccttctgtgcacgttcaggttggagctgacgctgaaggctttcccacagtgatcgcattccta

SEQ ID NO: 2451 - DNA, 455 bp, Homo sapiens
  MAP TO AL118508.6; EXPRESSED IN BONE MARROW, SIGNAL = 4.8; EXPRESSED IN FETAL LIVER, SIGNAL = 3.8; EXPRESSED IN ADULT LIVER, SIGNAL = 5.2; EXPRESSED IN BT474, SIGNAL =   2; EXPRESSED IN HBL100, SIGNAL = 3.1; EXPRESSED IN HELA, SIGNAL = 3.4; EXPRESSED IN HEART, SIGNAL =   4; EXPRESSED IN PLACENTA, SIGNAL = 4.1; EXPRESSED IN BRAIN, SIGNAL = 3.7; EXPRESSED IN LUNG, SIGNAL = 2.7
actgctgcaggtaaggatgggaattaagagacccaaggaggagtgactgttgtatcaggacaagcttgctgaattgaaatgaaaaacagaaatctgtccattgtgccagtcccattccctctggactcagctctaacaaggtttggaaggccaaactcccagatgctgaaagacaatgaagtttaaaaacaagtccattggtggcatccagatcagagtttccaatcagatacctggtcctctacgattttcacacccagcagggaggagagcaggcagccctttctttccacactccctgcccacttcacaacaatagttgggaatgtgtttctgtgaaagaagttcacagccagccacagtggctcatgtttgtaaccttgcactttagaaggcgaggcagaagggttgcttgagcccaggagttccaggttacagtgagctatgattgcgcc

SEQ ID NO: 2452 - DNA, 463 bp, Homo sapiens
  MAP TO AL079307.2; EXPRESSED IN BONE MARROW, SIGNAL = 1.9; EXPRESSED IN FETAL LIVER, SIGNAL = 2.7; EXPRESSED IN ADULT LIVER, SIGNAL = 1.4; EXPRESSED IN HELA, SIGNAL = 0.91; EXPRESSED IN HEART, SIGNAL = 0.87; EXPRESSED IN PLACENTA, SIGNAL = 0.97; EXPRESSED IN BRAIN, SIGNAL = 1.3
aagctgtctagagggctgtttcaaattaccccatgagacatctcaaaaaagaaatagtcctctctcagtacccaaggggaattggttccaggacctccatggataccaaaatccacagatgctcaagtcctggatataaaatggtgtaatatttgcatataatctatacacattgtcctgtatactttaaataatctccagattacttaaaatgcctaatacaatgtaagtgctatataaatagttgtcacactgtattttgtttgtattattttttattgttgtgttattattttttcccagatattttagatctgcagttgattgactccacaaatgtgaaactggtggaaacagggccagctgttttcgacagatatcctctctttgaggaaaaatggcttgatcttttgtccaaggaagttagaaaactgtaggcagagaaagtctgcgtcatcatttt

SEQ ID NO: 2453 - DNA, 452 bp, Homo sapiens
  MAP TO AL034372.14; EXPRESSED IN HBL100, SIGNAL = 1.4; EXPRESSED IN HEART, SIGNAL = 0.94; EXPRESSED IN PLACENTA, SIGNAL = 1.1; EXPRESSED IN BONE MARROW, SIGNAL = 1.2; EXPRESSED IN LUNG, SIGNAL = 0.99; EXPRESSED IN ADULT LIVER, SIGNAL = 1.3
gatctccaggacttgctcctcctctctaactgaaactttgtaccctttgaccaacatctctccatgccccaccctagcccctggcaaccaccattctactctctgcttcccagttcaaccttttgagattccataagctgagtctttattgtagactcagatattcttgtgcgagcactgatgagatgactaccccaaagccgacatggtgtaatcaaagtgtgcatgctgatacatttccttagttcaggaatttccccggtgtgatcaagttctcatgtcggcagctgagaaagccactgacagctggggagctattttctcctttagtcacatgatgatagagataatcctggatgggaagtgtgggggagagaaggaggagaatgttcgttgttctgtccagaattggtaagggggctcctagagcttcctttcctgtagactcagca

SEQ ID NO: 2454 - DNA, 427 bp, Homo sapiens
  MAP TO AL049765.16; EXPRESSED IN PLACENTA, SIGNAL = 3.1; EXPRESSED IN BONE MARROW, SIGNAL =   2; EXPRESSED IN LUNG, SIGNAL = 1.6; EXPRESSED IN BRAIN, SIGNAL = 2.2; EXPRESSED IN FETAL LIVER, SIGNAL = 4.1; EXPRESSED IN ADULT LIVER, SIGNAL = 3.5; EXPRESSED IN BT474, SIGNAL = 1.5; EXPRESSED IN HEART, SIGNAL = 2.2; EXPRESSED IN HELA, SIGNAL = 1.6; EXPRESSED IN HBL100, SIGNAL = 1.5
ttgtagaggtcttttacctcattggtatttaatttcctaggtatttaattttttagtagctattttaaatggggttactttcttgatttctttttcagctagttgtttgtgtatagaaatgctactgattttttttattatactttaagttctgggatacatgtgcagaacatgcaggtttgttacataggtatacacatgccatggtggtttgctgcaccgatcaacccatcatctacattttgtacaataattttatatactgcaactttactgaatttgtttatcagttctagtagtttttttggtggagtttttagttttttcaaatataagatcatatcttcaaacaagaataatttggtttcttttttcctaatttggatgtcttttctttttttcacttgccgagttgccctggttataa

SEQ ID NO: 2455 - DNA, 486 bp, Homo sapiens
  MAP TO AP000181.1; EXPRESSED IN LUNG, SIGNAL = 3.7; EXPRESSED IN ADULT LIVER, SIGNAL = 1.4; EXPRESSED IN BT474, SIGNAL = 2.1; EXPRESSED IN PLACENTA, SIGNAL = 0.96; EXPRESSED IN HBL100, SIGNAL = 1.5; EXPRESSED IN HELA, SIGNAL = 3.2; EXPRESSED IN HEART, SIGNAL = 1.1; EXPRESSED IN BRAIN, SIGNAL = 0.99
cagaaatcaatgatgaaagcattagaagacaattgagtttgtcagaactgtaaaatattgctgagtgtggattgctctgaaatctgaaaacatgacttgtgaattgcttatatccaaaatgcagacacaatgctgggtgttggtttacttgtttccggtttttcaaccctcttttctaagcaaaagatgtccaaactatacagacccacagaatctaacagatgtctttatattcctcctcctagaactctcagaggatccagcactgcagctggtcgtcactgggctgtgcctgtgtgcctggtcacggtgctgtggaacctgctcagcatcctggccgtcagccctgactcccacctccacacccccatgcacttcttcctctgcaacctgtccttgcctgacatcggtttcacctccaccacggtccccaagatgatcgtggacatccaatctcacagcagagtcatctcctatgcaggctgc

SEQ ID NO: 2456 - DNA, 495 bp, Homo sapiens
  MAP TO AC011082.1; EXPRESSED IN HELA, SIGNAL =   4; EXPRESSED IN PLACENTA, SIGNAL = 2.2; EXPRESSED IN HBL100, SIGNAL = 1.5; EXPRESSED IN HEART, SIGNAL = 1.6; EXPRESSED IN BONE MARROW, SIGNAL = 1.1; EXPRESSED IN LUNG, SIGNAL = 3.4; EXPRESSED IN BT474, SIGNAL =   1; EXPRESSED IN ADULT LIVER, SIGNAL = 3.1
ttgaggaaggaccccactacattactgacaatttatgcagtgcatctctttcccattcttccccaaggaggcctccagtcttttatcagggtaactgtgcattggggaaagtgaaatgatcagacattttgagggctactggacactgcctctgagctgacattgattccaggggacccaaaacatcactgtggtcctccagttaatgtaggggcttatggagttcaggtaattaatggatttttagctcaggtccaacttacagtgggtccagtgggttcccagaccgattctgtggtagtttccccagtgccagaatgcataattgtcatagacatacttagcagctggcagaacccccacattgactccctgactggtagcatgagggctattatggtgggaaaggccaaatggaagccattagagctgtctctacctagaaaaatagtaaatcaaaaacaatatcgcatccctggagggattgtggagatt

SEQ ID NO: 2457 - DNA, 431 bp, Homo sapiens
  MAP TO AF172272.1; EXPRESSED IN BT474, SIGNAL = 1.9; EXPRESSED IN FETAL LIVER, SIGNAL = 1.8; EXPRESSED IN HELA, SIGNAL = 2.3; EXPRESSED IN PLACENTA, SIGNAL =   2; EXPRESSED IN HBL100, SIGNAL = 2.1; EXPRESSED IN HEART, SIGNAL = 2.3; EXPRESSED IN BONE MARROW, SIGNAL = 2.5; EXPRESSED IN BRAIN, SIGNAL = 1.7; EXPRESSED IN LUNG, SIGNAL = 2.3; EXPRESSED IN ADULT LIVER, SIGNAL = 2.3
gaagctgtgaatacagaaggctctgttttagtggaactattactaaagtctgtccctgtattatgctttcttacaactgaagtttccctagctcttggatcaaggtgtgggttaccagatgcagttcctaaagaatgcccttttccctgaaaggcagttacgttatgaagttgctcagatttctttttcactactccaccactacctagttttaatagcccatgtgagggacttgattccctacttcttgtagtagcctctgctcgaacctgacttacagcctctttaactaaatcttcaacatcaggaccaatggggaaatgtcctgcagcatccacacacaattccagtctatcttcagaagcattatagacaaaggttttgccaggcaaatgtggaaaagtacaatgcttgccatcagccatacctaa

SEQ ID NO: 2458 - DNA, 403 bp, Homo sapiens
  MAP TO AL034422.18; EXPRESSED IN ADULT LIVER, SIGNAL = 1.3; EXPRESSED IN FETAL LIVER, SIGNAL = 0.9; EXPRESSED IN HELA, SIGNAL = 1.2; EXPRESSED IN HBL100, SIGNAL = 1.2; EXPRESSED IN HEART, SIGNAL = 0.87; EXPRESSED IN BONE MARROW, SIGNAL = 1.1; EXPRESSED IN LUNG, SIGNAL = 1.6; EXPRESSED IN BRAIN, SIGNAL = 0.97
aagaatgataacagtgaggagcactattttttaaaagtgactaatgacgtaagaacttaaaatggagtggtttgtcttatcagaaggccaaggagggcttcctggaggcaacacatttaagctaaggtctgagtggaagttgatcgggggaaagagctgccttccagggagaggacacagcagaggccatgcagcaagaaagaacagagcaccttggaggaactgaaaaaagaaatcagagcagctggagccaagagccacacagcccctccttcctcacgtgatgatgagccggacagagggcaaggtgtcaggaaagggcttctcttctggcccaggatggggtctgttttgtttttcctctgccctttcgggttcaagttcttctgcaacttcctctggc

SEQ ID NO: 2459 - DNA, 486 bp, Homo sapiens
  MAP TO AC005043.2; EXPRESSED IN HELA, SIGNAL = 2.6; EXPRESSED IN PLACENTA, SIGNAL = 1.3; EXPRESSED IN HBL100, SIGNAL = 1.3; EXPRESSED IN HEART, SIGNAL = 1.1; EXPRESSED IN BRAIN, SIGNAL = 0.96; EXPRESSED IN BT474, SIGNAL = 1.1; EXPRESSED IN ADULT LIVER, SIGNAL = 0.97
cagctctgaggaacagcaacatttgaaagaccaagaaaagccatgaaaaaccagagcaggtccgggaaagaacaggatcccttgggcagaaaagacccacagagtcctactctgcatgcatttgccacgaggattgagtgggtaatcacagttgggcataagcgtgcccccagaaccaaccctaggagactggagagctcgcacaaatggctcaaagtgggagggcaatcttggcctgtgtccgaatgaaggtagcttaccttattgaacctggcaaaggggtagtccttgccctcctccgctgcacgtcgccagtggaagaacattgctccgtccttgcgggccgggttggtgaatggcatccacttccaaggccgcaccttcttggagcccaacttggccttcactgtacggtatccctggccagtgtcactgggtagcagtgggggtgcatccctggcagggaggtttagggagatgcgaggt

SEQ ID NO: 2460 - DNA, 470 bp, Homo sapiens
  MAP TO AL080317.11; EXPRESSED IN FETAL LIVER, SIGNAL = 1.8; EXPRESSED IN ADULT LIVER, SIGNAL =   2; EXPRESSED IN HELA, SIGNAL = 3.2; EXPRESSED IN BRAIN, SIGNAL = 1.1; EXPRESSED IN LUNG, SIGNAL = 7.6; EXPRESSED IN BONE MARROW, SIGNAL = 1.3; EXPRESSED IN BT474, SIGNAL = 1.7; EXPRESSED IN PLACENTA, SIGNAL = 2.8; EXPRESSED IN HEART, SIGNAL = 2.4; EXPRESSED IN HBL100, SIGNAL = 1.3
gcaggagtgcctatcctcacctagatctgtgggggtggagccctagccagggacccacctttctctacccagcacttcccctcccgctttccgtatcattttacgggaccacactcttcccttcccagcactcccatatcaatagcacataaaacctttagttctactgaaaatttggagtgaaatctctccatagttagagcacatgtactatttggtaagcttacccttggtaattcatgataccagctgaagacatcaataccaataagtgagaagattcttgccaagggtggaaggatttgcttggtaatatagtaagtagcattcagtctcagagttgggtcctgcaggacttccactgggcgccttacaagctggataagtggtactccgggggtcccataaatgatgacgtatggcactcgctccccaacctgaggctcagagcgccggtcataagtcagcat

SEQ ID NO: 2461 - DNA, 478 bp, Homo sapiens
  MAP TO AC007671.5; EXPRESSED IN FETAL LIVER, SIGNAL = 1.4; EXPRESSED IN ADULT LIVER, SIGNAL =   1; EXPRESSED IN HELA, SIGNAL = 1.7; EXPRESSED IN BRAIN, SIGNAL = 1.2; EXPRESSED IN BONE MARROW, SIGNAL = 1.2; EXPRESSED IN BT474, SIGNAL = 2.1; EXPRESSED IN HEART, SIGNAL = 0.99; EXPRESSED IN HBL100, SIGNAL = 1.1
catggattacgtagttttgagtggaataatatgagtaccaggacatgtgtagacacccagtacttgattcatttttttatcgttgtagcagaattccttgcatatttactgaatggattccaaagatcactttggggtaaacctgcaggataaatgcctcagatagcaaatgttgttggctattacctttcctctataggttgatacttttctttatcataaagaaattgtaccatacttcttccctagaactcaaagtatgcctacaaaagcgcttaaaagggttatgcaaaatgaaggtacaaacctgcaagtaacccatctctatcaaatgtcttttagcaaaataaaatgagccattttcatataattctccatcccagtcttgtcgacgaggccgtttagctggatttaaattcagaggttcggtcacttcacgaactaaaagcaaaaagttagagtaagtccacgttgccct

SEQ ID NO: 2462 - DNA, 476 bp, Homo sapiens
  MAP TO AL080243.21; EXPRESSED IN BONE MARROW, SIGNAL =  12; EXPRESSED IN FETAL LIVER, SIGNAL = 9.7; EXPRESSED IN HBL100, SIGNAL =  28; EXPRESSED IN HELA, SIGNAL =  70; EXPRESSED IN HEART, SIGNAL =  16; EXPRESSED IN BRAIN, SIGNAL = 5.2; EXPRESSED IN LUNG, SIGNAL =  25; EXPRESSED IN BT474, SIGNAL =  55; EXPRESSED IN ADULT LIVER, SIGNAL =  15; EXPRESSED IN PLACENTA, SIGNAL = 7.3
atctcgtctcgaccaagagctgaagctgatcgaagagtatgggctccggaataaacgtgaggtctggagggtcaaatttaccctggccaagatccgcaaggccgcccgggaactgctgacgcttgatcagaaggacccacggcgtctgttcgaaggcaatgccctgctgtggcggctggtctgcattggggtgctggatgagggcaagatgaagctggattacatcctgggcctgaagatagaggatttcttagagagacgcctacagacccaggtcttcaagctgggcttggccaagtccatccaccacgctcgcgtgctgatccgccagcgccatttcagggtccgcaagcaggtggtgaacatcccgtccttcattgtccgcctggattcccagaagcacatcgacttctctctgtgctctccctatgggggtggccgcccgggccgcgtgaagaggaagaatgccaagaagg

SEQ ID NO: 2463 - DNA, 467 bp, Homo sapiens
  MAP TO AL096801.15; EXPRESSED IN ADULT LIVER, SIGNAL = 1.4; EXPRESSED IN BT474, SIGNAL = 1.2; EXPRESSED IN HBL100, SIGNAL = 1.2; EXPRESSED IN PLACENTA, SIGNAL = 1.1; EXPRESSED IN HELA, SIGNAL = 3.3; EXPRESSED IN HEART, SIGNAL = 1.2; EXPRESSED IN LUNG, SIGNAL = 5.2; EXPRESSED IN BRAIN, SIGNAL = 1.4
aacagaatccaactcttctgcctctgttagaccaaaggtactgagtagcatccaggaagggacagtccctgacaacacaagctcagcaagggggaaggaagacgtgaacaagaccctcccaaaccttcaggtagtcaaccaccagcaaggcccccaccacagacacatcctgaagctgctgccgtccatggaggccactgggggcgagaagtccagcacgcccatcaagggccccaagaggggacatcctagacagaacctacacaagcattttgacatcaatgagcatttgccctggatgattgtgcttttcctgctgctggtgcttgtggtgattgtggtgtgcagtatccggaaaagctcgaggactctgaaaaaggggccccggcaggatcccagtgccattgtggaaaaggcagggctgaagaaatccatgactccaacccagaaccgggagaaatggatct

SEQ ID NO: 2464 - DNA, 475 bp, Homo sapiens
  MAP TO AC004955.2; EXPRESSED IN BONE MARROW, SIGNAL = 1.4; EXPRESSED IN HBL100, SIGNAL = 1.3; EXPRESSED IN HELA, SIGNAL = 2.6; EXPRESSED IN LUNG, SIGNAL = 1.9; EXPRESSED IN BRAIN, SIGNAL = 1.5; EXPRESSED IN BT474, SIGNAL = 2.1; EXPRESSED IN ADULT LIVER, SIGNAL = 1.8; EXPRESSED IN FETAL LIVER, SIGNAL = 1.3; EXPRESSED IN PLACENTA, SIGNAL = 1.4; EXPRESSED IN HEART, SIGNAL = 1.8
tccatgtcaatcttaaattctgcaaattgaacatgatccaattttgctttaacattcttgccatccatattattcagtgctgtagtcttttcaggaatattaacattcacaggttcttccttgattcttacagatgcaataggttcatgtttaatctgctgtaattcatatttagaatgaagtttatctgaaaaaacagaatccaaggaggctttgcttacagcacaaatcatgttgtcagtgtgaggtccaagaacagatgatgtggaatctgatgatgtgcctgtttcatgagtagctgtattctgagaagtgtcctcctctgagtgatataatttgagccgaatatgccatgctaaactgcatacagctgaaactgtcttgaactgatgaacaacattccttggaataaaataaatgtcattatcatatagctgaatcctggcatagcgaatgccttccctcctcagttgat

SEQ ID NO: 2465 - DNA, 470 bp, Homo sapiens
  MAP TO AC009961.2; EXPRESSED IN BONE MARROW, SIGNAL = 1.7; EXPRESSED IN LUNG, SIGNAL = 9.1; EXPRESSED IN BT474, SIGNAL = 4.6; EXPRESSED IN ADULT LIVER, SIGNAL = 1.7; EXPRESSED IN HBL100, SIGNAL = 1.2; EXPRESSED IN HELA, SIGNAL = 4.7; EXPRESSED IN PLACENTA, SIGNAL = 1.5; EXPRESSED IN HEART, SIGNAL = 1.7
gggaacttcagaagctgatggtacattactacgggactgtgaagctgtcaagattcttggagaaacgtaagaattttcagaattcaatgatcttgtattcaaggaatcctgactagatcttcgtgaaaaaaaggtagatgacatgctagaagctatgcgtgacagcaatctcctcgttgtccgcctaccttcattgtcagaagattcttgaaatggtctttgagatgaaacaaccctttctgaattgcttatgattggggcttcatctctacttgaactgtaagaaaatccaggctgcgtattgcttcgggaagattctgattctcttgaagaaaaatttgatcttaaagaatttctggagtccctagaacttagtatggtctgatgttcagaaggcaattggtggtttgtggatgatgtattcaactgtaaagtgctcattgagttttcttttggtcttgctccttgtg

SEQ ID NO: 2466 - DNA, 478 bp, Homo sapiens
  MAP TO AL033531.7; EXPRESSED IN PLACENTA, SIGNAL = 1.3; EXPRESSED IN BRAIN, SIGNAL = 1.8; EXPRESSED IN FETAL LIVER, SIGNAL = 1.1; EXPRESSED IN HBL100, SIGNAL = 1.8; EXPRESSED IN HELA, SIGNAL =  11; EXPRESSED IN HEART, SIGNAL = 2.5; EXPRESSED IN LUNG, SIGNAL = 0.9; EXPRESSED IN BONE MARROW, SIGNAL = 1.2; EXPRESSED IN ADULT LIVER, SIGNAL = 2.6; EXPRESSED IN BT474, SIGNAL = 2.7
tttccccatcggtaatactaaaagtttctattctaagtcttctatccaccactaatttaagacaactctgctggcttgcgttatttcatactagtttatttaggagttccattttcactcctcaatagattttatgtatttctcatatgcttcttcactcataagttcatctagttctgaagggttactcagtgtcatcttgatcagccaaccatcttcataacaagatttgtttacaagtcctggattttctgcaagagcttcattaatttcagttacttctcctgataaaggagaatagagttcactagcagctttcacactttccaaagcaccaaactcatcttgtttgttcaattttgtcccaacttcagggagactacaataaacaacatctcccaacgcttcctgtgcaaaattgctgattcccactgttccaatgccattttctgttgttacccattcgtgtttctctgtg

SEQ ID NO: 2467 - DNA, 477 bp, Homo sapiens
  MAP TO AL121577.1; EXPRESSED IN BT474, SIGNAL = 1.2; EXPRESSED IN BONE MARROW, SIGNAL = 2.3; EXPRESSED IN LUNG, SIGNAL = 1.6; EXPRESSED IN BRAIN, SIGNAL = 1.8; EXPRESSED IN ADULT LIVER, SIGNAL = 2.4; EXPRESSED IN FETAL LIVER, SIGNAL = 1.5; EXPRESSED IN PLACENTA, SIGNAL = 2.2; EXPRESSED IN HEART, SIGNAL = 2.2; EXPRESSED IN HELA, SIGNAL =   2; EXPRESSED IN HBL100, SIGNAL = 3.3
gatttccttgcttcagtggcctttggtattacctcttcatttggttctcattcaattcccattggcctgctggaaagcatcaagaggactgcatactgagaactggtccttggagtagttgatttagaagagtgactatagttcagagtagccaagtcaaggctttaagaatcaggctaaaggtaagtaggatgagcatggaaagtcagaatcctgtctgtctctaattattatgatttcctgatttgttttcaggtgttttgaagtcttctgcatctactttcagtcaggcaacaatgaagagccttatgtcagtatcaccaagaagaggcaaatgccaaaaaatggcctctcagaggagattgagaaggaggtgggccaggcagaaggcaaactaatcacccaccgatcagcgttcagccgggcgtcggtgatccaggctttcttgggctcagccccccagctgaccctacagct

SEQ ID NO: 2468 - DNA, 476 bp, Homo sapiens
  MAP TO AP000553.1; EXPRESSED IN BRAIN, SIGNAL =   2; EXPRESSED IN BT474, SIGNAL = 1.4; EXPRESSED IN HBL100, SIGNAL = 1.7; EXPRESSED IN HELA, SIGNAL = 1.6; EXPRESSED IN BONE MARROW, SIGNAL = 2.2; EXPRESSED IN ADULT LIVER, SIGNAL = 2.4; EXPRESSED IN FETAL LIVER, SIGNAL = 1.8; EXPRESSED IN PLACENTA, SIGNAL =   2; EXPRESSED IN HEART, SIGNAL =   2
agacagaaagagctgccaggggcaggggagtccccgcttcatgggtgcagtgtttcagttttgcaacatgaagaattctggaggttggagggtggcgatggctgtacaaaaatgtgaatatatttaatgtcactgaactgtacacttagaaatggttaagatggtaagagttatgtgtactgactacaattattttaaagaagagtgtatcatttttacatttctaaggtctcattaacaaaagaaggttaagtccatgactgatgctgccatcatcagcaacaggacgtgcgccaagttttcctggtggcaccaccccagcctggcctgtgacaaggggcctgcagagagtcaggcacaccggattttctttcaggccaaacagaagagcaagggtttccccaaattcgagagcacggggctgggaagaagagccaagcgccagcagtgtcctcacacctgctcctcctgagatg

SEQ ID NO: 2469 - DNA, 476 bp, Homo sapiens
  MAP TO AF165145.1; EXPRESSED IN PLACENTA, SIGNAL = 5.2; EXPRESSED IN BONE MARROW, SIGNAL = 4.6; EXPRESSED IN BRAIN, SIGNAL = 3.3; EXPRESSED IN BT474, SIGNAL = 2.3; EXPRESSED IN FETAL LIVER, SIGNAL = 3.6; EXPRESSED IN HEART, SIGNAL = 5.6; EXPRESSED IN HELA, SIGNAL = 3.6; EXPRESSED IN HBL100, SIGNAL = 3.2; EXPRESSED IN LUNG, SIGNAL = 3.2; EXPRESSED IN ADULT LIVER, SIGNAL =   5
agggctttaatgctgcagtgagaaaatggttgtgccactgcattccagcctgggcaacaaaacgggaccctgtctcaagaaaaaagagaaaaaaaaacaacaacaacccaacaacaatgaaacaaaaggcactcatggagcttccttattccatctgcaggcagggaacagcattacctgaaactgaccaggggactaactagaatctaggcgggggtggccaggcttacccgccacgtaaagcagctggtacttgacggagatctgagatctgcccccggcctccgccctgcagtaaaccacaccctggtgctcggaatgaggttgcaaatacacaaagccccgcttcatgtcataaacaatgtccgttccattggctgggatctccttggctgggaattccctgtggagcgtgactttggccgacagcacggtcacccgacaaggaaccacagcctgtctgtccgggttcaagt

SEQ ID NO: 2470 - DNA, 467 bp, Homo sapiens
  MAP TO AP000519.1; EXPRESSED IN ADULT LIVER, SIGNAL =  26; EXPRESSED IN BT474, SIGNAL = 9.5; EXPRESSED IN FETAL LIVER, SIGNAL =  10; EXPRESSED IN PLACENTA, SIGNAL =  20; EXPRESSED IN HBL100, SIGNAL =  64; EXPRESSED IN HELA, SIGNAL =  79; EXPRESSED IN HEART, SIGNAL =  33; EXPRESSED IN BONE MARROW, SIGNAL =  52; EXPRESSED IN LUNG, SIGNAL =  87; EXPRESSED IN BRAIN, SIGNAL =   9
acctgagctcttcctcctccacatcacggcagcgaccacagctccagtgatcacagctccaaggagaaccaggccagcaatgatgcccacgatggggatggtgggctgggaagacagctctgggaaaagaggggaaggtgaggggccctgaccctgctaaaggtctccagagaggctcctgctttccctaagagacatgacacccccatctccctccttaccccatctcagggtgaggggcttgggcagaccctcatgctgcacatggcaggtgtatctctgctcctctccagaaggcaccaccacagccgcccacttctggaaggttccatcccctgcaggcctggtctccacgagctccgtgtcctgggtctggtcctccccatcccgctgccaggtcagtgtgatctccgcagggtagaagcccagggcccagcacctcagggtggcctcatggtcagagatgg

SEQ ID NO: 2471 - DNA, 466 bp, Homo sapiens
  MAP TO AP000514.1; EXPRESSED IN PLACENTA, SIGNAL = 1.1; EXPRESSED IN BRAIN, SIGNAL = 1.3; EXPRESSED IN FETAL LIVER, SIGNAL = 0.89; EXPRESSED IN BT474, SIGNAL = 1.6; EXPRESSED IN HEART, SIGNAL =   2; EXPRESSED IN HELA, SIGNAL = 2.4; EXPRESSED IN HBL100, SIGNAL =   1; EXPRESSED IN LUNG, SIGNAL = 0.93; EXPRESSED IN ADULT LIVER, SIGNAL = 0.91
tcacagtgcatgattcctccacaaatgttgaccagaatagccagtacctttttatctgaagtgataggcttaaatgcttctgttacttgatggactgtagcaccaccaccaacaaggaaattagctggagtctctccatgaagttttattatatccattgtggccatagccaaaccagcaccatttactaggcagcctatacttccatcgaggccagtgtagttgagatctgccttagcagcatctttgttcctttcatcttcctgggtccagtcctgtagatcaaacattttcttttggcgataggctgaattagagtcaaaattgatctttgcatccttacacaatgcagctccatctgaatcttccaccattgaatttatttctatcatggttgcatcgtatttcagaaaaaggctgtaaagcttgatcatgttttctgctgctgaagccacaatattagatg

SEQ ID NO: 2472 - DNA, 447 bp, Homo sapiens
  MAP TO AC007981.24; EXPRESSED IN HELA, SIGNAL = 6.8; EXPRESSED IN PLACENTA, SIGNAL = 2.4; EXPRESSED IN HBL100, SIGNAL = 2.4; EXPRESSED IN HEART, SIGNAL =   2; EXPRESSED IN BRAIN, SIGNAL =   2; EXPRESSED IN BONE MARROW, SIGNAL = 3.6; EXPRESSED IN LUNG, SIGNAL = 7.9; EXPRESSED IN BT474, SIGNAL = 1.5; EXPRESSED IN FETAL LIVER, SIGNAL = 3.1; EXPRESSED IN ADULT LIVER, SIGNAL = 8.6
ggaaacttgtgtgtactgggcctagaggcctcggatgtggaggagtcattcctgagggcgagtgtctgccctggtgctatatctgctgccttttcacactgggtgtgacctgaagagacagcctgaggcctgtcctcactcactgtctttgaggaactgagggtcagctggcagtgggatgaggctggccccctcctccgctttagccccggcaagcctcccgtggagctgtaggagctggagatggcatttcggttggtgcaggagctcgtccaggagatctgggatgtctggttatatctgatttctgacctctgggcatggaggtctgtctgcagaggcccgggcccgggcacaaagggagagaggcctctattgtcccgcaggggccgaaatgcagacggtgcatccccggtgacctcggggacccttctctgatcaccagga

SEQ ID NO: 2473 - DNA, 461 bp, Homo sapiens
  MAP TO AC009948.2; EXPRESSED IN ADULT LIVER, SIGNAL = 1.2; EXPRESSED IN BT474, SIGNAL = 5.5; EXPRESSED IN FETAL LIVER, SIGNAL = 3.6; EXPRESSED IN HBL100, SIGNAL = 0.91; EXPRESSED IN HEART, SIGNAL =  56
tgacacaactggaaagctcaactagtaaaatgcttaaagcaggcataagaggtgagcaataaaattactggtagaggtagacaagccaagtaacatggtgtagtctttagtacacacaattcagtagaaagcaaatctttatttttttcagtgattctaagaccttttttttgtcattgttccataaaggaattccgcctaaaattgaagctcttccatctgatatcagcattgatgaaggcaaagttctaacagtagcctgtgctttcacgggtgagcctaccccagaagtaacatggtcctgtggtggaagaaaaatccacagtcaagaacaggggaggttccacattgaaaacacagatgacctgacaaccctgatcatcatggacgtacagaaacaagatggtggactttataccctgagtttagggaatgaatttggatctgactctgccactgtg

SEQ ID NO: 2474 - DNA, 445 bp, Homo sapiens
  MAP TO AP000427.1; EXPRESSED IN LUNG, SIGNAL = 0.89; EXPRESSED IN BRAIN, SIGNAL =   2; EXPRESSED IN ADULT LIVER, SIGNAL = 1.8; EXPRESSED IN BT474, SIGNAL = 3.2; EXPRESSED IN FETAL LIVER, SIGNAL = 1.2; EXPRESSED IN HELA, SIGNAL = 2.2; EXPRESSED IN HEART, SIGNAL = 1.1
agctccaggtcaccagattctgtggtggtggctgtcactatctcatcgaacaaatctgtgctgttggctatgctatctcctaccagtagctccctgtcagccccttcccccgtgacctgctcttccagagataacccatctgccattgtgtcaagaggggggttgagggttaagctcttctctggggaatcacatggaaagtctaggcacagttcgtccctcagagagccactgtgtgccatctccatgctctgaaggagagactccagcttcttgttttggatgtttatgtccacaaaatatttctgaatgcctttatctttatcagccaagctgctccgcatggtttcgatgacctgtttgagctgtttaatctctttcctggcttctttgagtgccaactgggcctctacccggtgacactcctcctcaatccagtcctctc

SEQ ID NO: 2475 - DNA, 460 bp, Homo sapiens
  MAP TO AC008040.7; EXPRESSED IN HEART, SIGNAL = 3.2; EXPRESSED IN BRAIN, SIGNAL = 2.2; EXPRESSED IN BONE MARROW, SIGNAL = 2.5; EXPRESSED IN LUNG, SIGNAL = 3.8; EXPRESSED IN ADULT LIVER, SIGNAL = 4.1; EXPRESSED IN BT474, SIGNAL =  11; EXPRESSED IN FETAL LIVER, SIGNAL =   3; EXPRESSED IN PLACENTA, SIGNAL = 3.1; EXPRESSED IN HBL100, SIGNAL =   3; EXPRESSED IN HELA, SIGNAL = 8.8
ccaatattctataaaatgaaggaccgaatataactgcttgaatgtcaaatacatttcagtagatagatttaaagaatgctacaaatgccatgtgttcaatatggtaatcagccaacatagaaaatccaacctcttgtacttattcattcagtcccaaaattagtcagattatgatttttcatgtgaagatttaggtgtttctccatcattttcctcttcctcatcctcttcacaatccccatctgtttgctgttccagttcctcttttgttatcatttcaaaatcatttccatttccactactgtgctgggatcgatcatcttccctcctgtcactgtccgtgtctgaatgccgttctccccccgagccttctgttccatgatttcctggtcctactttcccctcctcatcttcctttttctcactgtctgacttttcctcactgtcggacttctgttgc

SEQ ID NO: 2476 - DNA, 443 bp, Homo sapiens
  MAP TO AL034343.17; EXPRESSED IN HELA, SIGNAL = 1.2; EXPRESSED IN PLACENTA, SIGNAL = 1.7; EXPRESSED IN HBL100, SIGNAL = 1.4; EXPRESSED IN HEART, SIGNAL = 1.3; EXPRESSED IN BRAIN, SIGNAL = 2.2; EXPRESSED IN BONE MARROW, SIGNAL = 1.8; EXPRESSED IN BT474, SIGNAL = 1.3; EXPRESSED IN ADULT LIVER, SIGNAL = 1.8; EXPRESSED IN FETAL LIVER, SIGNAL = 1.6
caacagttgcatgagaaaatggtatatgaaaatccccatcttatagttgaggaaactgaggcttagaaaggtaagccactgccagaggctggtgtatgcttccaggctgtgtggctccagaacctgtgccacagccctgcagaactgcctccctgcaggtgaacactcagtgctgtggggctctcattcgctgtcttcctcccccatgcctcaccattgtgctttggcttgctcctcctgcagtgtcacttgggaccccaaccggtacccctcggaagttgtacaggcccagtgtaggaacttgggctgcatcaatgctcaaggaaaggaagacatctccatgaattccgttcccatccagcaagagaccctggtcgtccggaggaagcaccaaggctgctctgtttctttccagttggagaaggtgctggtgactgttggct

SEQ ID NO: 2477 - DNA, 459 bp, Homo sapiens
  MAP TO AL079341.9; EXPRESSED IN BT474, SIGNAL = 6.4; EXPRESSED IN FETAL LIVER, SIGNAL = 6.4; EXPRESSED IN ADULT LIVER, SIGNAL = 3.7; EXPRESSED IN HELA, SIGNAL =  17; EXPRESSED IN PLACENTA, SIGNAL = 3.9; EXPRESSED IN HBL100, SIGNAL = 4.1; EXPRESSED IN HEART, SIGNAL = 3.9; EXPRESSED IN BRAIN, SIGNAL = 3.1; EXPRESSED IN BONE MARROW, SIGNAL = 1.6; EXPRESSED IN LUNG, SIGNAL = 4.4
ggacactgaaattgacattatttgttaatggccaacgaagaccccttgaatcaagtcaggtgaaatatctctgtcgagaactgacagaactttgaaataaagtgaatcacttattggatagcttggaaccacctggaaaaccaggaccttccactaatattcctgaaaatgttactgtgaatggtagggaagaaaagcctgcttcttcggattcttctggaaaacagtctactcaggttatggcagcaagtatgtcagcttttgacccttttaaaaaaccaagatgaaataaaaaataatgttacgtcggcatttggcttaacagatgatcaggtttcagggcaacccagtgctcctgcagaagactgttcaggaacatctgacagcattgccgcctcctcctcagtagcagctcacccaccaggagttcagccacagcaaccaccatatacagaagct

SEQ ID NO: 2478 - DNA, 432 bp, Homo sapiens
  MAP TO AC007878.2; EXPRESSED IN LUNG, SIGNAL = 5.6; EXPRESSED IN ADULT LIVER, SIGNAL = 2.3; EXPRESSED IN BT474, SIGNAL = 1.3; EXPRESSED IN FETAL LIVER, SIGNAL = 1.9; EXPRESSED IN HELA, SIGNAL = 2.8; EXPRESSED IN PLACENTA, SIGNAL = 1.3; EXPRESSED IN HBL100, SIGNAL = 1.9; EXPRESSED IN HEART, SIGNAL = 1.8; EXPRESSED IN BONE MARROW, SIGNAL =   2; EXPRESSED IN BRAIN, SIGNAL = 1.8
tccatttcacattgggaaggttgatcatttcagttaaccatgttaggtttttgtaggagattggtcagggtggtgggaaaagttataaggagagacgcaaaccttcttggaagtcctgggaggttttgcaaagcttcgggagagaataaaggctgaaggcagctaaattctcttaccctgaggctaagggcaagtagtaggtaacaaaggagtgtaaaggaatttatctagataagtttatttacttttgccgacctttgatcatccgacctttgatcatccgacctttgatcatctgacctttgatcatctgacctttgatcatccgacctttgatcatctgacctttgatcatctgcgtgcaggactgctccctacaggcgggggcaacaattacccacagattgtgttggctccaggcctttgtcatta

SEQ ID NO: 2479 - DNA, 392 bp, Homo sapiens
  MAP TO AP000470.1; EXPRESSED IN HBL100, SIGNAL = 1.4; EXPRESSED IN HEART, SIGNAL = 1.2; EXPRESSED IN LUNG, SIGNAL = 5.3; EXPRESSED IN BONE MARROW, SIGNAL = 2.2; EXPRESSED IN BRAIN, SIGNAL = 1.2; EXPRESSED IN ADULT LIVER, SIGNAL = 3.9; EXPRESSED IN FETAL LIVER, SIGNAL =   1; EXPRESSED IN PLACENTA, SIGNAL = 1.6; EXPRESSED IN HELA, SIGNAL = 2.4
ctttagggaaggggaggatggttctggcaacatcagcctttataagtagatgtataaataatatataacggtttataaacttttttcaatgaacatatgtaattaaatattttcaaaactaattgaagtgagactaacttaaattagtaaactatagcaaaagcacaatcttcatagagctaacattctctgagtacgactccttcaattgaagagcaggctggaaaaataatactatattgctgacacacgaaactcaccaatctcggacagggtttggtaatggaaaaacaagcagactgttatggtttggctctgtgtccttactgaaatttcgtgttgaattgtaatcctcagtgttggaggaggggcctgatgggaggagaccgata

SEQ ID NO: 2480 - DNA, 462 bp, Homo sapiens
  MAP TO AC004913.2; EXPRESSED IN PLACENTA, SIGNAL =   1; EXPRESSED IN HBL100, SIGNAL = 1.2; EXPRESSED IN HELA, SIGNAL = 3.9; EXPRESSED IN HEART, SIGNAL =   1; EXPRESSED IN LUNG, SIGNAL = 3.1; EXPRESSED IN BONE MARROW, SIGNAL = 0.94; EXPRESSED IN ADULT LIVER, SIGNAL = 1.3; EXPRESSED IN BT474, SIGNAL = 1.3
gcttctcggctaccacagactcgggaaatgtctgtgatggtgaaggctcaggagttgactgagagtttgcctgctgtgatgtggtgcttggggcagggttcccactgtcaaaatacatgttggctgttacaggctggtcttttgtgagaatgaatcctgatgaatcacaatactgagaattcccatcttgtatactgaaagagtcttgagtataatcttggtagatgtctcttggcatgctggcaaaatgtgtttgttcatttacctcttttgtttgagggccataaggatcttcctgtctttcatcttttgaactactagctacaaaatgtacaggctcaaaacgaggtctcgcatggaatttggaaccggcttgctttttaggaggattttgacctatagaatgagtgaaatttacaattcattaaaatgggaatatttcaaaagaaccaagcaggaaaa

SEQ ID NO: 2481 - DNA, 447 bp, Homo sapiens
  MAP TO AL035458.32; EXPRESSED IN FETAL LIVER, SIGNAL = 1.3; EXPRESSED IN HELA, SIGNAL =  15; EXPRESSED IN HEART, SIGNAL = 1.6; EXPRESSED IN LUNG, SIGNAL = 2.8; EXPRESSED IN BRAIN, SIGNAL = 1.4; EXPRESSED IN BT474, SIGNAL =  11; EXPRESSED IN ADULT LIVER, SIGNAL = 1.5; EXPRESSED IN PLACENTA, SIGNAL = 1.7; EXPRESSED IN HBL100, SIGNAL = 2.2; EXPRESSED IN BONE MARROW, SIGNAL = 1.5
tttctccacctgagaatggccaccagtccttcctgagcagcgatgatcaaattttatttatgagacagttggagtgatgattgttaataatgaatacccggcagaaaggaaagaagccttaatgaggaatctgttgactccactaatggagaagtttaaaattctgttagaaaatttgatgctggcacaagatgaagaaaggcaagcctctctagcagactgtctcaaccatgctgttggatttgcaagtcgaactagtaaagctttcagcaacaagcagactgtgaaacagtgtggctgttccgaagtttatctggactgtttacagacattcttgctggccctcagttgtcccttacaaaagggtattctcagaagtggagtctgtactttccttcatcgaatgattatttgcctggaggaagaagtttttccgttcatcccatc

SEQ ID NO: 2482 - DNA, 446 bp, Homo sapiens
  MAP TO AC010854.1; EXPRESSED IN BONE MARROW, SIGNAL = 1.1; EXPRESSED IN LUNG, SIGNAL =  10; EXPRESSED IN BRAIN, SIGNAL = 5.2; EXPRESSED IN ADULT LIVER, SIGNAL =   1; EXPRESSED IN BT474, SIGNAL = 1.2; EXPRESSED IN HEART, SIGNAL = 0.84
ggcactcaagagcaaacaatgatttcttacagatatacctaaatactgccagaatcagttttcacactattaagaatcatcaaaaattccctaggagtaaattagctattttagggatgtgcctcatgccaccaaggcattatttagcaaagagtttgcaagaagcttggagtcctagtttgaaaatagctaaagatgctaccatggtgactcccaggcctcccaccacactgggaggtgtgaccagatagaggattcctgctccaatgatggcccccaggcactgggctgcgatgtagaagacagacttggcgatgctgatcttcctggtgcacaccatggccacagtcactgcagggttgatgtggccaccgctgatatggccaaagcactgcaccatggttgcaatgctgagtccaaagcaaagggagatgagaaccatgtcg

SEQ ID NO: 2483 - DNA, 460 bp, Homo sapiens
  MAP TO AL121716.1; EXPRESSED IN HBL100, SIGNAL = 1.5; EXPRESSED IN HEART, SIGNAL = 1.6; EXPRESSED IN LUNG, SIGNAL = 0.93; EXPRESSED IN FETAL LIVER, SIGNAL = 1.5; EXPRESSED IN ADULT LIVER, SIGNAL = 1.6; EXPRESSED IN PLACENTA, SIGNAL =   2; EXPRESSED IN HELA, SIGNAL = 2.2; EXPRESSED IN BRAIN, SIGNAL = 1.3; EXPRESSED IN BONE MARROW, SIGNAL = 2.2; EXPRESSED IN BT474, SIGNAL = 3.4
cctagttgcttctgtaggggcttaataaaaggacagagatgaggatgtatgctgggtcctgagttcagggtaggactttggtactttcaatttgatatctcagagtttgggcaagtaatcatgacaaatccagaagcaaatatgaccccaggcacatgtccttttctgttatgcctgcctttcattagtaatgagaatttttataagacccccctcctttatctaaataataaatatgacagtcttttgcccaaaatttgtcccacagaataagaaaactattttgattgaaaggcatcttcccatccaaatcaccttaaacaaggtcttcatggccaagcatacttttcactggaacaaaggctgtgagttctcctctttccttccacaggacaaggaggaggactttaagacagtgattttggagggattggagatggccaagcatcaggtgagggtg

SEQ ID NO: 2484 - DNA, 445 bp, Homo sapiens
  MAP TO AC007728.1; EXPRESSED IN BT474, SIGNAL = 4.9; EXPRESSED IN HEART, SIGNAL =   3; EXPRESSED IN LUNG, SIGNAL = 2.7; EXPRESSED IN BRAIN, SIGNAL = 2.1; EXPRESSED IN FETAL LIVER, SIGNAL = 1.2; EXPRESSED IN ADULT LIVER, SIGNAL = 4.9; EXPRESSED IN PLACENTA, SIGNAL = 2.4; EXPRESSED IN HELA, SIGNAL = 8.7; EXPRESSED IN HBL100, SIGNAL = 2.9; EXPRESSED IN BONE MARROW, SIGNAL = 3.1
aaggtcatggtcactggtggtctgctgctagtctgatcccctacagctttctgaatccctgcgaaaccattacatatgagaagtatgctcggcaagtcaatgagatgcactgaaaactgcaacacctgcagccggcattcgtcaacagaaagggtccaattctccacgacaacacccgactgcatgtcacacaaccaaagcttcaaaagttgaatgaattggactatgaagttttgcctcatccgccatatttacctgacctctagccaactgactaccatttcttcaagaatcttgacaactttctgcaggaaaaatgcttccacaaccaggaggatgcagaaaatgctttccaagagtttgttgaatcccgaagcatgaatttttatgctacaggaataaacaaacttatttcttattggcaaaaatgtgttgattttaatgg

SEQ ID NO: 2485 - DNA, 459 bp, Homo sapiens
  MAP TO AL121658.1; EXPRESSED IN BT474, SIGNAL = 2.9; EXPRESSED IN ADULT LIVER, SIGNAL = 1.3; EXPRESSED IN HELA, SIGNAL = 3.3; EXPRESSED IN HBL100, SIGNAL =   2; EXPRESSED IN HEART, SIGNAL = 1.5; EXPRESSED IN LUNG, SIGNAL =   1; EXPRESSED IN BONE MARROW, SIGNAL = 0.95
aaaggctgcagcttctgtggaacatttggccatccggtgtcattggtctcagaggccagcagttactggagatgtccttcaagtctacagtgggtctgaagggacggctattattttctgtgagacccagaggagtgtaactgaaatagccatgaatccacacataaaacagaatgcccagtgtttacatggggacattgcacagtcacaaagagaatttacactaaaagacttcagagaaggtagttttaaagttttggtggcaaccaacgtggctgcctgtggtttggacattcctgaagttgacctggtgattcatggttctcctcctcaggatgttgagtctatatccatcgttctggacgcacaggtagagctggacagacagggatttgtatatgtttttatcaaccaagagaaagaggtcaactaagatatgtggaacaaaaagtaggaatt

SEQ ID NO: 2486 - DNA, 425 bp, Homo sapiens
  MAP TO AL035413.19; EXPRESSED IN HBL100, SIGNAL = 4.1; EXPRESSED IN HEART, SIGNAL = 4.4; EXPRESSED IN LUNG, SIGNAL = 3.2; EXPRESSED IN FETAL LIVER, SIGNAL = 4.8; EXPRESSED IN ADULT LIVER, SIGNAL = 6.5; EXPRESSED IN PLACENTA, SIGNAL =  13; EXPRESSED IN HELA, SIGNAL = 5.8; EXPRESSED IN BRAIN, SIGNAL = 5.2; EXPRESSED IN BONE MARROW, SIGNAL = 6.2; EXPRESSED IN BT474, SIGNAL =   3
gtgcttagaagcaagccaggtatatggtgggcactcaataaactgttgcaaaggtgatgatctctgtatcagcactgcccagcactaggtctgacctgcggtagcaatcagtgcaggtccctgtcgagggaacacaccccagcctctagtctggagaggcccgtggcccaccagacaacccctcgctgagcagtagctggagccactgcctcaaccccacagccctgccctggtcctgccaccaagacactactcacgggaaggtagatgcagcaaagcagagaatggagatcaagcccaggcccacgctggcctcgtcccagccgtcctgggcacattcacccaacacatcccatatccactggatggagccactggggcagctggagaagttgcgggagcccagtttcttccagaccatggct

SEQ ID NO: 2487 - DNA, 458 bp, Homo sapiens
  MAP TO AC007308.13; EXPRESSED IN BONE MARROW, SIGNAL = 1.1; EXPRESSED IN FETAL LIVER, SIGNAL = 5.5; EXPRESSED IN HBL100, SIGNAL = 1.6; EXPRESSED IN HELA, SIGNAL = 2.6; EXPRESSED IN HEART, SIGNAL = 0.86; EXPRESSED IN BRAIN, SIGNAL = 1.2; EXPRESSED IN LUNG, SIGNAL =   3; EXPRESSED IN BT474, SIGNAL = 1.5; EXPRESSED IN ADULT LIVER, SIGNAL = 1.5
agcctctcaggaaaagggtctcatgaacaaatgaggaaagcaagtagaggtagggcagggagggagaggcaaaggaatgtgttgttggaaagggtagtgtgcccctcacagatgacagtacccgtctccagatgtgcccactgagagtttatgaaggggctgctccatgtggtccttgactgccctgggggagagtcacagaaagctataatgccactgcctctcggtttccccaggagctcgcccgtcagcgaggagtcctggagcgcacagagaagatggtggacaagatggaccaagatttgaagatcagccagaaacacatcaatagcattaagagcgtgtttggggggctggtcaattacttcaaatccaaaccagtagagaccccacctgaacagaatggcaccctcacctcccagcccaacaacaggtgagtgcatcttctaccatctggg

SEQ ID NO: 2488 - DNA, 387 bp, Homo sapiens
  MAP TO AC011307.1; EXPRESSED IN ADULT LIVER, SIGNAL = 1.5; EXPRESSED IN BT474, SIGNAL = 1.4; EXPRESSED IN HBL100, SIGNAL =   1; EXPRESSED IN PLACENTA, SIGNAL = 1.1; EXPRESSED IN HEART, SIGNAL = 0.97; EXPRESSED IN LUNG, SIGNAL = 0.91; EXPRESSED IN BRAIN, SIGNAL = 1.2; EXPRESSED IN BONE MARROW, SIGNAL = 1.1
agggtgttatgggcttttcccgagggtgtggttctgccagatccatactatggaaaccggatcactgtccatggcaacggttccctggacatcaggagtttgaggaagagcgactccgtccagctggtatgcatggcacgcaacgagggaggggaggcgaggttgatcgtgcagctcactgtcctggagcccatggagaaacccatcttccacgacccgatcagcgagaagatcacggccatggcgggccacaccatcagcctcaactgctctgccgcggggaccctgacacccagcctggtgtgggtccttcccaatggcaccgatctgcagagtggacagcagctgcagcgcttctaccacaaggctgacggcatgctacacatt

SEQ ID NO: 2489 - DNA, 403 bp, Homo sapiens
  MAP TO AC002992.1; EXPRESSED IN LUNG, SIGNAL =  12; EXPRESSED IN BRAIN, SIGNAL = 0.9; EXPRESSED IN BONE MARROW, SIGNAL = 2.2; EXPRESSED IN BT474, SIGNAL = 1.8; EXPRESSED IN FETAL LIVER, SIGNAL = 1.8; EXPRESSED IN ADULT LIVER, SIGNAL =   2; EXPRESSED IN HBL100, SIGNAL = 1.7; EXPRESSED IN PLACENTA, SIGNAL = 1.9; EXPRESSED IN HEART, SIGNAL = 1.2
ttgaatcagccacagtgacccaccgatattcaagagcccaggtagtagcacgattctggaaatgttgctgtggctgtttttgggaagctgaggctgccccagtgtgcatgtgtgtgtgcagatggctgtgcatattcatatacctatgcacaaatacatccaggtatatgtatagactgggcagtttccggcaaaatcctaatgatgccttttacttacaggtgggaagggcataggaggatgggaagatgggatccatgtgcccgggattttccactggcccagggtgctcctggctggctgagtgattggagagcccacgagcctgatggacgtgttccctcctgtggtccagctggcaggcggcaaggtgccccaggacaggtacgtggcaataaggctg

SEQ ID NO: 2490 - DNA, 475 bp, Homo sapiens
  MAP TO AC007666.12; EXPRESSED IN PLACENTA, SIGNAL =  13; EXPRESSED IN BONE MARROW, SIGNAL =  11; EXPRESSED IN FETAL LIVER, SIGNAL =  12; EXPRESSED IN HBL100, SIGNAL = 7.5; EXPRESSED IN HELA, SIGNAL =  12; EXPRESSED IN HEART, SIGNAL =  11; EXPRESSED IN BRAIN, SIGNAL = 8.7; EXPRESSED IN LUNG, SIGNAL =  18; EXPRESSED IN BT474, SIGNAL =   5; EXPRESSED IN ADULT LIVER, SIGNAL =  10
aagaattcgaactcctgggctcaagcaatcctcctcccttggcctccccaaagcaccaggattacaagcgtgagccaccttgcccagcctgcagtttaatctttgaataatcctgtcaggctttaattttcacaaatgaagaaagagaagttaaacaatttgtcagattagtagtaggtggtcgagttaagacctgaatttatatatgcctgactccaaagcgcctgctcatgacttcagaaaacttcttagcttaatactgcaaccaggatctacttacattttcttctgctgctcaatctgtttctctttcttctcataatattccataatctttagtctttgggtttgcacaagccgacctttctctatgttgaactcttcttctgcctagagggaaattagtcaatattaattcattacatcaagttttgattaacagttttaaacagctggtgacctgcgttacttgctt

SEQ ID NO: 2491 - DNA, 484 bp, Homo sapiens
  MAP TO AC004970.2; EXPRESSED IN BT474, SIGNAL = 1.7; EXPRESSED IN HBL100, SIGNAL = 2.1; EXPRESSED IN BONE MARROW, SIGNAL = 2.4; EXPRESSED IN LUNG, SIGNAL = 2.1; EXPRESSED IN ADULT LIVER, SIGNAL = 1.9; EXPRESSED IN FETAL LIVER, SIGNAL =   3; EXPRESSED IN PLACENTA, SIGNAL = 3.1; EXPRESSED IN HEART, SIGNAL = 1.6; EXPRESSED IN HELA, SIGNAL = 1.6; EXPRESSED IN BRAIN, SIGNAL = 2.5
cagccactcattatctggggaccatgattcttgaacactttagatagcatggtgttaagcaatcagcctgcctggaatggaattaatatttctgctctgctacctaccaaatgtgtaacattttcaagtttattggaattttatatgcttcagtttagtaacgtaaaaaataaaaatagtggtgaaacctatcccatgaagttactgtaatgtttaaatgagttaatagatgtaaactaaaaatattatctggaaaataacaaccactccataattgttagatactatgacatcaccaccaccaccaccaccaccaccatcatcatcatcatcatcattttaatcttatggttaatgtatctttatgatcaacatttctctgttttctgcaactttatctttgagatgtccattttgctcagaccacttaaccatttcattttgtcttagtcattattttcccttttaatttttccatgttttt

SEQ ID NO: 2492 - DNA, 467 bp, Homo sapiens
  MAP TO AC008080.1; EXPRESSED IN PLACENTA, SIGNAL = 1.1; EXPRESSED IN BRAIN, SIGNAL =   1; EXPRESSED IN FETAL LIVER, SIGNAL = 1.2; EXPRESSED IN HEART, SIGNAL = 1.2; EXPRESSED IN HELA, SIGNAL = 1.9; EXPRESSED IN HBL100, SIGNAL = 1.2; EXPRESSED IN LUNG, SIGNAL = 3.9; EXPRESSED IN BONE MARROW, SIGNAL = 0.93; EXPRESSED IN ADULT LIVER, SIGNAL = 0.91
gatagcaagccatgcaactggtgaaattacaaagttgacagctccatgagaatccccacaatgcattatccaagtctgccaaatctacaagtcgggaaccattgattgaatgagaagttagggcacagttcctactacctgaggtacttctgctcttctgaagacggaggcatttctcagggtggaagaaacagccctggattcttcaagtagaaaataaagaggaactggcagatgagattctgaaaccaacttccttcacagcctgcaagtgtgatatgttcaacccattagagattctaatttcaggggaagccagcctgtgggcaaagggtcagaccactgtttatgccccagagtggaagagcggaggaaaggaatgggtgagtcaagatacctcattccctcccacaggagttagaaggaattcctatcttcctcagcaacctcacccaccaaccagctac

SEQ ID NO: 2493 - DNA, 458 bp, Homo sapiens
  MAP TO AC006323.3; EXPRESSED IN BRAIN, SIGNAL = 1.2; EXPRESSED IN BONE MARROW, SIGNAL =   1; EXPRESSED IN LUNG, SIGNAL = 3.9; EXPRESSED IN ADULT LIVER, SIGNAL =   1; EXPRESSED IN BT474, SIGNAL = 2.5; EXPRESSED IN FETAL LIVER, SIGNAL = 0.88; EXPRESSED IN HBL100, SIGNAL = 1.5; EXPRESSED IN PLACENTA, SIGNAL = 1.3; EXPRESSED IN HELA, SIGNAL = 2.5; EXPRESSED IN HEART, SIGNAL = 1.3
catcctccccactgaagaactctccttccccctcatttcagccaaacctgccacaatgtttgctttccaacatttagagcaagaggactgccctgttttgcctggtgacataaaggactaattcagataacaaggccctggctctcggccttgccaccttctgccatcacagacccattcatctggcaatcactcctttgtcacccccgcctaccccccacggcccgtccttgcgagccatccctgcgtgagggacagcacacctggcacaggcatacagataagtcacctgaatcagtagtttgcggtcttcctcgatgtttttgtgtgtggtttcttgttcctgcttctgttcggttttcattggcacattgatgttaacccttaatttcttactatcaagaaaaatgaggaaaccgatcactattatattaaaaggtaggcagtgaaggctgctt

SEQ ID NO: 2494 - DNA, 476 bp, Homo sapiens
  MAP TO AC009474.1; EXPRESSED IN BONE MARROW, SIGNAL = 2.3; EXPRESSED IN HELA, SIGNAL = 2.2; EXPRESSED IN LUNG, SIGNAL = 1.6; EXPRESSED IN BRAIN, SIGNAL =   2; EXPRESSED IN BT474, SIGNAL = 1.3; EXPRESSED IN ADULT LIVER, SIGNAL = 2.8; EXPRESSED IN FETAL LIVER, SIGNAL = 2.2; EXPRESSED IN PLACENTA, SIGNAL = 2.8; EXPRESSED IN HEART, SIGNAL = 2.9; EXPRESSED IN HBL100, SIGNAL = 2.6
gaaaactcctccccaggttcaggagcccctacatcttaccttatattctttctaattcttataaaccatcatgcatttatcgtctgatctagttctcccttctctaaattctttgggaacagttttcctctagctataaatctgcctaaaatcataatgtcctctaggtttatggtgtctctaattatcatatgggagaacttatcaaatttaggcttcattcttttatttattcaataaacatttattgaccttcttaccatctgccaggctctgggctgcatgcaagagttgccaaaacaaaagtttcagtccctgtcctcagaagcttccagaccaatgaacaacatgaacaccaaaaggcaggtacaacacagtgtagctaatgctgtgagcactggatgggtacagagggcgtcatccagctcagcctagagttcaggacagacttctcagaggacaagacacctgagttt

SEQ ID NO: 2495 - DNA, 469 bp, Homo sapiens
  MAP TO AL008723.8; EXPRESSED IN PLACENTA, SIGNAL = 1.9; EXPRESSED IN HELA, SIGNAL = 1.6; EXPRESSED IN HBL100, SIGNAL = 2.2; EXPRESSED IN HEART, SIGNAL = 2.3; EXPRESSED IN LUNG, SIGNAL = 9.3; EXPRESSED IN BONE MARROW, SIGNAL =   3; EXPRESSED IN BRAIN, SIGNAL = 1.7; EXPRESSED IN ADULT LIVER, SIGNAL = 2.3; EXPRESSED IN BT474, SIGNAL = 3.3; EXPRESSED IN FETAL LIVER, SIGNAL =   2
agagaatgggatggggactccaaaactggagtatttgaaattttactgagaaaagggccgggactagaccaaaaagtcctcaacaaagaaggctcaacaacaaagacaagaggcagaaccagcctttgtcccccatgcctagccctgggaaagccggctatgggcaggagggagctggaagctgaggatgtctctgagggtgagggactgcaaaggggtgggggcggtggtggccagagagatgccagagagcaaatggcacccatggcttctttacctttggacatcttcagcatcttcggcgtcttcgggaggctgaggtactgcatgagttgggccttcttagctttcaaatccaatttggcaggctttgcagtggtggatgctggtgctgtggctgccacagtctcaggaatctcacactcatggcagggtcccacatctggcctgcagcagtcacagttgaggc

SEQ ID NO: 2496 - DNA, 474 bp, Homo sapiens
  MAP TO AL021807.1; EXPRESSED IN PLACENTA, SIGNAL = 1.9; EXPRESSED IN HBL100, SIGNAL = 1.3; EXPRESSED IN HEART, SIGNAL = 2.2; EXPRESSED IN FETAL LIVER, SIGNAL = 2.2; EXPRESSED IN ADULT LIVER, SIGNAL =   2; EXPRESSED IN HELA, SIGNAL = 1.9; EXPRESSED IN BRAIN, SIGNAL = 1.7; EXPRESSED IN LUNG, SIGNAL = 1.6; EXPRESSED IN BONE MARROW, SIGNAL = 1.7; EXPRESSED IN BT474, SIGNAL = 1.6
cctttcctcatgcctaccagtgtttgaaagtaaaagttttccattaaaaaaaaattacctcagtttcttcacatacagccaatgccaacaagactgtagggcttgggtagggttgggaagagaatctttggagaggggaaaaaaaagacaaggcaacaagcgtagacactctctgcttggctgactggttggggcaccatgatgaatactagtgttttttgtgtacagattagatcgtaagtcaattcaattttgcaagggtttttccgagactgtctccactccagtatgttgaaaaattgaggcgacgtcaaggtactgctcagtacgttgagaaattgaggcgacatcaaggtactgccgtgactcggattcgaaccgaggttgctgcggccacaacgcagagtactaaccactatacgatcacggcacgccaccagaggccgctgcttgtggggctcttcctttgcttat

SEQ ID NO: 2497 - DNA, 472 bp, Homo sapiens
  MAP TO AC011086.1; EXPRESSED IN BONE MARROW, SIGNAL = 1.9; EXPRESSED IN HELA, SIGNAL = 2.1; EXPRESSED IN HEART, SIGNAL =   2; EXPRESSED IN LUNG, SIGNAL =   7; EXPRESSED IN BRAIN, SIGNAL = 1.6; EXPRESSED IN BT474, SIGNAL =   1; EXPRESSED IN ADULT LIVER, SIGNAL = 1.8; EXPRESSED IN FETAL LIVER, SIGNAL = 5.2; EXPRESSED IN PLACENTA, SIGNAL = 1.4; EXPRESSED IN HBL100, SIGNAL = 1.3
tcccagctctaccactttccaatggtgtgaacttgcacaaataactctgagtctcattttcttcatttgtaaaatggagagaacaatctccgcttcaagagattgtcttaaatggaacatgcaaagcatcactgatatcgtttaccaaccacacatagcagctgtctttccccactcccctgttgtttccactgcctcataagacttcccaccactcacaaagcacagcgcttttcctcacaaagctgagtgggctccctaggttcaggatggaagtaaataggagtaccatcttaccttcagggacggcccaggagtggggtagcagccacagaagtggtaacatctgtagcagcgcagctccttggttctgttcatgacccataccttcttgccacacagtaggtaggagctaccaacccagccaacccagcttccccaactccctccccgagagggtggccttagatca

SEQ ID NO: 2498 - DNA, 473 bp, Homo sapiens
  MAP TO AC011307.1; EXPRESSED IN BT474, SIGNAL = 1.3; EXPRESSED IN HBL100, SIGNAL = 2.2; EXPRESSED IN HEART, SIGNAL = 3.8; EXPRESSED IN LUNG, SIGNAL = 9.3; EXPRESSED IN BRAIN, SIGNAL = 4.1; EXPRESSED IN ADULT LIVER, SIGNAL = 7.3; EXPRESSED IN FETAL LIVER, SIGNAL = 1.9; EXPRESSED IN PLACENTA, SIGNAL = 4.8; EXPRESSED IN HELA, SIGNAL =  17; EXPRESSED IN BONE MARROW, SIGNAL = 2.4
gcagaagaagctaaccatccctaggaaggaaaggagttgttgttttgtagtaggggtaggtgtttgggagattagccagacatgatcatcagggagagcacgtgtgttcttatgaagaattatgccaagatatataatggataaggaagaaatttgagcttgactgaagaaatgggggctgtccatgaagccttgcagcagaacagcccaactaatttgctgagcctgatgggtgtcaaggtcagtccaggtgaaagtgaagaaagactgggatgaagcatgcaaaggaatagtaaagaaagcatgtttgagacccagaatggaataatgggttatggaggtattgtgaagggaggtattgaggataggagaatatatgggtttggcaccatggggtggataggcaaaataatttggttgataaggtgcagatcttgaactaaagtgtaagacttgtctggtttttggacagg

SEQ ID NO: 2499 - DNA, 466 bp, Homo sapiens
  MAP TO AL021392.5; EXPRESSED IN BONE MARROW, SIGNAL = 8.2; EXPRESSED IN BT474, SIGNAL = 4.2; EXPRESSED IN HBL100, SIGNAL = 5.1; EXPRESSED IN LUNG, SIGNAL = 7.9; EXPRESSED IN BRAIN, SIGNAL = 8.9; EXPRESSED IN ADULT LIVER, SIGNAL =  12; EXPRESSED IN FETAL LIVER, SIGNAL =  11; EXPRESSED IN PLACENTA, SIGNAL =  12; EXPRESSED IN HEART, SIGNAL = 9.7; EXPRESSED IN HELA, SIGNAL = 9.8
gagctctgaagcagacacccaggtttcccagagggatccctgtcctggcaggcagatttggttggaaccaccctctccttaggcgggtagcctcctttgagggtctcaagtcggtgtaggactcttaggttcactacccccactcaccactctgcattttgcattacctaaggaaagtgcttattgctcatctctggttccagatagtttgctttatttattgcttgtttcttttgtggaaggagggcttccttgtgatcttggcagtgcaataatgttatgtctgtagacatttacttgcaatcaggtagcggatggcattttgggatatctgatcactatgctgccagaagtcaagttgactcattagctcattctgggagttacatccttggctgccaacatggctctcaccttgctccagaggagtactttggagagaattcagggtgtacattttctggct

SEQ ID NO: 2500 - DNA, 381 bp, Homo sapiens
  MAP TO AC010876.1; EXPRESSED IN BT474, SIGNAL = 1.1; EXPRESSED IN PLACENTA, SIGNAL =   3; EXPRESSED IN BONE MARROW, SIGNAL = 3.1; EXPRESSED IN FETAL LIVER, SIGNAL = 2.8; EXPRESSED IN ADULT LIVER, SIGNAL = 2.2; EXPRESSED IN HEART, SIGNAL = 2.5; EXPRESSED IN HELA, SIGNAL = 1.5; EXPRESSED IN HBL100, SIGNAL = 1.5; EXPRESSED IN BRAIN, SIGNAL = 1.9; EXPRESSED IN LUNG, SIGNAL = 1.5
gcttcaaccaaatgaaaatacgtatacgctagggacgtttttaaagacccacaggtttatgctatcttgattaatcttcgaaggggctttactttccttaggtaccttaaacttccttcctaaatttaaggactgaggaggcataggcattacaaagtggacggtgccagaggggattgaggcaagtcttaaggaaagcaaatcaattttaggaacaagtatgtgtggaagttgaggacctggaaattcatatcctaaaacaacaacaacaaccacaaccacaaccaccaccaccaccaccaccaccaccaccaccaccaccaccatgaactccaaggggtaggagtaactcttttgaagaccacaaccatagcccaaagt

SEQ ID NO: 2501 - DNA, 463 bp, Homo sapiens
  MAP TO AC010905.1; EXPRESSED IN BT474, SIGNAL = 1.3; EXPRESSED IN HBL100, SIGNAL = 1.2; EXPRESSED IN LUNG, SIGNAL = 2.2; EXPRESSED IN BONE MARROW, SIGNAL = 2.2; EXPRESSED IN ADULT LIVER, SIGNAL = 4.5; EXPRESSED IN PLACENTA, SIGNAL =   3; EXPRESSED IN HEART, SIGNAL =   3; EXPRESSED IN HELA, SIGNAL = 3.7; EXPRESSED IN BRAIN, SIGNAL = 1.7
taccatgttccccatcatcctgaagcagctggatggatagaatgatggaatggccttttgaagtcacaactaaaatgccaattaggttataatactttgcatggctgggacaaggttctccagaaggctgtgtttgctctgaatcagcatccaatatatggtactgtttctcccatagccaggaatcatgggtccaggaatcaaggggtggaattggaagtggcaacactcaccatcacccctagtgacccactaacaacatatttgcttcctgtttctgtgacattatgttctgctggcctagaggtcttagtttcagagggaggaatgctgccaccaggaaacatagcaatgattcaattaaactggaaattaagattgccacctggacactttgcacttctcctacctttacaccaacagcctaagaagggaggtacagtgttggctgggatgattgact

SEQ ID NO: 2502 - DNA, 454 bp, Homo sapiens
  MAP TO AL031281.6; EXPRESSED IN ADULT LIVER, SIGNAL = 3.6; EXPRESSED IN PLACENTA, SIGNAL = 3.3; EXPRESSED IN BRAIN, SIGNAL = 2.8; EXPRESSED IN BT474, SIGNAL = 1.6; EXPRESSED IN FETAL LIVER, SIGNAL = 2.8; EXPRESSED IN HEART, SIGNAL = 2.5; EXPRESSED IN HELA, SIGNAL = 2.8; EXPRESSED IN HBL100, SIGNAL = 1.9; EXPRESSED IN LUNG, SIGNAL = 2.1; EXPRESSED IN BONE MARROW, SIGNAL =   3
cctaaacagccctgaaatcgaccaattttctccaagcatcatcccacacacagacatttcactattccctgacagtctaactttaattctgcttgtagggatggaatatatctgtctaaaacagaggatgtcttggtctgcaagttccccaacaacagaatctacaaggcttgactcatgacccaatttaagtaaaaaataaaaataaataaaacagacaaggagaacgaagactgatacttggctgaaggttaactgaaaggcaatttcatgacagtcaagcagactggggtctagggaattggcagcaattattttaagaaatgagaagcaagattatcgaatttggcgcacagtagtgtttctatatctgcacaggctgcaggtatggggtgatgacattctgtgggcggtgggctcttttcccagcaatgtgggagcctgtactctcctc

SEQ ID NO: 2503 - DNA, 461 bp, Homo sapiens
  MAP TO AC011448.1; EXPRESSED IN ADULT LIVER, SIGNAL = 3.9; EXPRESSED IN PLACENTA, SIGNAL = 1.8; EXPRESSED IN BONE MARROW, SIGNAL = 2.6; EXPRESSED IN BRAIN, SIGNAL = 1.7; EXPRESSED IN FETAL LIVER, SIGNAL = 0.97; EXPRESSED IN BT474, SIGNAL = 1.2; EXPRESSED IN HEART, SIGNAL = 2.2; EXPRESSED IN HELA, SIGNAL = 1.7; EXPRESSED IN HBL100, SIGNAL = 1.7; EXPRESSED IN LUNG, SIGNAL = 1.6
tggggtacagtaggacagggatgagacagcaactgctcctccctgaaatgcacaagcctggagctgagggatgcctgttcctgagtgtcacctggagtgtccaggtatctttttatatcaggaagtgcagtcagtgagtgctgtgggtcccacctgtgggccacctgccttgatgtcaggaacacctcagccttctagtctcggagacaaaccagccagtggcaggaaagtaaacaggatttcgattctgctccatctgtcctcatcccgtgactaggaatggccaagtctcagcccagaggaaactgttcatggtcctgatcctgcaccctgtggtacccacgggccgcctcttgaagggcaatcccatgagccggggtcctggcgtgcttctcgatttaacccacagttctcacatttccctctggctgaagtctgcagcaggccttatggtaaagacc

SEQ ID NO: 2504 - DNA, 459 bp, Homo sapiens
  MAP TO AL031673.16; EXPRESSED IN BONE MARROW, SIGNAL = 1.3; EXPRESSED IN BRAIN, SIGNAL = 1.2; EXPRESSED IN ADULT LIVER, SIGNAL = 1.5; EXPRESSED IN BT474, SIGNAL = 1.2; EXPRESSED IN FETAL LIVER, SIGNAL = 0.9; EXPRESSED IN PLACENTA, SIGNAL = 1.8; EXPRESSED IN HBL100, SIGNAL = 1.9; EXPRESSED IN HELA, SIGNAL = 1.7; EXPRESSED IN HEART, SIGNAL = 1.3
ttctagagcagttgggagagcctcactttgttgtctctaaaaataaggccaattcccaccagaaacggtgtagttagtagctgctttaaagcagaggagtggagttggactctctcagccacttgtaggatcacagcttcctagggcatgactactaaagacatgcaatgtgttaatggagttattttccattatttaggtgataaaactcttacaatcaaaataccattataaagaagaggctgaaatcatctgtgataaagttcaagttaaactcagcaaggaatgttttcatccttacaatacatgcattactgatttaaggacttcacattgggaagaagcaatccaggaaacaaaaggtggtgcagccaatagaaaattggctgaagaatgttatttcctttggaaatctacacgtttacagcatatgacactagcagaagacgtcaaagccat

SEQ ID NO: 2505 - DNA, 463 bp, Homo sapiens
  MAP TO AL117348.2; EXPRESSED IN BT474, SIGNAL = 3.4; EXPRESSED IN FETAL LIVER, SIGNAL = 1.7; EXPRESSED IN ADULT LIVER, SIGNAL = 2.1; EXPRESSED IN HELA, SIGNAL =  88; EXPRESSED IN PLACENTA, SIGNAL = 1.8; EXPRESSED IN HBL100, SIGNAL = 1.5; EXPRESSED IN HEART, SIGNAL = 1.8; EXPRESSED IN BRAIN, SIGNAL = 2.2; EXPRESSED IN BONE MARROW, SIGNAL = 1.8; EXPRESSED IN LUNG, SIGNAL = 1.6
cgcctgttacacaaacatgggctgggctggctgaaagtgagtgtgggtagctgagggaggagaaggaaacaccacagataaatcccagggatggtgggtcagcagtaccatctccactcgagagggacagtgagttatctggaggggaacagggagtcagccaagaaggggtctggatgtgcctacactcactaggtggccatggacttctcctggaaggtgacgaaggccattcccaggggctggtcctggacgtggcgttcttcctctgtgatcctctccagcagcctgtccttcatccgtgtgtagtaagagatggcgtcttcctgccacaagacacatcccattgggatgacgtggccccatgctggtatctggggcaccccgatgccaatgcctctgctcccagccggggggtgggacccttacccactcacagcccagcacttcacagcagcaaaac

SEQ ID NO: 2506 - DNA, 475 bp, Homo sapiens
  MAP TO AP000050.1; EXPRESSED IN BONE MARROW, SIGNAL = 1.4; EXPRESSED IN BRAIN, SIGNAL = 1.2; EXPRESSED IN LUNG, SIGNAL = 5.1; EXPRESSED IN ADULT LIVER, SIGNAL = 1.7; EXPRESSED IN FETAL LIVER, SIGNAL = 0.95; EXPRESSED IN HELA, SIGNAL = 0.91; EXPRESSED IN PLACENTA, SIGNAL = 1.1; EXPRESSED IN HBL100, SIGNAL =   1; EXPRESSED IN HEART, SIGNAL = 1.3
gcactgatcccctgaaacacagccaagaccttcccagctccgcagccagcgcctcctcgactggacttccccacctgttagggctgaactgtgtccctcagattcacacgttgaagcccaggacatcagaatatgacttcgtttggagataaattctttaaagaggtgatgaagtgaacacgaggctgttagggtgagccctaattccatctgatgggtgctcttaataagagggggaaatgtggacacacagacgctggagatgtgcatgcacagaggaaagaccctgccgaggagagaggcctcaggaggaaccagccctgttgtcaccttgatcttggactttgtatctttagaaccatgaggaagtatatgttgtttaagcggctgggtctgtggcctttgttatggtcgcctgagcagattagcgcaccagcgaggaggaagaggcctccggggaagagcatgagctcta

SEQ ID NO: 2507 - DNA, 472 bp, Homo sapiens
  MAP TO AL109823.6; EXPRESSED IN PLACENTA, SIGNAL = 5.5; EXPRESSED IN HELA, SIGNAL = 5.2; EXPRESSED IN HBL100, SIGNAL = 3.1; EXPRESSED IN HEART, SIGNAL = 4.7; EXPRESSED IN LUNG, SIGNAL = 7.9; EXPRESSED IN BONE MARROW, SIGNAL = 4.6; EXPRESSED IN BRAIN, SIGNAL = 4.2; EXPRESSED IN ADULT LIVER, SIGNAL = 5.2; EXPRESSED IN BT474, SIGNAL =   2; EXPRESSED IN FETAL LIVER, SIGNAL = 4.6
atcctttccaaagcacatggctttcttttccttggaaattcagtgaatccccaaaacttgtggtttttaatgcaggagactcagctccctttggcatctcagcagacacagaaagatgtaaaactgtcaccccacagacaaattccttttgatgccttctcttggccaccacacgtggaccaggagataaggggagctacgtgctcatccgtgtagccactgccaaccaggccacaccttagtcctgctactctgggaatgcagagaagcagctgcgcactgaccttcaggcggatttgcagatttttatctgacaacaagtggatgcagcgttccatcacgtccatggctatttggatctgcaatggcagtggtggctccacatctggacgggtgtcattctcatccactttgggagggactgactgttcctctggaaaaagagcacaactgggggcagtgttgtatgagt

SEQ ID NO: 2508 - DNA, 462 bp, Homo sapiens; identical to SEQ ID NO: 793
  MAP TO AP000313.1; EXPRESSED IN BONE MARROW, SIGNAL = 2.8; EXPRESSED IN HBL100, SIGNAL = 1.8; EXPRESSED IN HELA, SIGNAL = 1.8; EXPRESSED IN HEART, SIGNAL = 2.2; EXPRESSED IN BRAIN, SIGNAL = 2.8; EXPRESSED IN LUNG, SIGNAL = 1.6; EXPRESSED IN BT474, SIGNAL = 1.4; EXPRESSED IN ADULT LIVER, SIGNAL = 2.7; EXPRESSED IN FETAL LIVER, SIGNAL = 4.1; EXPRESSED IN PLACENTA, SIGNAL = 2.4

SEQ ID NO: 2509 - DNA, 969 bp, Homo sapiens
  MAP TO AC011307.1; EXPRESSED IN BONE MARROW, SIGNAL = 3.2; EXPRESSED IN BT474, SIGNAL =  11; EXPRESSED IN HBL100, SIGNAL = 3.8; EXPRESSED IN BRAIN, SIGNAL =   3; EXPRESSED IN LUNG, SIGNAL =   3; EXPRESSED IN ADULT LIVER, SIGNAL =  17; EXPRESSED IN FETAL LIVER, SIGNAL = 9.3; EXPRESSED IN PLACENTA, SIGNAL = 3.7; EXPRESSED IN HEART, SIGNAL = 3.8; EXPRESSED IN HELA, SIGNAL =  56
tcaataggctcagctcctcagctgataggcactgaatccaagcacatctgacagccacaccaaggctggtgctccaaaggagagttcaaaactccttcagtgtacaccacaacactctccacacagtgtctgagcatggctcatgggcctggagtcagtgctgacccaaactcctggtcagtgtgctaaccatcctgatattcctcattgattttggtgttgctgctaaactgaacagtattagtttggtatagctgctgtaaaaaaattacctcctcttgctctgtcacctgcttctgttgcacggggcgcaagtggtttactgcaccgtgaagacagatttcagatgcagggaactcgcacctccaatcccagatgctatgtccagcaaaggatccatggttctggcccacagtggtggcctggacacctcctgcatgcttgtgtggctgaaggaacaaggacatgttgtcattgcctacctggccaacattggccagaaggaagacttcgagaaagacaggaagaaggcatgcaagcttggggccaaaaaggtgttcattgaggaagtcagcagggagtttgtggaggagttcatctggccggccatccagtccagcgccctgtatgaggactactacctcctgggcacctctctggctaggctctgcatcgcccacaaacaagtggaaattacccagcaggaggggcccaagtacgtatcctatggcatcatgggaaaggagaacgatcaggtccagtttgagctcacctgctcactggcccccagattaaggtcattgctccctggaggatgcccgagttctactactggctcaatggctgcaatgatctgatggaatacacaaagcaacatcggattcccatcccagtcactctcaagaacccgtggatcatggacgagaacctcatgtgtatcagctatgaggctggaatcctggagaaaca

SEQ ID NO: 2510 - DNA, 948 bp, Homo sapiens
  MAP TO AC007688.15; EXPRESSED IN PLACENTA, SIGNAL = 1.2; EXPRESSED IN HELA, SIGNAL =  35; EXPRESSED IN HEART, SIGNAL = 1.2; EXPRESSED IN BRAIN, SIGNAL = 1.8; EXPRESSED IN BT474, SIGNAL = 1.8; EXPRESSED IN HBL100, SIGNAL = 3.9; EXPRESSED IN LUNG, SIGNAL =  31; EXPRESSED IN BONE MARROW, SIGNAL = 1.5; EXPRESSED IN ADULT LIVER, SIGNAL = 1.2; EXPRESSED IN FETAL LIVER, SIGNAL = 0.9
caggctggacgactttaagcaagatctgagccttaaggaacttatctattctatcaagggtataatctggaaaatcttgcatgttccttacagttataatatcctatgattctcccccacctttctacaagggattctctgcctagccaggctgcatctgtaccttgagtgatttcctcttgagagtaggctctgttctccacaccatagctcttcttcacgagttgaggtttacagaaagcatcctcaacaggataatccatggggtttcgttgctttgtgagcagccaaaactcgggactaacataagccaacaggaacacccagccattggcagccaaggcggagctgaggatggtgtcatcccacctgcggtcaaagtcaggaagcatgagcagggtgatccaggccacccagatggcaatggagaggagcatcgtgaggtagatgtgggccccatgtctcttccagcccgtgaaggaaccacagaaggtgaaggaggacatgaggaaggtcagcgccatcaagaagaggacgtaggtgagcaggaggacaaagtcttcattgcgacgaggagcggaaagctcagaaaagacattgacgttggtcctattcatggtcaggacaatatattcaatagcgataacatcctggactaggctgaagcccacggccagacccagaatcaccaacagggaaaggggcttcctcccccggacgagcttggtcagactgacagcatgagccagcaggcaggagaagcagatggaaaagaggatcccaaagaggaagaagcgtgtgggccctgtgctcccgtccagtccgatgatgaaggcgaaggtgaggccaaagatgcccaacacacccaggaggaagagaaactgagtaggcagcatttttcgcctgttggagtcctgcaccttgcagacgaggatcgggagagtgagc

SEQ ID NO: 2511 - DNA, 476 bp, Homo sapiens
  MAP TO Z82188.2; EXPRESSED IN HBL100, SIGNAL = 0.93; EXPRESSED IN PLACENTA, SIGNAL =   1; EXPRESSED IN HELA, SIGNAL = 1.3; EXPRESSED IN HEART, SIGNAL = 0.99; EXPRESSED IN BRAIN, SIGNAL = 1.1; EXPRESSED IN BONE MARROW, SIGNAL = 1.4; EXPRESSED IN LUNG, SIGNAL = 4.3; EXPRESSED IN ADULT LIVER, SIGNAL = 1.2
gaagaaagctccccatgtcccatgatcctgtacgtgcctaatcctgtcactcacagctgtcagcaaacagtgcaaggcagattaatgaaaagagaatagtggttaatatcccatagtgcctaatccatttctccttaccaagggacatgaccgagggggacctctaactccctaaggactccaaccttcttcatttgggcctctaacccaatttctgataagcatctttgcccttcactaagaggggcctttaaccccctatttctgaggagggaacctaacccaaatccatacattacccagaataaaatatccctcacttacccaaagtcagccaattggggctgtagtctatttcctttgggttgagggtgttttctggtatcgtcccttcgtggttcactagaaaaaatggtactggaaaggggtcccaatccagacccaaagagagggttcctggactcgcacaagaaaga

SEQ ID NO: 2512 - DNA, 486 bp, Homo sapiens
  MAP TO Z97055.1; EXPRESSED IN HBL100, SIGNAL = 9.2; EXPRESSED IN HELA, SIGNAL =  13; EXPRESSED IN HEART, SIGNAL =  17; EXPRESSED IN ADULT LIVER, SIGNAL =  21; EXPRESSED IN PLACENTA, SIGNAL =  20; EXPRESSED IN BRAIN, SIGNAL =  24; EXPRESSED IN LUNG, SIGNAL =  14; EXPRESSED IN BONE MARROW, SIGNAL =  22; EXPRESSED IN FETAL LIVER, SIGNAL =  13; EXPRESSED IN BT474, SIGNAL = 5.2
ttggagactaagatgaaaaactacctctatttgcaaatgacattgttgtatatatagaaaatcctaaggaatacaggcagacagacagatacacacatatgcacacacacacacacacacacacacacacacaattagaactaataaacaagttcaataaggttgtaggatacaagatcaatatacaaaactcagttatatctctatatacctacaatgaacaatctgaaaataaaattaaggaaacaattctatttacaatatcatcaaaaagataaaatacttagaaataaattaaacaaaaagtacaatatttgtgcactaaaaactacacaatattgttgaaagtagacctgaataaatggaaaaatatcccatgttcatggataagatggcaatactctccaaactgatctatagcttcaacccaatgtttatcaaaatcccaactgcctttcttgaagaaattgacaagttggtattgaa

SEQ ID NO: 2513 - DNA, 1403 bp, Homo sapiens
  MAP TO AL078472.1; EXPRESSED IN BONE MARROW, SIGNAL =  27; EXPRESSED IN LUNG, SIGNAL =  19; EXPRESSED IN BT474, SIGNAL =  34; EXPRESSED IN FETAL LIVER, SIGNAL = 7.1; EXPRESSED IN ADULT LIVER, SIGNAL =  28; EXPRESSED IN HELA, SIGNAL =  43; EXPRESSED IN PLACENTA, SIGNAL =  20; EXPRESSED IN HBL100, SIGNAL =  25; EXPRESSED IN HEART, SIGNAL =  18; EXPRESSED IN BRAIN, SIGNAL =  21
gcattctttcatcaggaggcacaaaatgtgattgtctctttttgtgacactagcaactgttggtgactaatgcctagatccgttgattcattaagggttgtaaaatgataatgttctagttgtgttactccttcattttattatctggaatactgttttataaaaagaaaagtttccatcacctcttacttgattgcccagcgtaactgttcatatgggaaaggcagaataaatgtttgcttgtttacctttctttaccagtttccagtgtagtcagtaggttcactgtattttccagctgtgattaaatttttaaaactattatttttaatgtatctgttactgtataggacagtatctggaaatacccaaagacaagatctctaaagaagtcattggctagtggtggatcagtgcagtgtggtggtggtggtgatggtggtgatggtggtggtagtggtagtggtggtgatgctggtggtggtggtggtgatggtggtggtggtgatagtggtggtggtgatggtggtggtggtggtggtagtggtgatggtggtggtggtggtgatggtggtgatggtggtggtggtgatggtggtggtggtggtgatggtgatggtggtggtggtgatggtggtgatggtagtggtgatggtggtggtggtggtgatggtggtgatggtgatggtggtggtggtgatggtggtgatggtagtggtggtagtggtactggtggtggtggtgatggtggtggtgctggtgatggtggtagtggtggtggtggtagtggtgatggtggtggtggtggtggtagtggtagtggtgatggtgatgatggtggtggtggtggtggtcgtggttttagtggtgatggtggtggtggtggtggtggtggtagtggtggtgatgctggtggtggtggtggtagtggtgatggtggtggtggtgatggtggtggtggtgatggtggtggtggtgatggtggtggtggtggtggtagtggtgatggtggtggtggtgatggtggtggtggtgatggtggtggtggtgatggtggtggtggtgatggtggtggtagtggtggtagtggtgatggtggtagtggtgatggtggtggtggtgatggtggtggtggtggtggtggtagtggtgatggtggtagtggtcatggtggtggtggtggtggtcatggttttagtggtgatggtggtggtggtggtggtagtggtggtggtggttgtggtagtggtggtggtggtggtggtagtggtgatggtggtggtggtagtggtagtggtgatggtggtggtggtggtggtcgtggttttagtggtgatggtggtggtggtggtggtggtggtactggtggtgttatgcacataggggataaaacagcagaggca

SEQ ID NO: 2514 - DNA, 966 bp, Homo sapiens
  MAP TO AC011307.1; EXPRESSED IN PLACENTA, SIGNAL = 8.3; EXPRESSED IN HELA, SIGNAL = 8.3; EXPRESSED IN HBL100, SIGNAL =   6; EXPRESSED IN HEART, SIGNAL = 7.6; EXPRESSED IN BONE MARROW, SIGNAL = 8.6; EXPRESSED IN LUNG, SIGNAL = 7.9; EXPRESSED IN BRAIN, SIGNAL = 7.9; EXPRESSED IN ADULT LIVER, SIGNAL = 9.4; EXPRESSED IN BT474, SIGNAL = 4.8; EXPRESSED IN FETAL LIVER, SIGNAL = 8.6
tccatgactgcagcattttatctgattttgtttttacattgacctctgcaatgactaccatgcaaatacttgatccagacacacttgcaggaataggactgacatctttgactacatttcatgtccttgaacccatggtcaggccaacctaacatcagatttaacagggagttgttatttgcagtcaatcactttccacaatcttctccaggctgtaaaaaccattgggcattttgcaatagcagccacgtgggctgatgcatcacagaaatacctattttttgtgttattccagtgacataacgccatggtagagtatttgggaaactgacatcttaattgtttttctttttttctgtagttttgatagtagaatcaaggtgtttgccaacaggaccctggtggtgaaatcaatgacagacaaagacgccggagattacctgtgtgtagctcgaaataaggttggtgatgactgcgtggtgctcaaggtggatgtgatgatgaaaccggccaagattgaacacaaggaggagaacgaccacaaagtcttctacaggggtgacctgaaagtggactgtgtggccactggacttcccaatcccgagatctcctggagcctcctggatgggagtctggtgaactccttcatgcagtcagatgacagtggtggacgcaccaagcactatgtggtcttcaacaatgggacactctacttcagtgaagtggggatgagggaggaaggagactacacctgctttgctgaaaatcaggttgggaaggatgagatgagagtcagagtcaagatggtgacacctgccaccatctggaacaagacttacttggcagttcaggtaccctatggagatgtggtcactgtaacctgtgaggccaaaggagaacccatgcccaaggtgacttggttgtccccagccaacagggtgatccccacctcctctgagaagtatc

SEQ ID NO: 2515 - DNA, 500 bp, Homo sapiens
  MAP TO AL031283.15; EXPRESSED IN BRAIN, SIGNAL = 5.5; EXPRESSED IN BONE MARROW, SIGNAL = 5.5; EXPRESSED IN LUNG, SIGNAL = 3.4; EXPRESSED IN BT474, SIGNAL = 4.5; EXPRESSED IN FETAL LIVER, SIGNAL = 4.1; EXPRESSED IN ADULT LIVER, SIGNAL = 4.7; EXPRESSED IN HELA, SIGNAL = 8.4; EXPRESSED IN PLACENTA, SIGNAL = 5.7; EXPRESSED IN HBL100, SIGNAL = 4.8; EXPRESSED IN HEART, SIGNAL = 4.1
cctttctctaccccagagcctgcacagggtcaagtatacagaaatcgctcaatatatgctccctatgtgaaggaagggctgtccctccctcctcttcctccccgagaggatctcagaaccctccctggtgcctgctgtaacaggccctctgaagcctcactcagccaagcagcagctgctcacagctgctgttcaatggcaatgtcattcattcattgacaaagggtgggggttggtctctcccgggccaccaggtcctcaggtgaagcccctggtaggggagtggggctgggggccgggcttacctcccggaagctcagcttgctgtcaaagtcctcatccacctccttgatcatgtttttcaggcccaggtgggtctgaggggccccaagtttctccatcatgagttttagctccatcaggtcgatgaagccgtcccgcccggcatcatacctgcagatgcaaaaagagaggacatcttggcactggctcagtcagag

SEQ ID NO: 2516 - DNA, 457 bp, Homo sapiens
  MAP TO AC007028.2; EXPRESSED IN ADULT LIVER, SIGNAL =   1; EXPRESSED IN BT474, SIGNAL = 0.95; EXPRESSED IN FETAL LIVER, SIGNAL = 1.5; EXPRESSED IN HBL100, SIGNAL =   1; EXPRESSED IN HELA, SIGNAL = 1.7; EXPRESSED IN HEART, SIGNAL = 0.84; EXPRESSED IN LUNG, SIGNAL =  18
ggtggcctgagcatagtttcttgcccatcaaaagactttaagttagcaactttatgtcataccacagtgggacaagaggcttcctttttgttccttgcttttaacctttgtggtaacttgcaaagataaacccttgagcacccaagatgcttgtttcttagtacatgtaattgggttaattctacatggacagacaacatattaagttgataaagtatataaacttagcttttaaaatgtcattaaagtttttaattacctctctgttattttagatcggccctcacacttgctgttattcgtgaacacaaagatatagtcattcttcttctgcagcaaatattgatatgttttctcgagatgtgtgtggaaagactgcagaagattatgcctctgaggctgggaattcagtgtaagtctttacataaaaaggctagtgaacactaaattgaagttt

SEQ ID NO: 2517 - DNA, 469 bp, Homo sapiens
  MAP TO AC007378.2; EXPRESSED IN PLACENTA, SIGNAL = 6.1; EXPRESSED IN HBL100, SIGNAL = 2.6; EXPRESSED IN HEART, SIGNAL = 2.3; EXPRESSED IN FETAL LIVER, SIGNAL = 1.5; EXPRESSED IN ADULT LIVER, SIGNAL = 1.8; EXPRESSED IN HELA, SIGNAL = 9.1; EXPRESSED IN BRAIN, SIGNAL = 1.5; EXPRESSED IN LUNG, SIGNAL = 3.3; EXPRESSED IN BONE MARROW, SIGNAL = 1.3; EXPRESSED IN BT474, SIGNAL = 1.3
aacaggtaccattccctgccggttgtggtagtgaccaccctgtgctagcctcagtggccacaagatgagagccctgagggtcctcctaaggaaatgaaagactagggaaacaaaagtttcaccaagttccagaagtcctaaagcatactgtgattatacaaagctatcccttgatctctcacgtctaataagatcgtgtgcgttgtcacatcagcgactccatcatgtgctgttcttttcactagaagacacaattccaaagaaggtggtgtgccacttcagtgggaaggcctatgccgacgaggagcggtgggaccttgacagctgcacccactgctactgcctgcagggccagaccctctgctcgaccgtcagctgcccccctctgccctgtgttgagcccatcaacgtggaaggaagttgctgcccaatgtgtccaggtatctaagccaccatccttccatttgtc

SEQ ID NO: 2518 - DNA, 356 bp, Homo sapiens
  MAP TO AC007250.2; EXPRESSED IN PLACENTA, SIGNAL = 0.97; EXPRESSED IN ADULT LIVER, SIGNAL = 1.3; EXPRESSED IN FETAL LIVER, SIGNAL = 0.98; EXPRESSED IN HEART, SIGNAL = 0.98; EXPRESSED IN HELA, SIGNAL =   1; EXPRESSED IN BRAIN, SIGNAL =   1; EXPRESSED IN LUNG, SIGNAL = 1.3; EXPRESSED IN BONE MARROW, SIGNAL = 0.95
tgaatgactgtctccattttgactaatatggattagttgtgagaggacaaaaatcacaattataggtagtttttaaggtcaagggaaaaataaaaaaaatgaccatattgttaattaataattgttaatttattgctgccactagattttaaaaattacatagagttgcctgatttttatattttatactcctcttcccactcacatcactcctatacctcttctttctctttttttttctcttcctcctcctcctcctcttctttctcttcttctttaaaaaaagtaatgatgaggttgttagatttgctagacatagtagtgatacagaagggcggcagggaagtgctgagtag

SEQ ID NO: 2519 - DNA, 327 bp, Homo sapiens
  MAP TO AC007308.13; EXPRESSED IN BONE MARROW, SIGNAL = 1.9; EXPRESSED IN BT474, SIGNAL = 1.2; EXPRESSED IN HBL100, SIGNAL = 4.2; EXPRESSED IN BRAIN, SIGNAL = 1.7; EXPRESSED IN LUNG, SIGNAL = 0.97; EXPRESSED IN ADULT LIVER, SIGNAL = 2.4; EXPRESSED IN FETAL LIVER, SIGNAL = 1.3; EXPRESSED IN PLACENTA, SIGNAL = 1.8; EXPRESSED IN HEART, SIGNAL = 2.7; EXPRESSED IN HELA, SIGNAL = 1.7
agcaagcaaggggaagagagaggatggaagtcaggtgggaagggggcttgcaggtcacagaaacaagcccaccttcgagtctgtaggggggctctgattcccccctggcttgcgccaaccgcatgtggagaaggggaagatgcctggggttggggagcaggaggccaggccagagggcagcagctgggatgctgggacttgtcagatcctggataaacctcaaaggtgaaggtgatgggatgtgctgagagtcatctgtgggatgtgcataagagggagtcaaagacgtctgagcagacagaaggacctcgctggcatctacagtga

SEQ ID NO: 2520 - DNA, 480 bp, Homo sapiens
  MAP TO AC007638.1; EXPRESSED IN PLACENTA, SIGNAL = 1.3; EXPRESSED IN HEART, SIGNAL = 1.2; EXPRESSED IN BRAIN, SIGNAL = 1.2; EXPRESSED IN BONE MARROW, SIGNAL = 0.93; EXPRESSED IN LUNG, SIGNAL = 0.9; EXPRESSED IN FETAL LIVER, SIGNAL = 1.1; EXPRESSED IN ADULT LIVER, SIGNAL = 1.2
  unsure 165
  unsure 279
ctagcagggatccagacacacaaacaactgttcatagagagtgatatttcttatgggtaccagaaatgcatgtctactttgttattttccataacttaaatctctataaatgtctccatccccactcctgaccaatcacttagtcaagccaattccaggctgccntcagtcaagccttcccctttgattcaggtctttctccctcccaaaacactcctccttaggactgcatctgaattctaaatgtcatgcactgaataggcattagaggtggggaangcatctgatacctgggtgtcacctggtaccattgtgctggcctctacctgatgctcaggtatggttacctggggtgcagcttacctgtctctctcctttgccatggtgctgatgccatcaatatctgcctgctggctgtctttgtctttaatggagatacagggaaaattggaattctttcacactgctttggagcctcag

SEQ ID NO: 2521 - DNA, 472 bp, Homo sapiens
  MAP TO AC009481.1; EXPRESSED IN HELA, SIGNAL = 2.4; EXPRESSED IN PLACENTA, SIGNAL = 1.6; EXPRESSED IN HEART, SIGNAL = 1.2; EXPRESSED IN BONE MARROW, SIGNAL = 1.4; EXPRESSED IN BRAIN, SIGNAL = 1.2; EXPRESSED IN ADULT LIVER, SIGNAL = 1.9; EXPRESSED IN FETAL LIVER, SIGNAL = 1.2
cagttctaatggccaaataagatgtcaaaactatgctctagatttatcttcaaatccaaagaaaaagccacataaacttttcaagtaaatataaaaaatatttaccaaatcctcaaatgtttaagttgaaatgatcaatatttaactatgtttgacttattaaagtgatgacatcctttgatggcccaatatttcctgtatagtacagttggtcattcagagacaaattccttagattccctctattccctctgtctgcttggatctccttcccctctgtcagcttgttcatttcggctggctcgcagtgcatgatctgcttacttccagagaggacctgaggaagctccactcctatagcaacagggctatgcagttcatttggcaactcatcatgtactgcctcgtgatcaatattctgttgccatgaactgttatgtaaatcttgaactggtttctgcatttttgtggg

SEQ ID NO: 2522 - DNA, 495 bp, Homo sapiens
  MAP TO AC008132.19; EXPRESSED IN LUNG, SIGNAL = 3.4; EXPRESSED IN BRAIN, SIGNAL = 0.96; EXPRESSED IN ADULT LIVER, SIGNAL = 1.4; EXPRESSED IN FETAL LIVER, SIGNAL = 0.97; EXPRESSED IN PLACENTA, SIGNAL = 1.2; EXPRESSED IN HEART, SIGNAL = 0.92
atgctgtgatcagccacctccatgcaccacaccaagcaagcccctgggtgattcacagtctccactaccagggcactgaccttaactctgtgttcttctagctccccatgaggacaccgtacacaacatcactaacgaggatgcctcacacgatatcactaacgaggacgctgtccacggcatcgctaacgaggccgccgcccagggcatcgccaacgaggacgccgcccagggcatcgccaacgaggacgccgcccacggaatcgccagcgaggacgccgcccagggcatcgccaacgaggtcgccgcccagggcatcgccaacgaggacgccgcccagggcatcgccaacgaggacgccgtccatggcatcgccaacgaggacgctgcccacggcattgctaacgaggatgccgtgcacggcatcgctaatgaggactccgtatacgacatcgctaatgaggatgccatatatgacatcgctaatgacaccgt

SEQ ID NO: 2523 - DNA, 486 bp, Homo sapiens
  MAP TO AC008280.2; EXPRESSED IN PLACENTA, SIGNAL = 1.3; EXPRESSED IN HBL100, SIGNAL = 2.3; EXPRESSED IN HEART, SIGNAL = 1.9; EXPRESSED IN ADULT LIVER, SIGNAL = 1.1; EXPRESSED IN HELA, SIGNAL = 3.2; EXPRESSED IN BRAIN, SIGNAL = 0.92; EXPRESSED IN LUNG, SIGNAL = 0.99; EXPRESSED IN BONE MARROW, SIGNAL = 2.1; EXPRESSED IN BT474, SIGNAL = 2.3
aggccaagccgtaaaggagataagatagaaataatcactccagtatcacagtagacaggccttgaaggtcctggggcccccacagtttaatcagacttagcaagcatttttttgcctccgaccttctaattgaaacaaaattagctaccaatagacttaggtgaatattagactggtcttgggctcataacctcaacctacataagcactaagaaaattgtaacactttgaattggtctggtggaattatctcgggccttctccctgtatctggttacagcaataaattcccttctttcctagtttgtctgcttctcattattggcgggcctcgagaaaacacagccggacccggcttggttctgggaacaaatctgtaagaaaggtgatattgtagacatcaagggagtgggcactgttcaaataggaatgccccccaagtgtcaccatggctaaactggaagagcctacaatgttccccagcat

SEQ ID NO: 2524 - DNA, 468 bp, Homo sapiens
  MAP TO AC009496.1; EXPRESSED IN ADULT LIVER, SIGNAL = 1.2; EXPRESSED IN BT474, SIGNAL = 3.7; EXPRESSED IN FETAL LIVER, SIGNAL = 1.9; EXPRESSED IN PLACENTA, SIGNAL = 1.8; EXPRESSED IN HELA, SIGNAL = 3.4; EXPRESSED IN HBL100, SIGNAL = 3.4; EXPRESSED IN HEART, SIGNAL = 2.4; EXPRESSED IN LUNG, SIGNAL = 5.4; EXPRESSED IN BONE MARROW, SIGNAL = 2.3; EXPRESSED IN BRAIN, SIGNAL = 1.6
agtgtcctttcagtgcccagtgcagtgtcctgtaggtggtctatttgctgaaaacacaaatagaaaaaagcagtgattcttgctcaatgataccctatccttcagacttgtaaatgagggtgtcccaggcagtgggggtggtgagtaaatcagagttttctgtgcatagcaaccactggagtctttatcaactgctactctatgtcctgggagaaacccattcccaagataatctgttgagcctgtcctggcccagtaatagcatgtggattttagaacaaaaccacaagagatgggtggaaggtcagaaaccttcagaacaagtacatgatgtggagctcagcatgggtgtccaagccttcctggtggaatatcttggaggatacatcttctactttgctcagggctggccaaaatgtcttaaaacccagccgggactaattgccttgttgttggtggtggtaaggg

SEQ ID NO: 2525 - DNA, 409 bp, Homo sapiens
  MAP TO AC009226.2; EXPRESSED IN BONE MARROW, SIGNAL = 1.3; EXPRESSED IN ADULT LIVER, SIGNAL =   2; EXPRESSED IN FETAL LIVER, SIGNAL = 1.9; EXPRESSED IN PLACENTA, SIGNAL = 1.7; EXPRESSED IN HBL100, SIGNAL = 0.95; EXPRESSED IN HELA, SIGNAL = 0.94; EXPRESSED IN HEART, SIGNAL = 1.2; EXPRESSED IN BRAIN, SIGNAL = 1.6
acccaaagttcatccaccactctccatgtttctgaacatgggattttgatatgctctcctcctacccactttctattaagaattcctaccctatcattgggaagtttcactgagcatgaggagctctgcagattcacttctcagtgaaactgataaaaattatttttgaaaacaataatttaaggtctctgcaaatagccttaccaaaatatagtaaatgaagaaacatttattcttgaaaatctactaaaactaaaaagtacaagtgttagtaatattcgaaccaagaccaacatacttccttccctctcccagctcaggaaggtggagatttcactccaaactgcagctgaaaacaaagggcttcttctccctcctgctaccagtctgagggctattttcctgggag

SEQ ID NO: 2526 - DNA, 491 bp, Homo sapiens
  MAP TO AC009308.3; EXPRESSED IN PLACENTA, SIGNAL =   2; EXPRESSED IN HBL100, SIGNAL = 1.6; EXPRESSED IN BONE MARROW, SIGNAL = 1.8; EXPRESSED IN HELA, SIGNAL = 1.4; EXPRESSED IN HEART, SIGNAL = 1.9; EXPRESSED IN BRAIN, SIGNAL =   2; EXPRESSED IN LUNG, SIGNAL = 1.7; EXPRESSED IN BT474, SIGNAL = 1.1; EXPRESSED IN ADULT LIVER, SIGNAL =   2; EXPRESSED IN FETAL LIVER, SIGNAL = 1.6
caattccaatccaacaccacatttgtaaccaccttatttaacaacaagaaatttggctccagttatccataatatatttcgctgttggatcaaccaacctggtatgtactctctctcctgtaggcatcactttctcctacccttgccccatgcagatgtggtcctgacctttctcctgctctaaaccccaactctgggctgccactgtcccccctttaccatgtgggcccccaccttactcagctcaggctccagtgctcctcatcaaaccacctcaggacccccaacctgttcatgttcctcctcaatggaggagccccgttcatcccatttaggctccaacacctgctgttggccatggccacaccctgccctccacacagacgctccagatgcttgccttgcttggcccatataatggcttttggattggagtgtctggaaaggcggaaaggcagtcaggaaaagcaggaaggcagaaaggcagtcag

SEQ ID NO: 2527 - DNA, 461 bp, Homo sapiens
  MAP TO AC010134.1; EXPRESSED IN BONE MARROW, SIGNAL = 5.5; EXPRESSED IN BRAIN, SIGNAL = 3.7; EXPRESSED IN BT474, SIGNAL = 2.5; EXPRESSED IN HBL100, SIGNAL = 3.1; EXPRESSED IN HEART, SIGNAL = 6.1; EXPRESSED IN LUNG, SIGNAL =  16; EXPRESSED IN ADULT LIVER, SIGNAL = 7.5; EXPRESSED IN FETAL LIVER, SIGNAL = 4.2; EXPRESSED IN PLACENTA, SIGNAL = 6.8; EXPRESSED IN HELA, SIGNAL = 4.7
ctcaaaagtccacagtccaaagtcttatctgagacaaggcacgtcccttctgcctatgagcctgtaaaatcaaaagcaagttagttactttctagatacaatgggggtgcaggtattgggtaaacacagccattccaaatgggagaaattggccaaaataaaggggctaccggtcccaggcaagtctgaaatccaacagggcagtcaaaccttaaggctccaaaatgatctcctttgactccatgtctcatatccaggtcatgctgatgcaagaggtgggcttccacagccttgggcagttgcgcccaagcttctgcacagcaaagcagacaatcaacagagtgaaaagacaaaatcagaagaaaatatttgcaaactacatattagacaaggggttaacgtcagaaacatacaaggaactcaaacaactcaactgcagaaaacaaataatccaatttaaa

SEQ ID NO: 2528 - DNA, 364 bp, Homo sapiens
  MAP TO AC009857.1; EXPRESSED IN BT474, SIGNAL = 2.6; EXPRESSED IN ADULT LIVER, SIGNAL = 6.2; EXPRESSED IN PLACENTA, SIGNAL = 6.4; EXPRESSED IN BONE MARROW, SIGNAL = 4.1; EXPRESSED IN FETAL LIVER, SIGNAL = 6.8; EXPRESSED IN HEART, SIGNAL = 4.1; EXPRESSED IN HELA, SIGNAL = 2.7; EXPRESSED IN HBL100, SIGNAL = 3.2; EXPRESSED IN BRAIN, SIGNAL = 4.5; EXPRESSED IN LUNG, SIGNAL = 2.2
  unsure 104
gcctcaagcattataagagttttctttctacccattctactttttaaaacatttctctgtatctgacaccaagaatttatactagctaaaagcattcacttttngttaaaagaagtagaaatttttccttcaacttctctatgtggattttggtcgagataggttggtggtctgggttttctcatcttcatgaaacagatggagcacagaggcacatgcaattcttgccttatcctatagcactgtgaaatgggagattccctgatccccctggcgggatgtgtgacaggagtatggctcgcctgttcagttgctgacactgctcaaagccctgatgggaggcggggcatgcagatggatagat

SEQ ID NO: 2529 - DNA, 458 bp, Homo sapiens
  MAP TO AC009813.2; EXPRESSED IN ADULT LIVER, SIGNAL = 1.6; EXPRESSED IN PLACENTA, SIGNAL = 0.94; EXPRESSED IN HEART, SIGNAL = 1.1
caaatactcaccttccctctggtcttttctctctcaattacttgtcttaatatctcttttgcccactaatttatgggactagggatggcagcatccttgttttttttgttcactggtgtatcccagtgcttaataactattacgtactcaatacatgcttgttggagagaaggagggagggaaggagggaaggatggatgggtgagtgaatgatcaggccatcctgggaagaagaagagcaaggtataagggtacagaacccatttccaccacagcagtaatggtcacccacctcgagccatgtccagttcggtgcatctccggtcagggttggtgtgaacacggcacttaaacacagccccaggagacttcactgaagggctgtatttggaatctgcctttggtgcgcccacaaggaccctgcagcaagagaaaaaggcattctgtcacaacctacg

SEQ ID NO: 2530 - DNA, 464 bp, Homo sapiens
  MAP TO AC009955.1; EXPRESSED IN PLACENTA, SIGNAL = 1.1; EXPRESSED IN HBL100, SIGNAL = 1.3; EXPRESSED IN HELA, SIGNAL = 1.4; EXPRESSED IN HEART, SIGNAL =   1; EXPRESSED IN BT474, SIGNAL = 1.4
gaagcattgaaatggacttgcttaaggtgatgtggctagtgtcagggctggatgagaactcaggtcatcttaggaaccaccacttcccttctggtagttttctgtgattccacagtgcccgctggctctgcatgaagagcacacagcatgagctaatgcgcttctaggtatcctactcctagtctgggccttctccagagccctctcttgtctctctctcccctctccacagagccccgcctccggttcacacggcccctgcaggacgtggagggccgtgagcacgggattgccgtgctggaatgtaaagtacccaactcccgcatccccacggcctggttccgtgaggaccagcggctgctgccctgccgcaagtacgagcagatcgaagagggcactgtccggcgcctcatcatccacaggctgaaggcagacgatgatggtatctacctgtgcgagatgcg

SEQ ID NO: 2531 - DNA, 491 bp, Homo sapiens
  MAP TO AC010968.1; EXPRESSED IN ADULT LIVER, SIGNAL = 1.3; EXPRESSED IN BT474, SIGNAL =   1; EXPRESSED IN FETAL LIVER, SIGNAL = 1.1; EXPRESSED IN HELA, SIGNAL = 1.1; EXPRESSED IN HEART, SIGNAL = 0.97; EXPRESSED IN LUNG, SIGNAL =  17
ggtttcagcttgtccatttttctatcttgatttggtttacaataactactttgtgtttaaactttaccatgtagtatttctacactgaatacattgctttatctcatttaattttataatagccctttaaattattgtttaattaagtagatttgttaaaaggtaagtttagtatagtacctgtcataatcattgcatattaaaatatctgaaagaggatctgaatttaattttttgttgttcttgtgttgaattttctgtgatttttttattttttattttttatttaggcacagcagctcttatcagcatgtttagaaaaggtagatatttctagtacagagggttatgatttgttcatcacacagctcaaagatggtttaaaaaatacatctcatgagactgcagcaaaccacaaagttgctaaggtaagaagttaatagattgcctcttttggggttatattacaatggacacctccattcttttgc

SEQ ID NO: 2532 - DNA, 473 bp, Homo sapiens
  MAP TO AC010985.1; EXPRESSED IN PLACENTA, SIGNAL = 1.1; EXPRESSED IN HEART, SIGNAL =   1; EXPRESSED IN LUNG, SIGNAL = 2.6; EXPRESSED IN FETAL LIVER, SIGNAL =   1; EXPRESSED IN ADULT LIVER, SIGNAL = 0.95
ggtttaattttccaagggggtatttgtgaataagtgatctgcagataggcccgtgtacttgctcttgtctgcaactgtgtgggtgcaaacaccactgtagttctggctcccagaagctacagatacttgatttcttctcctatacctttttagtacaatcacctacacggagttaggagtcatgtcatggaccaatacctttacttagctgagatgattataaggacacaccatacaactttaatctcacattatctcctagaaagtttaatgggaatgtaacctattctcactttagctattataattggaacagttgtcaggatcacagagcattggctaactattttgcaaatcagtgtggacttcttgcagaggagaatgcatgaaacttggagtcttaaaatgttgatggtaagcatgtgttgtcattgtctccctctaaatctcaggaaatgattgaaaccttcagg

SEQ ID NO: 2533 - DNA, 479 bp, Homo sapiens
  MAP TO AC011074.1; EXPRESSED IN HEART, SIGNAL = 0.91; EXPRESSED IN LUNG, SIGNAL = 1.9; EXPRESSED IN BRAIN, SIGNAL = 0.92; EXPRESSED IN ADULT LIVER, SIGNAL = 0.96; EXPRESSED IN FETAL LIVER, SIGNAL = 0.93; EXPRESSED IN PLACENTA, SIGNAL = 0.97; EXPRESSED IN HBL100, SIGNAL =   1
aagtcagagtgatcagagtattttaggtaagaaatatcagacaaaatttttgtctcccacaagtgcagtgaacaatataaggaaggagtggaatgaagacatagaaggaaatagaagaaatgaatgagattgggatgataaaagagaaagaagagccacacatatctgccataaagacttcacttcaggaactcaatgatttgccatgagatgcagacagttaaccgtcatgggagaggtttttttattttaaagtttaaaatatagaaagtcaaactttttttccatttacatagaaaagaatgcaatatttaggaatacatttaacaaagtaagtgcaaacttatactctggaaaccacaacaaaaaattgtttaaagaaatcacagaaggcctaagtggtaagaaagacatctcatgttcataaatcaaaaaactcatatatgtgttttgtgtttgtttgttttgcatccagcttc

SEQ ID NO: 2534 - DNA, 496 bp, Homo sapiens
  MAP TO AC011416.1; EXPRESSED IN PLACENTA, SIGNAL = 3.6; EXPRESSED IN HBL100, SIGNAL = 1.8; EXPRESSED IN HEART, SIGNAL = 3.9; EXPRESSED IN BONE MARROW, SIGNAL = 2.7; EXPRESSED IN HELA, SIGNAL = 2.4; EXPRESSED IN BRAIN, SIGNAL = 3.5; EXPRESSED IN LUNG, SIGNAL = 2.8; EXPRESSED IN BT474, SIGNAL =  35; EXPRESSED IN ADULT LIVER, SIGNAL = 3.6; EXPRESSED IN FETAL LIVER, SIGNAL = 2.8
ggtctccatttctctgtgccccacattcaggaaagtgctcccagatataaaatgtggtgcttgcctcatgttatttctgtctctctaagactctaatcctacactgccaattttccaatgcctaaaatggtcactttacatattttctttcattgtagtgtgagggtaaatccaacagcagttactccattatggcctgtaaataaagttgcatagataaatcaaattcatgagctttttattccttctgtcttacttcatagattctttaaatttttcttcttcttcttcttcttcttcttcttcttcttcttcttcttcttcttcttcttcttcttcttcttcttcttcttcttcttcttcttcttcttcttcttcttcttcttcttcttcttcttcttcttcttcttcttcttcttcttcttcttcttcttcttcttcttctctctctttctctcgctctctctcccccaccccccaaccacacacacacttt

SEQ ID NO: 2535 - DNA, 489 bp, Homo sapiens
  MAP TO AC011474.1; EXPRESSED IN PLACENTA, SIGNAL = 4.9; EXPRESSED IN HELA, SIGNAL = 5.1; EXPRESSED IN HEART, SIGNAL = 4.6; EXPRESSED IN BONE MARROW, SIGNAL =   4; EXPRESSED IN BT474, SIGNAL = 4.1; EXPRESSED IN HBL100, SIGNAL = 3.1; EXPRESSED IN BRAIN, SIGNAL = 4.6; EXPRESSED IN LUNG, SIGNAL = 9.2; EXPRESSED IN ADULT LIVER, SIGNAL = 5.7; EXPRESSED IN FETAL LIVER, SIGNAL = 4.1
gccacgttgatctctgtgtgaaataggacggactcagtacctgcagctagacaacgctggagaaactccaaaggactgagtgccgcccaggcttcaggagagtaagacaacagacactatgcacttttctaatgtggccggcactctgtgcttgcaatcacatatgtgccacagacaggatttctatcaaacaaacaagaagaacagatggatgccaagcccgttgtcactttcctggtgcgtttaacaggagccaggggagaagtccagtttggggcgtcttgggaagtttccacatcatccatgaaattctgtggtggacttgtcacccacaccatgggtgggtttgatggcttggtggtcggcagtgcaatgaccacaaccatgttggcttttattactcacaacaccggggatcgttcccagagcagtgcttttctaaacactggagaaagcagggcttgcattgggctggggagctgagtcatt

SEQ ID NO: 2536 - DNA, 448 bp, Homo sapiens
  MAP TO AC011199.1; EXPRESSED IN LUNG, SIGNAL = 1.5; EXPRESSED IN BRAIN, SIGNAL = 1.3; EXPRESSED IN BT474, SIGNAL =   1; EXPRESSED IN PLACENTA, SIGNAL = 0.96; EXPRESSED IN BONE MARROW, SIGNAL = 0.99; EXPRESSED IN ADULT LIVER, SIGNAL = 0.98; EXPRESSED IN FETAL LIVER, SIGNAL =   1; EXPRESSED IN HEART, SIGNAL = 0.93
ctctgacttcccgtgtcaccactttattgtcactgttccctcccttgtcctccctgcttatggtgtcagggccttgtgcactttgttgtcaccctgcctgcggcctggcatggaacagatgccccctgtgccgggtcgtgagtgtggagcactgtggtcatctcagctcatccccacatgcccctgtggggtcaaactgtgagcctaggcccacagggagccgctgacagtggacgtaggggcaagatggaatcactgttgcattctaggaggcccactttggccactgggtggagaggacattgggagctagcatggatgtggggagactgctgactattgcagaagcctgaaaagaggtgatgcctatggttggtgttcacggactcatcctccaactctgagggttttgcctgattatcctccctacacaggaggagaagggctc

SEQ ID NO: 2537 - DNA, 482 bp, Homo sapiens
  MAP TO AL009050.9; EXPRESSED IN BT474, SIGNAL = 2.2; EXPRESSED IN FETAL LIVER, SIGNAL = 1.8; EXPRESSED IN HBL100, SIGNAL = 2.4; EXPRESSED IN HELA, SIGNAL = 1.7; EXPRESSED IN HEART, SIGNAL = 2.4; EXPRESSED IN ADULT LIVER, SIGNAL = 1.6; EXPRESSED IN PLACENTA, SIGNAL = 2.2; EXPRESSED IN BRAIN, SIGNAL = 3.2; EXPRESSED IN LUNG, SIGNAL =  15; EXPRESSED IN BONE MARROW, SIGNAL = 1.9
tgccactgcatgtgtagaccaatttgagcttctcattcatctgttgatggacacatgagttgcttctaccttttagctattgtgagtaatgctgctatgaacatgtgaacatggctgaacacatacatctttgagactctgttttcaaatcttttggatatatacccagaattgaaatttctgaatcatatggtaattctatttttaattgtttgaggaaccactgtatggtttttccatagcagctgcacaattttacattcctaccaacagtgcaaatgggttccagtttctccacattttctccaacatttgttattctcctcctcctcctccctcctcctcctcctcctgctcctcctcctcctcctcctcctcctctgctgactgatcagggtgatggttgctgaaggttggagtgagtgtggcaattcctgaaaacaatgaaatttgctacatgaattgactcttcctttcatgga

SEQ ID NO: 2538 - DNA, 485 bp, Homo sapiens
  MAP TO AL035665.22; EXPRESSED IN BONE MARROW, SIGNAL = 2.2; EXPRESSED IN LUNG, SIGNAL = 0.89; EXPRESSED IN ADULT LIVER, SIGNAL = 6.7; EXPRESSED IN BT474, SIGNAL =   1; EXPRESSED IN FETAL LIVER, SIGNAL =  10; EXPRESSED IN PLACENTA, SIGNAL =  15; EXPRESSED IN HBL100, SIGNAL = 1.9; EXPRESSED IN HELA, SIGNAL = 4.6; EXPRESSED IN HEART, SIGNAL =   3; EXPRESSED IN BRAIN, SIGNAL = 2.4
agggcaggaaggataagctcaacacatagcaagtgcttaataagtatcaattgaatgaatgaatgacttaattttggaggatgattccaggaagaggaaatagtgtatgctgaggcatggggccaagaaacaaccctaggtgtactggtgatgggagggtggagcacagagaaaatacacacacacaaacacacacacactcacacacagtacacacatgcacacacacgcacacacaaatgcacgcgtgaatgcacacacacacacacatgcatgcaagcatgctggggaatgtggcagcacagaggttaacacagcagaacgagtgtttggccagggaaggcatctctgaggaggtgacactggacagtatcctgcaaacctgcaggcattttgcaggagaagatggaggaacagcattccaggtggatggaccggcagaggcaaaggcctgtaggcctgacggaaggaagtgtgggtgcttg

SEQ ID NO: 2539 - DNA, 475 bp, Homo sapiens
  MAP TO AF165424.1; EXPRESSED IN HEART, SIGNAL = 2.7; EXPRESSED IN BRAIN, SIGNAL = 1.1; EXPRESSED IN BONE MARROW, SIGNAL = 1.8; EXPRESSED IN LUNG, SIGNAL = 2.2; EXPRESSED IN ADULT LIVER, SIGNAL = 2.8; EXPRESSED IN FETAL LIVER, SIGNAL = 1.9; EXPRESSED IN HELA, SIGNAL = 1.9; EXPRESSED IN PLACENTA, SIGNAL = 2.4; EXPRESSED IN HBL100, SIGNAL = 1.5
caaggaggctttcaatgagctcctgctgatccttagctcgaggttcagacaactccttcagggttcttagtcttctctgaggccccatgttgcttgtcaaattatgatcaacaaaaacaatcaaactctgtaaaatattttaagagatttattctgagccaaatatgaatgaccagtggcccatggcacacccctcagaagatcctgagaacatgtgtccaatgtggtctgggcactacattttagggagacatgagacatcaatcaaacacatataagatattcattggttctgtccagaaaagtggaacaactcaaagcaaggggtatgggagttgctttcaggtcacaggtagatttcaaatttttctgattagcaattggttgaaagatttatcgatagaaagaaatgtttggattatgataaggggttgtggagaccaaagttttatcatgcagatgaagcctccaggta

SEQ ID NO: 2540 - DNA, 485 bp, Homo sapiens
  MAP TO AL121587.4; EXPRESSED IN HBL100, SIGNAL = 0.91; EXPRESSED IN HEART, SIGNAL =   1; EXPRESSED IN BRAIN, SIGNAL = 2.2; EXPRESSED IN BONE MARROW, SIGNAL =   1; EXPRESSED IN LUNG, SIGNAL = 1.2; EXPRESSED IN ADULT LIVER, SIGNAL = 1.3
gtacgcagagctccagaaggaagcagtgtgctgatattagatttctctccatgcccacccaccgtgtcccacagactcccatgctaccaggtaatcccagcatgggattaccaactccaagcaaccaggtaaacccagaccctgcccatgagcagagagttcttatcaaagcatcaacattcttttgcttccctctcaaccccctccctgctgtcatcagcaggaactgcagcaggcgatagggactcaccgtgggcagctggcccgacagcaggtggctgtcctgtgctagcatgttggacaccatgatggctgggaggtccatggcctgataggagtaggcagggagcagaccgttgggggtgaggccgtggcacagcgagtggtagctggcttcgtggtcccccaggtgcaggagggatggctccgggaggttgggaggtgttatcggggggatctcatagtcttcgttgttctcgctctgg

SEQ ID NO: 2541 - DNA, 484 bp, Homo sapiens
  MAP TO AL049553.14; EXPRESSED IN FETAL LIVER, SIGNAL = 0.9; EXPRESSED IN HBL100, SIGNAL = 0.99; EXPRESSED IN HEART, SIGNAL = 1.1; EXPRESSED IN LUNG, SIGNAL = 1.1; EXPRESSED IN ADULT LIVER, SIGNAL = 1.4; EXPRESSED IN PLACENTA, SIGNAL = 1.1; EXPRESSED IN BRAIN, SIGNAL = 0.97; EXPRESSED IN BONE MARROW, SIGNAL = 0.97
tttgaggtgagatgtctgcctcaagggagggtgttccaggtggtggggacaatttaagcaaaggtctggagggaggccaggcagagcgtgttcaccccacctagattaaaatgctgtaggagggagttttccccacttgttaccttcctgatcataccagcaaaagtgaactgctctccggaggaaaaaagtgatattgcaaaagctgggctgtcagggaggggctgctgttagaacaccaggtactgagagataaggatgcctctcctcttccttgcttctcctcccagcctccccctcatcaccattccttctcaaggaaaggcccgacctgcaggaaaaatggctgcagtgtgtgaaaggggcagccaagaggccaccattgacccaccctcaacaccatcaccattggcaccaccagcatatgccacggtatataaccacggcaacctggcgacgacagtcatcctgtcatcactccctg

SEQ ID NO: 2542 - DNA, 483 bp, Homo sapiens
  MAP TO AL121763.1; EXPRESSED IN ADULT LIVER, SIGNAL = 2.7; EXPRESSED IN BT474, SIGNAL = 1.8; EXPRESSED IN FETAL LIVER, SIGNAL = 1.6; EXPRESSED IN HELA, SIGNAL = 2.1; EXPRESSED IN PLACENTA, SIGNAL = 2.8; EXPRESSED IN HBL100, SIGNAL = 1.8; EXPRESSED IN HEART, SIGNAL = 3.5; EXPRESSED IN BONE MARROW, SIGNAL = 2.2; EXPRESSED IN LUNG, SIGNAL = 1.7; EXPRESSED IN BRAIN, SIGNAL = 4.8
atcagagggaggtttcccccatgctgttctcatgatagtgagtgaattctcatgagatgtgatggttttaaaagtggcagttttttcttgcacagtcacactccctcatgctgccctggtaagaaggtgcctgcttccccctcgccttctgccatgattgtaagtttcctgaggcctccaagccatgcttcctgttaagcctgtggaacttgagtcaattaaacctctttcctttgtaactacctagcctcagggaagttctttacagcagtgtgaaaatgagctaatacactaaccaatcatgaaaggcaagaatcgttatggagaaaagcctaaaaattaccaaccttggccatgaaagcgtaaaaacaaggatgacaatgtcaaagacagaggtgattgggagaaggggagatcaacaatgtcttcctcaccttacccagaagaccctgatggttcctagaacaagaagcagaggctgaa

SEQ ID NO: 2543 - DNA, 473 bp, Homo sapiens
  MAP TO AL080246.13; EXPRESSED IN BT474, SIGNAL = 1.4; EXPRESSED IN PLACENTA, SIGNAL = 1.6; EXPRESSED IN HBL100, SIGNAL = 1.4; EXPRESSED IN HEART, SIGNAL = 2.4; EXPRESSED IN ADULT LIVER, SIGNAL = 1.9; EXPRESSED IN FETAL LIVER, SIGNAL = 1.3; EXPRESSED IN HELA, SIGNAL = 1.7; EXPRESSED IN BRAIN, SIGNAL =   2; EXPRESSED IN LUNG, SIGNAL = 0.89; EXPRESSED IN BONE MARROW, SIGNAL = 2.5
tgctgtggttggaatgtttgtatcaccctagaatttgtacgttgaaatcttaacacccaaggtgatggtgttaggaggtgggtcctttgggaggtgattaggtcatgagggtcgatcccttgtgaatggaactagtgcccttataaaagcagccccagagggcttccttgcctgttccaccaggtgaggacacagtgagaagtcagtctaggaacccggaagtgggccctcacctgactctcaacctgcccaggtgccttgattttggatttccagcctccagaactgtgagcagtgaattcctgtggctcataagccactcactctgtggtgttttgttccagcacctcccatagaccaaggcatactccatcctgtgctcctgccagcgcttcccaagcgtcactctggccacacgcccctggagcgggggcctggtaacgtgcaggtctggattcagtgtgggttgctga

SEQ ID NO: 2544 - DNA, 467 bp, Homo sapiens
  MAP TO AL035455.28; EXPRESSED IN BT474, SIGNAL = 1.1; EXPRESSED IN FETAL LIVER, SIGNAL = 1.3; EXPRESSED IN ADULT LIVER, SIGNAL = 1.4; EXPRESSED IN PLACENTA, SIGNAL = 1.6; EXPRESSED IN HEART, SIGNAL = 1.4; EXPRESSED IN BONE MARROW, SIGNAL = 1.1; EXPRESSED IN HELA, SIGNAL = 1.1; EXPRESSED IN HBL100, SIGNAL = 1.1; EXPRESSED IN BRAIN, SIGNAL = 1.2; EXPRESSED IN LUNG, SIGNAL =  12
ctaagatgggatcctcctgcccgcaaattacatgaaaagttttgattgtgtgcatctgcacattctctcaagagtaagccatggctctccttcatccaattagtaaagcactgcctgactttacaaaggtcagaagcacaaatttagattttcagaggagtccatcaggatatatttacatgccaacaaatcaattcaaccaacagattgagaattcaaataagcctccacaaggacaaacctctggtttttcagcaaatttctctttttattcttgtgtatgcttctgtttcaaatgatcatagcaaacactgaaaagatgaccaaatccagggttgtatccttctttggggtactcggaaaagaaaacaagaagaagaagagaatgtagtctatgtagtctactcagaaatactaaaacaaaaacctataggagcttacattctagcagtgaaagccaagcaata

SEQ ID NO: 2545 - DNA, 467 bp, Homo sapiens
  MAP TO AL109759.1; EXPRESSED IN LUNG, SIGNAL = 1.1; EXPRESSED IN BRAIN, SIGNAL = 1.2; EXPRESSED IN ADULT LIVER, SIGNAL = 1.4; EXPRESSED IN HELA, SIGNAL = 0.99; EXPRESSED IN HEART, SIGNAL =   1
caaagaaacttcggactgaatctgaactacagactaaatggatctactagacagttacggaacatttcgtccaacggccgcagaatgcacattcttttcctcagcacaaggatcattctcatgggtagatcatatgttaggtcacaaaacaagtcttaaaacattaaaaaaactgaaataatatcaaacatcttctctaaccacaatagaagaaaactagaaattaataacaggaggaattctggaaactacacaaacacaccaaaattaaacaatatgctcctgaatgaccagggggtcgatgaagaaattaagaagaaaactgaaaaacttcttgaaacaaatgataatggaaacacaacattgactacaggatacagcaaaagtagtactaagagggaagtttatagcggtaagagcctacagcaaaaaagaagaaaaactcaaacaaacaacctaacaatgca

SEQ ID NO: 2546 - DNA, 462 bp, Homo sapiens
  MAP TO Z98044.10; EXPRESSED IN HBL100, SIGNAL = 1.4; EXPRESSED IN HELA, SIGNAL = 1.2; EXPRESSED IN HEART, SIGNAL =   2; EXPRESSED IN LUNG, SIGNAL = 0.89; EXPRESSED IN BT474, SIGNAL = 2.2; EXPRESSED IN PLACENTA, SIGNAL = 1.8; EXPRESSED IN BRAIN, SIGNAL = 1.5; EXPRESSED IN BONE MARROW, SIGNAL =   2; EXPRESSED IN ADULT LIVER, SIGNAL =   2; EXPRESSED IN FETAL LIVER, SIGNAL = 1.4
ttttgaagtcagcatggcaggatgctaaggatggagactcacctgtgcagcaggctgaaccgtaacccatcccagcctctgactcccaaccctggaagctgcgaggaccagctgtttgtctctggactttttagtttgccctcatccatgggatggaggtatctgtgacctctccacccgggagagggagagaacagacctggcctgcccagacacacttttctcttctggtgtctcccttcccagcctggatgacaaacgagtgtccttcctgcctggaattagccaagggagaggcctgctggttgagggctgcagagcaaatgccactgttggcccccagcactctgtccctgcccactggtctctggttccctacggggaggtcaagggagacaggaacttcacaaatgggtcccggggaagagcagatgactccagtggggcttgtgaaaggaacta

SEQ ID NO: 2547 - DNA, 467 bp, Homo sapiens
  MAP TO Z97985.4; EXPRESSED IN BT474, SIGNAL =   2; EXPRESSED IN FETAL LIVER, SIGNAL = 2.4; EXPRESSED IN HBL100, SIGNAL =   3; EXPRESSED IN HELA, SIGNAL = 2.8; EXPRESSED IN HEART, SIGNAL = 4.2; EXPRESSED IN ADULT LIVER, SIGNAL = 3.1; EXPRESSED IN PLACENTA, SIGNAL =   4; EXPRESSED IN BRAIN, SIGNAL = 2.2; EXPRESSED IN LUNG, SIGNAL =   3; EXPRESSED IN BONE MARROW, SIGNAL = 2.9
ctactgcactccagcctgtgcaacagagtgagaccctgtctctaaagcaaaaaccaaaccaaaccaaaactaaactaaaatggatggttccatttatatgacagtcttgaaatgacaacactgtcattagagaacagattattggttgtcagaagttagaggtgaggggagtggataggagggttagactggagataaaggcatgcagtatgaactcttttttaagaaagcagattttatggaatatagacatgtgaccctcttccgcccttttggacctctcatgaaagtgaagagcaagatgattgacatcattagatcaattattattaatatcattatgccacttgctgaaagaactgaagcacttgtacagtttatgcagaacttcagggaggtttgtattcatcaagacaagattcatctcacagtagtgtattttggtaacgaaggactgtctaaagtca

SEQ ID NO: 2548 - DNA, 384 bp, Homo sapiens
  MAP TO AF165926.1; EXPRESSED IN PLACENTA, SIGNAL =  10; EXPRESSED IN HBL100, SIGNAL =   6; EXPRESSED IN HEART, SIGNAL =  11; EXPRESSED IN BRAIN, SIGNAL = 8.7; EXPRESSED IN BONE MARROW, SIGNAL = 7.7; EXPRESSED IN LUNG, SIGNAL = 6.3; EXPRESSED IN BT474, SIGNAL =   5; EXPRESSED IN ADULT LIVER, SIGNAL =  11; EXPRESSED IN FETAL LIVER, SIGNAL = 9.1; EXPRESSED IN HELA, SIGNAL =   9
tacttgggaggttgaggtgggaggattgagctcaggatttcaaggctgtcgtgcactgtagttgctcctatgaatagccactatttctagtctgggcaacatagcaaaaaaaaccccccgccccaaaaaattgcaattggatttcagaagatatccccctagaaactattcagttatgaataagacctaccttttagtatcaagagctaaaaatccaaatttccgatctttttttttcttcccagattttattgtacagtttttagaacagcaggtttgtactttgaactgggatgtgggcttcgtaatacagacaatgaatgaaattggagtaccattacctagactactagaagtttatgatcagttgttcaaatcacgggt

SEQ ID NO: 2549 - DNA, 448 bp, Homo sapiens
  MAP TO AL035106.25; EXPRESSED IN BONE MARROW, SIGNAL = 2.3; EXPRESSED IN BRAIN, SIGNAL = 1.9; EXPRESSED IN ADULT LIVER, SIGNAL = 2.4; EXPRESSED IN BT474, SIGNAL = 3.9; EXPRESSED IN FETAL LIVER, SIGNAL = 2.3; EXPRESSED IN PLACENTA, SIGNAL = 1.7; EXPRESSED IN HELA, SIGNAL = 1.5; EXPRESSED IN HBL100, SIGNAL = 2.2; EXPRESSED IN HEART, SIGNAL =   2; EXPRESSED IN LUNG, SIGNAL =   4
gtctccccatgagtcactgctgtgtttgtgcctagatgcaaggtcttaaaatgaagccccctgtcattgagtggttgagaggggtctttgtttgcagaaggtcttccttgcccactggaaaaggataagaagtgagcgtttgaagggctggaagtccagctccccatcctgatccaggcgagggccctgcctgtgctggggcggaagggcttggcaatggggagtgttgaaggtcacgcggctgagtctctgctgcacctttgcctcctgcccccaccagcggattaccatagcaacggctataccgtcaccaacggctggaagatccacaacacggccaagaataagtggtttgtctgcatggccaagacggcagaggagaagcagaagtggctggatgccatcatccgcgagcgggagcagcgcgagagtgagcagcagctttggg

SEQ ID NO: 2550 - DNA, 381 bp, Homo sapiens
  MAP TO AL024507.7; EXPRESSED IN BONE MARROW, SIGNAL = 0.98; EXPRESSED IN BT474, SIGNAL = 2.4; EXPRESSED IN ADULT LIVER, SIGNAL = 2.6; EXPRESSED IN HELA, SIGNAL = 5.5; EXPRESSED IN PLACENTA, SIGNAL = 1.8; EXPRESSED IN HBL100, SIGNAL = 1.5; EXPRESSED IN HEART, SIGNAL = 1.4; EXPRESSED IN LUNG, SIGNAL = 3.9
agaggaacagccagcagaagatggggtaaaaacttgggtttccgaacctatttttcctagtgaaagaaatattttatttacttttccaattgacttatattgctctgggagagtaattcagtttagctatttccacctaaaaattactacaaccttcaattgaatctgttgctataacttaagagtgtgacgtgttatgattcacagcagggtgaaactaacaagaacaggacaaaaggaggatggcaacagaagagtaaaggacccaagaaaactgctaaatcaaaaaaaaagaaacctttaaaaaaaaaacctacacctgtgctattaccacagtcaaagcaacagaaacaaaagcaggcaaatggagtcgttgggaat

SEQ ID NO: 2551 - DNA, 500 bp, Homo sapiens
  MAP TO AC009955.1; EXPRESSED IN FETAL LIVER, SIGNAL = 1.1; EXPRESSED IN ADULT LIVER, SIGNAL = 2.4; EXPRESSED IN PLACENTA, SIGNAL = 2.3; EXPRESSED IN HELA, SIGNAL = 2.4; EXPRESSED IN BONE MARROW, SIGNAL = 1.2; EXPRESSED IN BT474, SIGNAL = 1.7; EXPRESSED IN HEART, SIGNAL = 1.7; EXPRESSED IN HBL100, SIGNAL = 1.7; EXPRESSED IN BRAIN, SIGNAL = 1.3; EXPRESSED IN LUNG, SIGNAL = 2.6
atacttcccaaatgcctcccacctgccatgcactctaggtacagcctctcacttaatcctgagaggtgggcattagcccattttacagatggggagacagaagcataaggaagtttagtaactggcctattgctgcaaagcaactgagtagcaggactaggattcaaacccaggtccgcctggcctgcaaacccatgctgtgccttgctttttctcaaagtcatcctgccggttcccccaccctcgttacctgtggctgggaaaaggatggcttgggagacatcctcctcttcctcgggctcagagcccctgtgtgtgaagccccccagggcatgtcttcggggcagccgcctgactccagggtccccaccttccctggtcaccgcggggggccccaaggcatccaagaacagggccctcaccttggccagaacaagttcccgggccagctccagcccctggcagctgtgcccacctgtggggtcagcagcaagaagagc

SEQ ID NO: 2552 - DNA, 497 bp, Homo sapiens
  MAP TO AC009963.2; EXPRESSED IN LUNG, SIGNAL = 3.3; EXPRESSED IN BRAIN, SIGNAL = 1.5; EXPRESSED IN BT474, SIGNAL = 3.1; EXPRESSED IN ADULT LIVER, SIGNAL = 3.5; EXPRESSED IN HEART, SIGNAL = 2.2; EXPRESSED IN PLACENTA, SIGNAL = 4.6; EXPRESSED IN BONE MARROW, SIGNAL = 1.4; EXPRESSED IN HELA, SIGNAL = 6.2; EXPRESSED IN HBL100, SIGNAL = 2.8
ttccactgccttacctcagcatcaaatctaaatagttttaccccctgtgaatacagaactttttcaccttcttctcctattacaagttctactttttcaggcatttgaactactggttcaaaatggatgtcatcgctgtcctcagtcttataggcatcatcatctttctcaaagtcaccggaagtgtttgctttattggccattttaccgcattgtgatgagaataatttttctccagcacctgaaaatcccttgaaattggggtcttttttgccaaactgaaatccttctcctgaagttgattttgcaacatctgcaaatgtaaaagtgctacttgtttggccaaaaatcacaccacggccattcttctggccactaatatcctgagcctggaagccagtatcattttcaagaggcttttcactttccttttcttgatttcctggttccgaaatgccaaatttaaatccatcagcagacacagggatggaaaatcc

SEQ ID NO: 2553 - DNA, 474 bp, Homo sapiens
  MAP TO AL035106.25; EXPRESSED IN PLACENTA, SIGNAL = 2.2; EXPRESSED IN HBL100, SIGNAL = 1.5; EXPRESSED IN HELA, SIGNAL = 1.8; EXPRESSED IN BRAIN, SIGNAL = 2.1; EXPRESSED IN BT474, SIGNAL = 3.6; EXPRESSED IN HEART, SIGNAL = 2.4; EXPRESSED IN LUNG, SIGNAL =  16; EXPRESSED IN BONE MARROW, SIGNAL = 2.1; EXPRESSED IN ADULT LIVER, SIGNAL =   2; EXPRESSED IN FETAL LIVER, SIGNAL = 1.8
gtggatgatatctgctggggtaccagccatcatgtctgcattgcaggcaggaaaagatcacagtagttaaaagcatgttagcaccagactggaacagtcttcttgaagtaactgaatgaattaagagtatttagaagggacatttttctccttcattgggatccttgaaatgggtttgtattgttccgcccaaaggcccagtggatgctgggggctgttttccagtgagctctctcttcctccactgcaggccacctgaaccccatgtcgtacacccagcactgcatcaccaccatggctgctccctcctggaagtgcttgcctgctgcagagggtgatccccaaggccagggtctccatgatggcagcttcgggccagccagtgggacccttggtcaggaagaccggggcctcagcttcctactcaagcaggaggaccgtgagatccaggatgcctacctgcagctcttcacc

SEQ ID NO: 2554 - DNA, 473 bp, Homo sapiens
  MAP TO AL033529.13; EXPRESSED IN HBL100, SIGNAL = 1.9; EXPRESSED IN HELA, SIGNAL = 3.3; EXPRESSED IN BRAIN, SIGNAL = 2.5; EXPRESSED IN LUNG, SIGNAL = 1.8; EXPRESSED IN BT474, SIGNAL = 1.8; EXPRESSED IN HEART, SIGNAL = 3.8; EXPRESSED IN PLACENTA, SIGNAL = 2.3; EXPRESSED IN BONE MARROW, SIGNAL = 2.4; EXPRESSED IN ADULT LIVER, SIGNAL = 3.2; EXPRESSED IN FETAL LIVER, SIGNAL = 3.1
tgcagcaacacattttagggcaacaaagttcagaatggatacaatggcctgttcagaaagcatgcaagttatatcagatcatttctttaaagtcagtgtgataaatttgttaactagactccgaccatagaaagagagagatacaggaagtcaatgtaaattgcagacatgccagctctgttggttcacattacagctacctaatgttgggcttaatttctttttcttcttcttcttcactatcatcaacctgttggatgaccagatcaccagacccatcttctacaatctccacataggatctattctcatcttcactcaagtgccatctggaatccttatctccatctgatggggacataagatgttgttcagcttccaagtcaatggggaggctgtctatgccaaattctgcaagacactcattacacagtctgtagcgcctggttccctcctgtaccacttgccctgtt

SEQ ID NO: 2555 - DNA, 471 bp, Homo sapiens
  MAP TO AL096817.12; EXPRESSED IN BT474, SIGNAL =  11; EXPRESSED IN HEART, SIGNAL = 2.5; EXPRESSED IN LUNG, SIGNAL =  17
gaaaaaggtgatctcaggttcctaaagttgccgttagaagttagactagtggcctcaccctagcccacagcagggaagtacataggaagcctccctgctctgaaaatgtgttttgtttgataacagctaatgcaatccaaaagctcatccgtatcagcctgtctcaggctggtggctcatctcaacaattgctcattcatctgcgtttaaagatgaaattattttgtttttagtggccaatccatctaaattataaatccatattatcttttgtagcaaagccgtggaggaaattgtgaatactggtgtcacagttattaaggatgagaagaccagtgtggcccgactgatgagggaaaaagaacatgaaatgagcatcctctatggcatagctcagaggcagaggcaagaagaggtacaggaagtgcttcaagaagcagagaaaacacatcaggccactcttggcaatat

SEQ ID NO: 2556 - DNA, 473 bp, Homo sapiens
  MAP TO AL121588.6; EXPRESSED IN HELA, SIGNAL = 2.1; EXPRESSED IN HEART, SIGNAL = 1.8; EXPRESSED IN PLACENTA, SIGNAL = 2.2; EXPRESSED IN HBL100, SIGNAL = 1.7; EXPRESSED IN BRAIN, SIGNAL = 1.7; EXPRESSED IN BONE MARROW, SIGNAL = 1.4; EXPRESSED IN LUNG, SIGNAL = 2.7; EXPRESSED IN ADULT LIVER, SIGNAL = 3.6; EXPRESSED IN BT474, SIGNAL =   1; EXPRESSED IN FETAL LIVER, SIGNAL = 1.3
ttatgcaaatttctgtagccggtttgaatttctcctcaaaaaatgggtttttcttttctactacattgtcaggctgcaaattttctgaatttttatgctgtttccattttaaaatggaatgcttttaacagtacccaagtcaacttttgaatgctttgctgcttagaaatttcttccgccagataccctaaatcatctctctcaagttcgaagttccacaaatctctagggcaggggcaaaatgctgccagtctctttgctaaaacataacaagagtcacctttgctccagttcccaacaagttcctcatctccatctgagaccccctcagcctggaccttaatgttcatatcactatcagcatttttgtcaaagccattcaacaagtctctaggaggttccaaactttcccacattttcctgtcgtcttctgagccctccaaactattccaacctctgcctgttacccagtt

SEQ ID NO: 2557 - DNA, 473 bp, Homo sapiens
  MAP TO AC009963.2; EXPRESSED IN LUNG, SIGNAL = 4.6; EXPRESSED IN ADULT LIVER, SIGNAL = 1.7; EXPRESSED IN BT474, SIGNAL = 1.4; EXPRESSED IN HELA, SIGNAL = 1.2; EXPRESSED IN PLACENTA, SIGNAL = 1.9; EXPRESSED IN HEART, SIGNAL = 1.2; EXPRESSED IN HBL100, SIGNAL =   1
ccaaccacgtttgtgaaactacattgatttttacatcaaccttataaatgaaaacaccaaaaatatacacatttatcatagttatctccccaattttcccattataaattcaactgatcctggtaaaaatttcgttttataactgttctacctaaataaaagaaatttaagtcctgcggggcactgctgctttagtacaaaaagatgtatgctaattgcctacatagaaatgtaaagacccaatagcttttatctaccttaagggtctgtacaacacacgaattccactctaaacttgaacgcaaagctatgttcctctctgcctcatggcagcgggccacagcatccttcaatcttttagttgagcgatacaactccactagccggatgttcacatggacgtcatcaggtcttacataaagttctgactgaatcaagtcaaaaagtttattccatccatcttcaccttcaca

SEQ ID NO: 2558 - DNA, 483 bp, Homo sapiens
  MAP TO AC009506.2; EXPRESSED IN BRAIN, SIGNAL = 0.94; EXPRESSED IN BONE MARROW, SIGNAL =   3; EXPRESSED IN LUNG, SIGNAL =   4; EXPRESSED IN ADULT LIVER, SIGNAL =   2; EXPRESSED IN BT474, SIGNAL = 7.7; EXPRESSED IN HELA, SIGNAL =  12; EXPRESSED IN PLACENTA, SIGNAL = 2.2; EXPRESSED IN HEART, SIGNAL = 1.1; EXPRESSED IN HBL100, SIGNAL =   4
tgctgtctgatattcattttctgcattctctatgattttaataaactccttggcagtttgtgcgtcattcgaaacagttagcgaatcctgtacatctttatgactaaccaactgaacactgccatcttcgtaatagtgaacctgaatcttaagcactccaaccacctgggctgtaggtggtgtgatggtaaacttccactctgatctccaacgaccattccagaagtttttaggctgacactcatggctttcaatacatgcaataatagtctgttgcccatcgatagtttttagcataaacagtacagaagccgttggaataatggtctttcacataggctcttaaagcactgtcacaggattctctccaagacttcagacctccatctacttgttttggctgggggtcacttgcttttttctataagtgatcaaatgtaaaggaaattttgtttcttggatctaaaactctgctattaccca

SEQ ID NO: 2559 - DNA, 472 bp, Homo sapiens
  MAP TO AL034548.24; EXPRESSED IN PLACENTA, SIGNAL =   2; EXPRESSED IN HBL100, SIGNAL = 1.5; EXPRESSED IN HEART, SIGNAL = 1.9; EXPRESSED IN BRAIN, SIGNAL = 1.8; EXPRESSED IN BONE MARROW, SIGNAL = 1.8; EXPRESSED IN LUNG, SIGNAL = 5.5; EXPRESSED IN ADULT LIVER, SIGNAL = 2.1; EXPRESSED IN FETAL LIVER, SIGNAL = 1.5; EXPRESSED IN BT474, SIGNAL = 1.3; EXPRESSED IN HELA, SIGNAL = 1.2
aaagagatgagttgggatggagggaaacacagggttggccggagaaacccactgctaggtgggagctgggaaggaaattaagaggcctcaggattccaaataaaacatgacagtttatgcctcctgtcagttagaccccagcaagtgtgttctgtgattcccatctcctgaggatggatcaaggggttacccttaagtctggtgaggatccaaggtgatcccttggccaggggcccctggctgaccctgactgcttcctggtctgtctgcttctccctagatcagcctgtcctcggggaccctgcttctgctgctgggtgtggcggctctgaccactggctatgcagtgccccccaagctggagggcatcggtgagggtgagttcctggtgttggatcagcgggcagccgactacaaccaggccctgggcacctgtcgcctggcaggcacagcgctctgtgtggcagctgga

SEQ ID NO: 2560 - DNA, 481 bp, Homo sapiens
  MAP TO AL033531.7; EXPRESSED IN HELA, SIGNAL = 1.8; EXPRESSED IN HBL100, SIGNAL = 1.3; EXPRESSED IN HEART, SIGNAL = 2.8; EXPRESSED IN LUNG, SIGNAL = 0.99; EXPRESSED IN BRAIN, SIGNAL = 1.4; EXPRESSED IN BONE MARROW, SIGNAL =   1; EXPRESSED IN ADULT LIVER, SIGNAL = 1.7; EXPRESSED IN BT474, SIGNAL = 1.9
gagttgctccctttagataattgctttgtatgggaaaataaaaagccttaatctatgttaatctctctatagttagaggccatgttcaagtgtattgtggaagtttcctccccttatagaggaattagacatcatattagaatgtgtttgtgagctcctaagttaggttaaataattagtattgcccacattaccacctgttacatacaactttattttctgacagcacaatcagataagttcacagccaagccattggattccaactcaggagaaagaaatgacctcaatcttgatcgctcttgtggggttccagaagaatctgcttcatctgaaaaagccaaggaaccagaaacttcagatcagactagcactgagagtgctaccaatgaaaataacaccaatcctgagcctcagttccaaacagaagccactgggccttcagctcatgaagaaacatccaccagggactctgctcttc

SEQ ID NO: 2561 - DNA, 471 bp, Homo sapiens
  MAP TO AC009550.2; EXPRESSED IN ADULT LIVER, SIGNAL = 3.4; EXPRESSED IN BT474, SIGNAL = 1.2; EXPRESSED IN HELA, SIGNAL = 3.2; EXPRESSED IN HEART, SIGNAL = 1.9; EXPRESSED IN PLACENTA, SIGNAL = 2.8; EXPRESSED IN HBL100, SIGNAL = 1.6; EXPRESSED IN LUNG, SIGNAL = 8.2; EXPRESSED IN BONE MARROW, SIGNAL = 1.1
  unsure 364
  unsure 372
  unsure 380
  unsure 430
gtgccttcaggacctgctcaagcctgatcacatatacaccacttccatttgatgatggaatgctgctgtgcacaacccactttatggctagaggggtcagaaagcacccagtttgtgataggcagttcaggtcccatggtgacttgatgacccatagtcaaatgttcagtttccaccaaagcccagtaacaggccaagaactgtctctcaaaagaagagtagttatctgcagaatatggcagggccttgctctaaaatcctagaggcctccactgtgattcacctatgggggcctgacaaaggctccaaacagcatcatatctgccactgacacctcaagcaccattggatctgctgggtcatnatggcccnaagtggcnagagcagcttgcacagcagcctggacctgttgcagagccttctccttttnctggaccacattcaaaactggcagcctttcgggtcacttaa

SEQ ID NO: 2562 - DNA, 466 bp, Homo sapiens
  MAP TO AL096712.14; EXPRESSED IN HELA, SIGNAL = 2.7; EXPRESSED IN HBL100, SIGNAL = 1.1; EXPRESSED IN HEART, SIGNAL = 1.2; EXPRESSED IN LUNG, SIGNAL =  20; EXPRESSED IN BT474, SIGNAL = 1.2
ccagctgagcaactgacaggttttacattttatttccaggaaatgagatagtattttcacaaagaagaggtaagccatcctctcaaaatagacactgccttcagaggcagccatggggtacacccaacctatccaaaacaactgtcaacggaggtgtttccgaggtatcaaaacagtaacaacaacaacaaattaaaaaaaaacagaagagaactcaaataactctttcgacatgtagtgaggcagagtctacgaagtaccctgaagcagttgggtgccgtgaatcctggtggtgcttcagccaatgatggcagcagggctggccaccgtggaaggcaagtgactgagggcttcctaactcaagtctctgtcccacaagacttctcagttgaccttcagagcagcggagtcacggctagagagaatcctccagaccatctcaggctcgcactacctggcagtcttt

SEQ ID NO: 2563 - DNA, 456 bp, Homo sapiens
  MAP TO AL121748.1; EXPRESSED IN BT474, SIGNAL = 2.4; EXPRESSED IN HELA, SIGNAL =   2; EXPRESSED IN PLACENTA, SIGNAL = 1.3; EXPRESSED IN HBL100, SIGNAL = 1.8; EXPRESSED IN HEART, SIGNAL = 1.9; EXPRESSED IN LUNG, SIGNAL =  17; EXPRESSED IN BRAIN, SIGNAL = 1.8; EXPRESSED IN BONE MARROW, SIGNAL = 1.1; EXPRESSED IN ADULT LIVER, SIGNAL = 1.1; EXPRESSED IN FETAL LIVER, SIGNAL = 1.9
tcctttattcttttagctagcctgagaaggctatcagtgaaattctccaggggatgggtgatcggaccagacaggtgcttgggttgtttcaagcatttaaaattctgtgattctattaaaaataaatttactcaatcagctagtgccctgagcttgcctaagatgaacatataaatatatggagtatggctggaatttgtcttaaacactatgataattatgtgaggcagcacatagcaaattttttaattaacaagattttttttcttagatcaaataatcgttcaggttggcttcatcgggaagcttctctggggatttcacatagaaacttcactcgcggggcctttttccttggtgcttttgtgctatcttgtaagaaagtgcagcccacagggggagataagatgaagcccaaacggttcatctttcatgtccctccagtctttgaaggaa

SEQ ID NO: 2564 - DNA, 455 bp, Homo sapiens
  MAP TO Z95114.19; EXPRESSED IN LUNG, SIGNAL = 3.6; EXPRESSED IN BONE MARROW, SIGNAL = 1.1; EXPRESSED IN FETAL LIVER, SIGNAL = 1.4; EXPRESSED IN ADULT LIVER, SIGNAL = 2.2; EXPRESSED IN HEART, SIGNAL = 2.2; EXPRESSED IN PLACENTA, SIGNAL = 1.2; EXPRESSED IN HBL100, SIGNAL =   1
cctcatgcaagtgctttgactcgtatacaaggttgaccacatccagtgcaaggaagatgcctgaagtggtcgcactcaggatccgggctcctctgctcactgcccgggtggtgcctgcaatcgttctctctgcttgaccaccacttccagctgagattcgccaggtggtcacagggagtcgggccctggctctggcttgcctgatggcacggatttcactcccaatggtttgtgtggcttcgtaataattattaagaagggaaagtaagttgggtgtgatgtcacgcataacttccttaaataccttcaatcggtcaatgctggttgcagtcagcctgctggcttcagcttctgctgatgatgtgtatgagtgctccacgatgctggtggtgatcccagtcacagcagacgctgctcccagccctaccccagctgcagtaagggccagactcgtc

SEQ ID NO: 2565 - DNA, 465 bp, Homo sapiens
  MAP TO AL109954.10; EXPRESSED IN PLACENTA, SIGNAL = 2.1; EXPRESSED IN HEART, SIGNAL = 1.8; EXPRESSED IN LUNG, SIGNAL = 1.5; EXPRESSED IN BONE MARROW, SIGNAL = 1.2; EXPRESSED IN FETAL LIVER, SIGNAL = 1.7; EXPRESSED IN ADULT LIVER, SIGNAL = 2.9; EXPRESSED IN BT474, SIGNAL = 2.9; EXPRESSED IN HELA, SIGNAL = 3.5; EXPRESSED IN HBL100, SIGNAL = 1.4; EXPRESSED IN BRAIN, SIGNAL = 0.99
cagtacctctgcctgttctgcaatgcaatcttcctaaacaagtatgttcattttttctaactgggtccattcctgtttacaaataggtttttgagggcggtatgcctcaattataggagcagttttattatgataaatactgagatcagaaagcatgtgtaactgtgtcataaagtgattgcatccaggaattattgccagccaagattgataaatatacccaataagtataattgttctctgtgtcagcccttactgaaggaatactcatggcagtggtgataaccgctatcatagctaccataaaattactcgttgtgactggttgtcccgctttcctcaggttttcttccaccatctgtgacagcttcttgatctgtccccagatgggtggctgtgttcgacaggtgttgcttgtgacagttggagtcctccacagagtcagtcttgacatggctgcaactg

SEQ ID NO: 2566 - DNA, 455 bp, Homo sapiens
  MAP TO AC010748.1; EXPRESSED IN PLACENTA, SIGNAL =  21; EXPRESSED IN HBL100, SIGNAL =  16; EXPRESSED IN HEART, SIGNAL = 2.8; EXPRESSED IN LUNG, SIGNAL = 7.6; EXPRESSED IN BRAIN, SIGNAL =   3; EXPRESSED IN BONE MARROW, SIGNAL = 2.2; EXPRESSED IN FETAL LIVER, SIGNAL = 5.3; EXPRESSED IN ADULT LIVER, SIGNAL = 7.2; EXPRESSED IN BT474, SIGNAL =  49; EXPRESSED IN HELA, SIGNAL =  40
accagtgtcacttggctgcagctggagacagagatcaaggctcgcaaggaagagctgctcttcatgaagaagaaccacggagagaagtaaaaggcctacaagcccagattgccagctctgggttgaccttggaggtagatccccaaatctcaggacctcgccaagatcatggcagacatctgggcccaatatgacaagctggctcggaagaacagagaggagctggacaagtactggtctcagcagattgaggagagcaccacggtggtcaccacgcagtccgtcaaggttggagctgctgagacgacactcacggagctgagatatacagtccagtccttggagactgacctggactcaatgagaaatctgaaggccagcttggagaacagcctgagggaggtggaggcccgctacaccctgcagatggagcagctcaacgggatcctgcttta

SEQ ID NO: 2567 - DNA, 454 bp, Homo sapiens
  MAP TO AL079342.17; EXPRESSED IN FETAL LIVER, SIGNAL = 2.1; EXPRESSED IN BT474, SIGNAL = 5.9; EXPRESSED IN HELA, SIGNAL = 1.6; EXPRESSED IN PLACENTA, SIGNAL = 2.3; EXPRESSED IN HBL100, SIGNAL = 3.5; EXPRESSED IN LUNG, SIGNAL = 2.7; EXPRESSED IN BRAIN, SIGNAL = 1.3; EXPRESSED IN BONE MARROW, SIGNAL =   2; EXPRESSED IN ADULT LIVER, SIGNAL = 1.1; EXPRESSED IN HEART, SIGNAL = 3.3
tgtctttggaaggataccccattttgtaattgtggtcttccatattcttctgggttacagatgttgagatgtattccatggtactcgcatttctgataaatccatgttgtctggaagagacttcctttcagctttctgacatcttatcaagaattagtagaggggcaagaattcttgccctgttagtttccacaatgtagccatttaacaccatctcatccaaaattgtgtgtactttatccaaattaaacattatatctaattcacttactcagctgaaatactcatctaaaacttccacaaagttatgaatgaattcataaatagccatcttgttctcagtgtcattaactccaaccacaacgaagagagatgcatactgccgatatatcagcttaaaatccttataattcaatgaaagagcattgttcattggatcgaggagagacagctc

SEQ ID NO: 2568 - DNA, 453 bp, Homo sapiens
  MAP TO AC010732.1; EXPRESSED IN PLACENTA, SIGNAL = 3.4; EXPRESSED IN HEART, SIGNAL = 1.3; EXPRESSED IN LUNG, SIGNAL = 8.4; EXPRESSED IN BONE MARROW, SIGNAL = 4.8; EXPRESSED IN FETAL LIVER, SIGNAL = 1.9; EXPRESSED IN ADULT LIVER, SIGNAL = 2.4; EXPRESSED IN BT474, SIGNAL = 3.1; EXPRESSED IN HELA, SIGNAL =   9; EXPRESSED IN HBL100, SIGNAL =  15; EXPRESSED IN BRAIN, SIGNAL = 1.7
caggcaggaccttgcatcaaaatgacttttctttagaacaaaaaagagggggagaaaagaaaaagaagatcaaagaaagaggttccatgagcgtcatgagataggacacggcagggttctaagggaagcgggaaggtgggggctgtggacacagggtggcgggcgctgctctcatggcttctcttctccctggtgggctggtgggctagtagctgaggccggcggtcctctcccccggggagcaggcagatgactttggcaaggggtggtgtggcgggggctggggttactccgtctgggcgtcgtagttggctccccccgccttcttcagctcgctcttgatgaaatcttcctccagctccttccgatcactgatcacaaactccttagcgaaattctgcaagaacaaaggaaaacacagcgttcctattaagaaggaaggcacaggatgtg

SEQ ID NO: 2569 - DNA, 464 bp, Homo sapiens
  MAP TO AC005412.5; EXPRESSED IN BT474, SIGNAL = 4.1; EXPRESSED IN HBL100, SIGNAL = 2.2; EXPRESSED IN HELA, SIGNAL =   4; EXPRESSED IN PLACENTA, SIGNAL = 2.1; EXPRESSED IN HEART, SIGNAL = 1.3; EXPRESSED IN LUNG, SIGNAL =  13; EXPRESSED IN ADULT LIVER, SIGNAL = 1.2
gtggatctgccctctcagacagatcagcaaaacctgggggatatcttccagaatcagtggggtttatcatttataaatgagcccagtgctggccctgagactgttactgggaagtcatcagagcataaagtgatggaggtgacatttcaaggagaatatcctgctactttggtttcacagggtgctgaaataattccctcaggaactgagcatcctgtgtttcccaaggcttacgagctggagaaacggactagtcctcaagttctgggtagcattctaaaatctgggactactagtgagagtggagccttatccttggaacccagtcatataggtgacctgcagaaagcagacaccagtagtcaaggtgctttagtgtttctctcaaaggactacgagatagaaagtcaaaatcctctggcctctcctacgaacactttgttaggctctgccaaagaacagag

SEQ ID NO: 2570 - DNA, 452 bp, Homo sapiens
  MAP TO AC008000.7; EXPRESSED IN BONE MARROW, SIGNAL = 1.1; EXPRESSED IN FETAL LIVER, SIGNAL = 1.2; EXPRESSED IN ADULT LIVER, SIGNAL = 1.5; EXPRESSED IN BT474, SIGNAL = 0.95; EXPRESSED IN HEART, SIGNAL = 0.97; EXPRESSED IN LUNG, SIGNAL =  16; EXPRESSED IN BRAIN, SIGNAL = 2.1
ggaagtatgcatccccattgtacagagcaggagactgaggctcggtgaggatcaaggtctcaagaacttgccacaggtcataaagcaaggagtggcagagctgggaggtgagctggggtcagcctgacccggagctctttcagccaaagatttggtccacaccacccccagcctccacttcctggaaccccccaagcatgtgtccctcacattgcaggcttggtgatgtcagccatcacggtgatcatcctggtgctctacttcactgtggacaccttcgtggtcaacaagaagccgtggctgcctgagtgcacgcccgtctacgtgcagtactttgtcaagttcttcatcattggcgtgacggtgctggtggtcgccgtgcccgaggggctccctctggccgtcaccatctcgttggcctattcggtgaaggtgagaggggaggagagcag

SEQ ID NO: 2571 - DNA, 463 bp, Homo sapiens
  MAP TO AL033520.8; EXPRESSED IN FETAL LIVER, SIGNAL = 2.1; EXPRESSED IN BT474, SIGNAL = 2.8; EXPRESSED IN HBL100, SIGNAL = 2.4; EXPRESSED IN HELA, SIGNAL = 2.8; EXPRESSED IN HEART, SIGNAL = 2.3; EXPRESSED IN PLACENTA, SIGNAL = 2.5; EXPRESSED IN BRAIN, SIGNAL = 2.2; EXPRESSED IN LUNG, SIGNAL =   4; EXPRESSED IN BONE MARROW, SIGNAL = 2.6; EXPRESSED IN ADULT LIVER, SIGNAL = 2.7
acaaaactgcgctccttcacaagtgctggtttcctagcgaggaggatccatagtctgagctctttacgtccaattttcccgcttcccactgtcgccaaaccaaagttaaaatgagtcctctagtcctctacgcgcgcctcaaaatgacccctcaggagagcggtaggggtgatgtcatcgctgcgcgacgacaggaagtaagatcctggcctgtgcagctcgggtttccgagcttctgcctcaggcatctccgcgatctcctctcccctccaatcctatccgtgatggacgatgcccacgagtcgccctccgacaaaggtggagagacaggggagtcggatgagacggccgctgtgcccggggacccgggggctaccgacaccgatggaatcccagaggaaactgacggagacgcagatgtggacttgaaagaagctgcagcggaggaaggcgaggtaggaag

SEQ ID NO: 2572 - DNA, 449 bp, Homo sapiens
  MAP TO AC000026.3; EXPRESSED IN HBL100, SIGNAL = 6.7; EXPRESSED IN PLACENTA, SIGNAL = 4.6; EXPRESSED IN LUNG, SIGNAL = 5.9; EXPRESSED IN BRAIN, SIGNAL = 2.8; EXPRESSED IN BONE MARROW, SIGNAL = 5.3; EXPRESSED IN ADULT LIVER, SIGNAL = 5.4; EXPRESSED IN FETAL LIVER, SIGNAL =  11; EXPRESSED IN BT474, SIGNAL = 5.3; EXPRESSED IN HEART, SIGNAL = 4.4; EXPRESSED IN HELA, SIGNAL = 6.7
gccatttctgttaggtgtggttttagagcaaatgagacagttactttaccaaaaactaggtacattcagagaacttaggctttaaataccagtttgttgctactcttgcggaagggggaatatttaaagggattcaatatcctgatggtttaaagtaagtggtttacaaattgttctgataatgagtgtctaggcagatctctgaggggacctgaaatctgatgcagctctcctttgttctaggttatactactccaactgccccccaggcatacagccagcctgtccaggggtatggcactggtgcttatgataccaccactgctacagtcaccaccacccaggcctcctatgcagctcagtctgcatatggcactcagcctgcttatccagcctatgggcagcagccagcagccactgcacctacaaggtaaggccatggtgtcctt

SEQ ID NO: 2573 - DNA, 456 bp, Homo sapiens
  MAP TO AL022238.1; EXPRESSED IN FETAL LIVER, SIGNAL = 6.9; EXPRESSED IN BT474, SIGNAL = 3.6; EXPRESSED IN HBL100, SIGNAL = 5.1; EXPRESSED IN HELA, SIGNAL = 6.3; EXPRESSED IN HEART, SIGNAL = 5.8; EXPRESSED IN PLACENTA, SIGNAL = 8.5; EXPRESSED IN BRAIN, SIGNAL = 4.9; EXPRESSED IN LUNG, SIGNAL = 4.3; EXPRESSED IN BONE MARROW, SIGNAL = 7.8; EXPRESSED IN ADULT LIVER, SIGNAL = 5.1
tagccagacagacagtgccccctgacctcaaaaaaggaggtcaagctgaaatggccctgaccctgaccgtgtgtccaaaaccccagcgtgagagccagggctgcttcttgacagctgctctcctctgccctgcgtggcactgaaccaggagtaagggcttctctgttctagcctcccagggaagggaaaaagcaggggctgtgattgtcaagactcacaaccatgtggagaggccgaatcacgcaggagagccacgcattggagtaccctggctcccagccccttccccaccccgtcttgagccagagagctacaagcaggaatcccagtgcagctgcaaatcatggccatcgaggaagtctgtggagaagaggctgggggctgtggtgctgaggggggctaggctcagcacgggaccacctgacgacagctccagccagtccatgctgtccaggt

SEQ ID NO: 2574 - DNA, 465 bp, Homo sapiens
  MAP TO AP000504.1; EXPRESSED IN BONE MARROW, SIGNAL = 1.3; EXPRESSED IN FETAL LIVER, SIGNAL = 0.99; EXPRESSED IN ADULT LIVER, SIGNAL =   1; EXPRESSED IN BT474, SIGNAL = 1.4; EXPRESSED IN HEART, SIGNAL =   1; EXPRESSED IN HELA, SIGNAL = 2.3; EXPRESSED IN HBL100, SIGNAL = 1.4; EXPRESSED IN PLACENTA, SIGNAL = 1.2; EXPRESSED IN BRAIN, SIGNAL =   1
aggccctgcagagtcctaagttgtggggttactttagtggcaggaaagtgtttttgactactttttctcatcccagcaggtctctgaggctgtggttgctacagggtcaccacgagcttggcttacttgtctcatccttcccttgcctggtatcattttctcagttctcccaaaagccatgtcccggcccttgctcatcaccttcaccccagccactgaccccagcgacctctggaaggatgggcagcagcagccacagcccgagaagccagagtccaccctggatggggctgcagcccgagctttctatgaggccctgattggggatgagagcagcgctcctgactcccagagatctcagactgaacctgccagagaaagaaagagaaagaaaagaagaataatgaaggcaccagcagcagaagcagtggcagaaggagcatcaggaagacatggacaagggag

SEQ ID NO: 2575 - DNA, 455 bp, Homo sapiens
  MAP TO AL031768.9; EXPRESSED IN PLACENTA, SIGNAL = 2.6; EXPRESSED IN BONE MARROW, SIGNAL = 3.9; EXPRESSED IN LUNG, SIGNAL = 1.9; EXPRESSED IN FETAL LIVER, SIGNAL = 1.5; EXPRESSED IN ADULT LIVER, SIGNAL = 3.7; EXPRESSED IN BT474, SIGNAL = 1.6; EXPRESSED IN HEART, SIGNAL = 2.5; EXPRESSED IN HELA, SIGNAL = 3.1; EXPRESSED IN HBL100, SIGNAL = 2.3; EXPRESSED IN BRAIN, SIGNAL = 2.5
cctgagggagcttttgattgtggcagaaggtaaaggggaagcaggcacatcacacagtgagaatgggagcaagagagggagtgggggctgccacacacttttaaacaaccagatctcaccagaactcactcaccctcatgaggacagcaccaagacatgagggattcacccgccatgacccaatcaccgcccaccaggccccacctccaacattgggaatcatatgttaacatgatattttaaggggacaaacatccaaactgtatcatctgtgaaggctgacagagctgaggaagctgcaaaagaaaactctgaagctatcagagactggatcgtgaggtttaaggaaagaagccatcttcataacataaaagtgcaaggtgaagcagcaagtgctgatggagaagctccagcaaattgtccagaagacgtagctcagatcactgatgaaggtg

SEQ ID NO: 2576 - DNA, 465 bp, Homo sapiens
  MAP TO AC011406.1; EXPRESSED IN FETAL LIVER, SIGNAL = 0.91; EXPRESSED IN ADULT LIVER, SIGNAL = 1.5; EXPRESSED IN BT474, SIGNAL = 2.6; EXPRESSED IN HBL100, SIGNAL = 2.2; EXPRESSED IN HELA, SIGNAL = 6.4; EXPRESSED IN HEART, SIGNAL = 2.3; EXPRESSED IN PLACENTA, SIGNAL = 1.7; EXPRESSED IN BRAIN, SIGNAL = 1.4; EXPRESSED IN BONE MARROW, SIGNAL = 1.2; EXPRESSED IN LUNG, SIGNAL = 5.9
gaagctgcatctacaacagtcaggtcatctgatgttccttcaattgttgtatctgtatttgaaatgccataaagagaatcatttctgaccagctgtccattttggcgaacagcagtttcactcgtagaccgctctctttttagtcggccaactgcacggatttcttcattttgaggggttgtaggaggtctttctaaatccagaaaatctagtggtctttcacttagcctaagtacacgaggtgctgtttttagtgcgaggagtttaaagggagttgactgaataaggtcaagatctgctggtcttgaaaatgaaacatcctcattatttcctgctacaacaatcctctctggaacttgcattattatcacgctagcatttggaactcctttttggaatccctgttccaggttggcgtttggcggtgctacttttaacttttctgggaccctcattcgctgacta

SEQ ID NO: 2577 - DNA, 454 bp, Homo sapiens
  MAP TO AP000516.1; EXPRESSED IN LUNG, SIGNAL = 3.5; EXPRESSED IN FETAL LIVER, SIGNAL = 1.2; EXPRESSED IN ADULT LIVER, SIGNAL = 0.92; EXPRESSED IN HBL100, SIGNAL = 1.3; EXPRESSED IN HELA, SIGNAL =   1; EXPRESSED IN HEART, SIGNAL = 1.1; EXPRESSED IN BRAIN, SIGNAL = 2.5
tcagagagaaattttagggcacttctcaccattgctctttttcaggctagaggacaactgatcacacatactgtgtgcccctgcatatgcagctctgagaatacaaagtgagtagtaggagcttacgatctctacctagggagtatctcatcctctgccgcttctccctttttacccacactgacatcgtgtgtctgcttccccaccttgtactcctgtgtagcatcgtccagtggcacaacggtgtgagcccggtgggtgtgggaaattgcacatatcaagcatacagcctcctggtcctcataacagaaaaggctgagggcctcatggtgttgggggcagaggctctcatcccggatcttccgcttgacggcctggagctgcttggcaatttccaccatactgcctagttgccgattaggtcggagactgcggtagcgggatgtctttcgac

SEQ ID NO: 2578 - DNA, 464 bp, Homo sapiens
  MAP TO AL117354.2; EXPRESSED IN BT474, SIGNAL = 1.9; EXPRESSED IN HBL100, SIGNAL = 1.3; EXPRESSED IN HELA, SIGNAL = 2.7; EXPRESSED IN HEART, SIGNAL = 0.86; EXPRESSED IN PLACENTA, SIGNAL =   1; EXPRESSED IN LUNG, SIGNAL = 2.1; EXPRESSED IN BONE MARROW, SIGNAL =   1; EXPRESSED IN ADULT LIVER, SIGNAL =   1
aagccagactcctttagggctttgaactgtacctacagaaaatcagagtgcagtgaacataatgttcagtcctacagtcaggatgcagttgctccttcccattccacaagatactgcacctttccatcaagtgtcacccgacgtgccaaaactcggtatttttcgccacatgctattctacctgcagcaccaaaataactggtaatggagttctttagatgattgagttgtaactcctgatctgctaagttattcagaatctctgtgttgagttcatcaaactgataatcttctttgccttcatcatcttttacaatttctgagttctgagtctggagtgctcttcttggaagacgacctcttcttctccgcaaatgtggtattgcagcaggccaagatcttcctgtacgcgttctttttctggagtcagataatctatgtaacagagaaggccagaattgtct

SEQ ID NO: 2579 - DNA, 454 bp, Homo sapiens
  MAP TO AC006205.7; EXPRESSED IN BT474, SIGNAL =   1; EXPRESSED IN HEART, SIGNAL = 0.96; EXPRESSED IN BONE MARROW, SIGNAL = 1.1; EXPRESSED IN BRAIN, SIGNAL = 1.1; EXPRESSED IN LUNG, SIGNAL =   4; EXPRESSED IN ADULT LIVER, SIGNAL =   1
agcagttagcgaggtgctggcgcagtcattcagcaggtactgcggagggtctgctccatgggataccaggagacaggacagggcgcctgccctcgcggggtggaagttggtctttgggcctctgttagcggagggctcactgcaggtcagcgtgtggttgcaaagctgcctgtgccaatgcagggtggcccaggggacacgtggggcctttctgccagccacgggtgccgaggcagaaggtctgactgcaggctgggctcctcaccaatgaccacgagcaggacaccgatgaccacctgcaggagcagagagaggctgatgagggtgaccagggtggtgtagtagtgagaggatggtccctgctccagcaccgccttcagccgcatggcgttggacatgaacagggccacgtccagcatgctctccgccacgctcttcttggtggcgtaatggt

SEQ ID NO: 2580 - DNA, 464 bp, Homo sapiens
  MAP TO AC009961.2; EXPRESSED IN PLACENTA, SIGNAL = 1.8; EXPRESSED IN BONE MARROW, SIGNAL = 1.5; EXPRESSED IN LUNG, SIGNAL = 2.1; EXPRESSED IN BRAIN, SIGNAL = 0.93; EXPRESSED IN ADULT LIVER, SIGNAL = 1.7; EXPRESSED IN BT474, SIGNAL = 5.1; EXPRESSED IN HEART, SIGNAL = 1.9; EXPRESSED IN HELA, SIGNAL = 4.4; EXPRESSED IN HBL100, SIGNAL = 1.4
tttttgatttataggcttaagacaggtattcgaatttacctctcttttattttctgcaatctttctggatctcttgaaggcgcacttttagttttatcacttttaccatcagctgaattccaacctgaaggaataatatctactgtgatcatgacattgtcggtcaaattactcccaagtgctggagggactgcaaaccggaataaggaaccaggaagaatccctgatattcctgtatttcttccaccttgagccgaatctgatgtagagccacctgttgtggcactgcttgatgctgcagatgcttgtggtctgttggcagcagctccaagaggatcattctgtgcttcaaggtgaaccacttcatttgattctcttctaaaaatatgagatctagatgatgtatcagaggtaggtatccttgaagattcatctcttccctctcgcctccttctagagaacaa

SEQ ID NO: 2581 - DNA, 452 bp, Homo sapiens
  MAP TO AL096773.6; EXPRESSED IN FETAL LIVER, SIGNAL = 2.9; EXPRESSED IN ADULT LIVER, SIGNAL = 3.6; EXPRESSED IN BT474, SIGNAL = 4.9; EXPRESSED IN HBL100, SIGNAL = 4.1; EXPRESSED IN HELA, SIGNAL = 3.5; EXPRESSED IN HEART, SIGNAL = 3.9; EXPRESSED IN PLACENTA, SIGNAL =  19; EXPRESSED IN BRAIN, SIGNAL =   4; EXPRESSED IN BONE MARROW, SIGNAL = 3.4; EXPRESSED IN LUNG, SIGNAL = 4.6
atcatagcctgaccaccaggctgtggtaactggaaaccaacggcgtggcaagtgtaggtctggggctccgcgcaaggaaggactgcaaggaagccgcaggttaaagcgggtcaacccgcaaaataggctgccactgcgcaggcgcccattgcgcctaccaagacaccttgtaaacgtgcccggaaatgacgcctgtaatgctgagacagactcccagaagatctgagcgagtcgcgtagctgagcccggcaggggctggggtggtgctgctgctatgagctgcaccatcgagaagatcctgacagacgccaagacgctgctggagaggctacgggagcacgatgcggccgccgagtcgctggtggatcagtcggcggcgctgcaccggcgggtagcagctatgcgggaggcggggacagcgcttccggaccaggtcaggcagagggtaggag

SEQ ID NO: 2582 - DNA, 463 bp, Homo sapiens
  MAP TO AL096814.10; EXPRESSED IN BRAIN, SIGNAL = 2.1; EXPRESSED IN BT474, SIGNAL =   2; EXPRESSED IN HBL100, SIGNAL = 2.4; EXPRESSED IN HELA, SIGNAL = 2.2; EXPRESSED IN PLACENTA, SIGNAL = 2.7; EXPRESSED IN LUNG, SIGNAL = 1.8; EXPRESSED IN BONE MARROW, SIGNAL = 1.8; EXPRESSED IN ADULT LIVER, SIGNAL = 3.2; EXPRESSED IN FETAL LIVER, SIGNAL =   2; EXPRESSED IN HEART, SIGNAL = 2.8
tctccagggtacagtctcccctggggctgcaaggatttagtggagactcttaacaccagttctctggcatctgtgagtttgagtgtgggccatcatcttcttccttctgctctctccctctccacatttcccggtaccatctgatccatcaggcccttctttgctcaggcctgaaggactcaggcctgtgagagaggacggccccgttgtcggccaagacacctttgggcgaggagcagcgaacagggcctgtccatctcagacgtcagccccctgaaggcctgagcaatgggcaacgtgatggagggaaagtcagtggaggagctgagcagcaccgagtgccaccagtggtacaagaagttcatgactgagtgcccctctggccaactcaccctctatgagttccgccagttcttcggcctcaagaacctgagcccgtcggccagccagtacgtggaacaga

SEQ ID NO: 2583 - DNA, 451 bp, Homo sapiens
  MAP TO AF189001.1; EXPRESSED IN BRAIN, SIGNAL = 1.3; EXPRESSED IN BT474, SIGNAL =   1; EXPRESSED IN HEART, SIGNAL = 0.88; EXPRESSED IN HELA, SIGNAL = 1.3; EXPRESSED IN HBL100, SIGNAL =   1; EXPRESSED IN LUNG, SIGNAL = 1.6; EXPRESSED IN BONE MARROW, SIGNAL = 1.1; EXPRESSED IN ADULT LIVER, SIGNAL = 1.5
tcactaacaccagacacggggcgagctgacacggtcacacagttcgtaggatccagcagtgtgcttacgacgtcacgtattacggttcttgttcttggcaaccctgtggggttaagcactgtcagcatcgccatttcacacctgggaaaactgaggcaaaggccccacagttccagagtgagggtcaagtccacagcccctgacttgagagctatgctcttgacccactacgtgcgtcctagaaatcaaagacatcagattaaagtgtgagtttaggatcaggaacccacctgcctgctgctagagaggctgaggtggtcctgccagccatgcgctgctgcaggcgtctctgtgggcatgacctggggctggcatttggtgagatgtcaatccacacctgggaatccgtcctattggccctaaatatggaaaagatatttattgtggcatt

SEQ ID NO: 2584 - DNA, 463 bp, Homo sapiens
  MAP TO AC010724.1; EXPRESSED IN HBL100, SIGNAL = 2.1; EXPRESSED IN HELA, SIGNAL = 2.4; EXPRESSED IN HEART, SIGNAL = 1.4; EXPRESSED IN PLACENTA, SIGNAL = 1.5; EXPRESSED IN BONE MARROW, SIGNAL = 1.5; EXPRESSED IN BRAIN, SIGNAL = 1.7; EXPRESSED IN LUNG, SIGNAL = 1.6; EXPRESSED IN ADULT LIVER, SIGNAL = 2.2; EXPRESSED IN BT474, SIGNAL = 1.8; EXPRESSED IN FETAL LIVER, SIGNAL = 1.1
tcgaggagctggtacgttgccccacctggggaggctgccctcttccctagccctcaaggcctttgtttccccacctgtaaaatggggcattgtagccttcacatgaaatggtacttctaaaggcatctgtgagccagagccctgctctgatggctgtgggagagaggggatatttttctaacctgcctccacccttcccggtgccatgggaggcagacactaagttctggggtctccagttttagtgggtggccactgattgcttctctctgtccagaacaacgagaacaagagcacactgcagttggagcagcaagtaaaggagctggagaagtcgggtgagctgaaagagactgtaacctccgacccatccaagaagatgtgggaggcgggcaccagcctctggggaggggaggtgccaggccacaggcagctgcagcctggggacaggtgaccccagcac

SEQ ID NO: 2585 - DNA, 449 bp, Homo sapiens
  MAP TO AL080285.6; EXPRESSED IN ADULT LIVER, SIGNAL = 4.1; EXPRESSED IN PLACENTA, SIGNAL = 2.8; EXPRESSED IN BONE MARROW, SIGNAL = 8.2; EXPRESSED IN LUNG, SIGNAL = 4.3; EXPRESSED IN BRAIN, SIGNAL = 4.9; EXPRESSED IN FETAL LIVER, SIGNAL =   6; EXPRESSED IN BT474, SIGNAL =  13; EXPRESSED IN HEART, SIGNAL =  10; EXPRESSED IN HELA, SIGNAL =  12; EXPRESSED IN HBL100, SIGNAL = 6.4
ctagccttccagtgtcccagactgtggactttggaggggcaggtctggcctttcctgggtcagcacagggcacccaggtggcggcactggtgggcagccagcacaggcacctaggtaagggcacaagctcactatccgtcagccagcctaattgtgtttggataaattttccttgctgtcacccacgttgagcttaatcgtgtcagtgccaggcttccagccagcgggacaaacttccgcgtgctcttctgcgtactggaaggcctggaccagccgcagagcctcatccacggagcgtcccacaggcaaatcattaacagtgatctggaaaggacacccttgccatcactgataaagcggcccctgtaggcaatgcccgcatctgttttcagcacggcgtaatcctcagacaagccactggccacctcagcaagcagggggatgttcag

SEQ ID NO: 2586 - DNA, 462 bp, Homo sapiens
  MAP TO AL109924.6; EXPRESSED IN BONE MARROW, SIGNAL = 1.7; EXPRESSED IN LUNG, SIGNAL = 2.4; EXPRESSED IN ADULT LIVER, SIGNAL = 2.1; EXPRESSED IN BT474, SIGNAL = 1.2; EXPRESSED IN FETAL LIVER, SIGNAL = 1.8; EXPRESSED IN HBL100, SIGNAL =   2; EXPRESSED IN HELA, SIGNAL = 2.5; EXPRESSED IN HEART, SIGNAL = 2.7; EXPRESSED IN PLACENTA, SIGNAL =   2; EXPRESSED IN BRAIN, SIGNAL = 2.2
agctgacaaagactccccacagatctcaccaccaagggccctcacatttttgcctttacagaccccagatgcctaagccaccactccccttcccctactgctggagctgccctagccagtgtgacggttggtgctgccctagccagtgtgacggttggagctgccctagccagtgtgacggttggagctgccctagccagtgtgacggttggagctgccctagccagtgtgacggttggtgctgccctagccagtgtgacggttggagctgccctagccagtgtgacggttggtgctgccctagccagtgtgacggttggtgctgtggcttcaaacccaggacagccactgtccatgcccacaaatgtccctcccaccagcagcccctgcaccactatcacatgcatgctcacgctcatacagctcccaccgccagcccttgggcttgctttcctggaggca

SEQ ID NO: 2587 - DNA, 460 bp, Homo sapiens
  MAP TO AB020872.1; EXPRESSED IN HEART, SIGNAL = 1.7; EXPRESSED IN BRAIN, SIGNAL = 1.8; EXPRESSED IN BONE MARROW, SIGNAL = 2.3; EXPRESSED IN LUNG, SIGNAL = 3.2; EXPRESSED IN ADULT LIVER, SIGNAL = 2.4; EXPRESSED IN BT474, SIGNAL = 1.1; EXPRESSED IN FETAL LIVER, SIGNAL = 1.6; EXPRESSED IN PLACENTA, SIGNAL = 1.9; EXPRESSED IN HBL100, SIGNAL = 1.4; EXPRESSED IN HELA, SIGNAL = 1.5
tctactgcatggtcagtctgcaaattttacaaacttttatgaactgcttcccttttaaatataagttccaatttcaaatcatcttttttgtgaacacatacaactgtactctttcagaaaaagccaagtcaccccttgatactttgttgcttagaaatttctttggccagataccctaaattatctctctcaagttcaaatttccacagatctctagaacggggtaaaatgctgccagtctctttgctaaagcatagcaagagtcacctgtactctagttcccaacaagttcctcatctctatctgagaccatctcagcctggactttattgcccatatcactatcagcattttggtcaaagacatccaacaagtctctaggaaattccaaagtttcccatatcttcatgtcttcttctgagccctccaaactgttctaacctgtgcctgttacccagtt

SEQ ID NO: 2588 - DNA, 465 bp, Homo sapiens
  MAP TO AB020877.1; EXPRESSED IN BT474, SIGNAL = 1.8; EXPRESSED IN FETAL LIVER, SIGNAL = 1.1; EXPRESSED IN ADULT LIVER, SIGNAL = 1.6; EXPRESSED IN HELA, SIGNAL = 1.8; EXPRESSED IN PLACENTA, SIGNAL = 1.5; EXPRESSED IN HBL100, SIGNAL = 1.5; EXPRESSED IN HEART, SIGNAL = 2.4; EXPRESSED IN BRAIN, SIGNAL = 0.9; EXPRESSED IN BONE MARROW, SIGNAL = 1.3; EXPRESSED IN LUNG, SIGNAL =  14
aatgaccacattgaataccacagtggaaagtcttgttttgtgttgctgttttgttttagtaaaaagccttcagtgatagacattgtttttttagtcttttgatattgtatacaattttctagtgtacttgcatattagtgtgtttgtgcaaatacttttgaaggtagctttcttgaaaaggattggagaggtcagggcacatgcatattttaaaattaaattgatattgccaagttcacttcccaaaaactaatgccattagcattttattccattaaatctcaaatgactctaaagactactgtagaagcagagcctctatcagatcttgtccagaatattgatgatgatgatgatgatgatgatgatgatgatgatgatgatgataatgatggtcatggtcaacatttgtaatagtcttacaatgtagaagtattatgctatgcatcattcagaccttgtagg

SEQ ID NO: 2589 - DNA, 498 bp, Homo sapiens
  MAP TO AC007358.2; EXPRESSED IN LUNG, SIGNAL =  12; EXPRESSED IN ADULT LIVER, SIGNAL = 1.7; EXPRESSED IN FETAL LIVER, SIGNAL = 1.4; EXPRESSED IN HELA, SIGNAL = 1.3; EXPRESSED IN PLACENTA, SIGNAL = 1.7; EXPRESSED IN HBL100, SIGNAL = 1.1; EXPRESSED IN HEART, SIGNAL = 2.3; EXPRESSED IN BONE MARROW, SIGNAL = 1.2; EXPRESSED IN BRAIN, SIGNAL = 1.4
tttgcagatgaggacactgagactcagagatctgaaatagcttgtccaaggtcacacaagaaagccaggttcaaggcctggctccaccactgccttgtcttgtggccttgagcaagttccttggccttgctgggcctgtttcctaatctctgaagggggataagtacctagtccacaaggctaatgtgggagttaaatgagatgatccagctgagggcctcatcaaaggccctctgctcatgggaggagtcccgtacagtccacctccatctctgaatctgcattacccttgttttattattgtcatgcagttggcaacaaccactacaatcaaatgaagacctcggaagccaaggctgtgcagctgttgcacaaagttcctcgaaagtccctcttgccttccatcctccccatgttcccacatggtagagatggcaagtctcctttctttcattttactgatgagataaaacttcagtcaaagatgtgtcctaaacc

SEQ ID NO: 2590 - DNA, 475 bp, Homo sapiens
  MAP TO AC000026.3; EXPRESSED IN FETAL LIVER, SIGNAL = 1.7; EXPRESSED IN HELA, SIGNAL = 1.7; EXPRESSED IN HEART, SIGNAL = 2.7; EXPRESSED IN LUNG, SIGNAL = 1.2; EXPRESSED IN BRAIN, SIGNAL = 1.7; EXPRESSED IN BT474, SIGNAL =   2; EXPRESSED IN ADULT LIVER, SIGNAL =   2; EXPRESSED IN PLACENTA, SIGNAL = 2.1; EXPRESSED IN HBL100, SIGNAL = 2.2; EXPRESSED IN BONE MARROW, SIGNAL =   2
cagaagacctggccacactgggtcctcttccccagccagtactgatcctctggagtttctgagagggttcatgccacacccactccattgcctgctgcctttcccacctactccagttaactcactccataaccacctgacctgtcagtgtctgggctcatgattcctgtgtaaacaaaaccttctattgggaagaaagttttatgaagggagctgtatgaggggagacatgggtccctagacaccctaaaggagagactgaagtggacccaagctataaaccctcccctgtcagccagcttctagctgccaccaggcctactcctgcacacctgacatctttgcccacggtcatcgatgcaatcactttcttcactgcctccttcttcttctccttcttgtcactgttgagctctgccttcagctcgaagatctcccctaaggaaaggaggcaagcatgagtgatccctcccta

SEQ ID NO: 2591 - DNA, 462 bp, Homo sapiens
  MAP TO AC007558.3; EXPRESSED IN HELA, SIGNAL =   4; EXPRESSED IN LUNG, SIGNAL = 3.1; EXPRESSED IN BRAIN, SIGNAL =   4; EXPRESSED IN BT474, SIGNAL = 2.3; EXPRESSED IN ADULT LIVER, SIGNAL = 5.4; EXPRESSED IN FETAL LIVER, SIGNAL = 3.9; EXPRESSED IN PLACENTA, SIGNAL = 5.2; EXPRESSED IN HEART, SIGNAL = 4.4; EXPRESSED IN HBL100, SIGNAL = 3.1; EXPRESSED IN BONE MARROW, SIGNAL = 4.9
cagataaacgagctgacatgcctgctaactaaaatggattaactcgtatttgcagtaatatctgacttatgaggaatgcccctaatgagataactggagattagtttctattagatatttagtgtatgttctcagcttctttactgactaggccgggccatttccatctatagatcaaagcatgaagatatttactcctgaaggacctctcttacgtaggaagccagtggccaagacacaagtcctgaagtatgtgctgttccaattcatgggctgctgtattcataatagtgatcatcacagctatgggtactgtttatgcactgccaagccctgtgctcagacgctttctagatactgcctctctgagctctccaatgagccatatttcctccattctaagacaaagctctcagatgatgtataccattaatattttattcctccagacccctacaaaaa

SEQ ID NO: 2592 - DNA, 372 bp, Homo sapiens
  MAP TO AL121714.1; EXPRESSED IN LUNG, SIGNAL = 0.94; EXPRESSED IN BRAIN, SIGNAL = 1.7; EXPRESSED IN BT474, SIGNAL = 6.5; EXPRESSED IN HELA, SIGNAL = 1.9; EXPRESSED IN PLACENTA, SIGNAL = 0.97; EXPRESSED IN HBL100, SIGNAL = 0.97; EXPRESSED IN HEART, SIGNAL =   2
tgcagtgtttgttttccagtctagtagcttttcagcattcagttttgtggctcatgggaaatgttacttagcatcaagatgtggtttgatgagtgaacaatgtcagtatcaactgtacttaacagaagacagaggggctggggttaatctgcagctaacaacatataaaaataaaaacaaacacagacccacaataacatcaacatgcattattaggcaaagatccaaaattaacccaacccacacagatttcttctaagctgagattacacatggaaacagatactttatcaagatccatagccatagtagtaaggttcatcagggcggaatccatatgctgtggcagggcgtccaagaatgccaactggt

SEQ ID NO: 2593 - DNA, 466 bp, Homo sapiens
  MAP TO AC007038.3; EXPRESSED IN LUNG, SIGNAL = 1.9; EXPRESSED IN HEART, SIGNAL = 1.1
ggagattgaaatggtaagcgagacatttggctaagaccacaggttgttgggtacccactatggagaaaatactcaggtgccaggaacactgtttctgtccattggtgaagctgtacttgatgggaaacacctgaatttctagggtgttgtagtttggacttggaaagagctgagtttttctgtatctactgtggacagtctaccttgtgatgtttttctttccacttccgtcttccaaattctgcccctcagatagcccatggctggagcagcctgaggtgcagctgctgctgcagacagtcatcaatgtactcctcccaccgcggatcatcagcacatccaggagcaagaacttcatgttagagagctccccagcccactgctccacccctggggatgcggggaaagacttgcgcagggaagggctggctgagtccaccagccaagcagcatacttgggttggta

SEQ ID NO: 2594 - DNA, 474 bp, Homo sapiens
  MAP TO AB020874.1; EXPRESSED IN HELA, SIGNAL = 1.6; EXPRESSED IN HEART, SIGNAL = 1.1; EXPRESSED IN LUNG, SIGNAL = 2.7; EXPRESSED IN BRAIN, SIGNAL = 1.4; EXPRESSED IN BT474, SIGNAL = 2.9; EXPRESSED IN ADULT LIVER, SIGNAL = 1.3; EXPRESSED IN FETAL LIVER, SIGNAL = 1.1; EXPRESSED IN PLACENTA, SIGNAL = 3.6; EXPRESSED IN HBL100, SIGNAL = 2.3; EXPRESSED IN BONE MARROW, SIGNAL =   1
tgagtcagttaaacccctttcctttataaattacccagtctcagatatttctttatagcagtgtgaaaatttactaatgcaaaggtgtaagctgtttctctgttattctcttagttcccctccaaatgtcagctttattctttagccagcctttctcatgaatggaaaaatgtttaaagcagtcatgggtattctatctgcactccacacgatctagaggcagagagacaaacaagagtcaagggatttttttcaatggcttcttcttaaggtatggacctacctctgaaccaatcgttgaatctatagcgatattgggagttgactgccttaggtttcggtttaaaacccatctctgagtggaaccctgtgggaagatttgtgggactgctgtaatctgttagttgaggagaatcaggaccaactgtggaagcatgaattaaaggaatttctagccaaacaaaatgagccatt

SEQ ID NO: 2595 - DNA, 454 bp, Homo sapiens
  MAP TO AC007283.3; EXPRESSED IN BONE MARROW, SIGNAL = 2.7; EXPRESSED IN FETAL LIVER, SIGNAL = 1.7; EXPRESSED IN HELA, SIGNAL = 3.6; EXPRESSED IN BRAIN, SIGNAL = 1.5; EXPRESSED IN LUNG, SIGNAL = 5.2; EXPRESSED IN BT474, SIGNAL = 3.6; EXPRESSED IN ADULT LIVER, SIGNAL = 2.4; EXPRESSED IN PLACENTA, SIGNAL = 2.5; EXPRESSED IN HEART, SIGNAL = 2.5; EXPRESSED IN HBL100, SIGNAL = 2.7
ctgtgtacaaggtggccaagcatacccagaactttggtgtgcccatcatagccgatggtggcatccagaccatggggcatgtggtcaaggccctggccctaggagcctccacagtgatgatgggctccctgctggccgccaccatggaggcccccggcgagtgcttcttctcagacggaatgcagctcaagaagtaccagggcatgggctcactggatgccatggagaagagcagcagcagccagaaacaatacttcaacgacggggataaggcgaagatcacgcaggatgtcttgggctccatccaggacaaagggtccattcagaagttcgtgccctacctcatagtgggcatccagcatggctgccaggatatcggggcccacagcctgtctgtccttcggtccatgatgtactcaggggagctcaagtttgagaagcagaccatgtcagc

SEQ ID NO: 2596 - DNA, 460 bp, Homo sapiens
  MAP TO AC007425.16; EXPRESSED IN PLACENTA, SIGNAL = 1.4; EXPRESSED IN HELA, SIGNAL =  26; EXPRESSED IN HBL100, SIGNAL = 1.2; EXPRESSED IN HEART, SIGNAL = 1.3; EXPRESSED IN LUNG, SIGNAL =   2; EXPRESSED IN BONE MARROW, SIGNAL = 1.3; EXPRESSED IN BRAIN, SIGNAL = 1.1; EXPRESSED IN ADULT LIVER, SIGNAL = 1.8
tttggggctgtcactttgtccagttccagggctcattcacatagcattcttcatgagtggcgccccctagagttgtgtgatatgacagctctgctgccatggtcagaaaccaatctggcttgctgtcatgtcagtgcctccccacgcatgtggattttttccctcccaaaaggctcaggaaccacagaacgtaaccctgatgaacctgactccaattaggagcttgcacttggctggtgagaatccccagacagccccgagggtgactcctcccgctccttgcagaatctgtagcctggtgttcattgtgctggctcaagggtcagatcagagtgaggagtgcttggtaattgcactgagccaaagacactcacttcgcaattattgggcatttgaagttagttatttgatgtgggaaaaacctccacgctgccgaactgcctctgagctgaagcgagaa

SEQ ID NO: 2597 - DNA, 465 bp, Homo sapiens
  MAP TO AC007538.5; EXPRESSED IN BONE MARROW, SIGNAL = 0.94; EXPRESSED IN ADULT LIVER, SIGNAL = 1.7; EXPRESSED IN HBL100, SIGNAL =   1; EXPRESSED IN PLACENTA, SIGNAL =   1; EXPRESSED IN HEART, SIGNAL = 0.97; EXPRESSED IN LUNG, SIGNAL = 2.6
gggaaatgatgaacaacatcgcctaagtaaataaaatgtacaactccgctgaggaggctgagactcttgttgttctggggacctcttttattggtgtattggtcttgacctgataactttgagttagctctagtcaggaaaaccaatttactctaggtgtctcaagtagcaagggtttaatacagggaacagatttcacatatgttggagttcccaaagaagcaggatgctagagccaaagctgttctatactgctgaagccatttcaacagtaacctcaaatagtaatgaagtctgttctttcctccgcttaccttctagtctcctgctagttcctcttatgaacagaaccaacagggagccagctggcataagagtctgaaaaatgtggtgtgtgagtcccagccccaggatcacagaacagagtagagaaagtgggtttgaggctgagagaaaatgggtaaa

SEQ ID NO: 2598 - DNA, 486 bp, Homo sapiens
  MAP TO AC007628.3; EXPRESSED IN HBL100, SIGNAL = 0.95; EXPRESSED IN HELA, SIGNAL =   1; EXPRESSED IN HEART, SIGNAL = 0.9; EXPRESSED IN BONE MARROW, SIGNAL =   1; EXPRESSED IN BRAIN, SIGNAL = 1.2; EXPRESSED IN FETAL LIVER, SIGNAL = 1.2; EXPRESSED IN ADULT LIVER, SIGNAL = 1.3
gagggaggaacaaaaggagggaaggaaggataacctttgttcaaatttctcagaactctggagaaaagggccgtgtccacagaatgcccaaacatctaaagataatgtggataaagtcgattgttagaatatttggtttaaaagcagctgaacagacacccggaggtttctgcattcctcctggacatgtagtcttcttacacagactcaccccgaagaagtggagtgtctcagggaagtgaacatagatgaagccagacattgagcccctttactccttgatcagaggccagaagactgtgccccttttctcccgaaatagcatcacatcaagctactgctgtcagctgagcccagacccacccaccaacatgtacacctgtatcagccacccatactctgttcccaccagcagcatgggtttcaagagcacaaggagcctttcaagagcacagtccagctggtggtcttcagattgtcggtgca

SEQ ID NO: 2599 - DNA, 462 bp, Homo sapiens
  MAP TO AC009488.1; EXPRESSED IN BT474, SIGNAL = 1.7; EXPRESSED IN LUNG, SIGNAL =  19; EXPRESSED IN FETAL LIVER, SIGNAL = 2.4; EXPRESSED IN ADULT LIVER, SIGNAL = 2.6; EXPRESSED IN PLACENTA, SIGNAL = 2.6; EXPRESSED IN HEART, SIGNAL = 2.9; EXPRESSED IN HELA, SIGNAL = 2.7; EXPRESSED IN HBL100, SIGNAL = 2.3; EXPRESSED IN BRAIN, SIGNAL =   2; EXPRESSED IN BONE MARROW, SIGNAL = 2.3
cgtcaaacttgacttgcaccccgatcttgatgttaacaatgctgtagatgctgctggacttgacactgaccccagggatctgggagatggcggggagggtgacctgtttgctgttgatctaaacaggaggacagtgacggtgagtaggagcagggacaagagtcccctccccagcactccctcccagccccggtcaccacacccagctcactagcacacggtggcccttctgcagggtgacctgggcatcgtagatgtcaatgtagacctcatgaaggcggaaagcctcagttccaccttcctccttctcatgcttggcactgatcttgaagaagggcaaggccatggcggggtggcacactttcaccaggacaagagtgcaggcgtccgggatagaatggttactaccatcaaagctcacgtagtgggactcccctgggagctgacacactcccacacctg

SEQ ID NO: 2600 - DNA, 491 bp, Homo sapiens
  MAP TO AC009743.1; EXPRESSED IN LUNG, SIGNAL =   2; EXPRESSED IN ADULT LIVER, SIGNAL =   1; EXPRESSED IN HEART, SIGNAL = 1.3
tttttctatcctctgcccccgcctcggaaaattaaatgattatagagcaatctgatgagtacgttttattccttgggtaccactgcagaggctcaccctgtgtcctgagcagcatattaaagcattctttcccaagaaattacttagattgaatggaagaattttcttcccagaatttttcattatgtgtaaagtagtacccatgcctgggggttgttgggaggtagatgtgtttagtggggtgcctggtgcctagtgagtcctcagtgactgtacatgattctagtcaccatcagcctcctcaggtggggtgctcctttgtgtcttcgatgagcaggaggatgtacttcacttcaaatctgaactgagtcgtggaaaggtaattatgaaacacaggttctctgtgacagctgaggccaaagaggaattgtttcagcagcactatccaatagaaccacacactgtccaacacactagccatgaggcacatg

SEQ ID NO: 2601 - DNA, 495 bp, Homo sapiens
  MAP TO AC009948.2; EXPRESSED IN HEART, SIGNAL =   7; EXPRESSED IN LUNG, SIGNAL = 2.3; EXPRESSED IN BT474, SIGNAL = 0.99
cttgattgtcaaggctggtgcctcatttaccatgactgtgcctttccgaggaagaccagtacccaatgtcttgtggagtaagccagacactgacctccgtactagagcttatgttgataccacagactctcgtacatcactgaccattgaaaatgccaacagaaatgactctggaaagtacacattaacaattcagaatgttttgagtgctgcttcactgaccttagttgtcaaagttttagataccccaggtcctccaaccaacattactgtgcaagatgtaaccaaagagtctgcagtgttatcctgggatgttcctgaaaacgatggtggagcaccagtgaagaattaccacatagaaaaacgtgaggccagcaagaaagcatgggtctctgtgaccaacaactgtaaccgcctctcctacaaagttaccaatttacaagaaggagctatctattacttcagagtctctggagaaaatgagtttggtgttgg

SEQ ID NO: 2602 - DNA, 469 bp, Homo sapiens
  MAP TO AF166490.1; EXPRESSED IN BONE MARROW, SIGNAL = 5.5; EXPRESSED IN LUNG, SIGNAL = 4.5; EXPRESSED IN BRAIN, SIGNAL = 3.8; EXPRESSED IN ADULT LIVER, SIGNAL = 3.6; EXPRESSED IN BT474, SIGNAL = 9.4; EXPRESSED IN FETAL LIVER, SIGNAL = 2.3; EXPRESSED IN PLACENTA, SIGNAL = 3.6; EXPRESSED IN HELA, SIGNAL = 6.1; EXPRESSED IN HBL100, SIGNAL = 4.6; EXPRESSED IN HEART, SIGNAL =   3
ccattgtgagttctttcatgttgtctaaggtaagaacatttactgaaagccttcccacataggagacatccatatggtttatctcctaagtgagttctctcatgttttctaaggtcagagcaatgagtgaaggctttcccacatagatggcatatctgtgctttttctctagtgtgaatcatctcatgtcgtctaaggttagaacttttactgaaggctttcccacatagatgacatccatatggcttctctccagtgtgagttctctcatgttttcgaagatcagagcaatgagtaaaggctttcccacatagatgacatccgtgtggtttctctccagtgtgaatcatctcatgtcgcctaagattagaatttttgctaaaggttttcccacacacacgacattccaatgttatctctctagtgtgagtcacactgtgtggtctaagggcagagttttggataaagg

SEQ ID NO: 2603 - DNA, 490 bp, Homo sapiens
  MAP TO AC010085.1; EXPRESSED IN PLACENTA, SIGNAL = 1.4; EXPRESSED IN HBL100, SIGNAL = 1.5; EXPRESSED IN HELA, SIGNAL = 1.2; EXPRESSED IN HEART, SIGNAL = 1.4; EXPRESSED IN BRAIN, SIGNAL =   1; EXPRESSED IN BONE MARROW, SIGNAL = 1.2; EXPRESSED IN LUNG, SIGNAL = 1.4; EXPRESSED IN ADULT LIVER, SIGNAL =  44
cacggagctttaagttacaaaattactttctaaatagaaatgaatccatttctgtctagcttaatatttagttgttataattgttctttttttgatcagttacaaatgaactcttgatgaacaaaagaatatgcaatgcaatgtggaaaaccaaacagctattttaaagtcccacattgaaatactgtataatgtcagctcaactctcactcattctgggaggggggaagaaaacaggaaataaggcagctttcaaaaatgtctaaactctgctcctctctgcaggatctgagtggttttttgacgctgtggcagggcataatcgtggggaagaaataggtctgacatcagtttatgacggtacagagccagagaaagaagcaacccaggtccaatcattcagcagaatcatctctcaaggtgccctggggcctcatgcagagggttaacaaggacagaaagtctctagacctgggtctgttcatccaac

SEQ ID NO: 2604 - DNA, 463 bp, Homo sapiens
  MAP TO AL031848.11; EXPRESSED IN BT474, SIGNAL = 1.4; EXPRESSED IN FETAL LIVER, SIGNAL = 1.5; EXPRESSED IN PLACENTA, SIGNAL = 1.7; EXPRESSED IN HBL100, SIGNAL = 1.4; EXPRESSED IN HEART, SIGNAL = 1.2; EXPRESSED IN BRAIN, SIGNAL =   1; EXPRESSED IN BONE MARROW, SIGNAL = 1.3; EXPRESSED IN ADULT LIVER, SIGNAL = 1.1
ggtcttgaagctgcgactcatgtttagttctcagaacagccgtggctacctggcttctctgggactcctgacgggggtggtggtggtcccgggaatttgctcctagggtcacagtctgtgtgttggtcactgggaaccccaagggctgatcaccacctccctgccctgtggctttgcttaaaggtcttcaccatcagcccttccctgccagggcagtccagggacatgtggcttcagggggagaaagtgcccctctgccctccttctctctcatggaaacagcatctcagggccccttccgtggcctagcaggtggcaccccaccctgacgaacacaccacctaggaagagcccaaacattgggaaggttctctttcctccgggagccattgagccctttggggaccttctcccctccttggattgtcactgttgcacaaatggcatcctctccagaggcctc

SEQ ID NO: 2605 - DNA, 479 bp, Homo sapiens
  MAP TO AL080278.7; EXPRESSED IN PLACENTA, SIGNAL = 3.3; EXPRESSED IN HBL100, SIGNAL = 2.9; EXPRESSED IN HEART, SIGNAL = 3.5; EXPRESSED IN FETAL LIVER, SIGNAL = 3.8; EXPRESSED IN ADULT LIVER, SIGNAL = 3.5; EXPRESSED IN HELA, SIGNAL = 3.2; EXPRESSED IN BRAIN, SIGNAL = 3.3; EXPRESSED IN LUNG, SIGNAL = 4.5; EXPRESSED IN BONE MARROW, SIGNAL = 3.6; EXPRESSED IN BT474, SIGNAL = 2.1
attctctcagggccacacagctaagtgatagcaaggtctgtgtcttcaggagccattgctgcttctgcaaagccactaaatgagaccaccttgctatagggtttttgtggctttatcaatgacaccccctttcttcctggcacatagtaggcagcaagcaagcattcattcattcattggtataacagaaaaaaaaaatcctgcactactatgctcttctgaaacttaagtgtgtctacagcctttattgaatgaaggcatccatcaacatccaaatccttcccaggaaccagtcctttaagacccaggacacacttcttcaggaccccagccttctctcggtgtctgagggcacagtttctttatccctgccacttaccatgcccacccttaaccaatttattcctagtctcagcttaaatatcacttccctggggaagtccacttttctagacttcaccaattatgtgagggcccta

SEQ ID NO: 2606 - DNA, 463 bp, Homo sapiens
  MAP TO AL034431.13; EXPRESSED IN HBL100, SIGNAL = 1.1; EXPRESSED IN HEART, SIGNAL = 1.5; EXPRESSED IN LUNG, SIGNAL = 4.4; EXPRESSED IN FETAL LIVER, SIGNAL = 1.8; EXPRESSED IN ADULT LIVER, SIGNAL = 1.3; EXPRESSED IN PLACENTA, SIGNAL = 1.8; EXPRESSED IN HELA, SIGNAL = 0.99; EXPRESSED IN BRAIN, SIGNAL = 1.5; EXPRESSED IN BONE MARROW, SIGNAL = 1.4; EXPRESSED IN BT474, SIGNAL = 1.4
tcacctgcttaggagaagggtgttggggagggaggtgtgatgagagtcagatggatctggtgctaatgctggttgagatgcttacctgctgggtgaccttaggcaaatgctctctttaacaagcaagcatgggacgatgccctctctgtgcacagccatatgctgggctctgaagggacaagacactgtaggggagaaagacagaaaagaggaggacttaggatctgtgtaaacccagggagacttaagccctcgtgacacattattaataagtatacgttattatggctcttcagtggaagaagttggggcttaaagagattacatggcttgcccaaagtctctgtagccgtaatcccctgtactgtaaccactgttcccaaggtctgcccaataatgtgatagcagcaacagcacacagacccactccctctggtcattgccagcttcctcctgcctgtag

SEQ ID NO: 2607 - DNA, 477 bp, Homo sapiens
  MAP TO AL035071.17; EXPRESSED IN BONE MARROW, SIGNAL = 6.3; EXPRESSED IN HELA, SIGNAL = 3.6; EXPRESSED IN HEART, SIGNAL = 4.1; EXPRESSED IN LUNG, SIGNAL = 8.4; EXPRESSED IN BRAIN, SIGNAL = 3.7; EXPRESSED IN BT474, SIGNAL = 2.3; EXPRESSED IN ADULT LIVER, SIGNAL = 5.4; EXPRESSED IN FETAL LIVER, SIGNAL = 4.1; EXPRESSED IN PLACENTA, SIGNAL = 5.1; EXPRESSED IN HBL100, SIGNAL = 3.5
ccgattcaggttgtttatgcttattcaagcattgctgcacgaagactccttacacatgtatgtatttatgtgttgttaggatcccttttttctatgtccattattacattttactttgtatagaagggatctcactatggtgcccaggctagtctcaaactcctggcctcaagcgatcctcctatctcagcctcctgagtagctaggactacaggcgtgcaccaccaagcccagctactttataaattcttttgtggaaatggagtcttgctgtgttgcccgggctggtatccaactcctggcctcaagcgatccccctgcctcggtctcccaaagtactgagaattacaggcatgaaccacggtgtctggctacatcttgcattttatggcaagctttttgttgccctcagggacagtggagtggacaggacttggcccaggatggcctctcctcactgggatttcttcatgtggg

SEQ ID NO: 2608 - DNA, 479 bp, Homo sapiens
  MAP TO AL035422.12; EXPRESSED IN PLACENTA, SIGNAL = 1.2; EXPRESSED IN HEART, SIGNAL = 1.1; EXPRESSED IN BONE MARROW, SIGNAL = 1.3; EXPRESSED IN LUNG, SIGNAL = 2.1; EXPRESSED IN BRAIN, SIGNAL = 1.3; EXPRESSED IN FETAL LIVER, SIGNAL = 1.7; EXPRESSED IN ADULT LIVER, SIGNAL = 1.1
cccaggcttagctcacatcctaccttcttgatgaagctgttcccccatatccatgccctcactaatgtctcagtttttagaaattttacagtgcttataaactttcttctgatgttgtctaacctgtatgttctttgaggacaaggacctcgactcagaatgttcccgtgttctcctctagaactgaggaaatcgctgagtacacagtaggaactcaatgaatacttgctgatgaatcagtcaccagcctcttttgtgtcttctcttaacactgaacatcaatcaccaaataaagagtcagtccctgttgggtgtaggtctgcctctgaccacctctttaccagcttctacccagtatcacagggatttcctttcacagtgaattcacactgtcctgtgaggcagattcttcctcttatcaccttgtcctgcattgcttatcctggtgtctgtaactcccttctcagttgcccctggta

SEQ ID NO: 2609 - DNA, 475 bp, Homo sapiens
  MAP TO AL096814.10; EXPRESSED IN BT474, SIGNAL = 3.8; EXPRESSED IN HBL100, SIGNAL =   4; EXPRESSED IN HEART, SIGNAL = 5.2; EXPRESSED IN LUNG, SIGNAL = 4.9; EXPRESSED IN FETAL LIVER, SIGNAL =   7; EXPRESSED IN ADULT LIVER, SIGNAL = 5.5; EXPRESSED IN PLACENTA, SIGNAL = 5.7; EXPRESSED IN HELA, SIGNAL = 4.3; EXPRESSED IN BRAIN, SIGNAL = 6.5; EXPRESSED IN BONE MARROW, SIGNAL =   6
gcccttcagctctcaagaagaggacacagggagcatcagccgacagctaagagatggagggagggaaggagagacagagaagatggaaagggacaaaaggaagagaagagacagaagggtttggtgagtgagacagaaaaggtaaagagagacggagtggaaagaagagcagagaaagagccgaggagtggggaactgggagctctccctgaggacacttgtggaggaaggcgccaggtggactggccactggtccttcccttcagggtgccttaccccattcttgtcgaaggctcggaacatgccctctacatactgggaggcctcctcatcgtctgtgaccttgaagaagcgcttaaactcatgcataaagagtgtgccgctggggcactccatcacaaacttcttgtaccactcctggagctccgccacatctatctcgccagctgcctccgcctcctcccagctaaactcc

SEQ ID NO: 2610 - DNA, 494 bp, Homo sapiens
  MAP TO AL035562.14; EXPRESSED IN FETAL LIVER, SIGNAL = 1.2; EXPRESSED IN ADULT LIVER, SIGNAL = 2.1; EXPRESSED IN PLACENTA, SIGNAL = 1.7; EXPRESSED IN HELA, SIGNAL = 1.2; EXPRESSED IN HEART, SIGNAL = 1.5; EXPRESSED IN LUNG, SIGNAL = 1.6; EXPRESSED IN BRAIN, SIGNAL = 1.5; EXPRESSED IN BONE MARROW, SIGNAL = 1.4
tttgatgcagccatttagggctatgaactttcctcttagcactgcctttgctgtgtcccagaggtttttgataggttgtgtcactattgtcattaagtttgaagagttgtttaattccatttttatttcatttttgactgaatgatcattcaggatcaggttatttaatttccatgtattaaatattgtataaaatatttaatattccatatattaattgcatggttttaaaggttccttttggagttgatttccagttttattccactgtggtctgaaagagtgcttgatataatttcaattttcttaagtttattgaggctcattttgtggcctatcatatggtctgtcttggagaaagttccatgcaatgttgaatggaatgtataatcagtggttggtggatggagtgttctgtatatatctattaagtccatttgttccagagtatagtttaaatccattatttctctattgactttctgtcctgatga

SEQ ID NO: 2611 - DNA, 484 bp, Homo sapiens
  MAP TO AL096887.5; EXPRESSED IN BONE MARROW, SIGNAL = 1.9; EXPRESSED IN HBL100, SIGNAL = 1.2; EXPRESSED IN HELA, SIGNAL = 2.7; EXPRESSED IN HEART, SIGNAL =   2; EXPRESSED IN BRAIN, SIGNAL = 1.9; EXPRESSED IN ADULT LIVER, SIGNAL = 3.5; EXPRESSED IN FETAL LIVER, SIGNAL = 1.4; EXPRESSED IN BT474, SIGNAL = 1.1; EXPRESSED IN PLACENTA, SIGNAL = 2.7
aagtggaccccaagcaaaccacagcagccctacagaaaagtggccagactgctaaaagaaaaaaaaaaaaaaaactaaaggtcagcaacttcaaagattgaaggtagaagcccacaaagatgagaaagaatcagaaaaagaacactgaaaactcaaaaagccagagtgtcctctttcctccaaatgagtgcatcaacttttcagcaagagttcagaactaggttgaggctgagatggctgacatgacagaagtagaattcaggatatggataggaacgaacttcattcagcaaaaggattacattgtaatgcaatgcaaggaagctaaaaatcatgataaaacattgcaagagctgacagacaaaatagccagtatagaaaggaatgcagtcaacctgatagagctgaaaagcacactgcaagaacttcagaatgcaatcacatgtattaatagcagaatagataaagcagaggaaggaatttg

SEQ ID NO: 2612 - DNA, 463 bp, Homo sapiens
  MAP TO AL078591.15; EXPRESSED IN PLACENTA, SIGNAL =   8; EXPRESSED IN FETAL LIVER, SIGNAL = 6.6; EXPRESSED IN ADULT LIVER, SIGNAL = 9.7; EXPRESSED IN HEART, SIGNAL = 8.4; EXPRESSED IN HELA, SIGNAL =   9; EXPRESSED IN HBL100, SIGNAL = 7.4; EXPRESSED IN BRAIN, SIGNAL = 6.5; EXPRESSED IN LUNG, SIGNAL = 6.2; EXPRESSED IN BONE MARROW, SIGNAL = 7.8; EXPRESSED IN BT474, SIGNAL = 5.8
tagcatgagcaatctgtgccttaaggacatgctcctgctgcagataactagccaaacccatccatttatttcggcccatccctttgtttcccataagggatacttttagttaatctaatatccatagaaacaatgctaatgactggcttgctgttaataaatacgcgggtaaatctttgttcggggctctcagctctgaaggctgtgagactcctgatttcccactccacacctctatatttctgtgtgtgcgcctttaattcctctagcaccactgggttagcactgagctggtcttggcaagtggcgtccatcacgggggctcgaatccaggtcgaagggtcaccggagcgacggttggagaacgtggaactaagctggaggacactcgagtactcttaaagccaaccccgtggtgagtaagaaggggagctcagaagcatcagggtaacagtggcacaag

SEQ ID NO: 2613 - DNA, 458 bp, Homo sapiens
  MAP TO AL033383.24; EXPRESSED IN LUNG, SIGNAL = 2.1; EXPRESSED IN BONE MARROW, SIGNAL = 1.1e+02; EXPRESSED IN BT474, SIGNAL = 1.6; EXPRESSED IN FETAL LIVER, SIGNAL = 2.2; EXPRESSED IN ADULT LIVER, SIGNAL = 1.1; EXPRESSED IN HBL100, SIGNAL = 1.3; EXPRESSED IN HELA, SIGNAL = 1.9; EXPRESSED IN PLACENTA, SIGNAL = 1.1; EXPRESSED IN HEART, SIGNAL = 1.2
cccaattctatcatcaagctcagtatttgttaaacacctatacttaaaatactcatcgaaaaaagtgcaaatattaacatggttaatggattgggttacttaaaattatgaaactcattactacttcatttatttttatttttacttactacttcatttttaatggtccacaagttctagttttccgtttaaaatctcatgcactggtaaaaagctttaacattttgtacacaagttaccttggagaagaaagtcgtctcctctctggttctcgtcgttttctttctaaggatcggctcttggctcttctcccaggagacagtgtccgcgagggggatttgctctgcttagatcttctatcattcaaaagtggagacctgcttcttcttgatttatcacgtggttttggagacaaacttcttcttttaggactacgaccaggtcttctgctgggtgac

SEQ ID NO: 2614 - DNA, 396 bp, Homo sapiens
  MAP TO AL080247.3; EXPRESSED IN PLACENTA, SIGNAL = 0.99; EXPRESSED IN BONE MARROW, SIGNAL =   1; EXPRESSED IN FETAL LIVER, SIGNAL = 1.2; EXPRESSED IN HEART, SIGNAL = 1.1; EXPRESSED IN HBL100, SIGNAL = 0.92; EXPRESSED IN BRAIN, SIGNAL = 1.1; EXPRESSED IN LUNG, SIGNAL = 3.5; EXPRESSED IN ADULT LIVER, SIGNAL = 1.1
tgcagcaaaatgtcatgattcagataaaatagtttaccaggctaaaaatgagtttccttctaaacctatgaaataagcttttaaatccctacatatccacaaaaacagacttaacattatgaaataactggtatttctcaagctctttccaactgtctgattctacaatctaaactcacacttcctgaagacacagacgacacatgaacagcagcacagagccacagcacccgcggcgccgctgtccttacctgtaaaacagcctctattattgtcactgtctttccagtaccaggaggtccaaagagaatatacgggaggggacggcagtcaccactcagaatccttttaactgctaacttctgattttcatttagcactgggttgaaaaactcc

SEQ ID NO: 2615 - DNA, 479 bp, Homo sapiens
  MAP TO AL034384.1; EXPRESSED IN BT474, SIGNAL =   1; EXPRESSED IN PLACENTA, SIGNAL = 0.98; EXPRESSED IN BONE MARROW, SIGNAL = 1.3; EXPRESSED IN FETAL LIVER, SIGNAL = 1.2; EXPRESSED IN ADULT LIVER, SIGNAL = 1.3; EXPRESSED IN HEART, SIGNAL =   1; EXPRESSED IN HBL100, SIGNAL = 0.92; EXPRESSED IN BRAIN, SIGNAL = 1.6; EXPRESSED IN LUNG, SIGNAL = 3.2
gttacccactccaggctttgcccaggttgctccctagtcccagatttctttccctgcacgctctatgctctgcccaggcctgattcctgtccttccttctaggctctctcctaccagctcttccccactcccctaacatctggctggggtctgtaccaacttgtgcttatggatccttatgctttcttcagccccgccccctgacctggtgagcttctgggcgcctagtcacttcttagtgaatgtttgctgaataagtgctcaatgctcatggcttgcatacaatgaagagtggcctgagccctgccagccagcaactgtgcttgcagtgtccccacttacgctgtggaagatggagactttccagtcaacatgaaggaggagcaaaggcctgagagtgtgaactctgtcattggtttggcagccacccaggatgcccctggccaggaggtggctgggcaactctgggctcacagaca

SEQ ID NO: 2616 - DNA, 472 bp, Homo sapiens
  MAP TO AL096678.8; EXPRESSED IN BT474, SIGNAL = 1.1; EXPRESSED IN BONE MARROW, SIGNAL = 1.2; EXPRESSED IN LUNG, SIGNAL = 1.7; EXPRESSED IN ADULT LIVER, SIGNAL = 1.4; EXPRESSED IN PLACENTA, SIGNAL = 0.96; EXPRESSED IN HEART, SIGNAL = 0.98; EXPRESSED IN HELA, SIGNAL = 2.1; EXPRESSED IN HBL100, SIGNAL = 1.9; EXPRESSED IN BRAIN, SIGNAL = 1.2
ggcagagaaatcaaacacagcattaaatgctctgggggaacagcataaggtgggagaccttgcaacaagcaggcttccccactcctcactaagggtcttaaaacagaaacctagaactcctcggaagtgccacatgttgatggaggagtatcctaaaagggattctaatgggaataaggtgacttctcctcttcctcattatttttaacataaaaagccagacatctcatgatacctggggctggaaaccttggtcagcagggccattctctccaccttcttcatcggcttccttgtctttttcctccacagactgctgctgctcctcagagtgttcttcaggatgctgagcagcatctccatcttggtcatcagctcctgtgtccatttcctcttccccttctgccttgtcatcttcactggggccttcctcaggctcctgtggactctgactttcgttctggtcggtctc

SEQ ID NO: 2617 - DNA, 470 bp, Homo sapiens
  MAP TO AL096710.8; EXPRESSED IN HEART, SIGNAL = 1.4; EXPRESSED IN BRAIN, SIGNAL = 1.1; EXPRESSED IN BONE MARROW, SIGNAL = 0.92; EXPRESSED IN LUNG, SIGNAL = 1.9; EXPRESSED IN BT474, SIGNAL = 1.1; EXPRESSED IN ADULT LIVER, SIGNAL = 1.6; EXPRESSED IN HBL100, SIGNAL = 1.7; EXPRESSED IN HELA, SIGNAL = 0.92
aatggctttcaacacttggcaaatctgagccccactcagtgcggtccagttgtaccttcagacagtaaaatactaagtttaaaaaagaaattgataacaataaagactgaaacactcaggtaaagtaaacatttttttacctgcatctcatcaacccaattcaaaagatcctgaacaaatttcatattgatttcttcttctgttaaattttgatccagcaaagaagactttagaaggggttttcggatctgcatcaacttcaaagtttgcaatgaatttggctctactcctgaactgaaatttggaactaatcctgatgggaaaccaggtgtataagctggagtgacagatggagtcaggcgggaagtcatccctgatgacaggccagaagtcatactagaagaggttagggaaggtgttaaactctgggtcagccctgaggtcagactagggtgtaaggtctgtgcaaa

SEQ ID NO: 2618 - DNA, 448 bp, Homo sapiens
  MAP TO AL109624.1; EXPRESSED IN ADULT LIVER, SIGNAL = 7.6; EXPRESSED IN PLACENTA, SIGNAL = 7.3; EXPRESSED IN BRAIN, SIGNAL = 6.8; EXPRESSED IN BT474, SIGNAL = 3.7; EXPRESSED IN FETAL LIVER, SIGNAL = 6.1; EXPRESSED IN HEART, SIGNAL = 8.2; EXPRESSED IN HELA, SIGNAL = 5.5; EXPRESSED IN HBL100, SIGNAL = 4.8; EXPRESSED IN LUNG, SIGNAL = 4.1; EXPRESSED IN BONE MARROW, SIGNAL = 8.2
agaagtagggggacagccagttgagttcttgacactggggctacattttctatgtctcactaaaaggggacccctctccaagagggaatataatataaaagtatgtctgctaaaagaaattctaagattcctggagcctctggtctgtgaaggggatctaagtctttgactcatttcttcctctgtgtccctcaatgccccattctccttttgggaaaggtccttctgactaagtttggggctataattgctctaaatcaggacaggatatggtggagtttctctgggcccatggtgccaccatgttggccctggttcatggggaagttctggacacagaggagattcctttagaaattgagagccaagttaaccctgtggtgtaagctcaggaagaggtcagaggagcaaaaacggctaggccagtggcatcagtacgattgaagga

SEQ ID NO: 2619 - DNA, 1943 bp, Homo sapiens
  MAP TO AL050341.18; EXPRESSED IN PLACENTA, SIGNAL = 1.1; EXPRESSED IN HBL100, SIGNAL = 2.2; EXPRESSED IN HELA, SIGNAL =   3; EXPRESSED IN HEART, SIGNAL = 1.2; EXPRESSED IN BRAIN, SIGNAL = 2.2; EXPRESSED IN BONE MARROW, SIGNAL = 1.3; EXPRESSED IN LUNG, SIGNAL = 4.5; EXPRESSED IN ADULT LIVER, SIGNAL =   1; EXPRESSED IN BT474, SIGNAL = 3.8; EXPRESSED IN FETAL LIVER, SIGNAL =   1
aaccataaacaaaagcatgacgatctgcgttacaaatgtgaattaaatggctgtaatattgttttcagtgacttgggacagctttaccaccatgaagcacaacactttagggatgcatcttacacatgcaacttccttggctgtaaaaagttctattactccaaaattgaataccagaatcacctctcaatgcataatgttgaaaattcaaatggagacataaagaaatcagtgaaacttgaggagtctgcaacaggtgaaaagcaagattgtattaatcagccccatctacttaaccaaactgataaatcacatttacctgaagatcttttctgtgcagaatcagctaattctcaaatagatacagaaactgcagaaaacctgaaagaaaacagtgacagtaattctagtgatcagttaagtcatagctcttcagcttcaatgaatgaagagctaattgacacactagatcactctgaaactatgcaggatgtattgttatctaatgagaaagtctttgggccctccagtttaaaagaaaaatgttccagtatggcagtttgttttgacgggactaagtttacctgtggttttgatggctgtggttccacatacaaaaatgcaagaggaatgcagaaacatttacggaaggttcatccataccatttcaagcccaaaaagataaagacgaaagatctgtttccctctttgggtaatgaacataatcagacaactgaaaagttggatgcagaacctaaaccctgctcagatacaaacagtgactccccagatgaaggtctagatcacaatattcacattaaatgtaaacgagaacatcaaggttattcctcagaatcctccatttgtgcttctaaaaggccctgtacagaggataccatgttggaacttctgttacgcttgaaacatttaagcttgaaaaactcaataacacatggatctttctcagggtcattgcaggggtacccatccagtggtgctaagtctcttcagtcagtttcatctatctcagaccttaattttcagaatcaagatgaaaacatgccaagtcagtaccttgcacagttggcggctaagccgtttttctgtgagcttcaaggatgcaaatatgaatttgtgaccagagaggctctgttaatgcattatcttaaaaagcataattattcaaaagaaaaagtccttcagttaaccatgttccaacatcggtattccccatttcagtgtcatatttgccaaaggtcatttacaagaaaaacacaccttaggattcattataaaaataaacatcaaattggcagtgacagagcaactcacaaactattagataatgaaaagtgtgatcatgaaggcccatgttcagtagataggttgaaaggtgattgttctgcagaacttggaggtgatcccagtagtaactctgagaaaccacactgtcatcctaaaaaggatgaatgtagttctgaaacagatttggaatcatcttgtgaagaaacagaaagtaaaacatctgacatttcatcaccaataggcagccatagagaagaacaagaaggaagagagggcagaggtagcaggcgaactgttgctaaaggaaatctgtgttatattttgaataaataccacaaaccattccattgtattcataaaacttgcaactcctcattcaccaatctaaaaggcttaattcgccattacagaactgtacatcagtacaacaaagaacagttatgtttggagaaagacaaagcaagaaccaaaagggaacttgtcaaatgtaaaaagatatttgcttgcaaatataaggaatgtaataaacgcttcctgtgttccaaagctcttgctaagcactgtagtgattctcataacctagaccatattgaagagcctaaagtactttccgaagctggatctgcagcaaggttttc

SEQ ID NO: 2620 - DNA, 488 bp, Homo sapiens
  MAP TO AP000509.1; EXPRESSED IN BONE MARROW, SIGNAL = 1.2; EXPRESSED IN LUNG, SIGNAL = 4.9; EXPRESSED IN ADULT LIVER, SIGNAL = 2.2; EXPRESSED IN BT474, SIGNAL = 4.7; EXPRESSED IN FETAL LIVER, SIGNAL = 1.1; EXPRESSED IN HELA, SIGNAL = 1.7; EXPRESSED IN PLACENTA, SIGNAL = 1.2; EXPRESSED IN HBL100, SIGNAL = 1.2; EXPRESSED IN HEART, SIGNAL = 1.6
ctgttccctggaaagcagagccaggagagtgtatagcacagctcctgattgtgccgtatgtgggaatgggaagagtgaaattaaacaaacaggaggatttggaagcacaaataaacaaggcaaaacagcttattgggtgaatcaaattactgataaacgtcctacctgtgaaataactattcagggaaagaaatgtaaagatttggtagatacaggagcggacatttcaatcatttctcgacagcactggccgtctgcgtggccagttcaacacactcaacttaaaacagttggagttggtaaagcccctgaagtatatcaaagccattatattttgcattgtgaaggtcccgatggacaacctgggactattcaaccaattataacttccgtacctataaatttatgggggagagatttattacaacaatggggagcacaagttctacttccagagcaattatatagccctcaaagtcaacatatga

SEQ ID NO: 2621 - DNA, 458 bp, Homo sapiens
  MAP TO AP000513.1; EXPRESSED IN PLACENTA, SIGNAL = 0.99; EXPRESSED IN HBL100, SIGNAL = 1.1; EXPRESSED IN HELA, SIGNAL =   2; EXPRESSED IN HEART, SIGNAL = 0.86; EXPRESSED IN BRAIN, SIGNAL = 0.92; EXPRESSED IN BONE MARROW, SIGNAL =   1; EXPRESSED IN LUNG, SIGNAL = 2.1; EXPRESSED IN BT474, SIGNAL = 1.8
aggcatttcccctttctgtcacctgcagagctccggaaattggcctcagtccttgtcagcgactggatggctgtcatccgctctcagagcagtacccagcctgctggtaagctccttagtcctttatcctttgtatttatttctttcctattgggatgtggcctttaggtgctcccagtctgcttcacctctgacagtgttcatctaaataaaatccttttctgctttgttttttcacaacagagaaagataagaagaaacgtaaagatgaaggaaaaagtcgaactacccttcctgagcgacctttgacagaggtgaaggctgagacccgggctgaggaggccccagagaagaagagggagaagcccaagtctcttcgcaccacagcacccagtcatgccaagttccgttccactggtaagactggcggctggcctctggagggttcatgggcatgt

SEQ ID NO: 2622 - DNA, 448 bp, Homo sapiens
  MAP TO AP000346.1; EXPRESSED IN PLACENTA, SIGNAL = 1.7; EXPRESSED IN HELA, SIGNAL = 1.6; EXPRESSED IN HBL100, SIGNAL = 1.4; EXPRESSED IN HEART, SIGNAL = 1.3; EXPRESSED IN BONE MARROW, SIGNAL = 2.1; EXPRESSED IN BRAIN, SIGNAL = 1.7; EXPRESSED IN ADULT LIVER, SIGNAL = 1.4; EXPRESSED IN BT474, SIGNAL = 1.4; EXPRESSED IN FETAL LIVER, SIGNAL = 1.2
tgcagctcagtctcactttgttcatgaagccttttctgatcattcattccgtctgtccgtccatccatctgtccatctattcatctgtctttgcatccatctatcatctgtccattcatccacctacctatccatccatccataaatccatcctgtctaccaggcactgtttcgtgtactggggacatggtgtggtcccccaggctctcacccccatccatcccaggtcatggccaacaaggccctcctcatggtcatgtccaaggtccttctgctgtacctggtgtctctgctggatgtgacacagagctggcccctccttccagtgactcttttccccttgaggtctgactcccctttcctcttccccggcatctgtttctccacggcccatgcctggctgctgactccccagacccccacccagacctctttcttggccgtcttt

SEQ ID NO: 2623 - DNA, 475 bp, Homo sapiens
  MAP TO AP000352.2; EXPRESSED IN FETAL LIVER, SIGNAL =  21; EXPRESSED IN HELA, SIGNAL =  25; EXPRESSED IN HEART, SIGNAL =  38; EXPRESSED IN LUNG, SIGNAL =  15; EXPRESSED IN BRAIN, SIGNAL =  19; EXPRESSED IN BT474, SIGNAL =  14; EXPRESSED IN ADULT LIVER, SIGNAL =  35; EXPRESSED IN PLACENTA, SIGNAL =  22; EXPRESSED IN HBL100, SIGNAL =  16; EXPRESSED IN BONE MARROW, SIGNAL =  21
atcttggaaacgtgcgactccaggaaagatgagctggcattacttgtcagttataagatagtcatggcacttttgccatttccctgggaagttcaagtggctgtgccagtgccgtgctcctcccgtccccggggtgcatattcaaggagagatctgactgtgtgtgtgtgtgtgtgtgtgtgtgtgtgtgtgtgtgtgtgtgtgtgtgtgtgtgtgtgtgtgtgtgtgtgtttgccctctgcttgtgtcgcttccaggcagtgatgctggactccacagatgtcaacctctggtataagattggacatgtggccctgaggctcatccggatccccctggctcgccatgcttttgaggaagggctgcggtgcaatcctgaccactggccctgtttggataacctaatcactgtcctgtacaccctcagtgattacacaagtgagtcatgctttgatgctttcttccatgtgccagt

SEQ ID NO: 2624 - DNA, 455 bp, Homo sapiens
  MAP TO AP000356.1; EXPRESSED IN HEART, SIGNAL = 0.99; EXPRESSED IN LUNG, SIGNAL = 1.7; EXPRESSED IN ADULT LIVER, SIGNAL = 2.4
tcattgtggggatttttgtgacatgtcagaaaggagactgggcaaatgcttaagccactgtgatttcccccgggggctggcttatttggtgtcagggtttttttgtgtgtgttttgtttttatcatattgaaattctggaacttagagtcacactcaggagtgtaaccacctctggactattggtgatatttcagtttttctgctgagtctaaggaaatcttgaaggtcagaggcatcagtatatggccctttgcttttcagtcaacttactacatggagggaaacctgggccaccccgtgttccagacgcagttcggaaggatcgcggtgaacatttgctacgggcggcaccaccccctcaactggcttatgtacagcatcaacggggctgagatcatcttcaacccctcggccacgataggagcactcaggtcactcagttggtggggtctgg

SEQ ID NO: 2625 - DNA, 483 bp, Homo sapiens
  MAP TO AP000497.1; EXPRESSED IN BT474, SIGNAL = 1.4; EXPRESSED IN FETAL LIVER, SIGNAL = 2.1; EXPRESSED IN HEART, SIGNAL = 2.6; EXPRESSED IN LUNG, SIGNAL = 5.7; EXPRESSED IN BRAIN, SIGNAL = 1.8; EXPRESSED IN ADULT LIVER, SIGNAL = 2.4; EXPRESSED IN PLACENTA, SIGNAL = 2.3; EXPRESSED IN HELA, SIGNAL = 1.8; EXPRESSED IN HBL100, SIGNAL = 1.5; EXPRESSED IN BONE MARROW, SIGNAL = 2.6
  unsure 209
  unsure 212
  unsure 214
tcaaggtcagtttggaaggctgtgcagagcagtgtttggggggacagagaggcagtgaaggggaaggcattcagatgacatgagaagctgtgatgaatccatcgcaaaatagagtagagcttgtgttggccatctatgggtcatgcagttggtcaagatgtcaacaagcacaatccctttgcctgtcattgactctatgcttttgtatntgngnaagaaagcaagtcatccaaggaataaatactggatgaacccacttacgtgtgccacagagagagctagacagacttctgcttgccagaatggagagtcggaaccacttcctaaaaaatccccgtttttttcctcctaacactcgatatggaggcaagtctcttgtttttcctccaaagaagccagcaccgataggagaattccagagtacagagccagaaccgaggtatgtttttttttggcttgaaatttcagaaaacctggcccatg

SEQ ID NO: 2626 - DNA, 1490 bp, Homo sapiens
  MAP TO AL109928.5; EXPRESSED IN BONE MARROW, SIGNAL = 1.1; EXPRESSED IN BT474, SIGNAL =   2; EXPRESSED IN ADULT LIVER, SIGNAL = 0.9; EXPRESSED IN HELA, SIGNAL = 1.4; EXPRESSED IN HBL100, SIGNAL =   1; EXPRESSED IN HEART, SIGNAL =   1; EXPRESSED IN LUNG, SIGNAL = 1.2; EXPRESSED IN BRAIN, SIGNAL = 1.2
tgaaacaagcactttgagaaatgttaatgtttttcctaaatgctaatatttgatataaaatggaaactgtgcattctcttttgtcacatgcattatataatgtatctcaaatagagtattatatgggaaaatgttctgtaaaattacttatgctttaaggagtttggaagctgacattttctaatgcctactaatagctgagacaaaaaaaagtacaactagaagattctttttgtttgtttaattatagccagaccattttttgtcatatgtggtaagaattgcagttttattttctcacagcaatatgaatgctggcccatcttggaataaagtgcaacattcaaagaattcttcaggaaaaaggcagagtaaatcccaagtaccccacgcttcttcccagccgagaagcagcctcacagctgtcacccagcctactgaagaaaaacttaaagaaagcatttccccggaagcaagacgcaaaaggaatccactcggttccaggtgtcagggggcctcagggaataaactgtttcttgattttcagtcaatgaaaattattaaagagaatgctgatgaggacagtgcaagtgatctctctgattcggaaagaattcccattcctccttctcccctcacacctccagatctcaatcttcgagctgaagaaattgatccagtttactttgatcttcaccctggtcagggccatacaaaacctgaatactattatcctaatttccttccatcccctttcagctcctgggacctacgagatatggccctgcttctgaacgcagagaacaaaacggaagccgtgccccgagtgggaggacttcttgggaagtatatcgatagacttattcagcttgagtggctgcaagtccagactgtacagtgtgaaaaagcaaaggggggcaaagcaaggccccccactgcccctgggacctcaggggcactgaaaagccctgggagaagtaagctaattgctagtgctctgtccaagccactacctcaccaggaaggggcttcaaagtcaggcccttcccgaaagaaagcttttcaccatgaagaaatccacccatcacattatgcatttgagacttcccctagacccattgatgtgcttggtggtaccaggttttgttctcagaggcaaacccttgaaatgaggacagaagaaaagaaaaagaaatcaagtaagagtacgaagctgcagcgctgggatctgtccggcagtggaagcagctctaaggtggaaaccagcggtcacattcgagttcccaaacaggcagctgtgattctggactcagcagattcctgtaaggcctccaaaacacaagcacatgcacatcctaggaaaaagggaaaggcagagagctgtggtcatgccactgtatcgagtgagaaaaaactgaaaacaaacggagtaaagcaaaacacatataaactaaaataaatatctaaaatgctgaattgccaagacctgc

SEQ ID NO: 2627 - DNA, 988 bp, Homo sapiens
  MAP TO AL034380.21; EXPRESSED IN PLACENTA, SIGNAL = 4.8; EXPRESSED IN HBL100, SIGNAL = 5.2; EXPRESSED IN HEART, SIGNAL = 3.3; EXPRESSED IN BONE MARROW, SIGNAL = 5.4; EXPRESSED IN FETAL LIVER, SIGNAL = 3.4; EXPRESSED IN HELA, SIGNAL =  14; EXPRESSED IN BRAIN, SIGNAL = 4.4; EXPRESSED IN LUNG, SIGNAL = 5.7; EXPRESSED IN BT474, SIGNAL = 4.5; EXPRESSED IN ADULT LIVER, SIGNAL = 4.8
tccactttgttgcagctcaccccttggtcctgttcctcctccttttcataagttagtggtgcctgcttccgttctgggtgcttgtggtgcagcaggatcagcttgcccaggatgagcagcagccctgggtgtttggacatctcaaagtcattgcctggcacaaatgacaggcttcgaatggtattggacacacagacgcagcgcttggcaagagaatcctgccagtccagaagggtacacagtggggtctcatccttactgtggggttcgtcctctaggatcttgatgttccggtggctctgtgctgggctaatgccaaatggaaacttgctgctctccttgatggcctctgaactcttagctccatcctcggtcaaggtgctagaccgagtagacaacatgtcatccatagtggctgtgatccgtttttctggaggtccatcaggtgggggcccctcctggtctgttgtccctggtgtaccctctgctgttgtcacatgcttccgaggggctggtgggcagggtgcgtgaggccgggaaggcagcagctctgtcttgctctcgaagtgggtctggatatgctcagtggtgtcccccccaccaatccgccagtgcagcaggccactgtcaaactcctgcacacgcccaagcttatctgagcagtccaccacaaatggatcattcttctgtacgatctttactggaagcttgtcaaacttactgatcagcttctcctcactattctctgaagctggcttgtccttgcctgaaaaggctatctcctcatcattttcaactacttcctcttcttcttcctcttctagtttaggacctagaagttcttcttcttcttccccaccctccatgggagctggactagacaccttgctgaacctcccaggatccagtagcgttctctgtcctgggtcacccacctcatactcctttaaaatgccaaagatctcaatcaggcatcgtcggaaatatt

SEQ ID NO: 2628 - DNA, 496 bp, Homo sapiens
  MAP TO AP000552.1; EXPRESSED IN PLACENTA, SIGNAL = 2.8; EXPRESSED IN HBL100, SIGNAL = 8.3; EXPRESSED IN HEART, SIGNAL = 2.7; EXPRESSED IN FETAL LIVER, SIGNAL = 2.2; EXPRESSED IN ADULT LIVER, SIGNAL = 3.3; EXPRESSED IN HELA, SIGNAL = 2.6; EXPRESSED IN BRAIN, SIGNAL = 2.6; EXPRESSED IN LUNG, SIGNAL = 1.9; EXPRESSED IN BONE MARROW, SIGNAL =   3; EXPRESSED IN BT474, SIGNAL = 2.2
acaggaaaacacccagcaagaagaagccagtgcccaccaagaccacggaccctggtccaggggatctggacgctgaccattcccccaagatcccaaaggaaaccaaagctccacctccaacgagcccggcttccaggagcaagtttgtggaatggtcctcttgccaggcagacacctccgctgagctgatgtgtgtagaagcagtcctggacattttcaagacgatcctgccggccctatggagggcagcgatgggtccctgtccgcaagcccactcttctactcccccaacgtgccttcccgctctgatggtgacagtagctccgtggacagcgacgacagcattgagcaggaaatctggacgtttttggccctcaaggtgcagtctagaagtttgctggccagaggtgagagctgccctcaggctgcccagggcccactttcaccacctggcctcagcagccagaccggcagccccaaggcccctctctctaaa

SEQ ID NO: 2629 - DNA, 465 bp, Homo sapiens
  MAP TO AC004019.11; EXPRESSED IN BONE MARROW, SIGNAL = 2.5; EXPRESSED IN BT474, SIGNAL = 2.8; EXPRESSED IN HBL100, SIGNAL =   3; EXPRESSED IN HEART, SIGNAL = 4.2; EXPRESSED IN LUNG, SIGNAL = 8.5; EXPRESSED IN BRAIN, SIGNAL = 2.9; EXPRESSED IN ADULT LIVER, SIGNAL = 3.4; EXPRESSED IN FETAL LIVER, SIGNAL = 2.7; EXPRESSED IN PLACENTA, SIGNAL = 3.7; EXPRESSED IN HELA, SIGNAL = 2.6
caatataatgtgccctaaaggtgaattaaactcatagattacccaggttgcatcttctatttattagaattgtcttttgtgacctatagttctgtttctatagtttctataaactatagtttctataaacaatttctgtaaactatacctagaagtcaatcctcctgtcttcctatagagtataccaagatgtctgataatttagagaggtgtttccatcgggcaatgatgaaacattttcctggagaagatggagacacagatgaagaattttggattcgagaggatgaaaagcgggagaaaagacggagtcgggctgggcgaagtggtgggagccatgtttggacccgctccagggacccagaagggtccagcaggaaacagcagcccatggagaatggaggaaagtcgttgccccccacacgccgagcgccctcttctggggacgatcagagcagcagctcc

SEQ ID NO: 2630 - DNA, 471 bp, Homo sapiens
  MAP TO AC005948.6; EXPRESSED IN PLACENTA, SIGNAL = 1.2; EXPRESSED IN HEART, SIGNAL = 1.4; EXPRESSED IN LUNG, SIGNAL = 3.6; EXPRESSED IN BRAIN, SIGNAL = 0.97; EXPRESSED IN BONE MARROW, SIGNAL = 1.3; EXPRESSED IN BT474, SIGNAL = 1.2; EXPRESSED IN FETAL LIVER, SIGNAL = 1.2; EXPRESSED IN ADULT LIVER, SIGNAL = 1.1; EXPRESSED IN HBL100, SIGNAL = 1.4
catctcaagatgaacaagtagtgtgagagaaatcaatatttattgttttaaaccactaaactggcagtggggatggggtggggggtcttcaatactacaacattatctacatctattctgactgattcatcattaataatttttttctctaagacaaggccaaggacaaatgcatgccagcatttcacgggaaatatttcacaggccaaaagccattattcagtcatttgtggctttagccatttaaccagttactaatccccctaattgtactattgatagaccaaaagcctatcaagagagactctatcaaagacttactgaaatccaaagatatgtctattgcatttatttatcagatgagccataatgccaaagaagagatgaagttagtgcagaatgacttctttatcagcaatccacacaaattcctggtgaccactgcttgctttcctaaatgttcacagatcc

SEQ ID NO: 2631 - DNA, 493 bp, Homo sapiens
  MAP TO AC006369.3; EXPRESSED IN BRAIN, SIGNAL =   1; EXPRESSED IN LUNG, SIGNAL = 6.4; EXPRESSED IN FETAL LIVER, SIGNAL = 1.1; EXPRESSED IN ADULT LIVER, SIGNAL =   1; EXPRESSED IN BT474, SIGNAL = 2.7; EXPRESSED IN HBL100, SIGNAL = 0.93; EXPRESSED IN PLACENTA, SIGNAL = 0.97; EXPRESSED IN HEART, SIGNAL = 2.7
cctctcgtacctggagcttgacactgctctgccctgctaaacctgcatgaagaaccacaaagaactgtgctcactagagttcctgataacgtgactgtcaccacaaaagtaagaagggtcagaaagattcgattggctcaaccatagcttcttctgagtccctcattgtactttaaatggcacaagccacattggggataaaagggcactgaagagtaagagaatgtccactattcatgttcattaccaatgatgataatgagaagcacaaattggaactctttctaggattttttttaactgccttcagatacccagccatcatcaccaccatcactgccactaccatcatcactgtcttcattatcatcatcattatgatcatcacagttcacatgtactgagtacttattatacagtgggcaatattttaagctgttatatatttaaatcttcatagtaaccctatgagggaggtactgtcaaccccatt

SEQ ID NO: 2632 - DNA, 493 bp, Homo sapiens
  MAP TO AC008013.8; EXPRESSED IN HBL100, SIGNAL = 3.7; EXPRESSED IN HELA, SIGNAL =   3; EXPRESSED IN PLACENTA, SIGNAL =   4; EXPRESSED IN HEART, SIGNAL = 4.2; EXPRESSED IN BRAIN, SIGNAL = 3.7; EXPRESSED IN BONE MARROW, SIGNAL = 3.7; EXPRESSED IN LUNG, SIGNAL = 3.8; EXPRESSED IN BT474, SIGNAL = 2.9; EXPRESSED IN FETAL LIVER, SIGNAL = 3.7; EXPRESSED IN ADULT LIVER, SIGNAL = 3.7
gattcaaaacctggctctgcaggttgcttaccttggacaagtctcctaacctctctcagcctcgatttcctcatctgtaaaattgggtaaccataccattctcgcctcctttggaggactgaatgagccagtgcaagagaagtgcctggcaccctgtgggcactgaacggatagcagctgccgaggcccccgccaccccctgctctaacccggtggtctcctgcaggtcgggggagcagccgtcctggctgtgggcatctggaccctggtggagaagagtggctacctcagcgtcctggcctccagcacctttgccgcctccgcctacatcctcatctttgcgggcgtacttgtcatggtgaccggcttcctgggcttcggtgccatcctctgggagcggaagggctgcctctccacggtcagtgcccgccctgtgctctgcagggatggggagccctgcaccacccagtcaggtttccagcaagtgagaggg

SEQ ID NO: 2633 - DNA, 445 bp, Homo sapiens
  MAP TO AC006146.2; EXPRESSED IN PLACENTA, SIGNAL = 2.1; EXPRESSED IN BRAIN, SIGNAL = 3.3; EXPRESSED IN ADULT LIVER, SIGNAL = 1.6; EXPRESSED IN FETAL LIVER, SIGNAL = 2.4; EXPRESSED IN BT474, SIGNAL = 2.1; EXPRESSED IN HEART, SIGNAL = 1.7; EXPRESSED IN HELA, SIGNAL = 2.3; EXPRESSED IN HBL100, SIGNAL = 2.1; EXPRESSED IN LUNG, SIGNAL = 5.1; EXPRESSED IN BONE MARROW, SIGNAL = 2.4
ccctcgttctctctcaggtgctcccagggcttgagactcttctgtccccatggctactatgccatggggacagagtccagagtcctagtacagaagactatgctgggccagccaggcgagcaggactagctggggctggtgaaccccccggccgggtcagaatctgtgctacagcagtgagacagagctctaggctcactgcccttgttcttgttccccatagacttcccaaaagttcccaagggtgcctcttcccagaagagagtccccaagtgaagagaggctggagcccaagagggaggtgaaggagcccaggaaggagggggaggaggaggtgccagagatccaagagaaggaggagcaggaagaggggcgagagcgcagcaggcgggcagcggcagtcaaagccacgcagacactacaggccaatgagtcggtgagtgtg

SEQ ID NO: 2634 - DNA, 470 bp, Homo sapiens
  MAP TO AC006452.2; EXPRESSED IN BONE MARROW, SIGNAL = 1.8; EXPRESSED IN BRAIN, SIGNAL = 2.2; EXPRESSED IN LUNG, SIGNAL = 4.8; EXPRESSED IN ADULT LIVER, SIGNAL = 1.9; EXPRESSED IN BT474, SIGNAL = 1.4; EXPRESSED IN FETAL LIVER, SIGNAL = 1.5; EXPRESSED IN HELA, SIGNAL = 1.4; EXPRESSED IN PLACENTA, SIGNAL = 1.7; EXPRESSED IN HBL100, SIGNAL = 1.4; EXPRESSED IN HEART, SIGNAL = 1.6
gcagggccatatgtgagtgaaaaacatttacgagaggctgcagagtccggatgagcagaaggaggagctgagctgacaggaggaatgggatgatcgaatccttttcccatcccctggtctatttatagagtcatctgccttcaggaaatgctgagccccttctcccaggaccctgttgggagtgacgcctgtgctggctgacccagccttccacatcctcctcctggcctcagcagctctccccttgtgatccagtgggttactgggaacccagcctgtaaatgacagtgcttctcagaggtcccagtctagtgaggaaattcaaggaggaaaggcaaaacaacaacaacaacacaacaacaacaacaacaaacttaatgatactggaaaagcgcctggcacagagaggcccctcaacaccaacacagggagggaacaggtgggacgccagggctgcaggtgacaacact

SEQ ID NO: 2635 - DNA, 470 bp, Homo sapiens
  MAP TO AC006977.3; EXPRESSED IN BT474, SIGNAL =   1; EXPRESSED IN FETAL LIVER, SIGNAL = 1.1; EXPRESSED IN PLACENTA, SIGNAL = 1.4; EXPRESSED IN HBL100, SIGNAL = 1.7; EXPRESSED IN HELA, SIGNAL = 1.1; EXPRESSED IN HEART, SIGNAL = 1.4; EXPRESSED IN BRAIN, SIGNAL = 1.2; EXPRESSED IN BONE MARROW, SIGNAL = 1.2; EXPRESSED IN LUNG, SIGNAL = 1.3; EXPRESSED IN ADULT LIVER, SIGNAL = 1.6
ccccatggcataatcacagttgtgatgttgtgatgattcagtgaatgtctgtctccccactggatggtaagcttcctgagggcaggaacagcattggttccagtcaatgctatgtcccaggactgttcgtttttgcacatactaatcctaaaaggacgatgacaacagcaaccacttacatgacctagatgctcttctgggtgttgtgcaaatattaacaatttaatccttgcaacaatccacgagggaggcattcttctactcccacttaacagacaaggacagtgaagctagtaaagagaagtcatttgcccaaggggaccccactactgttggcagagctgggtgcaaacgcaggcttgtgaagccaggacccatgcattcaaagaccatgccaggtgcccccactgcacacctcatccccacataccagtgagggggagagaaatgctcctgcactgcctctgatt

SEQ ID NO: 2636 - DNA, 364 bp, Homo sapiens
  MAP TO AC009546.2; EXPRESSED IN PLACENTA, SIGNAL = 3.4; EXPRESSED IN HBL100, SIGNAL = 2.3; EXPRESSED IN HEART, SIGNAL = 3.7; EXPRESSED IN BONE MARROW, SIGNAL =   3; EXPRESSED IN BRAIN, SIGNAL = 2.9; EXPRESSED IN LUNG, SIGNAL =  12; EXPRESSED IN ADULT LIVER, SIGNAL = 3.7; EXPRESSED IN BT474, SIGNAL = 1.4; EXPRESSED IN FETAL LIVER, SIGNAL = 2.4; EXPRESSED IN HELA, SIGNAL = 3.3
  unsure 155
  unsure 304
  unsure 333
tgcaactctgttttcccagggaaatattaaatataagccttatagagttccacagtttctacagtttctatatgcaaagctgaagcctggaagcatactttctaagttcattcattcaaaataaaataacttggtgaacttgtagcaggtggcangggccatcaatgaatgataaatgaatcctgtccacttgtcacttaaagtctgtcctcctatactggaatgcttctgttagcactccatcccctgatacactttttcactcttccttgtttcactttgtttcttgagatgctcacctttnaccacagtcctgagttccctttccctccnagcttctggtcggagttggccaatgagagac

SEQ ID NO: 2637 - DNA, 487 bp, Homo sapiens
  MAP TO AC009403.1; EXPRESSED IN PLACENTA, SIGNAL = 5.8; EXPRESSED IN HELA, SIGNAL = 5.6; EXPRESSED IN HBL100, SIGNAL = 2.9; EXPRESSED IN HEART, SIGNAL = 6.6; EXPRESSED IN LUNG, SIGNAL =  15; EXPRESSED IN BONE MARROW, SIGNAL = 5.9; EXPRESSED IN BRAIN, SIGNAL = 4.8; EXPRESSED IN ADULT LIVER, SIGNAL = 7.9; EXPRESSED IN BT474, SIGNAL = 2.6; EXPRESSED IN FETAL LIVER, SIGNAL = 4.7
ctggttttcttcctggcaactcctgcttgtccttggaggtcttccccaggactgtgcattcctgcaactttctctttctctgcagtaacactcagctcgccaagcttgttcatgggatttttgtggctgagttgggaccctcgaggatggggctgtggcctccctcactgctgcacctcccacacctgacccagagcagcacaaggttcagagagtgtgtgagtgtcctgagcctgctgcgctgtccccacacacaacccccattgttattggcttcagtagcagaagtggagcctccctgttctgggggcctgaagtctatcatcaagacgggcagggctgcgtcccctctgaaacctggaggggtggatctgtgcctgactcttccagctctagcgttgctggtggtcctgggccttccttggcttgtagacaccaacgcagtctctgcctctgtcatcacgtggccttctcccatgttgtgagg

SEQ ID NO: 2638 - DNA, 476 bp, Homo sapiens
  MAP TO AC009408.2; EXPRESSED IN BONE MARROW, SIGNAL = 1.5; EXPRESSED IN FETAL LIVER, SIGNAL = 1.4; EXPRESSED IN HELA, SIGNAL = 1.5; EXPRESSED IN HEART, SIGNAL = 1.9; EXPRESSED IN LUNG, SIGNAL = 7.6; EXPRESSED IN BRAIN, SIGNAL = 1.6; EXPRESSED IN BT474, SIGNAL =   1; EXPRESSED IN ADULT LIVER, SIGNAL = 2.5; EXPRESSED IN PLACENTA, SIGNAL = 1.7; EXPRESSED IN HBL100, SIGNAL = 1.1
aaactacactatagaccaaatggacccaatggacatttacagaacattttatccaatagatgcagaatacacattcttattagcatatggaacattctccaggatagaccatatgttaagccacaagacaagccacaaaatattttttaaaatcaagatcatatcaagtatcttttctgaccacaatggaataaaattagatatcaataagagaggaactttggaaactgtacaaatgcacgtacattttacaacatgctgctcaatgaccaaagggtcagtgaagaaattgagaagaaagtttaaatatttattaaaacaaatgaaaatgaaacacaccataccaaaacatatgggacacaacaaaagtagtaccgatagggaagtttatagccataaacacctacatcaagaaagtcaaaaaatgtcaaataaacaaactaatgatatacctcaaggaactagaaaagcaagaa

SEQ ID NO: 2639 - DNA, 470 bp, Homo sapiens
  MAP TO AC009598.2; EXPRESSED IN BONE MARROW, SIGNAL = 1.3; EXPRESSED IN HELA, SIGNAL = 1.3; EXPRESSED IN BRAIN, SIGNAL = 0.99; EXPRESSED IN LUNG, SIGNAL = 9.2; EXPRESSED IN BT474, SIGNAL = 2.3; EXPRESSED IN ADULT LIVER, SIGNAL =   2; EXPRESSED IN FETAL LIVER, SIGNAL = 1.3; EXPRESSED IN PLACENTA, SIGNAL = 1.4; EXPRESSED IN HEART, SIGNAL = 1.2; EXPRESSED IN HBL100, SIGNAL = 1.2
tgtctttcccatgctgttctcatgattgtgagtaagtctcacaagatctgatggttttaagaaagggtgtttccctgtgcaaggtctcttcccttgtctgccacaatgtgagacatgcttttcaccttctaccatgattgtgaagcctccccagccatgtggaattgtaagtcaaataaacttctttcttttgtaagttgcccagtctcgagaaatgtctttatcggcagcatgaaaagggactaataaagtgtgtgattccttttagtattttcatttgcagaatttcattctctaggacttgggtatgaattcttacactctagtccagaagacaaatcttaatagcaaagacaatgtccactctgacaactggagcactgtaattatattgagcaatggttgtgtgctctccattatgtgttctattaaaacaagttttttctccaagtttcccttcaattaattca

SEQ ID NO: 2640 - DNA, 463 bp, Homo sapiens
  MAP TO AC009413.1; EXPRESSED IN HEART, SIGNAL = 0.95; EXPRESSED IN BONE MARROW, SIGNAL = 1.5; EXPRESSED IN LUNG, SIGNAL = 3.6; EXPRESSED IN BRAIN, SIGNAL = 0.95; EXPRESSED IN BT474, SIGNAL = 1.1; EXPRESSED IN FETAL LIVER, SIGNAL = 0.88
cacagatagattaaaaataaagggatgaagatatactaacactaatcaaaagcaagctgaagtagctatattaatttcagacttcagagcaagaaaaattatggataaagaggggcattacataatgataaaagggatctattccctaagaagacataatcattttaaatgtgtatgtgtctaacaacagaatatcaatatacattaggcaaaaatgatagaactgcaaggagaactagatgagtcctctattatagttggagatttcaacaccactatgccagtaattgacagatccagcaggcagaaaatcagtaaggacatagttgaactgaacaccaccatcagtcaaatgaatctaattgacattttagaaaatacttcatacaacaacagcagaatacatatgtttccgacgcacacagggaacattcacaaggtagaccgcgttttgaatcataaa

SEQ ID NO: 2641 - DNA, 452 bp, Homo sapiens
  MAP TO AC009651.2; EXPRESSED IN BONE MARROW, SIGNAL = 1.2; EXPRESSED IN FETAL LIVER, SIGNAL = 1.1; EXPRESSED IN HELA, SIGNAL = 1.2; EXPRESSED IN HEART, SIGNAL = 1.6; EXPRESSED IN BRAIN, SIGNAL = 1.1; EXPRESSED IN LUNG, SIGNAL =   6; EXPRESSED IN ADULT LIVER, SIGNAL = 1.5; EXPRESSED IN BT474, SIGNAL = 1.1; EXPRESSED IN PLACENTA, SIGNAL = 1.2
cggtagctacagagagaagcagggaaaagccccttataaaacaatcagatctcatgagaactcacttgttatcatgagtacaacatgggagaaccacccccatgatctaatcacctcccacaaggtccctcccccaacacatggggattataattcagattacatttcaagatgagattttgggtggggacacagccaaatcatgtcaataagtattactggaaatagtcaaaatgataaataggaaaataaaacattcctaaatttgtatcacctaatacagtatataaagacaacagtgacaaatccacaatcatatttggaaatgttacaatcactgacagaacaagcagacacaaaattcaaaaaatctgtaagaaaatagaaaatttgaacaatataatcaaccaccttaacgtaattgacatatagacaacactatagccaacaac

SEQ ID NO: 2642 - DNA, 427 bp, Homo sapiens
  MAP TO AC009440.1; EXPRESSED IN HEART, SIGNAL = 1.5; EXPRESSED IN LUNG, SIGNAL = 6.3
  unsure 26
tggaaagtaagaaaggaaacacctangcaatctcttcatagggaataacttttttcctgttattttcatacctgcatatcctatgtaaaagttaaaaataggcttttatcaacaagtttgtattctggaacatgtctaaaaatacaaatgcatcaatgtgagaagtttagatttacactcttaaggaaaggaatacatctattcactcagagcctttcaaatctgcagctctgatcacagtttgtctttgtcacttggagagcaaatatgttacctttgtgggaactgacatttgtactgattggcttgtaggtagtagtataaacaaaatggataatataagaatctctaccactgcaaactcagatataattgagggaagagagaaaatatttccagtatgtgtagaagccaaaattggagcaca

SEQ ID NO: 2643 - DNA, 488 bp, Homo sapiens
  MAP TO AC009411.1; EXPRESSED IN HBL100, SIGNAL = 1.1; EXPRESSED IN HEART, SIGNAL = 0.97; EXPRESSED IN PLACENTA, SIGNAL = 1.1; EXPRESSED IN BRAIN, SIGNAL =   1; EXPRESSED IN BONE MARROW, SIGNAL = 1.2; EXPRESSED IN FETAL LIVER, SIGNAL = 2.9; EXPRESSED IN ADULT LIVER, SIGNAL = 1.1
agcagttagacccccagtccctcctcccactccatgcaacctctttcccacagtagaagcctaaagggtttttctctggagagaataaaacagaatgtctctggaccaggagataagggcagggattacgaaggcactgtaaacagggaggatcgatgaagcgcaagatttccaactgaatgcaaattctgagaaaaaatagtatccgtctgaaattccaaaccagctaaactctcagttaagtgcgagggcaggaaaaatacattttcatgcatgcaaatatattatatgtctaaaatatatcacccccttacgtttttcatcaagcagctcctgaagaatgtgctcaaatgaaatgaaggagaaaatagggaaaaaagaaacagagtaagaggtgagaggcatcttcagggtggaaatcacaggcagattcctatgaagcagttgggcagcatgcttagaaatcaagaaatccagattggagcagg

SEQ ID NO: 2644 - DNA, 470 bp, Homo sapiens
  MAP TO AC009419.1; EXPRESSED IN BONE MARROW, SIGNAL = 1.4; EXPRESSED IN BRAIN, SIGNAL = 1.2; EXPRESSED IN BT474, SIGNAL = 1.1; EXPRESSED IN LUNG, SIGNAL = 4.9; EXPRESSED IN ADULT LIVER, SIGNAL = 1.7; EXPRESSED IN FETAL LIVER, SIGNAL = 1.9; EXPRESSED IN PLACENTA, SIGNAL = 1.6; EXPRESSED IN HEART, SIGNAL = 1.5; EXPRESSED IN HELA, SIGNAL = 1.5; EXPRESSED IN HBL100, SIGNAL = 1.1
  unsure 155
  unsure 172
  unsure 187
  unsure 204
  unsure 256
cacaagtcatagtaatctggagaaccattagaagagcataaaggttagaacaccttggaaaagccaagcctacctgcaaaccaatggtttgctgctcctatgaacatgtcatatgtttctttcctctgagaaatttcctttatgtatttggtggncagtgtctaaggaaacnaggatccaaaactgncatgatgttttattaangtgttttcaaaagatgacttctactcacctgaacctctgtggggactggttnggtcaaacccaagatttttctcattttatggattactttcaaattccatactaccagtaccctgctagtaccaagactgagcccccaggaatgccactggaatctttcctcagtagaaactagcttatcttcataaacccaacaattgctctgttttttcactacagcataagacttagctaaagccatccacagattatggccccatggattt

SEQ ID NO: 2645 - DNA, 483 bp, Homo sapiens
  MAP TO AC009473.2; EXPRESSED IN PLACENTA, SIGNAL = 1.7; EXPRESSED IN HELA, SIGNAL =   1; EXPRESSED IN HEART, SIGNAL = 1.5; EXPRESSED IN BRAIN, SIGNAL = 1.7; EXPRESSED IN BT474, SIGNAL = 1.3; EXPRESSED IN HBL100, SIGNAL = 1.4; EXPRESSED IN LUNG, SIGNAL = 5.8; EXPRESSED IN BONE MARROW, SIGNAL = 1.8; EXPRESSED IN ADULT LIVER, SIGNAL = 1.9; EXPRESSED IN FETAL LIVER, SIGNAL = 1.2
ttcctgtttaatatcaccaccctatatctatatagtgatttagaaccaattccccctgaggtacccttggctcctgtctttccctcacactgcacatccagtctatcagcaagtcctgccatcttgccctctatatccggaatgtgactgctgctcaacgtcatcactgttagaacagtctaagccaccccttttactagggccccattctttctcctccagcccattctccacatagcagacagaaatatgtcagatcacatcactccttggcttaaaagctctatctactgtaactagaataaatgctaagctccttgcagtgggctacaaggaactccatactctctctaatctcatttttctccccatccccatccaccagccacctgccgttctgtctcttgatgatgttaagccctttcctatctcaggctttgtatttgctagtcattttttaaaccagagcttcacttggcttcc

SEQ ID NO: 2646 - DNA, 473 bp, Homo sapiens
  MAP TO AC009476.2; EXPRESSED IN ADULT LIVER, SIGNAL = 1.5; EXPRESSED IN PLACENTA, SIGNAL = 0.95; EXPRESSED IN BRAIN, SIGNAL = 1.1; EXPRESSED IN HEART, SIGNAL = 1.1; EXPRESSED IN HELA, SIGNAL =   1; EXPRESSED IN HBL100, SIGNAL = 1.2; EXPRESSED IN LUNG, SIGNAL = 1.2; EXPRESSED IN BONE MARROW, SIGNAL = 1.1
tctctcagtgttttagcctcccaagctggtgtgcagttccatataactgggcctacctttcggggcaagcaaagaaagacaatatagagaaaaaattggaaatcttctgcaaggggaccccattctccatttctgattctagaatgatgactttttttttcttatgtcattaggtacttgtgtcactgctacactactgcattgccgttctgtgacaggactggatttggtgtggaacttagaaggttaaaaacaaacaaacaaacaacaggagaagaaaaacaattctctttactctcttcagctcatagagggcttttttatccccctggtctgctagccagaaagagattactaagagatttcgatttatttgtcttgcaatggggagctaaagaagaaaaaaaaaaaaaactacatgaaaccaaacatgaccatattggttgttcctcaagttttcatgtctttcccag

SEQ ID NO: 2647 - DNA, 493 bp, Homo sapiens
  MAP TO AC009974.2; EXPRESSED IN FETAL LIVER, SIGNAL = 2.6; EXPRESSED IN ADULT LIVER, SIGNAL = 2.6; EXPRESSED IN PLACENTA, SIGNAL = 2.2; EXPRESSED IN HEART, SIGNAL = 1.8; EXPRESSED IN BRAIN, SIGNAL = 2.2; EXPRESSED IN BT474, SIGNAL = 1.3; EXPRESSED IN HELA, SIGNAL = 2.4; EXPRESSED IN HBL100, SIGNAL = 1.6; EXPRESSED IN LUNG, SIGNAL =  12; EXPRESSED IN BONE MARROW, SIGNAL = 2.5
gcaggtttttgccttagacgtgctggccccaggacagtgatgaagacagagcctgtctcagctctaggctgtggggatcaatgccatcagtccctgttattgagggattatcccttagccaacattcctatctgtgggtgggcgtggagagtgtatctttttttggggtgtgtgtgtatatgtgtgtgtgtatgtgtgtgtgtgtttaatagttctgtttgtaaactcttttaataaaagttgtgcctcaccatacttgaagctcccaggacaagggttgagaggctcaacccctctttcagcttctatgtggtgttggaggtgctggtatcgtgttcacacaagatcctggtctggcagcttatttatatcatttcttgcctttaccaatttcccccttcctagatgaactatatttggttacctactttcaagtcaaggccggtggagctgaaataggaaagggtaagattcaacagagcggtcaattagg

SEQ ID NO: 2648 - DNA, 456 bp, Homo sapiens
  MAP TO AC010792.1; EXPRESSED IN ADULT LIVER, SIGNAL = 2.3; EXPRESSED IN PLACENTA, SIGNAL = 2.4; EXPRESSED IN BRAIN, SIGNAL = 2.5; EXPRESSED IN FETAL LIVER, SIGNAL = 2.8; EXPRESSED IN BT474, SIGNAL = 1.6; EXPRESSED IN HEART, SIGNAL = 3.4; EXPRESSED IN HELA, SIGNAL =   2; EXPRESSED IN HBL100, SIGNAL = 2.3; EXPRESSED IN LUNG, SIGNAL =  11; EXPRESSED IN BONE MARROW, SIGNAL = 2.6
catgctaatgctttgggacctacctgccatgttaagaaagacaagcccattttcaggagcatccttgaggcgctacttgacataggcagaaaataggacccagaaagatgtccctggagagcaaaatgaagtgactcttctcagtcttacaaccaacactgactgagcacaagaacgacagcttcgccaggtaggacttgcagggtcacgcagtgccatagccccagggcctggcagcaggtagtgctcacccagcacctgccagagaaggggcgcttgctccatgcaggtgccttgcaggcatctctgtgacccttcagggcaatccttgaggtaggtgtcatcatcatcatcatcatcatcatcatcatcatcataggtgttatgattcccaggagtctgggaagttacctgccccaggtcacacagccagtaagaggcagacagaaatgcaaa

SEQ ID NO: 2649 - DNA, 467 bp, Homo sapiens
  MAP TO AC010872.2; EXPRESSED IN PLACENTA, SIGNAL = 1.2; EXPRESSED IN HBL100, SIGNAL = 1.1; EXPRESSED IN HELA, SIGNAL = 1.3; EXPRESSED IN HEART, SIGNAL = 1.4; EXPRESSED IN BONE MARROW, SIGNAL = 1.7; EXPRESSED IN LUNG, SIGNAL = 9.6; EXPRESSED IN BRAIN, SIGNAL =   1; EXPRESSED IN ADULT LIVER, SIGNAL = 1.3; EXPRESSED IN BT474, SIGNAL = 1.2; EXPRESSED IN FETAL LIVER, SIGNAL = 1.2
gcatctgcacaaaaagcaactgaaaatggataaaaaacctatgggtaagaactaaagctgtcaattccttaaaaattttgaaataaatcttcatgactactatggtttaaatgtttgtcccctccaaaactcacattgcaacttaatcattgagatgtgggacatttaataggggtgaataggtcaggagggtactgtccttatgaattaattaatccattcatgggttatcgggttatcagggagtaggattggtggttttataagaagaggaaggacttgaactagcatgctcaccccctgtccacgtgatgccctgtaccacctcaggacctgcagagtccccactagcaaggtggctctcaccagaggtggccccttgaccctggacttctcagtctccataactgtaagaaataaattccttttctttatatattacccagtttcaggtattgctataagga

SEQ ID NO: 2650 - DNA, 424 bp, Homo sapiens
  MAP TO AC010877.1; EXPRESSED IN FETAL LIVER, SIGNAL = 1.4; EXPRESSED IN HEART, SIGNAL =   1; EXPRESSED IN BONE MARROW, SIGNAL = 0.92; EXPRESSED IN LUNG, SIGNAL =   2
cagttctctagacaattcccaattctgcaataccctcattgattcagttcatggaaatagcactagggcagggagacttactttttgttatcagagaggtcaatgttggtcccaaattttatggttttaaaaggtcctttccttctccttccagaacttaaaaaaagagagaatatgaaatccatgtattttagacagaaatgttgagtgggtgctaaaagttacttacttctctgaagatgtggattcgttatctgaatgatctttgtgttgtgttcttttctcattttcttccttcaggttaagaaaaaaatattcatacttagtatcctctaacaggctatcacttctattatacaaattatactcatctacatgagcagtattgactatttttgagaaataagtttttacaggcacattt

SEQ ID NO: 2651 - DNA, 456 bp, Homo sapiens
  MAP TO AC010102.1; EXPRESSED IN HELA, SIGNAL = 0.95; EXPRESSED IN HEART, SIGNAL = 1.1; EXPRESSED IN LUNG, SIGNAL = 7.2
tcatagcaaacaaaatgcagactatagcgaaagggcttaccatagaatgcaaaggatgagtatcacgaagtttgcctatataccgtccatgttaatgggtcaaaagagaagacgcctttggcagcttaatagggttgaaaggcatctaagagcattgagtccctttctgttttgttttgttttgttttttaaacaaaagcccttggcaaaattataattaaaaaatgcttgtttgatgtcatttcatgtgtgtgcctgtgcatgtatggatccaacagccagcaatattcttaatattcttgaagtcaggaacaacaaaacagtacctattctcaccactattaattttggtctggaagtgatggttcgcacaattagaccaaaaaaaattgaagtcgaaaatatgagaaaggagaaggtaatattgtgattacgtgtggatgatatgattgtaca

SEQ ID NO: 2652 - DNA, 494 bp, Homo sapiens
  MAP TO AC010879.1; EXPRESSED IN HEART, SIGNAL = 0.89; EXPRESSED IN LUNG, SIGNAL = 1.3; EXPRESSED IN BRAIN, SIGNAL = 1.1; EXPRESSED IN BONE MARROW, SIGNAL = 1.3; EXPRESSED IN FETAL LIVER, SIGNAL = 0.9; EXPRESSED IN ADULT LIVER, SIGNAL = 1.1
catttgcattttccaaagagaacttagtcactgaaggtaagtcactgaagattaaagatgtacctaaggagacagagtgctagagtttggatgtttgtcctctccaagtgtcaggttgacatttgattcctaatgttgtaggtgaagcctggttggtaggtgtttgggtcacagaggtggatgcctcatgagcaccttgatgctctccttgaggtaattgctgaattacctgaattattgctcttttcattccccccaaagctgattgtttaaaagagcctagcacatacttccccccattctcttgcttcttctcttgacatgtaatctctgcatacaccagctcctcttcaccttccaccgtgagtgcaagctttctgatgccctcactaggatctgtacccttgaagcagatcctgatgccatgattgatgtacagcctgcagaaccataagccaaataaacctcttttctctgtatgttgcccagtctca

SEQ ID NO: 2653 - DNA, 467 bp, Homo sapiens
  MAP TO AC010888.1; EXPRESSED IN BT474, SIGNAL = 1.3; EXPRESSED IN HBL100, SIGNAL = 1.6; EXPRESSED IN HEART, SIGNAL = 1.9; EXPRESSED IN LUNG, SIGNAL =   2; EXPRESSED IN ADULT LIVER, SIGNAL = 2.8; EXPRESSED IN PLACENTA, SIGNAL = 3.9; EXPRESSED IN HELA, SIGNAL =   3; EXPRESSED IN BRAIN, SIGNAL = 1.3; EXPRESSED IN BONE MARROW, SIGNAL = 1.5
agctgacattgattccaggggacccaaaacatcaatattggtcctccagttaaagtagggtttgtgaatgtcaggtaattaatggattgttagttcaggtctgagttacagtgtatccaatgcattcctggactcatcttgcagtcatttccccagagccagaatgcataattggcatagacatacttagctgctggctaaatccccacattggctccctgacttgtagggtgagggctactatgatggaaaagccaaatggaagcctttagagctgcctccacctagaaaaacagtaaatcaaaaacaatatcacatccctggagtggctgcagagattagtgccaccatcaaggacttgaaagacgcaggggtggtgatttccataacatccatattcaagtctcctggttcgttgtgcagaagacagatggatctctgagaatgaccatgggttatcatgagct

SEQ ID NO: 2654 - DNA, 488 bp, Homo sapiens
  MAP TO AC010133.1; EXPRESSED IN BT474, SIGNAL =  25; EXPRESSED IN HBL100, SIGNAL =  57; EXPRESSED IN HEART, SIGNAL =  17; EXPRESSED IN LUNG, SIGNAL = 4.3; EXPRESSED IN ADULT LIVER, SIGNAL = 5.4; EXPRESSED IN FETAL LIVER, SIGNAL = 6.3; EXPRESSED IN PLACENTA, SIGNAL = 6.3; EXPRESSED IN HELA, SIGNAL =  22; EXPRESSED IN BRAIN, SIGNAL =   9; EXPRESSED IN BONE MARROW, SIGNAL =  11
caaggtctatcaggctgtttgtatatccaaattcattgtcataccaaaaaaaaaaaaaaatgagcttggcacagtggttgttgaaagcaatgccagtccctgcgtcaaaggtggaagagaaggtgtcacttttggattaaaaggaggcaacttggtgctcagtgtagcttaggatgcccttgtgggggacctctggcacctgcttcaccaccttgttgatgttatcatatttggtaggttttcacatatggcaggttaggtccatgaccaacaggtaggtggtgggacatggaaaaccatgctagtgaatttcccattcagcttagaaatgatcttgcccacagcattggcagtgtctgtagagacagagagaatgttttggagagccccatgggtgtcacaccacagcttcccagaggggtcatccacagtcttctgggtagcagtgatggcagttactgtgaatatgggtccttccatgataccaa

SEQ ID NO: 2655 - DNA, 471 bp, Homo sapiens
  MAP TO AC011283.2; EXPRESSED IN FETAL LIVER, SIGNAL = 1.1; EXPRESSED IN ADULT LIVER, SIGNAL = 0.91; EXPRESSED IN HELA, SIGNAL = 0.91; EXPRESSED IN PLACENTA, SIGNAL = 1.1; EXPRESSED IN HEART, SIGNAL = 1.2; EXPRESSED IN BONE MARROW, SIGNAL =   1; EXPRESSED IN LUNG, SIGNAL = 6.5
ttcaaggataaaaaggggctccttgaatatcttttcagacaaatttatatcaggtttgctacgaaattctcccccattcaacatcagatgtatatgaatcaacatttatagaataagcagggagaagatgtcttctaattttctaaagtatttcaagttttttatatacaaaagtgaaatataaacatttcactcttgatgaaagttgtcttgtctgttctggatctttcatttcaacagaggctattactgaaattgactgaggatgatcagcctcatagacacctacctgaatttgaaatgtgtctctttcatttgctcattcattcagtccacaaatattcatcaagcccctgctatatgtatggcactattttaagtaatgggaatagaagagggtataagatggacatatccatgacctattgttccttttattccagtagggagacagagaagttagaaataagt

SEQ ID NO: 2656 - DNA, 493 bp, Homo sapiens
  MAP TO AP000501.1; EXPRESSED IN FETAL LIVER, SIGNAL = 1.4; EXPRESSED IN BT474, SIGNAL = 1.3; EXPRESSED IN HELA, SIGNAL = 0.9; EXPRESSED IN HBL100, SIGNAL = 1.4; EXPRESSED IN HEART, SIGNAL = 1.7; EXPRESSED IN LUNG, SIGNAL = 8.3
tgaaatgtgacttctttacacaaatgtttttgtgtctttagaatgactataccaagtgtcactcctgtctatgcagaaaggtacataatttgtgcatctgatatctgaggcaagtttagcagatctaagtaagtcctagcagaattttctaggagttgcacgatagctcctttgacccctctaactcttgccgtgggtttttcctaggtctccggcgagtgagagacctttgtcgagttctgcagttgccaccaacatttgaggataccgcggttgcctactaccaacaggcatatcggcactctggcatccgagcggccaggctgcaaaagaaggaggtgttggttgggtgctgcgtcttaatcacctgccgacagcataactggcccctaacaatgggggccatctgcacgctgttgtatgcagatttggatgtgttttctagcacttacatgcagatagtgaagctcctgggactggatgtgccatctct

SEQ ID NO: 2657 - DNA, 495 bp, Homo sapiens
  MAP TO AC011297.1; EXPRESSED IN BT474, SIGNAL = 1.7; EXPRESSED IN ADULT LIVER, SIGNAL = 1.1; EXPRESSED IN PLACENTA, SIGNAL = 1.1; EXPRESSED IN BONE MARROW, SIGNAL = 1.3; EXPRESSED IN FETAL LIVER, SIGNAL = 1.5; EXPRESSED IN HEART, SIGNAL = 1.7; EXPRESSED IN HELA, SIGNAL = 1.1; EXPRESSED IN HBL100, SIGNAL = 0.99; EXPRESSED IN BRAIN, SIGNAL = 1.1; EXPRESSED IN LUNG, SIGNAL = 9.9
ttaatcccccaggataagtggctaaagttacccatgtctagtcagggcagaaaaactggtaagtatctcgacaactagagtcagggtgatttccaggacagaggtaaaagtcaacattttggggtcctttttctgcacctttggagctcccacatccagtctggctcctggagtgtctaaatcctgctgcaaggttgaagtttcctgctcctatgaccagcaggttgcattggtctttgtgggtatgggtaggttctggaaacaaagcacataaatcaactgcaaaagaaacttccttggaggttcctgccttccacgtagggtttgcaaatacacgtcttgtgaaagaagtgaggagaaaagaacaggaaggcgcagaggacataacaggtggaaacagacaagagaggtaaataaaaagaattaatctaatggcttcacttgacttagacacaattttaggggcttggcctaggcttgggaacttatgtttcc

SEQ ID NO: 2658 - DNA, 489 bp, Homo sapiens
  MAP TO AL117258.1; EXPRESSED IN BT474, SIGNAL = 1.9; EXPRESSED IN ADULT LIVER, SIGNAL = 0.97; EXPRESSED IN PLACENTA, SIGNAL = 1.7; EXPRESSED IN BONE MARROW, SIGNAL = 1.8; EXPRESSED IN FETAL LIVER, SIGNAL = 1.2; EXPRESSED IN HEART, SIGNAL = 1.1; EXPRESSED IN HBL100, SIGNAL = 1.3; EXPRESSED IN BRAIN, SIGNAL = 1.4; EXPRESSED IN LUNG, SIGNAL = 1.5
gcggggaatagagaaggattctaggagggttctgtgaagctggatccgtgtctgcccactcccccacacctccaggcctctctgggtctttgacgaggaaagactgttccgtgtggcctgcgtgggcagaactggaaccttatcagagccttgggttgtgtgcgttagaggtcaaacaggcctccgtgttttctttgcctatcagcgccttttggcagccggcactgcttacctcctagatctggaaacgcctgcggttggacaggccaagccgaagcggcttttccacaattagaaacacgtgctcagttccttccacaagcgggggaggcggccaaggaactcggtgcagccaatcacagagccgagcgtagccacacccacgcccccacaggcccggcttccctgcccagcggctccaacctccagcctgggcacccagacccagagggctgctgggagggacatgcctcaccccttttgctccag

SEQ ID NO: 2659 - DNA, 486 bp, Homo sapiens
  MAP TO AL031258.5; EXPRESSED IN BT474, SIGNAL = 2.6; EXPRESSED IN FETAL LIVER, SIGNAL = 3.1; EXPRESSED IN ADULT LIVER, SIGNAL = 2.8; EXPRESSED IN HBL100, SIGNAL = 2.5; EXPRESSED IN HELA, SIGNAL = 1.9; EXPRESSED IN PLACENTA, SIGNAL =   3; EXPRESSED IN HEART, SIGNAL = 2.9; EXPRESSED IN BRAIN, SIGNAL =   3; EXPRESSED IN BONE MARROW, SIGNAL = 3.9; EXPRESSED IN LUNG, SIGNAL = 2.3
ctggacactggacgctgagtcatctcagggccccccaaggtggagcaagagatgacagcctcagcgtgcagactgctggcggccagccccagacccctccccatcccctcgtctgacccctcccctggcctgaccaagaagcagacccctactgcaggagggctgcactcacctggcccacaggttggccccgctggcatccagccctcctggggaaagaaccttggcctggggcccagagcagtgggcagcaagggacagcaggagggtgaggcctgagctctgcagggcacctggaataaggtgggctgtgagggtcccggcgggagcaggggccggggcatccgggtcccagggtggacctgtgacccccaccatgggggtctgcttgaggccagaggacatggaggaacttctggagccccacagcactggccacctgtgcacagcctgggcccaagcgcaggacgtgtctggtggagcatg

SEQ ID NO: 2660 - DNA, 494 bp, Homo sapiens
  MAP TO AL121722.1; EXPRESSED IN LUNG, SIGNAL = 3.1; EXPRESSED IN BT474, SIGNAL = 1.4; EXPRESSED IN PLACENTA, SIGNAL = 3.3; EXPRESSED IN BRAIN, SIGNAL = 2.4; EXPRESSED IN BONE MARROW, SIGNAL = 3.9; EXPRESSED IN ADULT LIVER, SIGNAL = 2.6; EXPRESSED IN FETAL LIVER, SIGNAL = 2.3; EXPRESSED IN HEART, SIGNAL =   3; EXPRESSED IN HELA, SIGNAL = 2.2; EXPRESSED IN HBL100, SIGNAL = 1.6
agactggagtctggagtggccatcttccgatccattggggccacatgctcttcctctagactctcctcaatctccctcctcttggtgactgctgacctggttgaagaagtcctctgtacaggatgcttctactcccttgatactatccagagtcctttctcaaatctctaccattttgtttgccaaaaggcactgaaaaaggttgacctctgaatgacaaacctagtggccatctctctagtgacattatctgtgactgtggcagtagtggatatggttgatcagcctctccttgaagctctcttgcccccacacttccatgatgctgcggttgctggttttcttctgaagctgcagtcacatccttaatgaactgcccagcctccttccatccatgcatggggagcagctctgggcccagattaagccccatgctcttctttctcttgacttctccatcttgagcagacaaacttcctctgctctctctgcag

SEQ ID NO: 2661 - DNA, 492 bp, Homo sapiens
  MAP TO AL035404.19; EXPRESSED IN PLACENTA, SIGNAL = 6.1; EXPRESSED IN HELA, SIGNAL = 4.8; EXPRESSED IN HEART, SIGNAL = 4.8; EXPRESSED IN BRAIN, SIGNAL = 3.9; EXPRESSED IN BT474, SIGNAL = 2.3; EXPRESSED IN HBL100, SIGNAL = 3.1; EXPRESSED IN LUNG, SIGNAL = 6.8; EXPRESSED IN BONE MARROW, SIGNAL = 4.8; EXPRESSED IN ADULT LIVER, SIGNAL = 3.8; EXPRESSED IN FETAL LIVER, SIGNAL = 3.7
aaggttcatgcctgctgctggtgtgcagagggcaggagaggggtctgggcggatctctgagggtctctcccaggactcatctgttcaggtgagaaatggaaccaagcctctgagaccagaacagctccaggagagctgggtggataagctgggataacagtgagaaggagagatgggttggaggaggagggggcctctgatggctggagaacgtgccttcacatatgagccagtccatgaagcaaagcagaaaaggcagtgcccttttttgggctcctggtaaaagaaccttccttattccttggggcggggtggtgaaggggcagctcagaaagccccgatttcagtgatttcagagacccaggagtggtagagcatggctcccgctggcctcccagctggccctggggaggatgagttgggggtgggaacagccacgtaagcagccgaccctgtaggaccagggggtgttggggaggaagactgcaggag

SEQ ID NO: 2662 - DNA, 466 bp, Homo sapiens
  MAP TO AC011294.1; EXPRESSED IN FETAL LIVER, SIGNAL = 1.1; EXPRESSED IN ADULT LIVER, SIGNAL = 1.4; EXPRESSED IN PLACENTA, SIGNAL =   1; EXPRESSED IN HEART, SIGNAL = 1.1; EXPRESSED IN BRAIN, SIGNAL = 0.96; EXPRESSED IN BT474, SIGNAL = 1.1; EXPRESSED IN HELA, SIGNAL = 0.93; EXPRESSED IN HBL100, SIGNAL = 0.95; EXPRESSED IN LUNG, SIGNAL = 0.9; EXPRESSED IN BONE MARROW, SIGNAL = 1.4
aggaggccatatgctagctgtgtaaccttggggaaggggcttaacctctgaaagcttgctttactcttctgtaaaatagtcacaataacagcaactccctccagggtttttatgagaatgaaatgacttcatgtgggacaaattcctggtacttgctgaggattcataaacgtgaaacattatcatcaacattatagcattatattacatagctctgattggtgatcaaataggccacatttatcaaacccctattactcccactatggctgctcctgctactgttactgtgagccttgttgctcctgctactactgttactgttacctaccagtgctactattgctgctaataccaccactgctactagtactactaatactgccgctatcactactgtaatactattgctattgctgctgctaatgctaccactaatagtgctgctgttcctgctcctgctacc

SEQ ID NO: 2663 - DNA, 491 bp, Homo sapiens
  MAP TO AL035665.22; EXPRESSED IN BONE MARROW, SIGNAL = 3.2; EXPRESSED IN LUNG, SIGNAL = 1.9; EXPRESSED IN ADULT LIVER, SIGNAL = 2.2; EXPRESSED IN PLACENTA, SIGNAL = 1.9; EXPRESSED IN BRAIN, SIGNAL = 1.6; EXPRESSED IN FETAL LIVER, SIGNAL = 1.4; EXPRESSED IN BT474, SIGNAL = 1.1; EXPRESSED IN HEART, SIGNAL = 1.6; EXPRESSED IN HELA, SIGNAL = 1.2; EXPRESSED IN HBL100, SIGNAL = 1.7
tgcgtttccttgctattctcatggtagtgaataatcctcatgagatctgatggtattatgaagagaaattcccctgcacaagctcattctgtctcttgcctgccattttgtaagacatgccttttgtcttctgccatgattgtgaggccttctcagccacatggaactgtgagcccattaaatctctttttctttataaatcacccagtctcagtctcaggtatgtctttatcagcagcgtaacaatagactaatacagttgaggtgagatcatcctggattagggtgggccctaaatccaatcacaggtgtccttctaagagacagaaaaggagaagatgcaaagagacccaaggaagaagaccatgtgaagacagaggcaggcattggagtgacactgctaccagccaaggaatgtcaggagccaccagaagctggaagagcctaggcaggatcctacactaaacctctggaggaagcatgactttgct

SEQ ID NO: 2664 - DNA, 490 bp, Homo sapiens
  MAP TO AL121759.1; EXPRESSED IN BT474, SIGNAL = 1.1; EXPRESSED IN ADULT LIVER, SIGNAL = 1.3; EXPRESSED IN FETAL LIVER, SIGNAL = 1.2; EXPRESSED IN HBL100, SIGNAL =   1; EXPRESSED IN HELA, SIGNAL = 1.1; EXPRESSED IN PLACENTA, SIGNAL = 0.97; EXPRESSED IN HEART, SIGNAL =   1; EXPRESSED IN BRAIN, SIGNAL = 1.4; EXPRESSED IN BONE MARROW, SIGNAL = 1.7; EXPRESSED IN LUNG, SIGNAL =   1
aggcagagtctgagacgagggtctgtgtataagtggtaatttatttgacaaggtggtcacctaaaattggagagcagggctgggctgaccgaaataagagctgttcactgcagtgagcacctggggctcagtccctccagaccttcagaggagccttcagaggagcagtgtagactacccttctgctccgcacagtgtctaatcctgcgaaaggagatggggctgtattcctaccggtttctgacccccactggtaagggcagccccaggtggagttaactcctttacacatctaggcttttccatgctgcaaactcagaacggcagccctgaaatgccaagtgcagctgaggcagaggcagaggcagacgctctcaggttataccacatgcagcaggctgtggcggctgtggcgactgtggcgactgtggatggtagaaaaaaggtcgggccaggaggcgtgaggtgggcacaaagggtgtctcatcca

SEQ ID NO: 2665 - DNA, 474 bp, Homo sapiens
  MAP TO AC011347.1; EXPRESSED IN BONE MARROW, SIGNAL = 4.6; EXPRESSED IN LUNG, SIGNAL = 8.3; EXPRESSED IN PLACENTA, SIGNAL = 3.8; EXPRESSED IN BRAIN, SIGNAL = 3.4; EXPRESSED IN ADULT LIVER, SIGNAL = 3.8; EXPRESSED IN FETAL LIVER, SIGNAL = 3.7; EXPRESSED IN BT474, SIGNAL = 2.5; EXPRESSED IN HEART, SIGNAL = 3.5; EXPRESSED IN HELA, SIGNAL = 3.6; EXPRESSED IN HBL100, SIGNAL = 2.7
ccccacctcaaccttctgagtatctgggaccacagatgtgcactgctacactcggctaattgtttattaatattattattatcattattatttataaagacaaagtctcactatgttgcccagcctgcaagtgtttcattctattcattctacaggaaattaaaaatagggctttacttatttgtagtttttcttaagtagtattttaatctcttcttttggctcacatgtccaagcagcctcctctgtggggtcaagctagggtgaagccacctttatttcagagtggtggacccatggtttcgttctggacaggttgactgatgaatgagaggtcagcatctcatcatgggatccagtccatttttcagccagttgttgatttggtccttgatttttccaggactttaatggcaccttgtcccctggatggaacaggtaaagaagctcatctgtggagtaggcagacctgga

SEQ ID NO: 2666 - DNA, 487 bp, Homo sapiens
  MAP TO AL035413.19; EXPRESSED IN ADULT LIVER, SIGNAL = 1.3; EXPRESSED IN BT474, SIGNAL =   3; EXPRESSED IN FETAL LIVER, SIGNAL = 0.98; EXPRESSED IN PLACENTA, SIGNAL = 2.4; EXPRESSED IN HBL100, SIGNAL = 3.5; EXPRESSED IN HELA, SIGNAL = 2.3; EXPRESSED IN HEART, SIGNAL = 1.7; EXPRESSED IN BRAIN, SIGNAL = 1.5; EXPRESSED IN BONE MARROW, SIGNAL = 2.2; EXPRESSED IN LUNG, SIGNAL = 4.1
ttatctgggaggagtgtgacgcccagagaggttcagtaagccaaagaccacacagatagaggaggtggcagagtccaacctcagattcatctttatgacgcctaaacctactacacccccaggaatgctgcaccccctcccccagccacagaacgatcagaacacacccaaggatcggctcccataactgtcgcagggagggccctgaatcccagaatctttgctgagcagcagcctgggacccaggctgatgatctgtcctttagcatctaacaggcacattggcctgtttcctgcaggtattttgaaggtggcgtctcatctgtctacctctgggatctggatcatggctttgctggagtgatcctcataaagaaggctggagatggatcaaagaagatcaaaggctgctgggattccatccacgtggtagaagtgcaggtactgcctcccagcagctggtggcccgggccactaagtacagatg

SEQ ID NO: 2667 - DNA, 461 bp, Homo sapiens
  MAP TO AC011368.1; EXPRESSED IN BONE MARROW, SIGNAL = 1.4; EXPRESSED IN LUNG, SIGNAL =   1; EXPRESSED IN BT474, SIGNAL = 1.2; EXPRESSED IN ADULT LIVER, SIGNAL = 1.4; EXPRESSED IN FETAL LIVER, SIGNAL =   1; EXPRESSED IN HELA, SIGNAL = 1.1; EXPRESSED IN PLACENTA, SIGNAL = 1.1; EXPRESSED IN HBL100, SIGNAL = 1.3; EXPRESSED IN HEART, SIGNAL = 1.3; EXPRESSED IN BRAIN, SIGNAL = 1.4
ggggagactgaaaggaggacagaaatgtgagggaattgagcattgggtaggtaaataagttatgatggaaaattcccatctggaagtgaacacgtttaaggaatggctggtgacaggaggtttgccagtgaaggctggaggtgaagctgacaagagttaggtcattattctgccaacaggtggcaaccatccaaggcttaaacacagaagaaatacatcgttagatttgtgacataaaaagatagagaagcatggaggatgagttggagaggagaagctcaagaggtagaaagtccagttagaatgggactgtttgccaaggcaagaaataatgtgagccaggcagttgtgttcaagggcagcaaacatttgattgaagcaacaggacttgttaatggattcatggcagctactgagaaaggtggagggctgtctgcctttcccagcaccaacagctttgt

SEQ ID NO: 2668 - DNA, 486 bp, Homo sapiens
  MAP TO AL049756.16; EXPRESSED IN BRAIN, SIGNAL = 6.9; EXPRESSED IN BONE MARROW, SIGNAL = 5.3; EXPRESSED IN LUNG, SIGNAL = 2.1; EXPRESSED IN BT474, SIGNAL =   2; EXPRESSED IN FETAL LIVER, SIGNAL =  14; EXPRESSED IN ADULT LIVER, SIGNAL = 4.8; EXPRESSED IN HELA, SIGNAL = 2.8; EXPRESSED IN PLACENTA, SIGNAL = 9.3; EXPRESSED IN HBL100, SIGNAL = 2.2; EXPRESSED IN HEART, SIGNAL = 2.9
cgtgcaaacacatatgcacacatacacacataaacatgtgcacacataaacgttcacacacataaacatgcaaacacatatacacacaaacatgaacacatataacacatatacacacacataaacacaaacttgcacatacataaacacatatatacacacatatacgcacatatatacacacaaacacacacataaacatgcatacatatacacatacacacatatacatacacacataaacatatacacacatatacaaacacacacatacagacacatacacagacacatatgcacacatatacacacacacacatacacacacacacctttcatctgatttcactggtacatgggcaaatttatcattattatcgttggcccccaagcccatctttccctgcactgttagctgtgttgtcactggcctctgaaatgcagccttcttctgctcctgcacctgctgagctcctatgcatccct

SEQ ID NO: 2669 - DNA, 472 bp, Homo sapiens
  MAP TO AL024507.7; EXPRESSED IN BRAIN, SIGNAL = 2.6; EXPRESSED IN BONE MARROW, SIGNAL = 3.7; EXPRESSED IN LUNG, SIGNAL =  10; EXPRESSED IN BT474, SIGNAL = 5.8; EXPRESSED IN ADULT LIVER, SIGNAL = 2.9; EXPRESSED IN FETAL LIVER, SIGNAL = 4.4; EXPRESSED IN HELA, SIGNAL =   9; EXPRESSED IN PLACENTA, SIGNAL =   5; EXPRESSED IN HBL100, SIGNAL = 6.5; EXPRESSED IN HEART, SIGNAL = 5.2
tggatctctccctcttcctgatacttggtttcggtacttcttgctgggtagtcctcccatgtggatgacttcatctaagcatggtggtaacaaggtagttggacttcttacctggtggttttggaaccttctatatgccaagtccttttacttacctgttacctcatttaagaactgcagttttgtagatttttttttaatatggtaaaaaaaaattataattagccagctggactcattttagatcatctcaattgtgttggcagcattcaaaacatcgttaagttacgagccagttgaacatacaccttcttctctccatcagacctgatgagtatgtttaccttggccatgccagtgtcatagagcttcttcacagcctgtttgatctggttggccttgacatccatagtaaacacaaatgtggttgtgtcttcttcatggctgacttagtggtcaaggggaacttgat

SEQ ID NO: 2670 - DNA, 480 bp, Homo sapiens
  MAP TO AL034380.21; EXPRESSED IN PLACENTA, SIGNAL =   1; EXPRESSED IN HBL100, SIGNAL = 1.5; EXPRESSED IN HEART, SIGNAL = 1.6; EXPRESSED IN BRAIN, SIGNAL = 0.95; EXPRESSED IN BONE MARROW, SIGNAL = 1.2; EXPRESSED IN LUNG, SIGNAL =  10; EXPRESSED IN BT474, SIGNAL = 1.5; EXPRESSED IN FETAL LIVER, SIGNAL = 0.93; EXPRESSED IN HELA, SIGNAL = 1.1
agagctggcatgttggattctggaggacacatgtgagctgtacgctgttcccttctgattagaggatgaggcagggcacccacccagtgaagggacctcagttcccactggagtgtcctctagctgacaaaggatatcttgctggtgtctccttcagagtggagaggaagttgcttccctgagcgcctggggagaaagaaacaggagaggacaagctcagagggacagtgactgctgaagcttgctgacccttgagcttgctggctgaccccttccactccccactgccctcacccacaactcacgcaacgtcaggtgggtgaccacacaggcgaagatgaaggccgtcaggaatgagagggagagaataaacgcgtagaagaagcgatagttccgtctccccacacagttgcccacccaggggcagtgatggtcaaatcgttctggacaagggcaaggggcgatgggttagtgtgggct

SEQ ID NO: 2671 - DNA, 472 bp, Homo sapiens
  MAP TO AL109615.8; EXPRESSED IN HELA, SIGNAL = 1.5; EXPRESSED IN PLACENTA, SIGNAL =   2; EXPRESSED IN HBL100, SIGNAL = 1.5; EXPRESSED IN HEART, SIGNAL = 2.3; EXPRESSED IN BONE MARROW, SIGNAL = 2.1; EXPRESSED IN BRAIN, SIGNAL = 1.7; EXPRESSED IN LUNG, SIGNAL = 6.3; EXPRESSED IN ADULT LIVER, SIGNAL =   2; EXPRESSED IN BT474, SIGNAL = 1.8; EXPRESSED IN FETAL LIVER, SIGNAL = 1.9
ccagagtaggatcacagggccagctggttgagcaacacagaagcagagtcctctccactggggacactttggtactcatggttggttgtctactcagcctctgtccccacacccctttcctcctttaaaacccaaccctctccgcctcctccacagtaaggccctgtgcctcaccaaccagttagcgaagcctcattctctctaaaggaatgggtatgtggcctaatgttggctgatgagaactcaagagtaagttttctaggggcactccagggaaaagttctccttatttgaaaaacagaccttgagaaagatatggcccctcttcaacctccaggcatattatgtctggatgcgatgtctggactttgagcagccaccttacaaccatgaagggcgctatagcacctgagaagcaaatcaacacgctgaggatagcagggcagaaaaacagacagaacctggatccttg

SEQ ID NO: 2672 - DNA, 471 bp, Homo sapiens
  MAP TO AF165425.1; EXPRESSED IN BT474, SIGNAL = 1.1; EXPRESSED IN FETAL LIVER, SIGNAL =  12; EXPRESSED IN HEART, SIGNAL = 0.86; EXPRESSED IN LUNG, SIGNAL = 3.3
cgatgactccagctgaatagccctgggagctggaacccctcagcactcgttaactgaaacgtaaaggaaataatggcaaattgactgtcttgaatcaagtataaaggagaatgcctgaaataattagatgtcatgaatttggaaagagaaacttcttgcagattgcttccttcagataaccttggactcaggagttttgtattgttcacttaacataagtgactatgattgagttataagttctctagggaaagcagcacactgaaatgggttatatcatgagtttagcctggatgaaagtgtttactccgaaattccaagtggcattggtgtggctattggggcagcttgctgtgctgaggagcatggacctgagcgtcagagatttggctcctggtcctgccatacccatcacggcagcaaaagtgactaccccatgggcgctgtgcagccttcttacactttgccatg

SEQ ID NO: 2673 - DNA, 470 bp, Homo sapiens
  MAP TO AL034405.4; EXPRESSED IN PLACENTA, SIGNAL =   5; EXPRESSED IN HBL100, SIGNAL =   3; EXPRESSED IN BONE MARROW, SIGNAL = 4.3; EXPRESSED IN FETAL LIVER, SIGNAL = 3.8; EXPRESSED IN HELA, SIGNAL = 4.4; EXPRESSED IN HEART, SIGNAL =   6; EXPRESSED IN BRAIN, SIGNAL = 4.3; EXPRESSED IN LUNG, SIGNAL = 2.8; EXPRESSED IN BT474, SIGNAL = 2.9; EXPRESSED IN ADULT LIVER, SIGNAL = 6.3
tgtttgatgtctgttggctgttattgatcataataaaataccttgtgtacagtagactcaaaaaatagataaaaaaatgacttgtggtcgctagatattagcaataaaatggtgaacatggtctctagaccccctaccaaaaacaactggcaaaggggatgcttttggtgggttaattccaacttcttcaggccatccctttaacctggaattcactccagctcttaaggatggactgtcctgcctgagggttgctgggctctggggtctgctctcctggcacctgcctaagaggcctgggttaagctagccctcccaggtggggaccagccaggtacaatgctgagcatccttccacagccagccaggcccattctggcagagtactgcaggctgttcttggttgccctccttcctgttgtggtgatcacaatattgagaggggccagactgtggaagaagggaagcag

SEQ ID NO: 2674 - DNA, 470 bp, Homo sapiens
  MAP TO AL096678.8; EXPRESSED IN BT474, SIGNAL = 1.8; EXPRESSED IN PLACENTA, SIGNAL = 2.5; EXPRESSED IN HBL100, SIGNAL = 1.5; EXPRESSED IN HEART, SIGNAL = 1.9; EXPRESSED IN ADULT LIVER, SIGNAL = 1.5; EXPRESSED IN FETAL LIVER, SIGNAL = 2.8; EXPRESSED IN HELA, SIGNAL = 1.1; EXPRESSED IN BRAIN, SIGNAL = 2.4; EXPRESSED IN LUNG, SIGNAL = 1.4; EXPRESSED IN BONE MARROW, SIGNAL =   2
acacagaaagcagcccagaggggtggctgggaggcagggtggcgagggtcctggcagagcgtcatgcccatcagctaaaaagccactcacttggctggctggtttggagccagagcacagaaattaaatctggctaacatcagacataaggtgaatgtgctgatatatttcttttgacatgtgtggcttggagtaggacaccatgaggtgaaacaaagtggggctctttgcccaaatggggtgacatgggcgccaccgactggtgtcagtcttgcagaggtcaaagcgttcaggggtgttgtctcttcctctcttacaggtgtcagcattttctgaccccaccccaccagccgaccaacagcctggacaccagaagaacctgcatgctcataatcaccctaaaaagaggaacaggcatcggtgttcatccccacccccaccccatgagttcagggcgtatcagctctaca

SEQ ID NO: 2675 - DNA, 472 bp, Homo sapiens
  MAP TO AL050318.12; EXPRESSED IN BT474, SIGNAL = 4.4; EXPRESSED IN ADULT LIVER, SIGNAL = 2.9; EXPRESSED IN PLACENTA, SIGNAL = 3.4; EXPRESSED IN HBL100, SIGNAL = 2.4; EXPRESSED IN HEART, SIGNAL = 2.9; EXPRESSED IN BONE MARROW, SIGNAL = 4.8; EXPRESSED IN FETAL LIVER, SIGNAL = 3.4; EXPRESSED IN HELA, SIGNAL = 3.9; EXPRESSED IN BRAIN, SIGNAL = 3.5; EXPRESSED IN LUNG, SIGNAL = 7.2
gcttgtctccgatctcttggtctcatcactgagcggaggcctggagaaacggcagagtcagcagaggagagggcccccatcacagtgcagtggtgccagctggcatcttcctgttgaagacctctggacagaggagatgatcccaatgtttggcagtgatccatagaaaaccctctgtatgaaagggaaccaaaacggaaacccaggacagctggctggagccttcagcacccttcttggcagatgcctactggggattttcagagactaaagggatgggagtgtgcagtaatgggagtgatgggtcctgctgcttctgaagctccatctcagcagccctctgtagcgccacctccaccagcagctggaagctgctgaagtcctctttgtcctgctctgggggtgtgggtggtggcgtgttgaagagtccacctgtggggcttccagcctcagccctggtcagcagagtaag

SEQ ID NO: 2676 - DNA, 471 bp, Homo sapiens
  MAP TO AL031963.11; EXPRESSED IN PLACENTA, SIGNAL = 3.6; EXPRESSED IN BONE MARROW, SIGNAL = 4.9; EXPRESSED IN HELA, SIGNAL = 3.2; EXPRESSED IN HBL100, SIGNAL = 7.3; EXPRESSED IN HEART, SIGNAL = 4.1; EXPRESSED IN BRAIN, SIGNAL = 7.3; EXPRESSED IN LUNG, SIGNAL = 3.5; EXPRESSED IN BT474, SIGNAL = 6.1; EXPRESSED IN ADULT LIVER, SIGNAL = 4.1; EXPRESSED IN FETAL LIVER, SIGNAL = 7.6
ctactctccccaccctctccctagaagggcatctgctgtgtcccctcctcctccagggcccctcccagcctttcagtctatccccataatatggccgatgctctgcggattttcaagcccctcagcagcggctgctgcaggaaatagggggtgcagctctttgctctctgtctagcacttactaactgtctgaccacaaaagcccctgttccaaggacatgggaggaggacaaggccatccttagtgacatgcaggatgcagagccatggtgtggttcttttttcatttcagttttgggaggtcatcagcgatgagcatgggatcgaccccacaggcagttaccatggagacagtgacttgcagctggagagaatcaacgtgtactacaatgaggctgctggtgagtagcgggatgtgtgtgcccaggaatccttgctttccatgatgtgggagatgaaacgtcccaggaa

SEQ ID NO: 2677 - DNA, 471 bp, Homo sapiens
  MAP TO AL096816.12; EXPRESSED IN BONE MARROW, SIGNAL = 1.6; EXPRESSED IN LUNG, SIGNAL = 1.5; EXPRESSED IN BRAIN, SIGNAL = 1.1; EXPRESSED IN PLACENTA, SIGNAL = 1.2; EXPRESSED IN ADULT LIVER, SIGNAL = 1.7; EXPRESSED IN FETAL LIVER, SIGNAL = 1.1; EXPRESSED IN HEART, SIGNAL = 1.5; EXPRESSED IN HELA, SIGNAL = 1.3; EXPRESSED IN HBL100, SIGNAL = 1.1
tcactctgagcaaaagctgcaaattacacgttctttctctccaggctgaagacaacatccttaacattttacatttataagtaatatctcgttagcagaaacagggtaaacagaagcacatggaatatgtcttttgtgtgtaattcaggatgatatttttattcagaaatttcaaagtcatgtaaacctgcccccctgccaaactcctccattatttggtgctggtttggactgtgtatcctaaagaggtaggaaaacacaccttttttcatcatcagctgcagaagacaccctgtcatggccaccaagagtaaattcacaggcttgtaaaagcctaactcaagtactgccaaccgcaggtggctctgctcatcagccttgtccagtgatttagtgatggggggagggcccttctctgttaacaaaaccatctccattaacccctgtgactctcacttgccacttcagcac

SEQ ID NO: 2678 - DNA, 466 bp, Homo sapiens
  MAP TO AL034346.18; EXPRESSED IN PLACENTA, SIGNAL = 1.5; EXPRESSED IN HELA, SIGNAL = 1.1; EXPRESSED IN HEART, SIGNAL = 1.5; EXPRESSED IN BRAIN, SIGNAL = 1.1; EXPRESSED IN BT474, SIGNAL = 1.1; EXPRESSED IN HBL100, SIGNAL = 1.1; EXPRESSED IN LUNG, SIGNAL = 4.7; EXPRESSED IN BONE MARROW, SIGNAL = 1.4; EXPRESSED IN ADULT LIVER, SIGNAL = 1.5; EXPRESSED IN FETAL LIVER, SIGNAL = 1.6
cccttgaatgtaaaacaggagcatactcaaatagagatttatttttgtgtcctcctgtgcatgctttgagctggggatagtcaatgaggtgctaccgagtgttgggccataaagcctcctcacgctaactccaggcatgtgaaggactgaaacgtgaagctctttctgtaattcccctccttcttcttcatgaatggaggcgagaattaggctgtgtggttttcacagccaatgctgatcttaaacaagaatctggctgtttcctccccgggctgtttcctggccagtcacaatatgatcctaacagggctgccagagaccatgcagatgaccgcttctcaggggctccttccccacagccacagcacagctatggagctataagaaagctgaggacacagcagctgaacatcggcaacattcgagtcccttccatgaagctagagagaggtggcatccatgacag

SEQ ID NO: 2679 - DNA, 466 bp, Homo sapiens
  MAP TO AL109942.4; EXPRESSED IN BONE MARROW, SIGNAL = 1.5; EXPRESSED IN LUNG, SIGNAL = 2.9; EXPRESSED IN FETAL LIVER, SIGNAL = 1.2; EXPRESSED IN HBL100, SIGNAL = 1.3; EXPRESSED IN HEART, SIGNAL = 1.1; EXPRESSED IN BRAIN, SIGNAL =   2
ttgaggttcattcatgttgtagcatgtatcagtaattaatttattctttcttgtggctggagaatattccattttatggatatactgtattgtatttatccacgcatcagttgatgaacactggggctgtttcggcctttggctatcgagagcaacgctgccgtgaacgtgggtgtacaagattttgtgtggatgtgtgttttcatttctcctgagtagattcctaggagtagagtttctgggtcatatggtaattctaacatcagaagaactacagctggatgtgtttcattcacttcccaaaatcttttctgaagcgaaagaagcaatggtattttgcagaggggtctcggactttcaaatccaagttcctttgctctttggacctacgtcaagccattatcatagagctaatgaaggagaactggatgtgtgaggtattacagggaaagatgaagtagctggg

SEQ ID NO: 2680 - DNA, 457 bp, Homo sapiens
  MAP TO AL049692.11; EXPRESSED IN LUNG, SIGNAL = 9.3; EXPRESSED IN BT474, SIGNAL = 1.3; EXPRESSED IN PLACENTA, SIGNAL = 1.3; EXPRESSED IN BRAIN, SIGNAL = 2.2; EXPRESSED IN BONE MARROW, SIGNAL =   2; EXPRESSED IN ADULT LIVER, SIGNAL = 1.9; EXPRESSED IN FETAL LIVER, SIGNAL = 2.3; EXPRESSED IN HEART, SIGNAL = 2.8; EXPRESSED IN HELA, SIGNAL = 1.4; EXPRESSED IN HBL100, SIGNAL = 1.6
agcaaataggggtaggtgggagtcctttgatatccacagcacttcatacaggtcagtgcagctcagaaagactgaccaacaattgtatgagcaagagctggaaataattatgggaggaaaatggaagagtcattgccggaatacaagtcctgggtcacatctggtgactgtgccgggtgggctcctgtgggcggctgctggagacagtgggtgtgacggccaggctctgctctctgtgactgcgttgtctgtcttgcttctcgtgcttctctacctcattttccttttggcaggtcagccttctcggcagggctcttggttcctgccaccccataacatgggctttgctttggctcagggttaccacagcaggcattgttgctgtcctgcgcagattctctggtccatcttggtgttcagcggcaatagtggcagaccctttcctacaggctggaga

SEQ ID NO: 2681 - DNA, 465 bp, Homo sapiens
  MAP TO AC011499.1; EXPRESSED IN PLACENTA, SIGNAL =   7; EXPRESSED IN HBL100, SIGNAL = 5.3; EXPRESSED IN HELA, SIGNAL = 6.6; EXPRESSED IN HEART, SIGNAL = 7.2; EXPRESSED IN BT474, SIGNAL = 3.9; EXPRESSED IN BRAIN, SIGNAL = 7.5; EXPRESSED IN LUNG, SIGNAL =  16; EXPRESSED IN BONE MARROW, SIGNAL =   8; EXPRESSED IN ADULT LIVER, SIGNAL = 5.9; EXPRESSED IN FETAL LIVER, SIGNAL = 6.8
gttatgggaaaaggcagacgaaccctgtgcagacagctatgtgtgtgaacttaattcagactaagatgaagtgttaaaagtccattcttactgattttggtaattcacggaatccaacaagttatggaaatttagttccatgagcatattcaggggtggggggagttatggctgaacatcagtgatgcctggaatattatgaagcggaaagattttcacacctacccccaaaaaaacaacaaaaaaaactgccccaaaatgattactgacgggaccaggggatataatccgcaaaatgacaaccagaataaaatatttgtttgtttgttttattattttatatatatttttagagatagtgtctctccctgttgcccagtttggagcgaggggcgcaatctcagctcactgcagccttgacctgctaggctcaagtgatcctctggcctcagcttccagagtagc

SEQ ID NO: 2682 - DNA, 456 bp, Homo sapiens
  MAP TO AL121656.1; EXPRESSED IN BONE MARROW, SIGNAL = 1.2; EXPRESSED IN LUNG, SIGNAL = 3.8; EXPRESSED IN ADULT LIVER, SIGNAL = 1.2; EXPRESSED IN PLACENTA, SIGNAL = 1.3; EXPRESSED IN BRAIN, SIGNAL = 1.2; EXPRESSED IN FETAL LIVER, SIGNAL = 1.7; EXPRESSED IN BT474, SIGNAL = 3.1; EXPRESSED IN HEART, SIGNAL = 3.3; EXPRESSED IN HELA, SIGNAL = 1.1; EXPRESSED IN HBL100, SIGNAL = 1.1
caaatgccctcagggtctgatgcctgctccagtgaatatttaccatgctcattctgaattctggcttccaacttcatttttggcctctggggattaagatactttaatttcttgccaagttagctactcattttatccagcattttaaaggtgctttttgggggagaattttcaggatacagagtctgtcatattgctggaagtaaacatcaggaaatttttaaatgaaaaaaaacacacgattcggaaaatggaaatagaaaagtttcataacattccaacatggttccaagtctacctaatgtttatttatatccgagttatgagtgttgtctctggagtcagacaacctcggtttggaatcaggctctgccgcttactactgctagaggtgagggtgggcaaactttttctgtgaagggctggatggtaagtacagttgtccctcagtacgca

SEQ ID NO: 2683 - DNA, 455 bp, Homo sapiens
  MAP TO AL096775.9; EXPRESSED IN PLACENTA, SIGNAL = 9.9; EXPRESSED IN HBL100, SIGNAL = 6.5; EXPRESSED IN HELA, SIGNAL = 8.5; EXPRESSED IN HEART, SIGNAL =  11; EXPRESSED IN BONE MARROW, SIGNAL =  11; EXPRESSED IN LUNG, SIGNAL =  11; EXPRESSED IN BRAIN, SIGNAL =   8; EXPRESSED IN ADULT LIVER, SIGNAL = 9.3; EXPRESSED IN BT474, SIGNAL = 4.7; EXPRESSED IN FETAL LIVER, SIGNAL = 9.1
cctagccacagcctcctgtgcacatctggacccctggggtggccacaaagggatccggcactccccagtgggagatgctgaggtagtaacggggtatgggctctgacccctcccagggaacactcctagcctgatgcctaccctgtccctagagcacctcgtgaagatatccaggtgtggccgtgggcatgttttcaggaccagttttcccatacctgggccctggatgatgatgcagttctcagacacccttgggcctctatgaggaaacaaggaagcctggggacctgccacccccaggtggcctgcagcaccaggtaccctcccgagtcaccccctggggcagtcagtagttggggagtgcccaggacctccaacactactacttgggccttcctcttcgccttttcttcctcctcttcctccggactctaagaaagtacaataggccccca

SEQ ID NO: 2684 - DNA, 455 bp, Homo sapiens
  MAP TO AL118555.1; EXPRESSED IN BONE MARROW, SIGNAL = 1.8; EXPRESSED IN BT474, SIGNAL = 1.4; EXPRESSED IN FETAL LIVER, SIGNAL = 1.1; EXPRESSED IN HEART, SIGNAL = 1.7; EXPRESSED IN BRAIN, SIGNAL =   1; EXPRESSED IN LUNG, SIGNAL = 1.7; EXPRESSED IN ADULT LIVER, SIGNAL = 1.4; EXPRESSED IN PLACENTA, SIGNAL = 1.5; EXPRESSED IN HELA, SIGNAL = 1.3; EXPRESSED IN HBL100, SIGNAL = 1.4
attgcttggaaaattgcctgatgatcacagtaagtgccatatgtgtattagctattattcatattattacttttattgttgttattttgtatttgtatttctttagtggaatataagctccttgtctgacttgtttatcatgatatgcccaaagactagcactgtgcttggcacataatagatattcaacacattttttgaggaaggaagaaggggattttaaataatagaattcctaaatccttttctgaaaccgcctttgacagctataatgtctttcatttacaacagcttctggagctatttgacagcgaagaccctcgggaacgggactacttaaaaacagtcttacacagaatttatggcaagtttcttggtcttagagcatttatccgaaaacagattaacaatatttttctaaggtaagtggagtgtgatgggggaagaaggagaag

SEQ ID NO: 2685 - DNA, 452 bp, Homo sapiens
  MAP TO AL034549.16; EXPRESSED IN PLACENTA, SIGNAL = 2.4; EXPRESSED IN HBL100, SIGNAL =   2; EXPRESSED IN BONE MARROW, SIGNAL = 2.5; EXPRESSED IN FETAL LIVER, SIGNAL = 2.2; EXPRESSED IN HELA, SIGNAL = 1.8; EXPRESSED IN HEART, SIGNAL = 2.9; EXPRESSED IN BRAIN, SIGNAL = 2.4; EXPRESSED IN LUNG, SIGNAL = 1.2; EXPRESSED IN BT474, SIGNAL = 1.4; EXPRESSED IN ADULT LIVER, SIGNAL = 3.4
aacactggacactaaggctgcactaaatgtatgaaaagtatcttttttcttaaaaaataaatttagttcactgtaacttttttactttataaacttaaaaaattttaaaaacctattgactgttttgtaatacatagcttaaaacacaaacaaattgtacagctccacaaaactattttccttctttatatgcttattctataagcttttttgattctgaaggtttttgtttttattttttaaacttttaaattaaaaactaggacacaaacacacacattggcctaggcccacacaggatcaggatcatcaatatcatcatattccaggtccacccacatctcatgccactggaaggtcttcggcggcaatacatacatggagctgtcaactcctatgataacaatgccttcttcaggaatacctcctgaaggacctgcttgaggatgttt

SEQ ID NO: 2686 - DNA, 420 bp, Homo sapiens
  MAP TO AL096776.9; EXPRESSED IN BONE MARROW, SIGNAL = 4.3; EXPRESSED IN LUNG, SIGNAL = 9.3; EXPRESSED IN BRAIN, SIGNAL =   3; EXPRESSED IN BT474, SIGNAL = 2.3; EXPRESSED IN PLACENTA, SIGNAL = 5.2; EXPRESSED IN HBL100, SIGNAL = 2.5; EXPRESSED IN HEART, SIGNAL = 5.2; EXPRESSED IN ADULT LIVER, SIGNAL = 4.3; EXPRESSED IN FETAL LIVER, SIGNAL = 3.7; EXPRESSED IN HELA, SIGNAL = 4.1
cccagtcatcctgggtctcaagtagccacatgacacctaggatggctataaggggaggtcccatctgggtcctaaatttacatactaggtatagaattcaggacagaagacagctatgaagatgatgactggagcattcagcccttcacagaatggccaggaggcaaagctgggccagggagaaaggggtcattttgagcttgactgtgccctgtaggtggtgatatagacactgaggacatgtccccatatgttaccaaggtcacctgtctggaccccagaatccagaggctcggaaaacaaaaacataagctcacagtcaaatcaagcaaatatcaaaaacataacagaagcagaagttttatgaccttaaagcttgaagcagagatagcataaacctgtctgaccagtagactcagg

SEQ ID NO: 2687 - DNA, 491 bp, Homo sapiens
  MAP TO AL023755.5; EXPRESSED IN HBL100, SIGNAL = 0.92; EXPRESSED IN HEART, SIGNAL = 0.98; EXPRESSED IN LUNG, SIGNAL = 2.9; EXPRESSED IN FETAL LIVER, SIGNAL = 1.1; EXPRESSED IN BT474, SIGNAL = 1.7; EXPRESSED IN HELA, SIGNAL = 0.94
tgaaggggccaaagtaattgaagtatccattcctcacaccagttattcaattgtctgctatcatgtatcgtgcacatcaggagtggcattaaatatggcaagacttgatgggctacaatgtagtcacagatgtgacactgatgtgtccactcagtgtgtccacccatggttgaagccatgtatgcgtcaactagacaagaagcgttcaatgatgtggtgagaggaagaattctctcaggaaactttttcttattaaaagaaaactgggaaaattatttcatcaaagcacagaaaagtgcgacgtctcattgctaatgactttgcaaatgcttttaactctggagcagacgtcttcctaactcccaccatcttaagtgaggcagtaccatattcggagttcatcaaagtagacaacagaacacgaagttcccagaatgatatttttacacaagctgtaaatatggcaggattgccagcagtgagtatccctg

SEQ ID NO: 2688 - DNA, 414 bp, Homo sapiens
  MAP TO AL118512.2; EXPRESSED IN HBL100, SIGNAL = 0.92; EXPRESSED IN HEART, SIGNAL = 0.91; EXPRESSED IN LUNG, SIGNAL = 2.5; EXPRESSED IN FETAL LIVER, SIGNAL = 1.2; EXPRESSED IN BT474, SIGNAL = 1.1
ggccgttctaagctgttctctttctaaattttatcatttcttgaaggagaccttgttatttgtacattcccactaaaatcagagaagtctacaaaatcttaccttaatgaccacaaatgggcaaagagaggcatttactgtgaataaataaatgaagcacgacaaaagtttggaaatacactaatttgaaatgctgtttgtattaaaataaagatgagaaaattttgcctgctttataataagaagttccttaccaggcacaatgagagtatttgtgttcagtttgatgggctgttcattcttgagccagctgaggtcaggaggtggaaaaccagagacctcacaggtcaaagagatgaaattgttcaccacgacggtaagattttcagatttaggaccaatgacacttggagg

SEQ ID NO: 2689 - DNA, 489 bp, Homo sapiens
  MAP TO NM_007104.1; EXPRESSED IN BT474, SIGNAL = 1.3; EXPRESSED IN FETAL LIVER, SIGNAL = 1.4; EXPRESSED IN ADULT LIVER, SIGNAL =   1; EXPRESSED IN PLACENTA, SIGNAL = 0.98; EXPRESSED IN BONE MARROW, SIGNAL = 1.1; EXPRESSED IN HELA, SIGNAL = 0.89; EXPRESSED IN HBL100, SIGNAL = 0.96; EXPRESSED IN HEART, SIGNAL = 0.87; EXPRESSED IN LUNG, SIGNAL = 4.6
gcagattcagaaagactccccagaaaagttctttcactcctaacttctacccagcctcatggtcacctcagcagctctcctgagaccgttactaagttctccacagctaatggtaactcagcttggaaagagttctcttgtaggaggatgctgaagggaggttgccaagtggtgtgggaaactgcttcatgcttaagttcacttccatatcatgatactaaaaggtatctaacagctgattttcattgctttcatttgtgatctgctaggaccacttgatccttatcactgcttttggcacactcctcatccaagagttgatcgcagaggcagagttccttgccaccagtccagtggaagtacaagccaactttgctctccaaatggcagcagtagctgagcaggccgccctgcattctctcctcataaacatgctgttctcaagtttgtcagaatccagagctctctactcattacccccttttccaa

SEQ ID NO: 2690 - DNA, 488 bp, Homo sapiens
  MAP TO AC007690.11; EXPRESSED IN PLACENTA, SIGNAL =  12; EXPRESSED IN HELA, SIGNAL =  33; EXPRESSED IN HEART, SIGNAL = 8.7; EXPRESSED IN BONE MARROW, SIGNAL =  11; EXPRESSED IN BT474, SIGNAL =  25; EXPRESSED IN HBL100, SIGNAL =  28; EXPRESSED IN BRAIN, SIGNAL = 4.2; EXPRESSED IN LUNG, SIGNAL =  14; EXPRESSED IN ADULT LIVER, SIGNAL = 6.4; EXPRESSED IN FETAL LIVER, SIGNAL = 9.6
aatgtagtttcgtagggaggtgtttaaactttaggcaataactttttgttttcctgcttcaggtttatttgtgcaaatagcacagaaggaccccagccccgtgcagatggcagccggcgggggctgggggaggggggcggttgcaccagtccttctgtcctcatgttggcagacagagatatctactctgaagcctttgtaggggcctgagcacctttgggagcctgagctggagttgaagctggagctgcagcctggaccttggtttggtccttggccttggcctttggccggcacagcctgagccccttggcaacgcgggcacgagcacgcttcccaagcttggggtggggaatgtaggcaagtcgattgagcttgtggctgacatcctttgggatcttgggcttagcctccttgggcttcacaagggccctgatagcctcggcatgtgcactcatggcctcggcactgttggcctgcatcttctt

SEQ ID NO: 2691 - DNA, 495 bp, Homo sapiens
  MAP TO AC007688.15; EXPRESSED IN HBL100, SIGNAL = 1.3; EXPRESSED IN HELA, SIGNAL =  30; EXPRESSED IN HEART, SIGNAL = 0.88; EXPRESSED IN BRAIN, SIGNAL = 5.6; EXPRESSED IN BT474, SIGNAL =  44; EXPRESSED IN LUNG, SIGNAL = 1.7; EXPRESSED IN BONE MARROW, SIGNAL = 1.1; EXPRESSED IN ADULT LIVER, SIGNAL = 7.6; EXPRESSED IN FETAL LIVER, SIGNAL =  13
tagcctccttcattcccttgcctaaaagtttagcatattctgcagcctcttccttatttttcttagtacacggcttcttcagagcaatatgctgccctttgtgctgcaggaaatgtggagtaacaagatgctgaatcttgggtgctttggtcctaggtttcttacctcctttgtttgagggctttcttacaacatactggcggacatcatcttcttcagagagattggaaagtttgcagattctgctagcttttttgggccccaggcgacaaggcaccatagtatcagtcagtccaggaatatccttctttactttttttttttttttaacaataatcaagttgagaatgctcagattggcatccactatgcaaccacgaactgattttctctttctttctccagttctccttggtctgtaacaggaatgccccttactcagtagcaggtggacacggccatgggtcaagacaccctgcttcatgggaaaacctt

SEQ ID NO: 2692 - DNA, 492 bp, Homo sapiens
  MAP TO AL008723.8; EXPRESSED IN HBL100, SIGNAL = 4.9; EXPRESSED IN HELA, SIGNAL = 3.7; EXPRESSED IN HEART, SIGNAL = 4.9; EXPRESSED IN LUNG, SIGNAL = 3.5; EXPRESSED IN BT474, SIGNAL =   5; EXPRESSED IN PLACENTA, SIGNAL = 4.7; EXPRESSED IN BRAIN, SIGNAL = 3.8; EXPRESSED IN BONE MARROW, SIGNAL = 5.7; EXPRESSED IN ADULT LIVER, SIGNAL = 4.6; EXPRESSED IN FETAL LIVER, SIGNAL = 4.1
agaaggagcagaaggggcccgtgactgccctgtgcactgcaaggccacctggtgtcggccatcagccagaagattttcctgtgaagcctgcgggccagcgagctgacgggcatggccttcatggtcgacaggcagctctacatccaccagatgatcagcgtcaggaacttcatcctggcagccgacctcatgaagagcatctggctgctgttaccaggaggagagcaagacgctgagcctcgtcatgtgatgccaagaccctggaggtgtacagcgtggacttcatggtagacaacacccagctgggttttctggtgtctgaccacgactgcagcctcatggtgtacatgtacctgcctgaagccaaggagagttttgggggcatgtgcctgctgcgctgggcagacttccatgtgggtgcccacatgaacgcattctataggaccctgtgccagggagccactgaggggctcagcaaaaagtcagtggtgg

SEQ ID NO: 2693 - DNA, 490 bp, Homo sapiens
  MAP TO AL096773.6; EXPRESSED IN FETAL LIVER, SIGNAL = 2.1; EXPRESSED IN ADULT LIVER, SIGNAL = 1.9; EXPRESSED IN PLACENTA, SIGNAL = 5.8; EXPRESSED IN HELA, SIGNAL = 6.6; EXPRESSED IN HEART, SIGNAL =   5; EXPRESSED IN BRAIN, SIGNAL = 2.2; EXPRESSED IN BT474, SIGNAL =  10; EXPRESSED IN HBL100, SIGNAL = 5.8; EXPRESSED IN LUNG, SIGNAL = 4.5; EXPRESSED IN BONE MARROW, SIGNAL =   3
acaagtggtgtcattcctggaaaaattccttaaataaaatcttttggtaccagagtgctgggtcttaattgcattgttgtaattttatggttgactcgtgtgaccatagaccatgaagctttcacattggacttatgttgtcaacaccttttttcgcttcagggaactaagttaaaaataacatgggtttactatgtgttcttcttgtttgacttagaactaggaaggatgagaaatctccagctaaaatcgtttttccttctcatcagaatgacccattgccaggacgcatcaaagttgactttgtgatccctaaagaacttccctttggagacaaagatacgaaatccaaggtgaccctgctggaaggtgaccatgttaggtttaatatttcaacagaccgacgtgacaaattagagcgagcaaccaatatagaagttctgtcaaatacatttcagttcactaatgaagcccgagaaatggtaagtgt

SEQ ID NO: 2694 - DNA, 489 bp, Homo sapiens
  MAP TO AF181450.1; EXPRESSED IN BRAIN, SIGNAL = 1.5; EXPRESSED IN BONE MARROW, SIGNAL = 1.2; EXPRESSED IN LUNG, SIGNAL = 1.3; EXPRESSED IN BT474, SIGNAL = 1.1; EXPRESSED IN FETAL LIVER, SIGNAL = 0.9; EXPRESSED IN ADULT LIVER, SIGNAL =   1; EXPRESSED IN HEART, SIGNAL = 6.9
aacagggaggaggtcaaatctatcatttcatgttatattctctgctctcttttcagttctctaaagaaaagatatctttgttatccacaataagtcattacgacccgttactggccctctgtgttttactaccacctcaagatacagttaggttctctcttgctgaagtactgaaataggataattcatctaataaacaaacaaacaaaaaaaacaactttgagcatctgaggatgaggaattggtttcgcgttggttgtgttgtctttcctccgacagttctgagttcacgtctagcgaggggttgtctctatggtggaaggggttcccggggtggttgacctcggagtggctgctggtggtgtgtccatcgggctcccagccccgctgttgggcgtgacagaggagctgactgcaggtgtgtctccctgctgctgggcctgcagggtctgtccacagatgtgatggtgcttctcccagtctttgtgc

SEQ ID NO: 2695 - DNA, 403 bp, Homo sapiens
  MAP TO AL096867.15; EXPRESSED IN ADULT LIVER, SIGNAL = 1.2; EXPRESSED IN HELA, SIGNAL = 1.8; EXPRESSED IN HEART, SIGNAL = 1.4; EXPRESSED IN LUNG, SIGNAL = 1.3
ccttaaaatggggatagcaatgcaaatttgcagagctcttacaagaattaaatgaaaatatatgtagtttatatagtctatttgttggatgaataaatgaataaccccatcacccaaacacaactaatattataattttaatacattcctttctatccagtctgatgcttatagtattagaataatacaatttgaaaatcagcctgcttttacttactattgtacaataaacagttttaccatgtttatgataccaatttaccatgattttgaaggcctcataatatacaactgagtgaaggcatcttaattttcataatcattctacaactattatttatttggattttgatttggtttggttttgcaattgcacgtaacacctcacacagtttgttcatgc

SEQ ID NO: 2696 - DNA, 487 bp, Homo sapiens
  MAP TO AC011457.1; EXPRESSED IN BRAIN, SIGNAL = 8.4; EXPRESSED IN BONE MARROW, SIGNAL = 7.5; EXPRESSED IN LUNG, SIGNAL = 5.5; EXPRESSED IN BT474, SIGNAL = 7.4; EXPRESSED IN ADULT LIVER, SIGNAL =   5; EXPRESSED IN FETAL LIVER, SIGNAL = 5.4; EXPRESSED IN HBL100, SIGNAL = 6.7; EXPRESSED IN HELA, SIGNAL = 5.6; EXPRESSED IN PLACENTA, SIGNAL = 9.9; EXPRESSED IN HEART, SIGNAL = 3.9
catagggctttttctcagtgtgaataacctgatgatgaatcaattgtgagcaatgactaaaagccttcccacattccttacattcatatggcttttcacctgtatgaattctgtaatgtacagtaagatgtgagacccgtttgaaggccctaccacataccttacattggtagggtttctctccagtgtgaattctctgatgttgcttgagttgtgagctcactctaaaggcctttccacatactttgcactcatagggtttctcaccggtatgaattctctgatgtcgtataagagttgagccttgattaaaagccttcccacattccttacattcatagagtttcctgccagtatgaacagtctgatgttgaatcaactgagaacgatgactaaaggttttcccacattccttgcatgcatagggtttttcaccagtatgaattctataatgtactttaagatgtgagatccgattgaaggcctt

SEQ ID NO: 2697 - DNA, 397 bp, Homo sapiens
  MAP TO AF179633.1; EXPRESSED IN HEART, SIGNAL = 0.86; EXPRESSED IN BRAIN, SIGNAL = 1.1; EXPRESSED IN BONE MARROW, SIGNAL =  38; EXPRESSED IN LUNG, SIGNAL = 2.8; EXPRESSED IN FETAL LIVER, SIGNAL = 1.1; EXPRESSED IN ADULT LIVER, SIGNAL = 1.1
tgcttcctatgtgcaaggtgttatactaagagccttacatgaataatatttaatcctcttgagtgtccaataaggaaagaacaactattgttagcattttatagtcagggaaactgaggcttggagaggtgaagtaacttgtccaaagtgacacaataagtggcagaattggagtttaagtttacaactgtctgatttagaagcccaagatcctaaccatgctgccatatggtcacaggaattaacgaaaatatatcccctacagctggagggggaaaaactggaaaatgagcttttcctgcaagttgtatgtcatggtgtttgggagctggccaaccgtggctcacaagagctgatgactgttcaaaaaatatgcaagccagttattgaacactgc

SEQ ID NO: 2698 - DNA, 486 bp, Homo sapiens
  MAP TO AC000026.3; EXPRESSED IN HBL100, SIGNAL = 5.1; EXPRESSED IN HELA, SIGNAL = 4.6; EXPRESSED IN HEART, SIGNAL = 3.6; EXPRESSED IN LUNG, SIGNAL = 2.2; EXPRESSED IN ADULT LIVER, SIGNAL =   3; EXPRESSED IN PLACENTA, SIGNAL =   4; EXPRESSED IN BRAIN, SIGNAL = 3.8; EXPRESSED IN BONE MARROW, SIGNAL = 3.7; EXPRESSED IN FETAL LIVER, SIGNAL = 2.4; EXPRESSED IN BT474, SIGNAL =   5
agagagcctaggcagcttgccccaggttgcgcagctagtcagagggtgaggagaagggaatctaggtctagctccctccagagagggtgcctgaaccaccaaaaggcacaagaacaactggcacccccagccaggctccgacttctaggtactcaggactgcctggtgaagagtcaagccaatgtcttcccaagcaacccaggaggtggtggaggtagcacggtgggtggcagtggcttaccatggggttagagtcggagatgaggtctttaagggtgtccaggaagccctggtcctccaccagctgggcgttgatgtcgtggagcttggccacgcacacagctgctgtcttgcgcacatatggatcctcgtccttcaggcacttccggagtggctcgcacaggtactctgtgatcttgtcaacgcggatgcagcccatggtccgcactgccagggctcggatgagggggttggggtcctcacagt

SEQ ID NO: 2699 - DNA, 470 bp, Homo sapiens
  MAP TO AB020863.1; EXPRESSED IN ADULT LIVER, SIGNAL = 3.9; EXPRESSED IN BT474, SIGNAL = 2.5; EXPRESSED IN FETAL LIVER, SIGNAL = 4.8; EXPRESSED IN PLACENTA, SIGNAL = 5.5; EXPRESSED IN HELA, SIGNAL = 2.5; EXPRESSED IN HEART, SIGNAL = 1.2; EXPRESSED IN LUNG, SIGNAL = 6.7
tttctcagaattacctaaatgttttgtagagttttgactagtaatcaatcaaaattatataaagtcttctccagtaattaagaaatacatatgcaaattcttttgtgattgagtaaaagcagcttaaattacttttcttttctacattaagaaatatattctcaacattttcagtgagaatttcttgtaatggcacctcaaattttatactcttaaaaaaaaacaataatttgtgaattaccaccaaaaggcaatggcagtcctacatttaagaatagagctatgcaaactctgttaaaaactatgaggaaaacttatattagaacttttgatatatactaaaatactgattatcttaatcacattttccccagagataaacattgagagaacgaaagccaaagtgtcatttaagagagatatatatgaaaaagtaacattaatatatagaactttaccatcaccagccg

SEQ ID NO: 2700 - DNA, 469 bp, Homo sapiens
  MAP TO AF181895.1; EXPRESSED IN HBL100, SIGNAL =   5; EXPRESSED IN HEART, SIGNAL = 1.1; EXPRESSED IN BRAIN, SIGNAL = 1.3; EXPRESSED IN BONE MARROW, SIGNAL =   1; EXPRESSED IN LUNG, SIGNAL = 2.4; EXPRESSED IN BT474, SIGNAL = 1.7; EXPRESSED IN ADULT LIVER, SIGNAL = 1.3; EXPRESSED IN FETAL LIVER, SIGNAL = 0.97
taatggccttggacttggacgatttatcgatttccccctgtaagatgctgtatcatttggttgggggggcctctgcgtggtaatggaccgtgagagcggccaggccttcttctggaggtgagccgatggagatttattccccagacatgtctgaggtcgccgccgagaggtcctccagcccctccactcagctgagtgcagacccatctcttgatgggcttccggcagcagaagacatgccagagccccagactgaagatgggagaacccctggactcgtgggcctggccgtgccctgctgtgcgtgcctagaagctgagcgcctgagaggttgcctcaactcagagaaaatctgcattgtccccatcctggcttgcctggtcagcctctgcctctgcatcgccggcctcaagtgggtatttgtggacaagatctttgaatatgactctcctactcaccttgaccctgg

SEQ ID NO: 2701 - DNA, 476 bp, Homo sapiens
  MAP TO AL078638.6; EXPRESSED IN BONE MARROW, SIGNAL = 1.6; EXPRESSED IN BRAIN, SIGNAL = 1.8; EXPRESSED IN ADULT LIVER, SIGNAL = 1.4; EXPRESSED IN BT474, SIGNAL = 1.8; EXPRESSED IN FETAL LIVER, SIGNAL = 1.4; EXPRESSED IN PLACENTA, SIGNAL = 3.7; EXPRESSED IN HELA, SIGNAL = 1.7; EXPRESSED IN HBL100, SIGNAL = 2.4; EXPRESSED IN HEART, SIGNAL =  10; EXPRESSED IN LUNG, SIGNAL = 9.3
ccagggaatcactagccatcggccatctggccccgcggggtgcttttgttcctggaatcatagtgaagtatctgttgtcttggtgcctggtagtcagctcggctgaaggggaagctgggtcttggtcctcagaccccatggactccaaggcagcattgtgcaggtgcctctgggagccactgctcagggtgctggggcatttcctgtggtcatttgtcctgtctgcttgcccccgcaggtccctccagctacaaggtgggcaccatggcggagaagtttgactgccactactgcagggatcccttgcaggggaagaagtatgtgcaaaaggatggccaccactgctgcctgaaatgctttgacaagttctgtgccaacacctgtgtggaatgccgcaagcccatcggtgcggactccaaggtaacgggcatccccatgtgccaatgggaagggctgggttttggagtgtcctttgc

SEQ ID NO: 2702 - DNA, 468 bp, Homo sapiens
  MAP TO AC007919.18; EXPRESSED IN HEART, SIGNAL = 0.9; EXPRESSED IN LUNG, SIGNAL = 2.1; EXPRESSED IN BRAIN, SIGNAL =   1; EXPRESSED IN BONE MARROW, SIGNAL = 1.2; EXPRESSED IN ADULT LIVER, SIGNAL = 0.94; EXPRESSED IN FETAL LIVER, SIGNAL = 0.91
gctgtgtaacaacgtttccatcaatgacagactgcatctaggaaggtggtcccataagattataatggagctgaacattttctgttacctagtggcatcatagttgtagtatgttgtagcacaacacattacttgcatgcccttagtgatggtggtgtaaacaaatctattgcactgttagtcatataaaagcatagcacatacaattatgtacagcatacaatgcttgatagtaataagtgactttgttattgtgtttattatactataccttttatttttattttagagtgttctctttctacttatgtattttttaaaaagttaactgtaaaacatcctcaggcgtgtccttcaggaggtattccagaaggtgttgttgtcataggaggtgacagctccatgcacgttactgcccgcctctccctgcgaggtaagacatagagatggaagacagtgatactggtg

SEQ ID NO: 2703 - DNA, 476 bp, Homo sapiens
  MAP TO AC010854.1; EXPRESSED IN PLACENTA, SIGNAL = 7.1; EXPRESSED IN HELA, SIGNAL = 5.7; EXPRESSED IN BONE MARROW, SIGNAL = 6.5; EXPRESSED IN BT474, SIGNAL = 3.2; EXPRESSED IN HBL100, SIGNAL = 3.8; EXPRESSED IN HEART, SIGNAL = 5.2; EXPRESSED IN BRAIN, SIGNAL = 5.3; EXPRESSED IN LUNG, SIGNAL =  11; EXPRESSED IN ADULT LIVER, SIGNAL = 8.3; EXPRESSED IN FETAL LIVER, SIGNAL = 3.9
  unsure 106
aggagctgtaccctgcaaagccacaatggtggagctgcccaaggccattggagcctacctcttgcatcagcatgacatggatgtgagacaaggagtcaaaggaganccattttggaactttaaggtttaatgactgccctattggatttcggacttgcatggggtctgtgtccttttgttttggccaatttctcccattcggactggatgtatttacccaatccctgtaccctcattgtatataggaaataactaatttgattttgatttaacaggcttgtaggtggaaggaacttgccttgttacagatgagactttggacttggacttttgagttaaagctggaatgtgttaagactttgggggactgttggaagggcatgattgtgtttttgaaatgtgaggacatgagattttggagcggtcagaggtggaatgacacggtttggctctgtccccacccaaatctcatcttg

SEQ ID NO: 2704 - DNA, 467 bp, Homo sapiens
  MAP TO AP000506.1; EXPRESSED IN BT474, SIGNAL = 4.6; EXPRESSED IN FETAL LIVER, SIGNAL = 2.2; EXPRESSED IN ADULT LIVER, SIGNAL = 1.6; EXPRESSED IN PLACENTA, SIGNAL = 4.1; EXPRESSED IN BONE MARROW, SIGNAL = 3.3; EXPRESSED IN HELA, SIGNAL = 6.6; EXPRESSED IN HBL100, SIGNAL =   6; EXPRESSED IN HEART, SIGNAL = 2.2; EXPRESSED IN BRAIN, SIGNAL = 1.5; EXPRESSED IN LUNG, SIGNAL = 9.8
cctggtttagggaaagtgggaactggggatggaaaagaggtggtgaaggctgtgctcgtgattaagtcttgctttttttttcccccctccagctcttctgttagaaatagtatctttgttttcctttgctgttcctcaatcccctactcttcaccccttgttttcacctattttgcgagaacccatccagatcccccttcccttcttcccctgccggcccagttatggcagagaacgatgtggacaatgagctcttggactatgaagatgatgaggtggagacagcagctgggggagatggggctgaggcccctgccaagaaggatgtcaagggctcctatgtctccatccacagctctggctttcgtgacttcctgctcaagccagagttgctccgggccattgtcgactgtggctttgagcatccgtcagaaggtaaattttctcttgggcatgtagtgctcatt

SEQ ID NO: 2705 - DNA, 475 bp, Homo sapiens
  MAP TO AC011408.1; EXPRESSED IN LUNG, SIGNAL = 5.7; EXPRESSED IN BRAIN, SIGNAL = 1.3; EXPRESSED IN BT474, SIGNAL = 1.5; EXPRESSED IN ADULT LIVER, SIGNAL = 2.1; EXPRESSED IN PLACENTA, SIGNAL = 1.7; EXPRESSED IN BONE MARROW, SIGNAL = 1.7; EXPRESSED IN FETAL LIVER, SIGNAL = 1.1; EXPRESSED IN HEART, SIGNAL = 1.4; EXPRESSED IN HELA, SIGNAL = 0.96; EXPRESSED IN HBL100, SIGNAL = 1.5
tcaggtggttctcacatccctatgaggtagaaagggcagggatcaccatccccatttgaaagataaggaacctggaactcagagagttaggtcccttgaccaaattcacacagctggctcgtggcagaatcaaaaccagaactcaggtccatgccccaaagtccctcctgctgcttttctgaagacaggaagaggctggggataggatgcctgtcctcatccctcacccggccctcttgggaggctctcaaacagccccactaaggatcggatgagtccgcatgcgatagatgattactgcagtggctgggcacagcaacaacgaggtcatgatgacaatggtggccaggatgatgaggacaataacccagatatccaggatgtgcttgggaagcacgacttccatggggacttggctgactgcatccatgttgcttcactctgcaacagacaagaaaggaagatcactgttgcg

SEQ ID NO: 2706 - DNA, 467 bp, Homo sapiens
  MAP TO AL031078.10; EXPRESSED IN BONE MARROW, SIGNAL =  10; EXPRESSED IN LUNG, SIGNAL =  10; EXPRESSED IN BRAIN, SIGNAL =   6; EXPRESSED IN BT474, SIGNAL =  14; EXPRESSED IN PLACENTA, SIGNAL =  11; EXPRESSED IN ADULT LIVER, SIGNAL =  12; EXPRESSED IN FETAL LIVER, SIGNAL = 5.5; EXPRESSED IN HEART, SIGNAL =  21; EXPRESSED IN HELA, SIGNAL =  25; EXPRESSED IN HBL100, SIGNAL =  19
tgtgccatggtggtttactgcacagatcaacccatcgcctaagtattaagttttccagattcctctgtgtctcttcttggcttggtagctcatttctttttattttattttattttattttttaacataaactccagattttattgtcttgataataaaacaaaagatgacacttagaactggatcacttggccctttctcttcttatctcctcccagctcaaaatgcttgcatcttttaatagccagtgttcgcttagatctgcagttgggctcaacacactcaagccttagcacaatcttctttgtagttttagcctttttccagaaaatcggcttagtctgcccaccatagccactctgcttcctgtcataacaccgctttccctgggcaggcaccatagccactctgctccctgtcataatatcgctttccctgggcatgcagagaatgcttgcccttctttt

SEQ ID NO: 2707 - DNA, 474 bp, Homo sapiens
  MAP TO AL079338.9; EXPRESSED IN HBL100, SIGNAL = 0.99; EXPRESSED IN HEART, SIGNAL = 0.92; EXPRESSED IN LUNG, SIGNAL = 1.9; EXPRESSED IN BONE MARROW, SIGNAL = 1.4; EXPRESSED IN BRAIN, SIGNAL = 1.2; EXPRESSED IN ADULT LIVER, SIGNAL = 1.1; EXPRESSED IN BT474, SIGNAL = 1.1
tttcaagtgagacctgctgctaggagagaagtaagctgacagcacccagcaaccacactgttgagaacccctgtggcatcatgttcctgctgaggccggccactttcttgccaaactacttgcagccagtgactgagcatgggaaagcgagaccctagagcccagctattcctgcccagtgcaggactcctccagacttccagactgcactgcagactgaggcacttcctagctgagcctccttcttttcttctctcctttcagctgctcctgctccattgcccatttctctcacctttatcctgcacttctgcttccatcttggcatcttcttccctcaagacccaacctgacaccatcagtattattacactcttcatttcccagtggaggaggtggggatccaggcaagaaagacaaagcgtaaatatgctccctttaaaattttgtactgctctatcgcttctgggtctt

SEQ ID NO: 2708 - DNA, 462 bp, Homo sapiens
  MAP TO AF152363.1; EXPRESSED IN BT474, SIGNAL =  90; EXPRESSED IN FETAL LIVER, SIGNAL =  20; EXPRESSED IN ADULT LIVER, SIGNAL =   8; EXPRESSED IN PLACENTA, SIGNAL =  11; EXPRESSED IN HEART, SIGNAL =  10; EXPRESSED IN BONE MARROW, SIGNAL = 9.8; EXPRESSED IN HELA, SIGNAL =  81; EXPRESSED IN HBL100, SIGNAL =  26; EXPRESSED IN BRAIN, SIGNAL = 7.8; EXPRESSED IN LUNG, SIGNAL =  17
ttaaatctcactttttgttaacttggtttaattattaacaaccagccacttctctgttactgaattcttttgttgctgttgtggttgttatttagtttttatttcataatcataaacttaactctgcaatccagctaggcatggaagggaacaaggaaaacatggaacccaaagggaactgcagtgaaagcacaaagattctaggatactgcgagcaaatggggtggaggggtgctcccctgagcaacagaagaaatggtctggtggttaagataaaacacaagtcaaacttattagagctgtccacagtcagcaatagtgaccttcttgctagtcttgccattcctgaacacaaagcgctccatggcctccacaatatccatgccttctttcaccctgccaaagaccacttgcttgccatccaaccacttggtcttggcagggcacatgaaaaactgggaa

SEQ ID NO: 2709 - DNA, 447 bp, Homo sapiens
  MAP TO AC005082.2; EXPRESSED IN BT474, SIGNAL = 1.9; EXPRESSED IN HBL100, SIGNAL = 1.5; EXPRESSED IN HELA, SIGNAL = 1.1; EXPRESSED IN HEART, SIGNAL = 3.2; EXPRESSED IN LUNG, SIGNAL = 7.9; EXPRESSED IN FETAL LIVER, SIGNAL = 2.1
ttttgtggccagctaaaatatgatctttgaattaaggaaatccatataaaagaaacatctattttataggaacctcatttcacttgaaactttctttaccaaaacaccaaaccaaaactttgtcaccaaactcctggaacaaagcactggtggctatattttagagtctctgatgagtctgaagtccactcatttttcatgtttcaagggtctcttcatttgctccacaagtatcgacaacacaaattaaacaacttgtgactggaaaagcacgaactttggagttggcaacccatttgtctgtttcggtattatattcgagaatgtgtcctaatcgaccaacaccctgaaaaccagccaagacataaactatagagccaactgctgcacatttcactgttacacccttccatggcattggtgagaccatcttccattcgttcaact

SEQ ID NO: 2710 - DNA, 461 bp, Homo sapiens
  MAP TO AC009406.1; EXPRESSED IN FETAL LIVER, SIGNAL = 3.1; EXPRESSED IN ADULT LIVER, SIGNAL = 6.5; EXPRESSED IN PLACENTA, SIGNAL = 7.4; EXPRESSED IN HELA, SIGNAL =  19; EXPRESSED IN HEART, SIGNAL = 3.5; EXPRESSED IN BRAIN, SIGNAL = 2.6; EXPRESSED IN BT474, SIGNAL = 1.4; EXPRESSED IN HBL100, SIGNAL = 2.6; EXPRESSED IN LUNG, SIGNAL =  11; EXPRESSED IN BONE MARROW, SIGNAL = 3.3
actgtgagacaaaccccagccacatctccaacacacaagaacttccaaatgcctgaaccgcagtggccaggcgttcctccagaacctcctcccccaggagcttgctacaaatgccagaaatctgaccaccaggccaaggaatgcctgcagcccaggattcctcctaagccgtgtcccatctgtgtgggaccccactggaaattggactgttcaactcacctggcagccactcccagagcccctggaactctggcccaaggctctctgactgactccttctcagtttagcggctgaagactgatgctgcccgattgcctccgaagccccgtagaccatcacggacgccgagctttgggtaactctcacagtggaaggtaagtccatccccttcttaatcaatatggaggctacccactccacattaccttcttttcaagggcctgtttcccttgcctccata

SEQ ID NO: 2711 - DNA, 445 bp, Homo sapiens
  MAP TO AP000343.1; EXPRESSED IN BONE MARROW, SIGNAL = 2.5; EXPRESSED IN LUNG, SIGNAL = 9.6; EXPRESSED IN BT474, SIGNAL = 6.3; EXPRESSED IN FETAL LIVER, SIGNAL = 2.8; EXPRESSED IN ADULT LIVER, SIGNAL = 1.8; EXPRESSED IN HBL100, SIGNAL = 3.9; EXPRESSED IN HELA, SIGNAL = 4.3; EXPRESSED IN PLACENTA, SIGNAL = 5.1; EXPRESSED IN HEART, SIGNAL = 2.4; EXPRESSED IN BRAIN, SIGNAL = 2.6
aggtcatgtgtgattcgcaggggttctggccgcttgaaaggttcctgagaaagtacatgccatgaggacagagcttgcagagggaggacaggcatgcagaaggctctgtgtgcagccccagacctgggtaccttcgtcaccgtcctcaccccacctccgggtgtgcagatatggagcaggtctcctgtgttatggcccaagcagggctgttaggacactgagaacattccctcctcccacaggagagagaggtccaaggtgccctacatcgtgcgccagtgcgtggaggagatcgagcgccgaggcatggaggaggtgggcatctaccgcgtgtccggtgtggccacggacatccaggcactgaaggcagccttcgacgtcagtgagtgttggcctgcgcaggacgggatggaggtgtgggcaatggtgtccgcgatgagatctc

SEQ ID NO: 2712 - DNA, 460 bp, Homo sapiens
  MAP TO AC007690.11; EXPRESSED IN BONE MARROW, SIGNAL =  14; EXPRESSED IN LUNG, SIGNAL =  31; EXPRESSED IN BT474, SIGNAL =  76; EXPRESSED IN ADULT LIVER, SIGNAL =   6; EXPRESSED IN PLACENTA, SIGNAL =  17; EXPRESSED IN BRAIN, SIGNAL = 3.5; EXPRESSED IN FETAL LIVER, SIGNAL =  14; EXPRESSED IN HEART, SIGNAL =  14; EXPRESSED IN HELA, SIGNAL =  28; EXPRESSED IN HBL100, SIGNAL =  25
aaaaatcattggtatctcaaagagactctatgtaaatgagccatatttatagatatttaccatactagaagctaaaataaaaaatttaaaaatatttctttaagaggaagacgcggtcgtaggtgcgaggatttctggtccgcatgctcctgctcctgactcaccgctgttcgctctcgccgccgaggaacaagtcggtcatgaagccgcgcagcagccatggcttttaaggataccggaaaagcacccgtggagccggaggtggcaattcaccgaattcgaatcaccctaacaagccgcagcgtaaaatccttggaaaaggtgggtgctgacttgatcagaggcgcaaaagcaaagaatctcaaagtgaaaggaggagttcgaatgccttccaagactttgagaatcactacaagaaaaactccttgtggtgaaggttctaagacgtgggatcgtttcc

SEQ ID NO: 2713 - DNA, 443 bp, Homo sapiens
  MAP TO AL031118.19; EXPRESSED IN HBL100, SIGNAL = 2.3; EXPRESSED IN HELA, SIGNAL = 3.2; EXPRESSED IN HEART, SIGNAL = 1.3; EXPRESSED IN LUNG, SIGNAL = 3.1; EXPRESSED IN BT474, SIGNAL = 2.7; EXPRESSED IN PLACENTA, SIGNAL = 3.3; EXPRESSED IN BRAIN, SIGNAL = 1.2; EXPRESSED IN BONE MARROW, SIGNAL = 1.2; EXPRESSED IN ADULT LIVER, SIGNAL = 1.2; EXPRESSED IN FETAL LIVER, SIGNAL = 1.8
gcaagcccttgtccaataaggtatttaatagtgcttagggactattagatgtcccatttctcctctctttcatttctcttgatcccttctcaccccagtgtaacaaactgctacaggtttttaccaaaatgctgcagcagtagttagaaatgagttaatttgcattatcaaagtattcaatcacattatcccaggtcacatttgcatataaccaagagatgaacaaataacatctactgcagtgattttgcaaattcagcatagtcaatgtatccatcattgttcttgtcatcatctctcaaaacaccatctcttatgttaatcagctcatcttcactcattagtggtgcctgttcactccctttctccttatagatatgagtgatggctgtggagatttctaaaccatcaagcaaataattgccatcataatcgtgcatttt

SEQ ID NO: 2714 - DNA, 459 bp, Homo sapiens
  MAP TO AL034422.18; EXPRESSED IN FETAL LIVER, SIGNAL = 2.7; EXPRESSED IN ADULT LIVER, SIGNAL = 1.4; EXPRESSED IN PLACENTA, SIGNAL = 9.3; EXPRESSED IN HBL100, SIGNAL = 5.2; EXPRESSED IN HELA, SIGNAL =  12; EXPRESSED IN HEART, SIGNAL = 2.6; EXPRESSED IN BT474, SIGNAL =   3; EXPRESSED IN BRAIN, SIGNAL = 1.1; EXPRESSED IN LUNG, SIGNAL = 6.3; EXPRESSED IN BONE MARROW, SIGNAL = 2.1
gcactcacaaagtttatacttccttcactcacttaatatttattaagcacgtaccatgttgccaagccccgtgcatgaccccaggactatttatggagactgcacacagtgcctcacctcccaagcttatttataggaggcacaggcaaggcgaaggtgaagagccccatgcccctgaaaaagagccaccagtgcctggggcacagccactctcacctgggtcggggtacattcaggcacataccacattccagaggattgggttcttcaaagtggcatctccaatgattaagtagagagtgtaggtgccagaggcagagtcaaattcaatctttctttcagaggtatccagttcaaacttgtacacgttcttgttgtctggctcggcaacaaacaccacttcctggccagtcttctggttatggagtcggacaaatgtctagatggaagaataataca

SEQ ID NO: 2715 - DNA, 431 bp, Homo sapiens
  MAP TO AL031685.15; EXPRESSED IN FETAL LIVER, SIGNAL = 2.5; EXPRESSED IN ADULT LIVER, SIGNAL = 2.4; EXPRESSED IN PLACENTA, SIGNAL = 2.2; EXPRESSED IN HELA, SIGNAL = 2.2; EXPRESSED IN HEART, SIGNAL = 2.2; EXPRESSED IN BRAIN, SIGNAL = 2.2; EXPRESSED IN BT474, SIGNAL = 1.9; EXPRESSED IN HBL100, SIGNAL = 2.8; EXPRESSED IN LUNG, SIGNAL = 5.1; EXPRESSED IN BONE MARROW, SIGNAL = 2.9
agctcctgctgtactcacccgaatttctctttcaggaatattaatcgtatttttcatttgtgagcacaacaaagtcaaggtccatctctctctggcctctgttgtaaccctgcttgtagtacatgctctgtagtgtgctgctggggtccagtgtagcccaggccagttctgctgttcattttgcctcagcgacctgaagccgaagcgcgaccgtatcgaggaatgacatgcttcttgttcccctccttccagagcactccgctggtccaggcggcaacatgtccatgcttttagtgatgtccctgcctctaatccagaagccatggaggagataaggtagcccccctcgatcggatggggaagcccagttcaatggatactaaattcaaggatgacttatttcggaagtacgtgcagttccatgagagcaa

SEQ ID NO: 2716 - DNA, 416 bp, Homo sapiens
  MAP TO AL034380.21; EXPRESSED IN HBL100, SIGNAL = 1.3; EXPRESSED IN HELA, SIGNAL = 1.1; EXPRESSED IN HEART, SIGNAL = 0.9; EXPRESSED IN BRAIN, SIGNAL = 1.2; EXPRESSED IN BONE MARROW, SIGNAL = 0.98; EXPRESSED IN LUNG, SIGNAL = 2.1; EXPRESSED IN BT474, SIGNAL = 1.9; EXPRESSED IN FETAL LIVER, SIGNAL = 1.3; EXPRESSED IN ADULT LIVER, SIGNAL = 1.2
atggatcactcaaacgggagatgttagctgccttccctgtccttggccaaggggttttgcctgtattcacatccttatcccagtcaggaatccacctcacctgaacatgcatgcacagacctccaaacagcagcagcactgcagcgtggaccacgtacacaaacacctgaggactgaggaatccaagatcgggcttctctagggtcttattgttcttgctcctttgcagcccaagtgtaaggcagagccaagggtgagtggtcacgtatgtccaagttgcccaggcaaccagtatagccactggtgcagccagtagaaaattgggcacctgcttgagctcatagtatttcaaaaagccaacattccagtagacatcctggatatagctgtatattagtggaacatcccagaagcac

SEQ ID NO: 2717 - DNA, 401 bp, Homo sapiens
  MAP TO AF146367.1; EXPRESSED IN ADULT LIVER, SIGNAL = 2.9; EXPRESSED IN BT474, SIGNAL = 9.1; EXPRESSED IN FETAL LIVER, SIGNAL = 2.3; EXPRESSED IN PLACENTA, SIGNAL = 2.2; EXPRESSED IN HBL100, SIGNAL = 2.3; EXPRESSED IN HELA, SIGNAL = 2.5; EXPRESSED IN HEART, SIGNAL = 2.2; EXPRESSED IN BONE MARROW, SIGNAL = 3.2; EXPRESSED IN LUNG, SIGNAL = 1.2; EXPRESSED IN BRAIN, SIGNAL = 2.5
gactgacatggacccctctgccacctgcttccagggccatctccgcagcactgactgtcattggtagttcacactgtcagcatgctgatgatggggaccatatcaaccctcactcgctggcccaaaggatgtgagagtcactggtcttctctcctccaccccactctaggcatctgcatctgggaccgacctcctgggctggctgatcaaagaggaagcagcagcaatgtctgctgtggggactgcaactccatacctgcatcatcctggtgatagtcacagtggccgagtgagtttcttgggggcccagcttcctccagaggtggcagcaatggcccggctactaggggacctagacaggagcacgttcagaaagttgctgaagtttgtggtcagcagcc

SEQ ID NO: 2718 - DNA, 457 bp, Homo sapiens
  MAP TO AL031670.6; EXPRESSED IN BONE MARROW, SIGNAL =  49; EXPRESSED IN LUNG, SIGNAL = 1.1e+02; EXPRESSED IN ADULT LIVER, SIGNAL =  95; EXPRESSED IN BT474, SIGNAL =  61; EXPRESSED IN FETAL LIVER, SIGNAL = 1.3e+02; EXPRESSED IN HBL100, SIGNAL =  52; EXPRESSED IN PLACENTA, SIGNAL =  48; EXPRESSED IN HELA, SIGNAL =  83; EXPRESSED IN HEART, SIGNAL =  16; EXPRESSED IN BRAIN, SIGNAL =  14
tttttgtttcttgtctcaaaatagcatcttattcttgtttcatgggtgtaatatcacctcttattctttttttttttttttttttttttttttttgcatcagaaagccttatttccatttggtccaaggcttgttagggtagttaagaaagctgcctattggctggagggagaggcttaggcagaagccctattactttgcaaggggcccttcagaagtcgctgggctcataaggctcttagacgtgcttgagagtgagcctttcgaagagatactcgcccagcccagcctctgggcctcccagcctgtggaggttcgtcaggtggtcacccatcttcttgatgagcttcacttcctcatctaggaagtgagtctccaggaagtcacagagatgggggtccatgtgggcagaatccagggcatgaagatccaaaagggcctggttcagctttttctc

SEQ ID NO: 2719 - DNA, 391 bp, Homo sapiens
  MAP TO AL009030.4; EXPRESSED IN PLACENTA, SIGNAL = 5.8; EXPRESSED IN HEART, SIGNAL = 1.7; EXPRESSED IN BRAIN, SIGNAL = 3.1; EXPRESSED IN BONE MARROW, SIGNAL = 6.5; EXPRESSED IN LUNG, SIGNAL = 5.1; EXPRESSED IN BT474, SIGNAL = 2.7; EXPRESSED IN ADULT LIVER, SIGNAL =  11; EXPRESSED IN FETAL LIVER, SIGNAL = 4.9; EXPRESSED IN HBL100, SIGNAL = 3.3; EXPRESSED IN HELA, SIGNAL = 5.4
tctaggccccacatcaacacttcactgcacgttgaggacaaggccatctcggactgcagaccctcacggccttcccacactttgtcctcacttgcaacaggggcttcgggtgggcctcccgtttctaaagcacccactatggatgcacagcaggacagacccaagtcccaagactccctgggcctactggcccccctagcatctgctgcagaggtcccctctacagctcccgtgtctgggaagaagcacagaccaccaggacccctgttctcctcctcagatccccttcctgccacctcttaccactcccgggacacagcacaggtcacctcgctgattcctgccaccttcacagctgcaagcagggatgccggcatgagaagaacaaggt

SEQ ID NO: 2720 - DNA, 462 bp, Homo sapiens
  MAP TO AC004878.2; EXPRESSED IN HBL100, SIGNAL = 2.1; EXPRESSED IN HELA, SIGNAL = 6.4; EXPRESSED IN HEART, SIGNAL = 2.1; EXPRESSED IN BONE MARROW, SIGNAL = 3.6; EXPRESSED IN LUNG, SIGNAL =   4; EXPRESSED IN PLACENTA, SIGNAL =   5; EXPRESSED IN BRAIN, SIGNAL = 2.9; EXPRESSED IN ADULT LIVER, SIGNAL = 4.3; EXPRESSED IN FETAL LIVER, SIGNAL =   2; EXPRESSED IN BT474, SIGNAL = 3.5
tggagctctaggaaaggtgggcgcgatctcgcgcccacacccagtgctctgggtcataagcctggatctggaaaaacaaacgcgctttgagaagacggggactccccaggatacccctctctcccctcgtccagcctccagcccacccgattcctccccacatcctccacgtccccaggccccacccacctcttccaactcctccagggaaacccaagccctgcagcgcatggaacaaaagaagtggaaccgatacttccggaacaaggctatctgagagcagttcttcctggccctcgggttcatgtaacggcataactggaaccaaagctcactgagcaagggtatatgagagcgggtctcctcgtacaggaagtagaagatgttttgtttgggggcctcgtcgtcctcctccatgtcattggccagatagctgaggacagaaatcaggttgctgctcag

SEQ ID NO: 2721 - DNA, 447 bp, Homo sapiens
  MAP TO AL035414.18; EXPRESSED IN BT474, SIGNAL = 7.7; EXPRESSED IN FETAL LIVER, SIGNAL = 4.9; EXPRESSED IN HBL100, SIGNAL = 7.6; EXPRESSED IN HELA, SIGNAL =  12; EXPRESSED IN HEART, SIGNAL = 5.2; EXPRESSED IN LUNG, SIGNAL = 5.8; EXPRESSED IN ADULT LIVER, SIGNAL = 6.4; EXPRESSED IN PLACENTA, SIGNAL = 7.1; EXPRESSED IN BRAIN, SIGNAL = 4.3; EXPRESSED IN BONE MARROW, SIGNAL = 9.7
tcacagtctcagatggcagcatttggcttctgtaatttgacgaagacactggccctcttggcatacaaaatggccaagcaaggattcagcttgatggcatctgtgaataagtcaatggctttctgcagtttaccatcatttagggctcaatggcagccactttcttatcatttgcctgatccctcatctcctctgttatctctgcattttcatctcccatttcttgaggggcatcagtgtctggttcaatcacaccttcattatcaatttctagatcactttcctcacttggttcgtctgcctttaagtcttcctccaccttcttactatcaggtttttcttccttggtattttcttctgatttagctttctgagtagcaggtggtactttacccgccatgctctccacccactctctcaggaagcgcatttccttggtgtatggaa

SEQ ID NO: 2722 - DNA, 446 bp, Homo sapiens
  MAP TO AC009974.2; EXPRESSED IN BRAIN, SIGNAL = 5.8; EXPRESSED IN BONE MARROW, SIGNAL =  13; EXPRESSED IN LUNG, SIGNAL =  28; EXPRESSED IN ADULT LIVER, SIGNAL = 7.6; EXPRESSED IN BT474, SIGNAL =  52; EXPRESSED IN FETAL LIVER, SIGNAL =  15; EXPRESSED IN PLACENTA, SIGNAL =  21; EXPRESSED IN HBL100, SIGNAL =  25; EXPRESSED IN HELA, SIGNAL =  47; EXPRESSED IN HEART, SIGNAL = 7.7
ccttttcacaagaaggtgccaaaagtgaagaagaaagctcctgcccctcctaaaccaaagccaaagtgaaggctttgaaggccaagaaggcagtgttgaaaggtgtccacagccacaaaaaaaaagatccgcacgtcacccaccttccggcggcccaagacactgagactctggaggcagcccaaatatcctcagaagagtgccccaaggagaaacaagcttgcccactatgctatcctcaagtttctgctgaccacggagtctgccatgaagaagatataaaacaacaacatactgtgttcattgtggatgttaaagccaacaagcaccagatcacacgggctgtgaagaagctctatgacattgatatgcccaaggtcaacaccctgattaggtctgatggagagaagaaggcatatatttgactggctcctgattacaatgct

SEQ ID NO: 2723 - DNA, 460 bp, Homo sapiens
  MAP TO AL078639.3; EXPRESSED IN PLACENTA, SIGNAL = 1.2; EXPRESSED IN HEART, SIGNAL = 3.2; EXPRESSED IN BRAIN, SIGNAL =  34; EXPRESSED IN BONE MARROW, SIGNAL = 0.94; EXPRESSED IN LUNG, SIGNAL = 8.3; EXPRESSED IN BT474, SIGNAL =   6; EXPRESSED IN FETAL LIVER, SIGNAL = 7.4
ggagacgttggaagacatggatattgagccagttgatggaagactgggtagttgttggaagacatgaagatgctggaagacacagagatgctggaagacgtggagatgttggaagacgagcagatgctggaagccctggagatgctggaagacctggagatataggaagacatggatttgttggaagacgtagcttagttggaagacatatattttctggaagacgtggattttctggaagacatggcttggttggaagacgtggattttctggaagacgtacctttgttggaagacatacctttgttggaagacgtacctttgttggaagacgtacctttgttggaagacacaagtaggctggaagacattaatttgatggaagacatggctttgttggaagacgtggatttgctggaagacacggatttcctggaagacctggatttttcggaagcta

SEQ ID NO: 2724 - DNA, 444 bp, Homo sapiens
  MAP TO AP000506.1; EXPRESSED IN HELA, SIGNAL = 2.6; EXPRESSED IN HBL100, SIGNAL = 0.93; EXPRESSED IN HEART, SIGNAL =   1; EXPRESSED IN BRAIN, SIGNAL = 1.2; EXPRESSED IN BONE MARROW, SIGNAL = 1.3; EXPRESSED IN LUNG, SIGNAL = 9.2; EXPRESSED IN BT474, SIGNAL = 1.2; EXPRESSED IN FETAL LIVER, SIGNAL =   1; EXPRESSED IN ADULT LIVER, SIGNAL =   1
ttgaacccaatgatcttccctggtagggctctatttctttaggtgaccaaccagaccctaagtgaggagttgactacattgcactccttccatcctggaagggccagaggttcatcttcacagggataggcacctattccataggtgggttttcctgtcctgctctcagaccctcagccagcaccactctctgggggctgttgatattcctgatccacaggcttggcactgctctccgtgcagtatcttcgtgggggacccacttgacagcgaaggaggtgcagtgtggccatgctgtgggacccactggtcctatcaccatctgcaccaaccaagggctgctggccataaagaatgttgaaaagagcttctataggcacagctcaacgccagcttgcaggaagcactctgcgggtgggagggtgccatctttcaggacatggt

SEQ ID NO: 2725 - DNA, 459 bp, Homo sapiens
  MAP TO AL109956.8; EXPRESSED IN ADULT LIVER, SIGNAL = 7.9; EXPRESSED IN BT474, SIGNAL = 3.4; EXPRESSED IN FETAL LIVER, SIGNAL = 3.3; EXPRESSED IN HELA, SIGNAL = 6.2; EXPRESSED IN PLACENTA, SIGNAL = 7.9; EXPRESSED IN HBL100, SIGNAL = 3.4; EXPRESSED IN HEART, SIGNAL = 4.6; EXPRESSED IN BONE MARROW, SIGNAL = 6.9; EXPRESSED IN BRAIN, SIGNAL = 2.6; EXPRESSED IN LUNG, SIGNAL = 6.1
gctggttgcccatttttatggttatttcttgatgatatgctaaacaaggggtggattatttacgcctcccctttttagaccatgtagggtaacttcctgacgttgccatggtatttgtaaactgtcatggcactggtgggagtgtagcagtgaggatgaccagaggtcactctcattgcaattttagttttggtgggtttgggctggctcctttactgcaacctgttttattaacaaggtgtttatgacctgcattttgtgctgacctatctcatcctgtgacttagaatgccttaaccatctgggaatgcagcccagtaagtttcagcctcatttccagctcctgtttaagatggagttgctctggttcacacgcctctgatactagaatgcctaggacccggttctcaacagagaagcacggtggcctgagagtcaatgaaacaatggccacagcag

SEQ ID NO: 2726 - DNA, 459 bp, Homo sapiens
  MAP TO AC010739.2; EXPRESSED IN HEART, SIGNAL = 5.5; EXPRESSED IN BRAIN, SIGNAL =   4; EXPRESSED IN BONE MARROW, SIGNAL = 5.6; EXPRESSED IN LUNG, SIGNAL = 3.6; EXPRESSED IN ADULT LIVER, SIGNAL = 6.2; EXPRESSED IN BT474, SIGNAL = 3.3; EXPRESSED IN FETAL LIVER, SIGNAL = 3.1; EXPRESSED IN PLACENTA, SIGNAL = 6.9; EXPRESSED IN HBL100, SIGNAL = 3.6; EXPRESSED IN HELA, SIGNAL = 6.1
aaaaatgtatgtaatgtggtggtgaatattaagtgtcaacttgatttgattgaagcatgcaaactattgttcctgggtgtgtctgtgaggctgtcgccaaaggagattaacatttgagtcagtggaatgggagaggcagacccaccctcaatctgagtgggcacaatttaatcagctgccagcatggctagaataatgcaggcagaagaaagtggaaggactagacttggtgagtcttccggccttcatctttctccctagctggatcgttcctgacctcgaacatcagactccaagctcttcagttttggacttttggatttacaccagtggtttgccaggggctcttgggcgtttggccacagactgaaggctgcactgttggcttccgtacttttgaggttttgggactcagactgatccaccactggctttcttgctcctcaagttgcagatggc

SEQ ID NO: 2727 - DNA, 421 bp, Homo sapiens
  MAP TO AL034396.6; EXPRESSED IN HELA, SIGNAL =  14; EXPRESSED IN PLACENTA, SIGNAL =  22; EXPRESSED IN HBL100, SIGNAL =  20; EXPRESSED IN HEART, SIGNAL = 2.2; EXPRESSED IN BRAIN, SIGNAL = 2.6; EXPRESSED IN BONE MARROW, SIGNAL =   3; EXPRESSED IN LUNG, SIGNAL = 7.2; EXPRESSED IN BT474, SIGNAL =  38; EXPRESSED IN ADULT LIVER, SIGNAL =   4; EXPRESSED IN FETAL LIVER, SIGNAL = 3.1
cagtgtcaattttgtttatttttgctctattttaaaattttattttcttgaccaagaagcagcttctctgccccttctggaatctccacctggttcagcccacctgcctccactcctgcttccaccatgtccatcagggtgacccagaagtcctacaaggtgtccacctctggcccctggttcttcagcagctgctcctacttgagtgggcccagtgcccacatcagctccttgagcttctcccgagcgggcagcagcagcttccagggtggcctgggcagaggctatggtggggccagcggcatggaagtcatcactgctgtaatggtcaaccagagcctgctgagccccattaacctggaggtggacctcaacatccaggccatgcacacctaagagaaggagcagatcaagaccctca

SEQ ID NO: 2728 - DNA, 394 bp, Homo sapiens
  MAP TO AC011242.1; EXPRESSED IN HEART, SIGNAL =   1; EXPRESSED IN LUNG, SIGNAL = 2.2; EXPRESSED IN BONE MARROW, SIGNAL =   1; EXPRESSED IN ADULT LIVER, SIGNAL = 1.2; EXPRESSED IN BT474, SIGNAL = 1.1; EXPRESSED IN FETAL LIVER, SIGNAL = 1.1
tcatttccattactaacacctttcctctctttaatatggaatgtgtatatgtagagattgtgtattaagaattctatgggtttaacaaagtcctgcattttttttttcttatcgtggagattagattggttaaagttttggaaaactcctgaattaaacttcttgcaaagtttactcttcttgtaaagagtagcttctttgctgttcgttgggcttggctcctgaaaaggacttggtttcaccttgatgtttccttgaagacaatgctctaaatctctgccagaaggatcgtcagtgaacaacgcaaatccagactgcgctggtttcctcattcctgtgtcctggttcaaagtattcaaaaattcttccactgtggtagatgcgtcaaaaccaa

SEQ ID NO: 2729 - DNA, 457 bp, Homo sapiens
  MAP TO AC007038.3; EXPRESSED IN PLACENTA, SIGNAL = 8.1; EXPRESSED IN HBL100, SIGNAL =  10; EXPRESSED IN BONE MARROW, SIGNAL = 4.1; EXPRESSED IN FETAL LIVER, SIGNAL = 6.7; EXPRESSED IN HELA, SIGNAL = 9.2; EXPRESSED IN HEART, SIGNAL = 4.2; EXPRESSED IN BRAIN, SIGNAL = 3.2; EXPRESSED IN LUNG, SIGNAL = 7.5; EXPRESSED IN BT474, SIGNAL = 9.6; EXPRESSED IN ADULT LIVER, SIGNAL = 5.9
tgcatgataaacacaaatgactaccacttgtctgtagatgaaaatctggttacccttatggttccagaaggaaaaacagacttatcttgcctgtttcataaacagcataaaagattaatacatgcagaacatgctcttattctggaggggatgggggatccagaacagggctttatttcctcccatctttcctacatttacatagttttcttaacctgttccctgtcacctattttttttaacattagtaagtcctagaccaaaggttttgtattcttccattccatctgactgcttttttggatggtggccattctctggtacactggtaccgaagatttcaccatggaaagctgtgcttgacctttcaacctgatcctttttttcatcttgacataataaggctgccatgtcttcacccttcagtggaaaagcccgtcgttcccaccacaaagac

SEQ ID NO: 2730 - DNA, 386 bp, Homo sapiens
  MAP TO AC008053.1; EXPRESSED IN ADULT LIVER, SIGNAL = 0.91; EXPRESSED IN PLACENTA, SIGNAL = 1.1; EXPRESSED IN HEART, SIGNAL = 0.97
agagggaaagtcttccaggtgggagtgtcagtgaatttaactttgttctcttttcttcctttcttaggatccttcttacagctctccatgatgcctcagagagctggaaatgatccacctggggtttcaaatgcaagtgaaatggaaatggagataagtaacatgagagaaaagtttcttatgagtgtaacaaagttagtagaaagcaaaagttacaacagcaaggtattttccaaagaaaagtactttcaaacaataaaggaagttaaagaagctaaagaaaaagggaagaagtcatcacgtgattatcgccgtgcagcaaaatatgatgtgatctctgtacagggcacagagaaactgatagaggctactcatggagaacgtga

SEQ ID NO: 2731 - DNA, 484 bp, Homo sapiens
  MAP TO AC002992.1; EXPRESSED IN BONE MARROW, SIGNAL = 1.5; EXPRESSED IN LUNG, SIGNAL = 1.3; EXPRESSED IN BRAIN, SIGNAL = 1.1; EXPRESSED IN ADULT LIVER, SIGNAL = 1.3; EXPRESSED IN FETAL LIVER, SIGNAL = 1.8; EXPRESSED IN HELA, SIGNAL = 1.1; EXPRESSED IN PLACENTA, SIGNAL = 1.4; EXPRESSED IN HBL100, SIGNAL = 0.93; EXPRESSED IN HEART, SIGNAL = 1.3
tctcttctattgaaaataactctttcgactaatcagaacatttaaaaatctacctatgacctggcaccaccccccgcaacccccttgcttcaagtagtctcaccctttcagatcaaagcattgtgtatcttacatgtattcattgatgtctcatgtctccctgaaatgtgtaaaagcaagctgtaccccaaccacctttggcccatgttgtcaggacctcctgaggctgtgtcacaggcatgtccttaaccttggcaaaataaactttctaaattgattgagacctgtctcagatacttttgggttcacaggtcccattcacagcttctggggagatgtgagttttatggggggcactgcttaccccagtcaacagtgctgtcccataagctgcccacacaatggcacctgcttagagaaagagtgaaggtttgaagctggaagcagaagacaaagaaggtgaaggggcagaagatgtctgtgt

SEQ ID NO: 2732 - DNA, 471 bp, Homo sapiens
  MAP TO AC007678.1; EXPRESSED IN HBL100, SIGNAL = 1.3; EXPRESSED IN HEART, SIGNAL = 1.4; EXPRESSED IN LUNG, SIGNAL = 2.5; EXPRESSED IN BONE MARROW, SIGNAL = 2.5; EXPRESSED IN BRAIN, SIGNAL = 1.4; EXPRESSED IN ADULT LIVER, SIGNAL = 2.1; EXPRESSED IN BT474, SIGNAL = 1.3; EXPRESSED IN FETAL LIVER, SIGNAL = 1.5; EXPRESSED IN PLACENTA, SIGNAL = 1.7; EXPRESSED IN HELA, SIGNAL = 1.5
agtctccatggaacactcccctcctacttgttcccaagccagggaccaagtactacaggccagtacaggatttgcacttggtcaaccaagctacagtgactttgcatccaatggtacctaacctgtacacattgttagaattcctgccagctgaggacaacttattcacctccttggacctgaaagatgctttctttagcatcagactagcccctgagggcccaaaactgtttgcctttcagggggaggatccagggtcaggtgtcatcactcagtacacttggacacggctcccccaagggttcaagtactcccccaccatctttggggaggcactggctcaagacccccagaagtttccttccagagacctaggctgcgtgctgctccagtatgtcgatgaccgcctgctgggacaacccatggcagtctggtgcaccaagggaatatacccttctccaacacctggag

SEQ ID NO: 2733 - DNA, 456 bp, Homo sapiens
  MAP TO AC004975.2; EXPRESSED IN ADULT LIVER, SIGNAL = 1.5; EXPRESSED IN PLACENTA, SIGNAL = 1.8; EXPRESSED IN HBL100, SIGNAL = 1.1; EXPRESSED IN HEART, SIGNAL = 1.4; EXPRESSED IN BONE MARROW, SIGNAL = 2.1; EXPRESSED IN FETAL LIVER, SIGNAL = 2.3; EXPRESSED IN HELA, SIGNAL = 2.6; EXPRESSED IN BRAIN, SIGNAL = 1.4; EXPRESSED IN LUNG, SIGNAL = 6.1
gccattgccttgacagtttacaaatgccatggcaacgtcaggaagttaccatatatggtctagaaaggggaggaaccctcagttccaggaactgcccacctcttttgaagaaaactcatgaataatccacccctttgtttagcacataatcagtaaataaccataagtattcttactcagacagcctaagctgctgctctgcctatggagtagccattcctttgctttcctagtaaacttgctttcactttactctatagattcacctcaaattctttcttgcgtgagatccgggaaccctcttttggggtctggatcaggaccccttcctggtatagttccgcagagctataagaagcaaagaagggctggatgacggaggcctggatggcattctgagctacagaaaggaagaggagttggggtttctgggtgtgatggagacaagttttgggg

SEQ ID NO: 2734 - DNA, 457 bp, Homo sapiens
  MAP TO AC008080.1; EXPRESSED IN PLACENTA, SIGNAL = 2.2; EXPRESSED IN HELA, SIGNAL = 5.2; EXPRESSED IN BONE MARROW, SIGNAL = 2.1; EXPRESSED IN BRAIN, SIGNAL = 2.2; EXPRESSED IN BT474, SIGNAL = 1.3; EXPRESSED IN HEART, SIGNAL = 2.1; EXPRESSED IN HBL100, SIGNAL = 1.5; EXPRESSED IN LUNG, SIGNAL = 2.4; EXPRESSED IN ADULT LIVER, SIGNAL = 2.7; EXPRESSED IN FETAL LIVER, SIGNAL = 1.8
acttgctcctccttgccttccaccatgattgtgaggctaccccagccacatggaactgtaagtccaattaaacctctttcttttctaaattgcccagtcttgagtatgtctttatcagcagcacgaaaacaggggtgggagtggatgggccgtaagctagggaaacatagattagcggaggaaccctacacatggaagtcaccttagactcccaaatcctgtgatacaagtttagcattggaaaaaaaaagtctttccttgtttcttttctttggaggataggggctgaaggggagctgaagccaagcatctccttgcatatctcaggttcagtgacagaagagcttttggaccctgcataccttttaaaagcagttaccttggctttcataaaattgaatgtgaacgtaggtcctctttgtgtagagaattgttaccaaatcctcccagaggagaa

SEQ ID NO: 2735 - DNA, 469 bp, Homo sapiens
  MAP TO AC008677.2; EXPRESSED IN BT474, SIGNAL = 2.2; EXPRESSED IN FETAL LIVER, SIGNAL = 2.8; EXPRESSED IN ADULT LIVER, SIGNAL = 2.5; EXPRESSED IN PLACENTA, SIGNAL = 2.5; EXPRESSED IN BONE MARROW, SIGNAL = 2.3; EXPRESSED IN HELA, SIGNAL = 2.8; EXPRESSED IN HBL100, SIGNAL = 1.8; EXPRESSED IN HEART, SIGNAL = 2.6; EXPRESSED IN BRAIN, SIGNAL = 2.2; EXPRESSED IN LUNG, SIGNAL = 1.7
tgaaacagcagcaagaacaatactgatcatcattattatactactaatattaaattaattgcttactctatgatagaaaatatcttacataatttatgtctcttcatccatttgtgcttattgacaggaaaagtaggtagtattatccataatttaaaatgaggaattgagacacagagaaattaaaatttacccaaagtcacccagctactgagagggagatccaggattcaaatgcaggtggcctaactctacattcatacccagagcttctgtgctatttgtctcacaaatggagagaaggggtgctccaggcagcagatgcagcatgtgcaaaagcacacctgcctgaggttaaaggcccactcctgcaactgcagggagctcagtgtggtaggaggccaggtctatgactgtttggggatgcagaggaaggagacataagcccaggctgaccactgaagacaca

SEQ ID NO: 2736 - DNA, 460 bp, Homo sapiens
  MAP TO AC006323.3; EXPRESSED IN BRAIN, SIGNAL = 0.99; EXPRESSED IN BT474, SIGNAL = 2.8; EXPRESSED IN ADULT LIVER, SIGNAL = 0.94; EXPRESSED IN HEART, SIGNAL = 0.97; EXPRESSED IN PLACENTA, SIGNAL = 1.6; EXPRESSED IN BONE MARROW, SIGNAL = 0.96; EXPRESSED IN FETAL LIVER, SIGNAL = 0.98; EXPRESSED IN HELA, SIGNAL = 1.4; EXPRESSED IN HBL100, SIGNAL = 1.2
cagagaattttcaaaggaagaacagtcaagaaaaaacttggggtagcatcatttaatgctaaagtgtatggagcaagtcatattctaaatacactcttccccctaagtcaaaccaaaatgctctgcagaagtctgaaattggcacataacgatgtacaaacacatgcatctttttaaaactgacatgggcaagtaatgccgttgactcgagagtctagaatcaaaagcaatatcaaaactacagataattataaatacctacattttatgagtcttgtggctcaccttcatttttgtcagcatccaataaattctgaaattctgtgtggaaaatttccaagtgtttttcaatgaggacttgttcacatttccttgctaattcatcttgtgtgctttcatgaaggtaaacctgaactcttcgttgttcctcaagcagacgagcctctgcctggagaaaatt

SEQ ID NO: 2737 - DNA, 486 bp, Homo sapiens
  MAP TO AC009405.2; EXPRESSED IN HBL100, SIGNAL = 0.93; EXPRESSED IN HELA, SIGNAL = 0.93; EXPRESSED IN PLACENTA, SIGNAL = 1.1; EXPRESSED IN BONE MARROW, SIGNAL =   1; EXPRESSED IN ADULT LIVER, SIGNAL = 1.3; EXPRESSED IN BT474, SIGNAL =   1; EXPRESSED IN HEART, SIGNAL = 1.1
gtcacctaatcagcgcaggtagaagaataggacctgaaagagtggagggaattgtttccctacccctgcctcaaactaaacaagaactcaggaaaattttaggactaattggatattgccatttatggattgactcatatgcattaaaaagtaaacttctgtatgagaaagttgccccatggaagcctgatcgtctcttgtggacttctgaggaaatccagcaaactgaggaattaaaagagatgctcataactgcccctcttctatctcttccctccctagaaaagccatttcacctttttgttaatgtaaataatggggtagctctaggagtgcttacccaagagcaaggaggccatcgacagcccgtggccttcttgtcaaaggtcttagacccagtcattcgtgggtggccccagtgtatccaatccatcatggctacagcagtattagttgaagaaagtaggaagttagcctttggaggaa

SEQ ID NO: 2738 - DNA, 494 bp, Homo sapiens
  MAP TO AC004938.2; EXPRESSED IN LUNG, SIGNAL = 2.4; EXPRESSED IN BRAIN, SIGNAL = 1.6; EXPRESSED IN BT474, SIGNAL =   4; EXPRESSED IN FETAL LIVER, SIGNAL = 2.1; EXPRESSED IN ADULT LIVER, SIGNAL = 2.3; EXPRESSED IN PLACENTA, SIGNAL = 2.7; EXPRESSED IN BONE MARROW, SIGNAL =   2; EXPRESSED IN HEART, SIGNAL = 2.4; EXPRESSED IN HELA, SIGNAL = 2.8; EXPRESSED IN HBL100, SIGNAL = 2.2
tgttcctaccaaggagctggcacggcaagcacagtccatgattcagcagctggctacctactgtgctcgggatgtccgagtggccaatgtctcagctgctgaagactcagtctctcagaggtgggtaaaagcagcaaagctgtacctgaatgaagctacacagtgttgtggggttgggtttgtgtgtggcaaaaaagagagcaaatccagggtgagatcccagctgctacattctgcctgatactgatgtcttgtccacctccagagctgtgctgatggagaagccagatgtggtagtagggaccccatctcgcatattaagccacttgcagcaagacagcctgaaacttcgtgactccctggagcttttggtggtggacgaagctgaccttcttttttcctttggctttgaagaagagctcaagagtctcctctggtaaggcagaggtgggtgtgattcctagtggaaacatctgtgagtaggagttgggacg

SEQ ID NO: 2739 - DNA, 477 bp, Homo sapiens
  MAP TO AC007970.3; EXPRESSED IN FETAL LIVER, SIGNAL = 1.2; EXPRESSED IN ADULT LIVER, SIGNAL =   2; EXPRESSED IN PLACENTA, SIGNAL = 1.6; EXPRESSED IN HBL100, SIGNAL = 1.5; EXPRESSED IN HELA, SIGNAL = 1.6; EXPRESSED IN BRAIN, SIGNAL = 1.2; EXPRESSED IN BT474, SIGNAL = 1.5; EXPRESSED IN HEART, SIGNAL = 1.8; EXPRESSED IN LUNG, SIGNAL = 1.6; EXPRESSED IN BONE MARROW, SIGNAL = 1.8
gaagggaatgcctggagcctacttattttatttcttatcgggagaatgagaatcatcattctactttgcataggaggttcagctcattcccttaaaatgggaagataaaggcattacccccacgaggcctcatatgatactccccattctgagcccagaacacccagaactttagaaattggctattgccatgtttagactgtgagtatgggaaggggaaactattatgtctgttgtccccactaccgtcccccactctcagtatcaacgtagatccagacgttcgacttcacttacctccaacctgactgttcacatacagagttgtgttacgcttccttacatgctgttagtgggaaatatcaaaatttggatgaacaatcaaactgtccaatgcattaattgtcatttatacacttatattaactcccattttgactccaagaaaagtgtaatgctggttcaagctcgagaagg

SEQ ID NO: 2740 - DNA, 478 bp, Homo sapiens
  MAP TO AC005095.2; EXPRESSED IN FETAL LIVER, SIGNAL = 1.4; EXPRESSED IN ADULT LIVER, SIGNAL = 2.1; EXPRESSED IN PLACENTA, SIGNAL = 1.3; EXPRESSED IN HELA, SIGNAL = 1.2; EXPRESSED IN BT474, SIGNAL = 1.2; EXPRESSED IN HEART, SIGNAL = 1.1; EXPRESSED IN HBL100, SIGNAL = 1.4; EXPRESSED IN BRAIN, SIGNAL = 1.1; EXPRESSED IN LUNG, SIGNAL = 2.1; EXPRESSED IN BONE MARROW, SIGNAL = 1.9
aatggaacaggaatgcatggctgaagaagaggtaagagaaaaggaaattgtaggagaagaaaaagaagaatccccaagaaaattcatgaagggtttagcagaaggtttgcaaacctcaacaagctccttaaaacgtttaaaaacatagactccaatgcaaagttttcattaatagagaggaattttcatagtgcagtatctgcttataagcaaatctttgaccaaaaaaaaaaaggaaaaacaaaccaagaaaaccaccatgcatgtatttctgaagagtgaccctcctcaagaagaaccacaagcaggaccttcaggaggaattccagaagaaggcactgttatcataggagatgacagctccatgcatgttactgcccctgaagaccttccactgggacaagttgaggaggtggaagacagtgacattgatgatcaggaagctgtgtatgcctaggctaaagtgcatgtttttgtg

SEQ ID NO: 2741 - DNA, 489 bp, Homo sapiens
  MAP TO AC008018.17; EXPRESSED IN BONE MARROW, SIGNAL = 1.7; EXPRESSED IN LUNG, SIGNAL = 1.7; EXPRESSED IN BT474, SIGNAL = 1.3; EXPRESSED IN FETAL LIVER, SIGNAL = 0.98; EXPRESSED IN ADULT LIVER, SIGNAL = 1.7; EXPRESSED IN HBL100, SIGNAL = 0.93; EXPRESSED IN HELA, SIGNAL = 1.3; EXPRESSED IN HEART, SIGNAL = 1.3; EXPRESSED IN PLACENTA, SIGNAL = 1.1; EXPRESSED IN BRAIN, SIGNAL = 1.1
gcctcctaaggaacaaagcagaatgcagaaaaattaagagtgggtctagggaataaaatagagatatgcaccagagtatgatgatgtgtctgggaaagaatatacaaatacttttaaaattactagacaataaacctgagatgacactaatacaggtaaatctcatttaatggtaatatattccaagaaatgcatcattaggtgattttgtggctgtgcagacaccaaagagtgtactttatacaaacctagacagcgtagcctactacatacctaggctatatcgtacagcctattgctcctgggctacacacctgtgcagcatgtcactgtgctgaatacagtaggccaatggtccgcaacacccaagccatggaccagcaccggttcgtgtcctgttaggaactgggcacaaagcaggagatgagtggctggccagccgagcattactgcctgagctccgcctcctgtcagatcagcagcagcatt

SEQ ID NO: 2742 - DNA, 475 bp, Homo sapiens
  MAP TO AC008119.6; EXPRESSED IN BONE MARROW, SIGNAL = 4.1; EXPRESSED IN LUNG, SIGNAL = 4.9; EXPRESSED IN FETAL LIVER, SIGNAL = 2.8; EXPRESSED IN ADULT LIVER, SIGNAL = 3.8; EXPRESSED IN PLACENTA, SIGNAL = 3.2; EXPRESSED IN HELA, SIGNAL = 4.3; EXPRESSED IN BT474, SIGNAL = 2.6; EXPRESSED IN HEART, SIGNAL = 3.5; EXPRESSED IN HBL100, SIGNAL = 2.5; EXPRESSED IN BRAIN, SIGNAL = 3.4
cagtttcctccagtaaaatggggatagataacagggcttccttcacagggtcgtggcgaggattcaatgagataacgtttgcaaggcaatgggcaggcagtaagcactcaaatccgacaggagctactgtcacgaaaagcgggtttgcagccttggcggctttatcgccgccgaggactagggaggcgggccaggacatggggacccgaggacctgaaagactggaagatgcccgctgcccacccccgggcccacctgctcctccagtctctcaatctccagctggtttttctcctcctcttcgtcatattcccactcgtactccccgggggagctctccgcggaggaagccatggcgtactcatccccatcgctctcgctcacgccttcctcctgctgatcccacgctggccccatggtcttgtatgtcgcagcggccacagcccgcgataacaccttcctccttgtcctagcc

SEQ ID NO: 2743 - DNA, 493 bp, Homo sapiens
  MAP TO AL008723.8; EXPRESSED IN HBL100, SIGNAL = 5.3; EXPRESSED IN HELA, SIGNAL = 6.5; EXPRESSED IN HEART, SIGNAL = 7.7; EXPRESSED IN BRAIN, SIGNAL = 5.4; EXPRESSED IN BONE MARROW, SIGNAL = 8.4; EXPRESSED IN LUNG, SIGNAL = 4.8; EXPRESSED IN ADULT LIVER, SIGNAL = 7.6; EXPRESSED IN FETAL LIVER, SIGNAL = 7.5; EXPRESSED IN PLACENTA, SIGNAL = 7.2; EXPRESSED IN BT474, SIGNAL = 3.5
gcattagaattaccaggcccattttaatgttagagtcctgggaacctttgctagagagaaattcaaattcagttgctctatgtttttgctactcagcaaagtccccaagccagtgggatcaatcctgagacttcccagttcagcatctgcattttaacaagatccccaggtaatctgagcacactaagtttagagaatcccttgtctaacccatgacatagacatcgggtttttgtttgtttttgtttttgacatcaccaggtgattctgtatgttgtcagggctgagaatctgatgatgaagcatctcaattttaggtgccagacagcagctaatccccatgtggaatgaggggccaactgcacaaatgatttttcctggtctggtcttgggaagggggcagggtatacagatgccttaccttggaacttccgcatccttgggttcatctgcagaatcttcttcagcttgggctccagttccttgatgtggg

SEQ ID NO: 2744 - DNA, 459 bp, Homo sapiens
  MAP TO AL021807.1; EXPRESSED IN HELA, SIGNAL = 1.1; EXPRESSED IN BRAIN, SIGNAL = 1.3; EXPRESSED IN BONE MARROW, SIGNAL = 1.3; EXPRESSED IN LUNG, SIGNAL = 3.9; EXPRESSED IN FETAL LIVER, SIGNAL = 1.8; EXPRESSED IN PLACENTA, SIGNAL = 0.94; EXPRESSED IN HBL100, SIGNAL =   1; EXPRESSED IN HEART, SIGNAL = 1.1
actgcctccacagctttcagcactgaagggtgacatgtcatactcattggctatgcatccgttgaagaaataaaggaatgaactctgaccggggaaagcaggagaggcaggagtgtgacaccctaacagtcgactgcagtgggagcagtggcaccagcagcacttggggagacttttactttccagtgtggcgggagtagtaaacactaggagtcagagagtaatcaccgaagctggagttaaaagtgtaaattaaaatcctccttcctataagaggaagataaccggttgactgcaactcacgtttcccctccagcactcggttaaacacgcacacgcacgcgcgcacgagctgcccacggtcttcctttcggggtttgagaagagacagacagaggtgggagagcgcagctgcagccgcatcaacattccggtgtctgcccttagaagaagtccgga

SEQ ID NO: 2745 - DNA, 457 bp, Homo sapiens
  MAP TO AC011282.1; EXPRESSED IN PLACENTA, SIGNAL = 1.4; EXPRESSED IN HBL100, SIGNAL = 2.2; EXPRESSED IN HEART, SIGNAL = 1.6; EXPRESSED IN BRAIN, SIGNAL = 1.6; EXPRESSED IN BONE MARROW, SIGNAL =   2; EXPRESSED IN LUNG, SIGNAL = 1.8; EXPRESSED IN ADULT LIVER, SIGNAL = 1.6; EXPRESSED IN BT474, SIGNAL = 1.3; EXPRESSED IN FETAL LIVER, SIGNAL = 1.6; EXPRESSED IN HELA, SIGNAL = 1.3
tgcaaacacagcactcactgatctttatgttacctgtagcaggtaccatatctgatgaatcaagcacggagaaataatctcatagtctatttgtttttggttcaccatttcctttagaattataaaaaacgagttttctaccttatactgatgtgtttcacaaatctactaatattattatgtagtttaaaaattcaaatgctgtttatagtgaacattataaattttctacccaacattctcattctctgatcacagaagatgttgtttaggaggccatccttttttcgtataactatgaaactcaggaaagctgacagcaaccctgtctactgggttatgaatcaaaataggagaagcaatcacgataaacccacaatctatgctactactgattggttcaggaattcagaattaaaccagtaagtgtgtggcatttttctaaaaacttttattg

SEQ ID NO: 2746 - DNA, 493 bp, Homo sapiens
  MAP TO AC011309.1; EXPRESSED IN ADULT LIVER, SIGNAL = 2.7; EXPRESSED IN BT474, SIGNAL = 2.3e+02; EXPRESSED IN FETAL LIVER, SIGNAL = 2.8; EXPRESSED IN HELA, SIGNAL = 2.4; EXPRESSED IN HEART, SIGNAL = 3.3; EXPRESSED IN PLACENTA, SIGNAL = 3.2; EXPRESSED IN HBL100, SIGNAL = 3.2; EXPRESSED IN BRAIN, SIGNAL = 2.6; EXPRESSED IN BONE MARROW, SIGNAL = 2.7; EXPRESSED IN LUNG, SIGNAL = 1.3
gaccattttatgtcttcatgttgagaaataatttataaacatatcaaagaaatataataggcttaacccagtctaaactccaagtttttccagagtatgcaaaataaggtataattgaaaaaagtcttttgtaataagatgtgactttgatcaaaggaatgtcctaattttattctgaggttaaagtacagacttatacctacaaagttaggtgctttgggcataaatggattttgtggtagaggaacttcagtgtggggctctgctttgagaacaagtacaactattcctgacttctcagacccttatcgtcatcgtcatcatcatcatcatcatcatcatcatcatcatcatcatcccatatctcttggacttctcatcctcaggtcatagcactgatatggagggtgaatatcacaggctgaggaaagtgggccagctacaaatctggtccattcgtacagagcatcatgcctaatactcctggggtttg

SEQ ID NO: 2747 - DNA, 499 bp, Homo sapiens
  MAP TO AC011409.1; EXPRESSED IN LUNG, SIGNAL = 2.5; EXPRESSED IN BONE MARROW, SIGNAL = 2.9; EXPRESSED IN ADULT LIVER, SIGNAL = 3.6; EXPRESSED IN BT474, SIGNAL = 2.5; EXPRESSED IN FETAL LIVER, SIGNAL = 2.1; EXPRESSED IN HELA, SIGNAL =   4; EXPRESSED IN HBL100, SIGNAL = 1.9; EXPRESSED IN BRAIN, SIGNAL = 2.4; EXPRESSED IN PLACENTA, SIGNAL = 3.1; EXPRESSED IN HEART, SIGNAL = 1.8
gaatgccttttgaagattaaggttagaaaataaagtcagaagaagccaaatcaggacttgtaaggtggatacctaatgatttctcatcaaaactctcacaaaattgcccttgtttgatgagaggactgagcaggagcattgtcatttggagaaggactctggtgaagctttcccagagattttctgctaaagctttagctagctttctcaaagtacccttataataagcagatgttattattctttggccctccagaaagtcaacaagcaaaattccttgagcatctcaaaaactgttgccatgacctttgctcttaattggtctgcttttgctttgaatggaccacttccccctcttggtagccattgctttgattgtgctttgtcttcaggattttactggggaagccacattccatttccttttgcaattcatcaaagaaatgcttcagtgttttggtaccactgatttaaaatttccattgaaagccctgctatt

SEQ ID NO: 2748 - DNA, 457 bp, Homo sapiens
  MAP TO AC010724.1; EXPRESSED IN LUNG, SIGNAL = 0.97; EXPRESSED IN BRAIN, SIGNAL = 0.99; EXPRESSED IN BONE MARROW, SIGNAL =   1; EXPRESSED IN ADULT LIVER, SIGNAL = 1.2; EXPRESSED IN FETAL LIVER, SIGNAL = 0.88; EXPRESSED IN HEART, SIGNAL = 1.1; EXPRESSED IN PLACENTA, SIGNAL = 1.7; EXPRESSED IN HBL100, SIGNAL = 2.1
tatgggctctttgttgggagcactgggagacttggcctgccctacctgaggggaaccagccatcccctgaggggttgcctccatgcagccgctctcaatggccgcagactcctccagcctctgacccccaataagcatgagggctgtgctgaagagttttctgccaatgatgatgtggccctgggcttctctgggtcccactctctggctgccttgcctgcctggggcactcaggatgaaggaaccctggagtttacactcaccacacagagctggcaggcacccttggccttccaggcagcaggctggcatggggacttcatccatgtggacatatttgagggccacctgtggtccatggttgagaagggccagggtactgtattgctcctcaacagtgtgcctgtgactgacgcacagccccacaaggtcagcatccacatcaacattcaccagc

SEQ ID NO: 2749 - DNA, 461 bp, Homo sapiens
  MAP TO AC010966.1; EXPRESSED IN FETAL LIVER, SIGNAL = 2.3; EXPRESSED IN BT474, SIGNAL = 5.8; EXPRESSED IN HELA, SIGNAL = 5.3; EXPRESSED IN PLACENTA, SIGNAL =  14; EXPRESSED IN HBL100, SIGNAL = 5.5; EXPRESSED IN LUNG, SIGNAL = 3.1; EXPRESSED IN BRAIN, SIGNAL = 2.8; EXPRESSED IN BONE MARROW, SIGNAL = 4.7; EXPRESSED IN ADULT LIVER, SIGNAL = 3.4; EXPRESSED IN HEART, SIGNAL =   3
  unsure 36
  unsure 43
  unsure 106
gcggtctctgtcaattttgcagaattttccaagaangtgctcntgagaggtggaagacaatgtctgggaaagagaagtctaaatttgatgaaatggcaaaggtggnataaagtacactaccactgggaaatgaaggattatggaccagctaagggaggcaagaagaaggatcctaatgccccgaaaaagccaccgtctggattcttcctgctctgttcagaattccaccccaagatcaaattcataaaccctggcatctctattggagacatggcaaaaaagctgggtaagatgcggaataacttaaatgacagtgaaaagcagccttacaccactaaggcggcaaagctgaaggaaaagtatgagaaggatgtttctgactataagttgaaaggaaagtttgatggagaaaagggtcctgctaaagttgcccagaaaaaggtggaagaggaagatgaaga

SEQ ID NO: 2750 - DNA, 431 bp, Homo sapiens
  MAP TO AC011304.1; EXPRESSED IN BT474, SIGNAL = 1.1; EXPRESSED IN HELA, SIGNAL = 1.2; EXPRESSED IN PLACENTA, SIGNAL = 1.6; EXPRESSED IN HBL100, SIGNAL = 1.4; EXPRESSED IN HEART, SIGNAL = 1.8; EXPRESSED IN LUNG, SIGNAL = 3.8; EXPRESSED IN BRAIN, SIGNAL = 1.3; EXPRESSED IN BONE MARROW, SIGNAL = 1.8; EXPRESSED IN ADULT LIVER, SIGNAL =   2
tgtacatttgtatgaatgtgtcaatgtatattcaaataaatatcatgaaagtttacataatgacttctcagttatgccctctgggagagcaattaaaaatggtaagtgaataactttggctgttttattatatactcatgtattaattaaagttttcaataagcattggtcttttatcagcagcatgaaaacagactaatacaatgaattgttatgaggagtggggtgctgccgaaaagatacctgcaaatgtggaagcgactttgaaactgggtaacaggcagatactggaacagtttggaaagctcagaaaaagaaagaaaatatggaagagtttggaacttcctagagatttgttgaatggctttgacaaaaatactgatagtgatatgaacaatatgtccaggctgaggtggtctgagatggagagg

SEQ ID NO: 2751 - DNA, 470 bp, Homo sapiens
  MAP TO AC011382.1; EXPRESSED IN HEART, SIGNAL = 1.2; EXPRESSED IN PLACENTA, SIGNAL = 2.9; EXPRESSED IN LUNG, SIGNAL = 2.4; EXPRESSED IN ADULT LIVER, SIGNAL =   1
tatcgaattctgcgacaggggacaagctccatcctctctctgcgcctgagtttccctcttctgtaacatggggaaaacactatcttccttcgaaggctgtggtgagaatccactgggaagtggagtcccacactttgtaaactgtaaagggctattcctctgtggagggttatacttgcctctgctgagcatcaggccagaaagggggctcaccctggagtctgtagacatagtaggcatcagaatccacctccctgtccccaatggtggttttgcagatgtagcttctgtcctcaaagataccagaaaagccacgttggtgatcataggggacaggcagtgcaacgtcccctttcttctcgtgcagtgtcaccaccagctgtgggtctgttactcggcatggaatggtgatctcagttatttccgtgagaaagatgaatagttcctcggcatcattagggaggaagccc

SEQ ID NO: 2752 - DNA, 450 bp, Homo sapiens
  MAP TO AL118516.6; EXPRESSED IN BRAIN, SIGNAL = 1.3; EXPRESSED IN BT474, SIGNAL = 0.95; EXPRESSED IN HELA, SIGNAL = 0.96; EXPRESSED IN PLACENTA, SIGNAL = 0.96; EXPRESSED IN LUNG, SIGNAL = 3.5; EXPRESSED IN BONE MARROW, SIGNAL = 1.7; EXPRESSED IN ADULT LIVER, SIGNAL = 1.4; EXPRESSED IN FETAL LIVER, SIGNAL = 0.93; EXPRESSED IN HEART, SIGNAL = 1.1
aagttgtagatatcagttccccccgtaaacacttgagtatgcatgtcattaacttgatttagggttttcgtggaggtaatatttacaccatgaaatgtacaaacctgcagcacaaaaatcagtgggatgagttttaacaaatgcatgacctgtgcagcgcgatctccgatcaaactgtagaacatcagccttactgcagaacgttctccagggccctttggcagtgcacacactgtgtagccacgcccagcgggcagcttcgggagatgagttggggagggagggctttggcgccctgacaggtagggatgttccagagctgctgttgcgtgcccagggcatgccttgacagcatcacagttgaatggagcagtgtctgggtgacatcgatgagaagggagctgaaggaggtgctgcggcccatgttcatgaggagatggaaggagtgca

SEQ ID NO: 2753 - DNA, 479 bp, Homo sapiens
  MAP TO AL049822.17; EXPRESSED IN PLACENTA, SIGNAL = 1.5; EXPRESSED IN BONE MARROW, SIGNAL = 1.9; EXPRESSED IN LUNG, SIGNAL =   1; EXPRESSED IN BRAIN, SIGNAL = 2.3; EXPRESSED IN ADULT LIVER, SIGNAL = 1.4; EXPRESSED IN FETAL LIVER, SIGNAL = 1.6; EXPRESSED IN BT474, SIGNAL = 2.1; EXPRESSED IN HEART, SIGNAL = 1.3; EXPRESSED IN HELA, SIGNAL = 0.97; EXPRESSED IN HBL100, SIGNAL = 1.3
ctctaagggcttctgagggctttgcttgacttttctcctgtttctgctcctgagcccaaagcagctcttaaagaaagaaatgtcaggttttgaagcatgtttggtagatttggaaagggcaactcgcaacttgaaggggattgttggaatcaactggttctagagtgagctgatcttaagaggccaagaggaaaaaagaaaaaccgggaaagaaacagtgaaagaaaaacagaaagaggcaaaacagtgtaacaacaacaacaacaacaacaacaaaatggctgatcacctgcatgataaataagaagagtagaagcgtgttttccgttagcagagtggcgcagcggaagcgtgctgggcccataacccagaggtcgatggatctaaaccatcctctgctaaagaagggtgcttttttttttttttttccccccccccttcttgaggaattaccttccacagttgtggggagaagatgg

SEQ ID NO: 2754 - DNA, 451 bp, Homo sapiens
  MAP TO AP000180.1; EXPRESSED IN HBL100, SIGNAL = 2.7; EXPRESSED IN HELA, SIGNAL = 4.2; EXPRESSED IN HEART, SIGNAL =   5; EXPRESSED IN PLACENTA, SIGNAL =   5; EXPRESSED IN BRAIN, SIGNAL = 4.7; EXPRESSED IN BONE MARROW, SIGNAL =   4; EXPRESSED IN LUNG, SIGNAL = 3.1; EXPRESSED IN BT474, SIGNAL = 2.4; EXPRESSED IN FETAL LIVER, SIGNAL = 4.3; EXPRESSED IN ADULT LIVER, SIGNAL = 5.5
accaaaataatggcacccactcttacatcacaggagggatggctttacctgctctgtctttattcctgctgtcatgtctaagcaactctaagtagcatggggcccattttggctgaggttcccccagaggccaaaaaggtcactttgagtacatccttggatagctcctctggtagaatggaggacggtagactggacacgggtcacactgaggttccagtaacttcaggcctcttcatcagagtgttgaataagaagcagaactttagcctccaaataaggtgtagttttggccggggaccgggaaagctgagacactgctgggctggggccgccatagccctgggaacggagtatattctagtgaaaggagaccaggtgactggcatagtgacagctaaatctggagatatattcagagttgatgttggagggagtgagccagtttctt

SEQ ID NO: 2755 - DNA, 472 bp, Homo sapiens
  MAP TO AL109798.8; EXPRESSED IN ADULT LIVER, SIGNAL = 7.4; EXPRESSED IN PLACENTA, SIGNAL = 8.8; EXPRESSED IN BONE MARROW, SIGNAL = 8.6; EXPRESSED IN LUNG, SIGNAL = 6.1; EXPRESSED IN BRAIN, SIGNAL = 6.8; EXPRESSED IN FETAL LIVER, SIGNAL = 6.5; EXPRESSED IN BT474, SIGNAL =  13; EXPRESSED IN HEART, SIGNAL = 8.2; EXPRESSED IN HELA, SIGNAL = 7.1; EXPRESSED IN HBL100, SIGNAL =  10
gctgctacatattgttaccagattcactacaggaatagattaagtggattttatcccaaatatctatttcctattacagtactgcatctttctaatttggtggcagctatgacctcatacactgcctattttccgtgcttttcctaaccagaagagaccctatttttctcctttgcttgttaaagcgaaaataattatgcagctttccatagatttgtccccaatgtctttttaaaaaaattttttttctttattttctaaaagtagcattggaaatgttatctccttcaatttcatcacctcttcatcctccttggaaacccgatccatggtgggtattaagatctttacatttgtactggttgggcgatgacttcattgctttcaagccagctgggggatcttgtgtggcagagcatcggaccgaagcggaggtgtgggtcgttgctgctgctgctgctgctactgctgc

SEQ ID NO: 2756 - DNA, 448 bp, Homo sapiens
  MAP TO AL118496.4; EXPRESSED IN HELA, SIGNAL = 4.6; EXPRESSED IN HEART, SIGNAL = 6.7; EXPRESSED IN BRAIN, SIGNAL = 2.8; EXPRESSED IN BONE MARROW, SIGNAL =   3; EXPRESSED IN LUNG, SIGNAL = 3.4; EXPRESSED IN ADULT LIVER, SIGNAL =   5; EXPRESSED IN BT474, SIGNAL = 3.5; EXPRESSED IN FETAL LIVER, SIGNAL = 3.9; EXPRESSED IN PLACENTA, SIGNAL = 6.3; EXPRESSED IN HBL100, SIGNAL = 3.6
gaaaacccgagcacagagaggttaattaactagctcaaagtcacacagccactaagacgggaccccagtcctcagacaagcctacagtattgttagttgttggcgtcaattgtgctgagccgagggaggcagcaggcacaaggaacacgggaacagccaaagacagcgccatccccagcgcctatcctacccacgttgtttgtggagatgaacattcacactgtgggatctgagaggggagagggcggtaaggggaggagtatcccatgcggcagcagaacgtggtttatagccttcattccctcaaatatgtgtgtgagaagtatgggggcagctggttggtcctgagctctaatttcacccattggaacatgaaaaactggacctgtgaaaacgttgccctcatccctgaagaggtgagacgtactgccaaggtctctattgccat

SEQ ID NO: 2757 - DNA, 471 bp, Homo sapiens
  MAP TO AL049692.11; EXPRESSED IN HELA, SIGNAL = 1.2; EXPRESSED IN PLACENTA, SIGNAL = 0.94; EXPRESSED IN HBL100, SIGNAL = 1.2; EXPRESSED IN HEART, SIGNAL = 1.4; EXPRESSED IN BRAIN, SIGNAL = 1.5; EXPRESSED IN BONE MARROW, SIGNAL = 1.7; EXPRESSED IN LUNG, SIGNAL = 1.5; EXPRESSED IN BT474, SIGNAL = 1.4; EXPRESSED IN ADULT LIVER, SIGNAL = 1.3; EXPRESSED IN FETAL LIVER, SIGNAL =   2
gttagcagtccagacctccgcagtcccagggcctggatgtaatcccagcactgtcactttttgtctgtgattgtggacaaatcacttgatgtctctgagtctcagtttcctcatttataacatgaagaaaataatggtaacttctacttagtagttgtaaggattaggaggggtcatagctgtgaagtgtttagagcagtacctggcatagcataagaactaagaacatgctaactggctatggttatctttgttttggggggcaaaggaatgctttttttgctatgcccaggacaaacacagctcatgctcagggacagtttctggttcaatgctggactgtgctttgtttgtggccacttttctgatctcagccaggggaaagaggggacagagcactggacttgggtcagaagacctggttccaagtatcttcttctccaccaatgaggtgagcagacttgcgagaaa

SEQ ID NO: 2758 - DNA, 477 bp, Homo sapiens
  MAP TO AL049812.3; EXPRESSED IN LUNG, SIGNAL = 2.3; EXPRESSED IN ADULT LIVER, SIGNAL = 1.3; EXPRESSED IN BT474, SIGNAL = 1.6; EXPRESSED IN FETAL LIVER, SIGNAL = 1.1; EXPRESSED IN HELA, SIGNAL =   1; EXPRESSED IN PLACENTA, SIGNAL = 1.3; EXPRESSED IN HBL100, SIGNAL = 1.4; EXPRESSED IN HEART, SIGNAL = 1.7; EXPRESSED IN BONE MARROW, SIGNAL = 1.6; EXPRESSED IN BRAIN, SIGNAL = 1.7
aaagtttcttttcacatacactttggaaaataatcaaatcttatcttgtttgtctcttccaaagaaagctaccaccaaagaaacacaggggttacatcctacaggtcagcccaagccctgccccagggaggtggtccctttttacaaagacaaggaggagcagagaagttccctgcagttccaccccctcccactgaccacacaaaaaagcaaagaacacctttatcaaaaactgctgtggacacagctggccggccagtgaatgctggacggtcaaggcccaggctggggaaggggtacagaatggttgtgggcgaagccccatgcaggttaggtgtgaggatggggggcctctcttgtggcctagggaacatcgtaaggtcacactggtccagactgcaaatgtctggtgccagaggcccctgaaggaggttgcagggggcagcagagcagtgacccccaagagcctcaatcttt

SEQ ID NO: 2759 - DNA, 420 bp, Homo sapiens
  MAP TO AL121778.2; EXPRESSED IN BONE MARROW, SIGNAL =   2; EXPRESSED IN LUNG, SIGNAL = 2.4; EXPRESSED IN BRAIN, SIGNAL = 1.2; EXPRESSED IN ADULT LIVER, SIGNAL =   2; EXPRESSED IN BT474, SIGNAL = 1.9; EXPRESSED IN FETAL LIVER, SIGNAL =   1; EXPRESSED IN PLACENTA, SIGNAL = 1.6; EXPRESSED IN HELA, SIGNAL = 1.9; EXPRESSED IN HBL100, SIGNAL = 1.6; EXPRESSED IN HEART, SIGNAL = 1.4
tgcacatttcttgcttcctgtacttttgctaatgacttattatttgctgtttaatttatatttattttagactatataaattatgtcagacaaaaagcaaattcgagtgattttctcatttgagttgaaaatgggtcgtaaagcagcagagacaacttgcaacatcaacaacacatttagcccgggaactgctaagaaatatacagtgcagtggtggttcaagaagttttgcaaaggagacgagggctttgaagatgaggagcattgtggctggtcattggaagttgacaatgaccaactgagagcagtcatcaaagttgatcctcttataactacataagaagttgccgaagagctcaacgtcaaccattctatggtcatccagcatttgaagcaaattggaaaggtgaaaaagctcga

SEQ ID NO: 2760 - DNA, 359 bp, Homo sapiens
  MAP TO AL050332.15; EXPRESSED IN BT474, SIGNAL = 4.8; EXPRESSED IN FETAL LIVER, SIGNAL = 8.4; EXPRESSED IN ADULT LIVER, SIGNAL =  12; EXPRESSED IN HELA, SIGNAL = 7.9; EXPRESSED IN PLACENTA, SIGNAL = 9.8; EXPRESSED IN HBL100, SIGNAL = 4.9; EXPRESSED IN HEART, SIGNAL = 8.5; EXPRESSED IN BRAIN, SIGNAL = 7.1; EXPRESSED IN BONE MARROW, SIGNAL = 7.6; EXPRESSED IN LUNG, SIGNAL = 5.8
ccaccacccactctcaccgcgctctgcacgcagggaccaatcgtcgctgtcgccacagccgagggccaatcgcagcgttctccgccacccgaagccacaccccgcccgacaggcgccttgtcttttctgtttcgcaggcgcaggagaggtaggcggattaattccacttccggtgccacttatgcttctcacccctcccctcctctagcggcaatagtgctggacttccgctcggctccccgccgtcgctcgctacgtcagaaaatgcgtggacgtcgccgcacgaacgcaactggccaagcgaaactggtggcggccggaggagaaggggcggggacgctggaggaaagaaatgacgc

SEQ ID NO: 2761 - DNA, 968 bp, Homo sapiens
  MAP TO AF124523.1; EXPRESSED IN BONE MARROW, SIGNAL =  15; EXPRESSED IN HELA, SIGNAL =  19; EXPRESSED IN LUNG, SIGNAL =  15; EXPRESSED IN BRAIN, SIGNAL =  14; EXPRESSED IN BT474, SIGNAL =  38; EXPRESSED IN ADULT LIVER, SIGNAL = 7.6; EXPRESSED IN FETAL LIVER, SIGNAL =  17; EXPRESSED IN PLACENTA, SIGNAL =  17; EXPRESSED IN HEART, SIGNAL = 9.6; EXPRESSED IN HBL100, SIGNAL =  27
aagatgttgaggaaaataaaacaggtagtctctgaagtttttccacaggaacagcacgctaagtgcttctttctggagttattttgtgacactgaatcgccaaagaaaagcttcctatagagttaacagagacttctcttgggctgaaggctgcttgtggttccacatgcagtttctgtgagaatggattcttgtgtcagccatgggtcacaactttctgtgcactttctggtgctggattaggtggccatgctggttgaaggcacgcccacactccccgcactcatagggcttctcgcctgtgtggatccgctggtgctggatgagcactgagtactggctgaaggccttcccgcagctattgcactcatatggcttctcgcccgtgtgggtcctcaggtgcacaatcagagttgctttcaggctgaaggctttgccacattctgtgcactggaagggcttttcacctgtgtggattctctcatgctggatcagagaccggcgtgcactgaaggcgtgcccacattcaccacacacatagggcttctccccagtgtggactctctggtgctggatcaggtgtgagtgctgaacgaaggccttcccacattcgtagcatgcatagggcttttcctcggtgtggatccgctcgtgattcatcagtgtggagcggtggctgaaggtcttcccacactcactgcactcatagggcttctccccggtgtgcacgttgtggtgctgaatgaggactgagcggtcgctgaaggccttcccacactcgctgcacgtgtagggcttctccccggtgtggatcctctggtgctgcagcagtgtcctcttcacactgaaggttttcccacactcattgcacctgtgaggcttctccccagtgtgtaccctctggtggctccgcagaacagtgctatggttgaaggctttcccacacaacggacacacatatggccttt

SEQ ID NO: 2762 - DNA, 475 bp, Homo sapiens
  MAP TO Z83844.5; EXPRESSED IN BONE MARROW, SIGNAL = 7.6; EXPRESSED IN LUNG, SIGNAL = 7.8; EXPRESSED IN BRAIN, SIGNAL = 4.2; EXPRESSED IN ADULT LIVER, SIGNAL =   4; EXPRESSED IN BT474, SIGNAL =   2; EXPRESSED IN FETAL LIVER, SIGNAL = 4.1; EXPRESSED IN HELA, SIGNAL = 4.1; EXPRESSED IN PLACENTA, SIGNAL = 3.3; EXPRESSED IN HBL100, SIGNAL = 4.2; EXPRESSED IN HEART, SIGNAL = 3.1
ctcgctatttgcagcacgaccccttccccttcttcccagagccccgcgcccctgagagtgaaccgccccaccacgagcctccctatataccacctgctgtgtgcattggacaccgagatgccccccgggcgtcctcgcccccccgccacacccaatttgaccccttccccttcctcccagacacatcagatgccgagcatcagtgtcagtccccccaacacgagccccttcagctccctgcacctgtgtgtattgggtaccgagatgcaccccgggcctcctccccaccacgccaggccccagagccttccctcttattccaggacctccccagggccagcacagagagccttgtcccttccatggactctctgcacgagtgcccccacatccccacccctgtgtgcattgggcaccgggatgcaccctccttctcatccccaccacgccaggctcctgagccatccctcttctt

SEQ ID NO: 2763 - DNA, 960 bp, Homo sapiens
  MAP TO AC007688.15; EXPRESSED IN PLACENTA, SIGNAL =  15; EXPRESSED IN HELA, SIGNAL =  13; EXPRESSED IN HBL100, SIGNAL =  12; EXPRESSED IN HEART, SIGNAL =  11; EXPRESSED IN LUNG, SIGNAL =  12; EXPRESSED IN BONE MARROW, SIGNAL =  14; EXPRESSED IN BRAIN, SIGNAL = 7.6; EXPRESSED IN ADULT LIVER, SIGNAL =   9; EXPRESSED IN BT474, SIGNAL =  15; EXPRESSED IN FETAL LIVER, SIGNAL = 9.4
ctcaaatcagcctccctgagcatttggggagcagaatttttaaggataatttggcagatgaggggaagccagtgagccaggagtgctgattggttagagatgaaatcgtaggaagtcggagccgtcttctttcagagtcagttctgggtgggggccacaagatcagatgagccagtttattgatctgggtggtgccagctgatccatcaagtgcagggtctgcagaatatctcaaccactgatcttttttttttttttttttttttgaggaattaacagtctttattgggctcagaccaggagtccgtgggtcttgaggacttctgtgtatttgtcaattttcttctccacgttcttctcggcctgtttccatagcctcatgaactgtttcttcttccggtagtggatcttggctttctctttcctcttctcctccagggtggctgtcactgcctggtacttccagccaacctcgtgagccaggcgccccagataggcaaactttcttgcaggcttcagacgcacaaccttgagggcagcaggaaccaccatccgctttttcttgtcgtagggcggtgggatgccgtcaaacaccttgaggcagtccagagcggcctggcctggcttggtcttgtggggcggcatacctcgcatggtctgccagaagatgcggctgggggcctggagggggtaggggcctcgggaagggttgctgttcatccgcttgcggaggaaagccaggtacttcaacttgtttctgtagaaattgccagaaatgttgatgccttcacagcatacaaccaccaccttccggcccagcagtacctgtttagccacgatggccgccaggtggcccaggagatggcctcgaccatcaagcaccaggacctgtacctccgccatcttcggcagccgcttgggaaagaagcactgatcttaggagcagtttaggggagggtt

SEQ ID NO: 2764 - DNA, 447 bp, Homo sapiens
  MAP TO Z98744.1; EXPRESSED IN BONE MARROW, SIGNAL =   5; EXPRESSED IN FETAL LIVER, SIGNAL = 2.7; EXPRESSED IN HELA, SIGNAL = 2.1; EXPRESSED IN BRAIN, SIGNAL = 1.7; EXPRESSED IN LUNG, SIGNAL = 2.8; EXPRESSED IN BT474, SIGNAL = 8.8; EXPRESSED IN ADULT LIVER, SIGNAL = 0.93; EXPRESSED IN PLACENTA, SIGNAL = 1.8; EXPRESSED IN HEART, SIGNAL = 1.1; EXPRESSED IN HBL100, SIGNAL = 6.3
gatttgctgactttcctcggagaaagtgagacccttgtgagatgggtcacagaggacaagtgaaaaggaccgtcttagaagacaaaggacactgcaaggaatcagaatgaacaacccttgacgactttccgccagtttatccctgctttaaagttgatttaagacagtcgaccaatggtgtgacagctatcctcagtgagaatgtaagtggctctgaaaagagcctttggaagcttggaagcaattaagaaacccaagatagagcaggggattatgctcgctcgccacggatacgacgcgcaagctggatgtccttaggcataatagtgacacgcttggcgtgaatagcacagaggttggtgtcttcaaagagacccaccagataggcctcgcacgcctcttgcagcgccatcaccgccgagctctggaaacgaaggtcggttttga

SEQ ID NO: 2765 - DNA, 1988 bp, Homo sapiens
  MAP TO AB023048.1; EXPRESSED IN PLACENTA, SIGNAL =   1; EXPRESSED IN HBL100, SIGNAL = 1.4; EXPRESSED IN HEART, SIGNAL = 1.1; EXPRESSED IN FETAL LIVER, SIGNAL = 1.5; EXPRESSED IN ADULT LIVER, SIGNAL = 1.5; EXPRESSED IN HELA, SIGNAL = 1.1; EXPRESSED IN BRAIN, SIGNAL =   2; EXPRESSED IN LUNG, SIGNAL = 4.7; EXPRESSED IN BONE MARROW, SIGNAL = 2.1; EXPRESSED IN BT474, SIGNAL = 1.4
gccttcagtagaggtggtggtggcctcagagcctgcagcagaggatgtggtggcctcagagcctatggtagagactgtggtggtctcagagactgtggtaaagactgtagtcatctcagagcctgtggtagaggctgtggtggtctcagagctagtggtagaaactgtagtggcctcagagccttcagtagaggcggtggtagtcttagagcctgtgatatagactgttgtggtctcagagcctgcggtagaggctgtggtggtcccagagcctgaggtggagactgtggtggtctccaaatctgcggtagaggctgtggtggtctcagagcccgtggtagagactgtggttgtctcagagccttcagtagaggtggtggtagtctcagagcctgtggtatagactgctgtggtctcagaacctgcagtagtgactgtagtggtctctgaaccttcagtagaggtgatggtagtctcagtgcctgtggtagagactgtggtggtctcagagcctgtggaggagactgtagtggtctcagagccttcaatagaggctgtggtggtctcagagcctgcagtagagactgtggtggtctctgagcctgcagtagaggccgtggtggtctcagagcccatagtagtgactgtagtggtctcagagccttcagcagagactgtgatggtctcagagcctgtggtagaaactgtagtgagctcagagccttcagtagaggctgtggtggtctcagagccttcagtagaggctgtggtggtctcagagcctgtggtagaaactgtagtgatctcagagccttcagtagaggctgtggtggtctcagagccttcagtagaggtggtggtagtctcagagccttcagtagaggctgtggtggtctcagagcctatggtagtggctgtagtggtctcagagctttcagtagaggctgtggtggtctcagagccttcagtagaggctgtagtggtctcagagccttcagtagaggtggtggtggtggtctcagagcctgctgtagaggctgggatggtctcagagcctgcagtggagactgtggtggtctcagaggctgtggtagaggctatggtggtctcagagttttcagtgaagactgtggtcattttagagcttgcagtggagaccttggtggtctcagagcctatggtagaggccatagtggtctcagagcccatgatggatgccatggtggtctcagagcttgtagtagaggctgtggtggtctcagagcctgtagtagaggctgaggtggtctcggagccttcagtagaggctgtggtggtctcggagccttcagtagaggctgtggtggtctcagagcctgtgatggaggctgtagtaatctcagagccttcagtagaagtggtggtggtctctgaacctgtggtagaaactttagtggtctcagagcctgtgatggagactgtagtggtcccagagccttcagtagagactgtggtctcagagcctgtggcagatactgtagtggtctcagagccttcagtagaggtgatggtcctctcagagcctgtggtagagaccatggtggtctcagagtctgtggtggagactgtagtggtctcagagccttcagtagaggctgtggtggtctcagagcttgtagtagaggctgtggtggtctcagagcctgtagtagaggctgaggtggtctcagaatctgcagtagatgctgtggtgttctcagaatctgcagtagagactgtggtggtctcagagcctgcagtggaggctgcagtggtcccagagccttcagtagagtctgtggtggtctcagcacctgtggtggagactgtagtcatctcagagccttcagtggaagtggtggtggtctccaagcctgtggtggaaactgtagtggtctcagagcctgtggtggagactgtagtgttctcagagccttcagtagagactgtggtcatctcagagcctgtgg

SEQ ID NO: 2766 - DNA, 948 bp, Homo sapiens
  MAP TO AC011301.1; EXPRESSED IN BONE MARROW, SIGNAL = 2.8; EXPRESSED IN FETAL LIVER, SIGNAL = 1.7; EXPRESSED IN HELA, SIGNAL = 2.8; EXPRESSED IN BRAIN, SIGNAL = 5.4; EXPRESSED IN LUNG, SIGNAL = 3.4; EXPRESSED IN BT474, SIGNAL = 2.1; EXPRESSED IN ADULT LIVER, SIGNAL = 2.1; EXPRESSED IN PLACENTA, SIGNAL = 2.1; EXPRESSED IN HEART, SIGNAL =   2; EXPRESSED IN HBL100, SIGNAL = 2.7
aaggaatgcatttcccactgaaatatcctactattcatctgctctagtaatatgatgttaagctgctttatgtatttctcagacaaatattttatttgcttgtcagaaacgtaatcacaaaatatccttctggaatcaactctaagaatgtgcagtagagacataattcagtgtgagtcacactttaactgtagactaccaccaacatcctttaccctagctcatgttttcatgaggcaacttacgttaggtagaaatattacctttaccatagtatggctttttgacatggctgtcactggatttaggctttctgtcctccccgggaagttgtctcggagactggtcctcatatgacctcatattgtccctcctcccagcttccatggccatcttctccctcatggcctttgctctttccgtttccaaagcgatggctttctccagcagggtcaggttccccttggtcatgtcgaacacctcttcagacctgtccgagttcacagaggtggtatcgtcgtcccgctcatgacacccatcctccttcgcacagctggcaaacactctcgaccgggggctcaactgctcctccagccgcatgaggttcagcatgtccgagtagtttctgtccggcgtccttccggggaagtcctcttctggccggacatgctgacggatgttcatgttctgctgcggattcctctcctgcgggttggtctcactgagcttcctggccaggtcgaagcactgattcctcaaacactccagactgctcagacacacctcctcatcgctctcctccaccatcttttccatgagtccgttgttcatgggcttccccaacatgacgtaattcatatttctactgtcttgctgcgacatgctgtctgcataatttctgtcattcatgttttctgagagcacaacaccgtgtccttgggctaatag

SEQ ID NO: 2767 - DNA, 968 bp, Homo sapiens
  MAP TO AC011309.1; EXPRESSED IN PLACENTA, SIGNAL =  72; EXPRESSED IN HBL100, SIGNAL =  59; EXPRESSED IN HEART, SIGNAL = 2.9; EXPRESSED IN FETAL LIVER, SIGNAL = 7.7; EXPRESSED IN ADULT LIVER, SIGNAL = 8.8; EXPRESSED IN HELA, SIGNAL =  44; EXPRESSED IN BRAIN, SIGNAL = 5.5; EXPRESSED IN LUNG, SIGNAL =  16; EXPRESSED IN BONE MARROW, SIGNAL = 3.5; EXPRESSED IN BT474, SIGNAL = 1.5e+02
tgtacgccccaggtcatcccagcgcttcccagccagcatctgcagctcctcatacttcatctggtccgtgctctcagcctcagtcaggctgcggttggcgatcaccttgtactgagccttgacctcagcgatgatgctgtccatgtccagggagcagctgttgtccatggacagcaccacagacgtgtccgagatctaggactgcagctcctggatctcttcttcatacagctgcctgaggaagctgatctcttcagtcagcgcttccaggcgagactccagctctaccttgttcatgtaagcttcacccacatctgaggagaaattcattctccatctctgtacgcttattgatttcatcctcatactttttcttgaagttctccgccagcctctgcatgttgccaagctctgcctccagcttcggcttctcctggctcagagtctccagccgctgcataaagttgttgatgtagctctcgaacatgtccacgttgctccaagccatcttctgctgctgcaggaggctccccttggtctccagcatcttgttctgctgctccaggaaacgtatcttgtcaatgaaggagggaaacttcttgttgagggtcttgatctgctccttctcctgggtgcgcatggcctggatgttggggtccacctccaggttcagggggctcagcaggttctggttgaccatgacggcagtgatgcctcccatgctgctggccccaccatagcctctgcccaggccagcccggaagctggtgctgcccactcgggagaagcttaaggagctgaggtgggcaccaggcccactcatgtgagagcagctgctgaaggcccggaggccagaggtggacaccttgtaggacttctgggtcaccctgatggacatggtggaggcagacaggctgaacaaggcagagattccaggagtggagaagctgcttcttggtctgaaattt

SEQ ID NO: 2768 - DNA, 469 bp, Homo sapiens
  MAP TO Z82188.2; EXPRESSED IN PLACENTA, SIGNAL = 2.1; EXPRESSED IN BONE MARROW, SIGNAL = 4.6; EXPRESSED IN FETAL LIVER, SIGNAL = 3.2; EXPRESSED IN HBL100, SIGNAL = 1.8; EXPRESSED IN HELA, SIGNAL = 1.6; EXPRESSED IN HEART, SIGNAL = 1.7; EXPRESSED IN BRAIN, SIGNAL = 3.2; EXPRESSED IN LUNG, SIGNAL = 1.6; EXPRESSED IN BT474, SIGNAL = 2.2; EXPRESSED IN ADULT LIVER, SIGNAL = 2.2
tagatctaatgcagcgccacctcctccaggaagccttcccagaacacccaagtttgacttgccacttgtcctccaagcaaccacagcacccccactcaatctctgcttctgtctgctcaaagcacacctccttattttcagtatctattaatagatactactcatactactaggacgactactactaacacagagtgcttctcacacacaggtgctgccctggcagctccacctggaataagttactgaattcccccaaccaccccaggaggcaggagctatcactatcccatgcttttctgataaggaaacacaggcagagagaggctacgtgactcgcccaaggtcacacagcaagtgcacagcacagctgagttcaaactgcacagcctggccctgcagcccgtgtttacaatcacaccacgaggccaagtcagggcctcccctgcagccagatcgcccctctgag

SEQ ID NO: 2769 - DNA, 963 bp, Homo sapiens
  MAP TO AC009497.2; EXPRESSED IN PLACENTA, SIGNAL = 2.4; EXPRESSED IN FETAL LIVER, SIGNAL = 1.6; EXPRESSED IN ADULT LIVER, SIGNAL = 1.3; EXPRESSED IN HEART, SIGNAL = 1.1; EXPRESSED IN HELA, SIGNAL = 3.1; EXPRESSED IN HBL100, SIGNAL = 2.2; EXPRESSED IN BRAIN, SIGNAL = 1.6; EXPRESSED IN LUNG, SIGNAL = 3.5; EXPRESSED IN BONE MARROW, SIGNAL =   2; EXPRESSED IN BT474, SIGNAL = 3.9
gagaggaaatttgtgatatggattctagtgaagcaatgtctcttgaaagccaggagtcacctaatgaaaattttaaaactgttggcccgtgtttaggagactcgaaaaatgtttcacaggaatctttggagacaaaagaagaaaaaccagaagaaaccccaaaaatggaactgagtctagagaatgttactgttgaaggaaatgcatgtaaagtaacagaatccaatctagagaaagcaaaaactatggaattgaatgtaggaaatgaagctagctttcatggacaagagagaaccaaaactggtatttctgaagaagcagcaatagaagaaaataaaagaaatgatgactctgaagcagacacagctaaactgaatgccaaagaagtagcaactgaggaatttaattcagatattagtctttctgataatactacacctgtaaaattgaatgctcaaactgagatttctgaacaaacagcagctggggaactagatggaggaaatgatgtatctgatctacactcatctgaagaaacgaataccaaaatgaaaaataatgaagaaatgatgatcggcgaggcaatggctgaaactggccatgatggtgaaacagagaatgagggcataactaccaaaacctcaaagcctgatgaagctgaaacaaacatgttgactgcagaaatggacaactttgtttgtgacacagttgaaatgagcactgaagaaggaatcattgacgctaataaaactgaaacaaatactgagtatagtaaatctgaagaaaaattagataacaatcaaatggtaatggaaagtgatattttacaggaagatcaccatacttcacagaaagtggaggaaccatcacagtgtctggcatctggaacagctatctctgagctaataatagaagacaataatgcatctcctcaaaaactaagggaacttgatccttcacttg

SEQ ID NO: 2770 - DNA, 953 bp, Homo sapiens
  MAP TO AP000508.1; EXPRESSED IN BONE MARROW, SIGNAL =  35; EXPRESSED IN BT474, SIGNAL = 1.3e+02; EXPRESSED IN HBL100, SIGNAL =  68; EXPRESSED IN LUNG, SIGNAL =  66; EXPRESSED IN BRAIN, SIGNAL =  20; EXPRESSED IN ADULT LIVER, SIGNAL =  22; EXPRESSED IN FETAL LIVER, SIGNAL =  34; EXPRESSED IN PLACENTA, SIGNAL =  64; EXPRESSED IN HEART, SIGNAL =  10; EXPRESSED IN HELA, SIGNAL =  94
gagcacccacttcttggttcccaccacacagcctttcagcatgacaaagtcattggtcacttcaccatagtggacgaagccacccaaagggttgatgctcttgtcagacaggtcatagtcagtggaggcattgttcttgatcagcttgccatccttgataaggtagccctagccaatcctatagatcttcttgttgatctcagtgcggtgatggtagcctttctgcccaccacgtaccacagagaagcccacacgagcaggatgccatgccccaatacaggccaccttgcacaggccttggtgggtcttgcggggcagcttcttggtgtgccaacgactggtgacccttttgtagcctttgcccttggtcaccctgatgacgtcgatcatctcatcctgcccaaacacttggttcacaggtacctggtgcttgagcctctcgccagcccagtccagcttctcagccacagtgcctccattcacctggatctccatcaggtgggccttcttctggcacagaggaagcagttgcatctgggtgtgggcaatgacgcagatgacttggcagtacttcttcatgctgctgaagtccttctccagctgcttcttgccatcctcatcctgccatttcttgcagtacttggtaaaggccttcttcttagatttatgccagttcttatagaaacgtctcttgcattcatcactgatgtgctcagcgaagacagtcttgcaagtccggaagccttgaggggtttccacgcagcccacaatgcccactggtggcctctccacaatggtcacagcctccaccacctccttcttgttcaccttggatcctggcctgtcgacttcccgcacgatgtgggtcatgccagccttgtatcccaggaaggctgtgaggtggaccggcttggacgggtcatccttagggaagctcttcaccttcccacaat

SEQ ID NO: 2771 - DNA, 484 bp, Homo sapiens
  MAP TO Z99716.4; EXPRESSED IN BT474, SIGNAL = 2.8; EXPRESSED IN PLACENTA, SIGNAL = 1.1; EXPRESSED IN BONE MARROW, SIGNAL = 1.2; EXPRESSED IN FETAL LIVER, SIGNAL = 1.2; EXPRESSED IN ADULT LIVER, SIGNAL = 0.95; EXPRESSED IN HEART, SIGNAL = 0.96; EXPRESSED IN HELA, SIGNAL = 2.8; EXPRESSED IN HBL100, SIGNAL =   2; EXPRESSED IN BRAIN, SIGNAL = 2.4; EXPRESSED IN LUNG, SIGNAL = 1.5
ggctaagccctttacactcattatctcatttagccctgctgcaagcctgtgattcacgcgctttcattatctctgtgctaatgaggaggaaagtgaggttctgaggtatggaataacttctcccgagtggcacagctaatcattgggaggaccagcatctgaacttggtttctcctctcacagagccatgctgtcatcccaagtgctagggctctgctcttttcacactgtagcctgcactggtctcactgtgttttcactcatcttcctacccagatgcacaagtctggcgttctgaggaaggccattgattacatcaaatacttgcagcaggtcaatcataaactgcgccaggagaacatggtgctgaagctggcaaatcaaaagaacagtaagtgtgctgagaaaaggcttgtcagccctggcccaggtggggctttgtaaaagcagatcattttcaccaggtggggttttctttgcagag

SEQ ID NO: 2772 - DNA, 962 bp, Homo sapiens
  MAP TO AC008125.9; EXPRESSED IN BT474, SIGNAL = 2.6; EXPRESSED IN BONE MARROW, SIGNAL = 6.5; EXPRESSED IN LUNG, SIGNAL = 2.9; EXPRESSED IN BRAIN, SIGNAL = 6.5; EXPRESSED IN ADULT LIVER, SIGNAL = 5.8; EXPRESSED IN FETAL LIVER, SIGNAL = 1.8; EXPRESSED IN PLACENTA, SIGNAL =   5; EXPRESSED IN HEART, SIGNAL = 1.1; EXPRESSED IN HELA, SIGNAL = 3.8; EXPRESSED IN HBL100, SIGNAL =   3
ttccaataaaaccaaaccaaggaatatttaagaacttaggccactttgggggtatatgccttgttcatccctttactacactgcaccattctattagaaatagcctccctgaatacctgtacccaacatggccatagttgattagatcataattagccgtttctaatgccaatcagagtgcctttcgaaggaatttgggatgggcattgcaggaggaagtcaatgtttccataaagttggaaatatgccatgtggtaaatggaagtacgggggagtattccccaatatttccaagcccacatgagcaaggaatgtgaaatgatgatgatggggatggtggtaataatgatagtgatgatcgtggtagtagtggtggtagtagcgatgatgagggtgatgctgatggtgatggtgatgggtgataatggtgatgatagtgatgatgatggatatggtggtgatgatgctgatggtgatgatgatggttatggtggtgatgatgctgatggtgatgatggtggtgatagtgatggtgaggatgctgatcgtgatgatgatggttatggtggtgatgatgatggttatggtggtaatgatgctgatagtaatgatgatggttatggcagtgacgatgctgatggtaatgatgatggttatggcagtgacgatgctgatggtgatgacgatggtggtagtgatggtgatgatgctgatggtgatgatggtggtgatggtaatgatgattatataatgatgattgtggtgatggtgatgatgatgtttattatagtcatgatggtggtaatggtagtggtggtgatgatgatgatgatggtagtgatgataatgataatggtgatgagagtgaggatagccaagatatattgagcacttactccctgtcagccacttgaggggtttatatacattattctttaaagccctatgaggtaagacagcca

SEQ ID NO: 2773 - DNA, 447 bp, Homo sapiens
  MAP TO AC006160.9; EXPRESSED IN BT474, SIGNAL = 1.1; EXPRESSED IN HELA, SIGNAL = 1.2; EXPRESSED IN BRAIN, SIGNAL = 1.3; EXPRESSED IN PLACENTA, SIGNAL = 0.6; EXPRESSED IN HBL100, SIGNAL = 1.1; EXPRESSED IN FETAL LIVER, SIGNAL = 2.1; EXPRESSED IN LUNG, SIGNAL = 5.8e+02; EXPRESSED IN ADULT LIVER, SIGNAL =   1; EXPRESSED IN HEART, SIGNAL = 0.82
atgggctgaagtatctgatctcatgataatagacacaccattgcaaaaagcccttttccagtggtggagacttttactaacatcaaatatatagtcttgtaaaattgattgcaccttgtgctacatgctgtaaaaacagtgtataaacgttgtaaaagttgtatgaaagggaaatggtgattccttgctcctcacccctccccagtggttttacaaggtcctttttctttttatagaccaagaaagaggcaagtgctgagacagaatatatgaagcaacaatatgaagaagaccttcgtaaaatcaaacatcagacagaagaggagaagaaacatctcaaagaccagctagtgaagcgactagaagacttggtaaagaagcacaccgtggaaatcaaatccgttcgctcgtccgtggaggctgaaagaaagaaactgcagagggtga

SEQ ID NO: 2774 - DNA, 480 bp, Homo sapiens
  MAP TO AC008133.1; EXPRESSED IN HEART, SIGNAL = 1.1; EXPRESSED IN ADULT LIVER, SIGNAL = 1.5; EXPRESSED IN BRAIN, SIGNAL = 1.4; EXPRESSED IN PLACENTA, SIGNAL = 1.1; EXPRESSED IN BONE MARROW, SIGNAL = 1.3; EXPRESSED IN HBL100, SIGNAL = 2.1; EXPRESSED IN FETAL LIVER, SIGNAL = 1.5; EXPRESSED IN HELA, SIGNAL = 2.6; EXPRESSED IN BT474, SIGNAL = 2.2; EXPRESSED IN LUNG, SIGNAL = 1.7
  unsure 46
  unsure 258
agctcttcattcccatttattgttattttattgttttttttttccntgtgtaggactagagagaaaaaaaggattcacaaataagaaaaataccctactttttttttccaaccagaatgtgtagtattgcggcgcttgtggcagattgaaatgacttaatgtagttcccacatttacagcgatgaacctctctactattaaagaggcaacatttctcagtttgtaaaagctttctcattcattcatcaagtccagcgnctgctgcctcccctgtctgtgcaatccgctcactcctctccctccttgcttctcccccctccactcagaccttcccatctcttccccgggaggctccacttggctcctgaccaatctcggcgctctcttcttgcttttccagtgtattctccaccttgcggccaagatcaacctttctaaaatataaatctgaatttgccatgcctctgtttgacatccctc

SEQ ID NO: 2775 - DNA, 442 bp, Homo sapiens
  MAP TO AL035403.10; EXPRESSED IN BT474, SIGNAL = 3.6; EXPRESSED IN BONE MARROW, SIGNAL = 7.1; EXPRESSED IN FETAL LIVER, SIGNAL = 7.9; EXPRESSED IN HELA, SIGNAL = 2.6; EXPRESSED IN ADULT LIVER, SIGNAL = 2.7; EXPRESSED IN BRAIN, SIGNAL = 4.2; EXPRESSED IN HBL100, SIGNAL = 2.8; EXPRESSED IN LUNG, SIGNAL =  11; EXPRESSED IN PLACENTA, SIGNAL = 5.3; EXPRESSED IN HEART, SIGNAL = 4.6
tctccccctcaactgagaactcaagtcagctggacttcgaagatgtatggaattcttcctatggtgtgaatgattccttcccagatggagactatggtgccaacctggaagcagctgccccctgccactcctgtaacctgctggatgactctgcactgcccttcttcatcctcaccagtgtcctgggtatcctagctagcagcactgtcctcttcatgcttttcagacctctcttccgctggcagctctgccctggctggcctgtcctggcacagctggctgtgggcagtgccctcttcagcattgtggtgcccgtcttggccccagggctaggtagcactcgcagctctgccctgtgtagcctgggctactgtgtctggtatggctcagcctttgcccaggctttgctgctagggtgccatgcctccctgggccacagact

SEQ ID NO: 2776 - DNA, 471 bp, Homo sapiens
  MAP TO AL078622.6; EXPRESSED IN BONE MARROW, SIGNAL = 4.9; EXPRESSED IN HBL100, SIGNAL = 3.9; EXPRESSED IN ADULT LIVER, SIGNAL =   3; EXPRESSED IN BRAIN, SIGNAL = 3.8; EXPRESSED IN PLACENTA, SIGNAL = 2.7; EXPRESSED IN BT474, SIGNAL = 3.5; EXPRESSED IN FETAL LIVER, SIGNAL = 3.5; EXPRESSED IN LUNG, SIGNAL = 3.7; EXPRESSED IN HELA, SIGNAL = 3.9; EXPRESSED IN HEART, SIGNAL = 4.6
acaattgatgtacaataaactgctgtatttaaattatatagtttgaggaattttgacatatgcataaacctgtgtgcccgtcaccaccatcaagaagtcaacatccaccaggcactgtggctcatgcgtgtaatcccagaactttgggaggccaaggcaggaggatcacttgtgctcaggagttccaggctacactgagccgtaatagcaccactgcactttgacctggatagcagagtgagaccctgtctcgaagaagaagagaaaaagaagaagaagaagaagaagaagaagaagaagaagaagaagaagaagaagaagaagaagaagaagaagaagaagaggaagaagaagaagaagaaggaggaggaggaggaggaggaggaggaggaggaggagaagggaataagatgagaggaagaaggaagaagaacaagaggaagaagaagaaggaggaaaaggaggaagagg

SEQ ID NO: 2777 - DNA, 442 bp, Homo sapiens
  MAP TO AP000132.1; EXPRESSED IN HBL100, SIGNAL = 2.4; EXPRESSED IN BRAIN, SIGNAL = 1.9; EXPRESSED IN BT474, SIGNAL = 1.9; EXPRESSED IN BONE MARROW, SIGNAL =   1; EXPRESSED IN FETAL LIVER, SIGNAL = 1.8; EXPRESSED IN LUNG, SIGNAL = 1.4; EXPRESSED IN HELA, SIGNAL = 1.5; EXPRESSED IN ADULT LIVER, SIGNAL = 2.2; EXPRESSED IN PLACENTA, SIGNAL = 1.8; EXPRESSED IN HEART, SIGNAL = 1.5
aacaaatatgccttgagcacctaacatatggcaggtactgtgcaaagcactaagatacaagagacagcagaaaagaacagggaagaaacagaaagagaggcaggagggtgtctggaatttttttctttcaggggagtactagagatgagagaagagtaataagcccattcagagagatgctgagttaaagagaaagctgatgagcagaagaaactagagaaaactaattcaagaaatgatcaaatctagccatgcgtctacataaatatacttccttttcccccatcgtttaaatcaaaatccctcttacctggtcgttccctcttcctctccccactcctcccatatcctcaaagctgccatcacctacaacagctccctctggaagcagcagcatcctctcttctcactcaagcacagccccaaccaaggtcaccagaag

SEQ ID NO: 2778 - DNA, 479 bp, Homo sapiens
  MAP TO AP000252.1; EXPRESSED IN HBL100, SIGNAL = 3.4; EXPRESSED IN LUNG, SIGNAL = 2.6; EXPRESSED IN HELA, SIGNAL = 3.1; EXPRESSED IN BT474, SIGNAL = 2.8; EXPRESSED IN BONE MARROW, SIGNAL = 0.75; EXPRESSED IN PLACENTA, SIGNAL = 1.6; EXPRESSED IN HEART, SIGNAL = 1.9; EXPRESSED IN BRAIN, SIGNAL = 4.3; EXPRESSED IN ADULT LIVER, SIGNAL = 1.8; EXPRESSED IN FETAL LIVER, SIGNAL = 1.7
tccagaatgttccaccaatgtgcgcaaacacaatgtgcttgctggggctcgagggtcaagagcggcttgcaagtcctaaactttaattttcccatcataggcccggctgaccatcctcttgttatcaaactggatgcatcggaccaattcttcatgtccctctaggactcttaaacaggagccacattcaatatccaagagcctaatggtatgatctgatgatccactaacaaccagcccatccctgtactggagacaagactcgcttgtgcccattgagagtacgagcaaattcacaggtgctcatgctccagactttgatggtcctgtcaccagaggcagacacgatgtatttctcgtcaaagtctactacgttgacagcagctcagtggacaaccaggacaccacgtaaagtgatatcggtcgcagaagccatgtcccacacagcaatggagcggtccttggaacaggtcaccatc

SEQ ID NO: 2779 - DNA, 397 bp, Homo sapiens; identical to SEQ ID NO: 376
  MAP TO AP000087.1; EXPRESSED IN BT474, SIGNAL = 2.3; EXPRESSED IN FETAL LIVER, SIGNAL = 3.2; EXPRESSED IN LUNG, SIGNAL =   1; EXPRESSED IN HELA, SIGNAL = 2.8; EXPRESSED IN HEART, SIGNAL = 7.1; EXPRESSED IN PLACENTA, SIGNAL = 1.4; EXPRESSED IN BONE MARROW, SIGNAL = 2.8; EXPRESSED IN HBL100, SIGNAL = 4.8; EXPRESSED IN ADULT LIVER, SIGNAL = 4.1; EXPRESSED IN BRAIN, SIGNAL = 3.4

SEQ ID NO: 2780 - DNA, 472 bp, Homo sapiens
  MAP TO AL035687.13; EXPRESSED IN HEART, SIGNAL =   1; EXPRESSED IN BONE MARROW, SIGNAL = 1.4; EXPRESSED IN HELA, SIGNAL = 0.96; EXPRESSED IN ADULT LIVER, SIGNAL = 0.94; EXPRESSED IN BRAIN, SIGNAL = 0.91; EXPRESSED IN PLACENTA, SIGNAL = 1.5; EXPRESSED IN BT474, SIGNAL = 1.5; EXPRESSED IN FETAL LIVER, SIGNAL = 1.2; EXPRESSED IN LUNG, SIGNAL = 1.1; EXPRESSED IN HBL100, SIGNAL =   1
tagcaactttccacctctgctaattgtactgtctaaggaatgtaatcattttgccatacttctgaggatcatgtttatcaattacatggatgatatcatgttatagttcactggtgaggagaacatagcaagatgagttgataaaacatgtgaaaaaggggttacaagtaaattctatgcatgatatgttgggaattgataattttataattcagtttaaaagttggcaaactttttctatgaagaattagatagtagcttttccacaacatgtttgcctccagaacacatgctgctaaaaccacccctaaaagccaaaatgcaaaggaagagattcttaacagcattattgttattggacacatagatctgggaaagtccatgactactggccatctgatccccaaatgtgattgtatcaacaaaagaaccatttaaaaattttagaaggaggctgctgaggtgcaaaagt

SEQ ID NO: 2781 - DNA, 485 bp, Homo sapiens
  MAP TO AC009306.1; EXPRESSED IN PLACENTA, SIGNAL = 9.2; EXPRESSED IN LUNG, SIGNAL = 3.9; EXPRESSED IN ADULT LIVER, SIGNAL = 2.7; EXPRESSED IN BONE MARROW, SIGNAL = 3.7; EXPRESSED IN HBL100, SIGNAL = 3.6; EXPRESSED IN FETAL LIVER, SIGNAL = 3.4; EXPRESSED IN HELA, SIGNAL = 3.7; EXPRESSED IN BRAIN, SIGNAL = 3.5; EXPRESSED IN BT474, SIGNAL = 5.5; EXPRESSED IN HEART, SIGNAL =   3
aggagaaggctcagcaacaggtccaggctgctgtgtaagctgctctgccacttgagtcatatgacccagcagatccaattatgcttgaggtgtcagtggcagatagagatgctgttaggagcctttgtcaggaccctagtggtgaatcacaggggagacctctaggattttggaacaaggccctgccatcttctgcagataactactctccttttgagagacaactcttggcctgttactgggctttggtggaaactgaacatttgactacgggtcatcaagtcaccatgcgacctgaactgcctaccacgaactgggtgttttctgacccatctaaccataaagtaggtcatgcacagcagtattccatcatcgaatggaagtggtatatacatggttgggctcgagcaggtcctgaaggcacaagtaagttacatgaggaagtggctcaaatgctcatggtctccactcctgccacttctttc

SEQ ID NO: 2782 - DNA, 471 bp, Homo sapiens
  MAP TO AC007540.3; EXPRESSED IN PLACENTA, SIGNAL =   2; EXPRESSED IN BT474, SIGNAL = 1.3; EXPRESSED IN LUNG, SIGNAL =   1; EXPRESSED IN HEART, SIGNAL = 0.93; EXPRESSED IN BONE MARROW, SIGNAL = 1.2; EXPRESSED IN BRAIN, SIGNAL = 1.6; EXPRESSED IN ADULT LIVER, SIGNAL = 1.9; EXPRESSED IN HELA, SIGNAL = 1.1; EXPRESSED IN FETAL LIVER, SIGNAL = 5.7; EXPRESSED IN HBL100, SIGNAL = 1.7
tcagtgtttgggaatcatggaaagatggtctgaggatgggtctttggggcaggcaggatgctgctatctatgggcacggagtgggcatcttggcctggaagtgtttcaactggtaaaggggaagctccctgggtccccttgtgtgtgtgtgcacgtgtgtgtgcatgtgcgtgttttgcatgtgtatgtgtgcgcgcatgtgcgtgttcatgtgtgtgtggacctaaagctgggggcaccatggtgcccgtggtggagggtgcccagactgacctatgctcctgatatcaattgtgacatccacgtagccatgctcagcgctgtgatacatggcctccctcagggccctcagtttggccttgctgttgcggctggcgcacaaggggggcggggctgtctccgccaggtcagtcccctcggccagaatctcctccagggacaggatatcactcttctccttctctggctggg

SEQ ID NO: 2783 - DNA, 460 bp, Homo sapiens
  MAP TO AC007297.22; EXPRESSED IN HBL100, SIGNAL = 2.9; EXPRESSED IN FETAL LIVER, SIGNAL = 2.9; EXPRESSED IN HELA, SIGNAL = 2.8; EXPRESSED IN BRAIN, SIGNAL = 3.1; EXPRESSED IN BT474, SIGNAL = 2.6; EXPRESSED IN BONE MARROW, SIGNAL = 3.2; EXPRESSED IN LUNG, SIGNAL = 3.1; EXPRESSED IN ADULT LIVER, SIGNAL = 2.7; EXPRESSED IN PLACENTA, SIGNAL = 2.5; EXPRESSED IN HEART, SIGNAL = 2.4
ttttgatcaggtctcagatggaaatacaaccacttaggtattcactattttaaactggaggaaaggtgattcttataaagtgacaaaaagtgcatcgtgttcatgtcctagttttttgtgaaggtaaacttgtgagtgataaaactcacaagatatttggctgaggaaacatctaagcacagcgttgaaagagtagcttggcttcccttgaatgtttatagtaaaatgcaagaaaagaaaaattatttaaagatggatttttttaattaataggaagacgatcttaacgatttggaaaatttacaacctggccatactctaaggaatgagagagtatgtttaggagacaacaccagggatgtcatcaagcaaccttttgataagattaaaattgtactggtagaaatcaggcactattcatcaacacaatggaagaatgaccccaagggcatttaaagat

SEQ ID NO: 2784 - DNA, 477 bp, Homo sapiens
  MAP TO AC006017.2; EXPRESSED IN LUNG, SIGNAL = 1.9; EXPRESSED IN ADULT LIVER, SIGNAL = 1.7; EXPRESSED IN BRAIN, SIGNAL = 8.4; EXPRESSED IN PLACENTA, SIGNAL = 1.9; EXPRESSED IN BONE MARROW, SIGNAL = 1.6; EXPRESSED IN FETAL LIVER, SIGNAL = 1.9; EXPRESSED IN HELA, SIGNAL = 2.2; EXPRESSED IN HEART, SIGNAL = 1.4; EXPRESSED IN BT474, SIGNAL = 3.9; EXPRESSED IN HBL100, SIGNAL = 1.9
tcatagcccacagggaagagtgctttaggagaatggaatgcttgcatctgctgtggaagcagctgaccaattgtgtggaagatgaggctacccacgcgaaaggtatggtcccgttctcctcgttgcacgatgctagcaatctgtcgcacctcatcacgctgaacatagaccctcctgaagactgcaaagtaacttaattcttgctcatgaattccctttggtttgtgcatggggcaaagcatagttttgtccttaaaaaacatgcattgtgctttaatggcgcaagtgaagtgataaatgttggtgcatcgaaatctgtggcatccactagtggcacccgtcttgtgacagaagacacatttcatttgtaggcctctcctcagagctagctccacatttattaaggcaccagcctgagtctcatagacctccgtggaccacagagcgcagttcaagtggacccacagatccaagtca

SEQ ID NO: 2785 - DNA, 462 bp, Homo sapiens
  MAP TO AB016897.1; EXPRESSED IN HBL100, SIGNAL = 3.7; EXPRESSED IN FETAL LIVER, SIGNAL = 3.4; EXPRESSED IN BRAIN, SIGNAL = 4.5; EXPRESSED IN HEART, SIGNAL =   4; EXPRESSED IN ADULT LIVER, SIGNAL = 3.4; EXPRESSED IN PLACENTA, SIGNAL = 3.1; EXPRESSED IN BT474, SIGNAL = 3.1; EXPRESSED IN BONE MARROW, SIGNAL = 4.4; EXPRESSED IN LUNG, SIGNAL = 3.9; EXPRESSED IN HELA, SIGNAL = 3.5
atcattttctctgggggctgcatgaactgccccttcttctgggctctagaacatttctcgtcagtaggcttgtgtgctcatcttccctgtgggactagaaattcctccagaataaggaccaggcagtgttcatctgtgtatccagaacccagacctatgctgagaaggagatagacatcccataaatatttaccaagcaagcgaaagagaacgtcgcctctgactggctagcagacataccttatcttcttcttccagcaggtgtggataatgaccaggagaggtttcccaggaacaggtcctcgacgatgcttctcatcatcagcctcttcctccccatcatgacagcccttttggtccggtgggccatcctcttctcttacctcaccagcacggaagatttgttgagatgtatgcactctagtttttattattaaaccaagagttgcttatgtttctaga

SEQ ID NO: 2786 - DNA, 490 bp, Homo sapiens
  MAP TO AP000165.1; EXPRESSED IN BT474, SIGNAL =  13; EXPRESSED IN HEART, SIGNAL = 2.7; EXPRESSED IN PLACENTA, SIGNAL = 5.3; EXPRESSED IN BONE MARROW, SIGNAL =  16; EXPRESSED IN HBL100, SIGNAL =  37; EXPRESSED IN FETAL LIVER, SIGNAL =  16; EXPRESSED IN LUNG, SIGNAL = 5.8; EXPRESSED IN HELA, SIGNAL =  10; EXPRESSED IN ADULT LIVER, SIGNAL = 4.9; EXPRESSED IN BRAIN, SIGNAL = 2.4
tgctgagtagtatggcattgtatgtagtgaatatttgtttttttccagtttggggttgttataggtacagctgctgtgaacatttgtgtacaagttgttgtgtggacacatgctttaatttctttggggtaaatacctagcagtggaatggctagatcataactgtaggtgtatgtttaggaaagtgccaaactataccagcaatgtatatgagagccggttttttttttttttttttttttttttgtggtggcgtggggttaccccaaagggcagactggtttattgggcatcagctgggaaaatcagcggttggacttggccacacatgccagctcatccttcttcttgatggcaaaggagttggaggagcccttggtggcagtgatgagctcatctgccaggcactcagcaatggtcatgatctcccggagggcaccctcaagagtgcctgtgcacagcaaccaggtggtctgattcacatggtgca

SEQ ID NO: 2787 - DNA, 469 bp, Homo sapiens
  MAP TO AL049744.7; EXPRESSED IN FETAL LIVER, SIGNAL = 8.1; EXPRESSED IN ADULT LIVER, SIGNAL =  13; EXPRESSED IN HEART, SIGNAL = 0.86; EXPRESSED IN LUNG, SIGNAL = 1.2
ttggtgtgagataacgaacctcagatatttacccagacaatgatgccgcttcaatacgacttcatttaaccaacaagtattgtgttcaaattcttttactgtattcttgactaatgcccattaataggagaatttattttactatgtacttatcaagaaatttgtatattcatttatacacagttgaaaaaccaaaaactaaataggtccattggtaaaacaaggtgacataaacattttgccacaattaatatagatgagtcttagaatgtcatctatgttacttagaaagacatgaacatgctaggatttcagagtagtgtacttactgacacggatgcatctgggagtaggagaccagccattctccatacatgtaactgtggtctgcgcttttggaagagcgtagccaggatggcaggcaacgtctatagatttaccctgtacaaactttcttccatgattttga

SEQ ID NO: 2788 - DNA, 406 bp, Homo sapiens
  MAP TO AL031655.7; EXPRESSED IN PLACENTA, SIGNAL =  11; EXPRESSED IN BT474, SIGNAL = 1.5; EXPRESSED IN LUNG, SIGNAL = 1.4; EXPRESSED IN HELA, SIGNAL = 1.1; EXPRESSED IN HBL100, SIGNAL = 1.3; EXPRESSED IN FETAL LIVER, SIGNAL = 1.8; EXPRESSED IN ADULT LIVER, SIGNAL = 1.7; EXPRESSED IN BRAIN, SIGNAL = 1.3; EXPRESSED IN BONE MARROW, SIGNAL = 1.6; EXPRESSED IN HEART, SIGNAL = 1.6
agacagtttggataatttctgatatgtattttactattaacatttatcttttggggaaatacttgtttactttgtagttggattttagagacagcttttcaccgtggcagatgtagtcagtgtcctggcaatattttctgagttcccatcattcctacgatgactttcgaggcaaacaactgaagctttctgcctaaaggcactcttgctggtgtccagtaggcccaagtatgggatgagcagcagtggttgaatgaaagagcatttcaagggagagctcccttacaaaccagatgcatccatcaatcaaaacctgttggtggataactacctctgctcccttgcccctcatgtgggataacagtaagatctgtgttataacctctcatccccaatactccagtgg

SEQ ID NO: 2789 - DNA, 381 bp, Homo sapiens
  MAP TO AC009229.1; EXPRESSED IN ADULT LIVER, SIGNAL = 4.3; EXPRESSED IN BRAIN, SIGNAL = 3.5; EXPRESSED IN PLACENTA, SIGNAL =   2; EXPRESSED IN BT474, SIGNAL = 2.9; EXPRESSED IN BONE MARROW, SIGNAL = 3.4; EXPRESSED IN HBL100, SIGNAL = 2.8; EXPRESSED IN FETAL LIVER, SIGNAL = 3.3; EXPRESSED IN LUNG, SIGNAL = 4.4; EXPRESSED IN HELA, SIGNAL = 5.5; EXPRESSED IN HEART, SIGNAL = 3.6
gctcacttgcttttctctctccacattaaacaccaaacaggtatcctgatgtgcagactcgagtgcaggcagaattggatcaggtcgtggggagggaccgtctgccttgtatgggtgaccagcccaacctgccctatgtcctggccttcctttatgaagccatgcgcttctccagctttgtgcctgtcactattcctcatgccaccactgccaacacctctgtcttgggctaccacattcccaaggacactgtggtttttgtcaaccagtggtctgtgaatcatgacccagtgaagtggcctaacccggagaactttgatccagctcgattcttggacaaggatggcctcatcaacaaggacctgaccagcagagtgatga

SEQ ID NO: 2790 - DNA, 399 bp, Homo sapiens
  MAP TO AC007939.1; EXPRESSED IN HEART, SIGNAL = 0.81; EXPRESSED IN BONE MARROW, SIGNAL = 0.99; EXPRESSED IN FETAL LIVER, SIGNAL = 0.87; EXPRESSED IN LUNG, SIGNAL = 0.89; EXPRESSED IN PLACENTA, SIGNAL = 1.5; EXPRESSED IN HELA, SIGNAL = 2.3; EXPRESSED IN ADULT LIVER, SIGNAL = 2.1; EXPRESSED IN BRAIN, SIGNAL = 0.98
tcatgagtttggattgcctgtagttagtgaaaaatactgttactttaaaaggaggctgaacctctaaatggtagtcatagtctttatttggcataataggaaattgagtaatttttcaaaaaggtagctcattatctgtagcatctattactataagttagctattatttgtcctctttgttgcctatgctaaatttccttctctatacaggttaatctttgaaataaaagttttgtaggaataaattgttatttttaactttattcagatttgtagaaaaatgctacatcgccacatgcttatatttcgactgcctaacttacagatgttagatggaagtcctgtgaattcagatgatagggcaaaagctgaatttcacctcgctgaactacaagcaa

SEQ ID NO: 2791 - DNA, 469 bp, Homo sapiens
  MAP TO AC006449.13; EXPRESSED IN FETAL LIVER, SIGNAL =  11; EXPRESSED IN LUNG, SIGNAL =  14; EXPRESSED IN HELA, SIGNAL =  12; EXPRESSED IN ADULT LIVER, SIGNAL = 8.6; EXPRESSED IN BRAIN, SIGNAL =  12; EXPRESSED IN HEART, SIGNAL =   9; EXPRESSED IN PLACENTA, SIGNAL =  12; EXPRESSED IN BT474, SIGNAL =  10; EXPRESSED IN BONE MARROW, SIGNAL =  16; EXPRESSED IN HBL100, SIGNAL =  10
atcaaacaaaggcaaaaccccaaaatatacacattgccagatacacacacatacagcaagacacacccccctccacctctcacactcactacacacaaggccagatagacacgccacaaccctcccccaccctgcgccacacacacacacaatcacagccagaccagagccaggcccaccctcgctacatgcagaagccatccacatccaccccccacctagaagcacacagcctgacatccctgcctggaaacagaccctgcaaacacacactaaccttttgtacgaccctggtccacccagggtaaattataacataagtcttccagcaacaaaagcagttcagcttccaaagtccgctctggggaccagaggctggagggctgcagtgggcatgtgacctgcacaaagctgtaccctcttcctgttcgggctctctccattcccatgacaacagctccatcaacca

SEQ ID NO: 2792 - DNA, 475 bp, Homo sapiens
  MAP TO AC004859.2; EXPRESSED IN HBL100, SIGNAL = 1.4; EXPRESSED IN ADULT LIVER, SIGNAL = 1.8; EXPRESSED IN BONE MARROW, SIGNAL = 2.1; EXPRESSED IN LUNG, SIGNAL = 1.7; EXPRESSED IN HELA, SIGNAL = 2.8; EXPRESSED IN BRAIN, SIGNAL = 1.5; EXPRESSED IN HEART, SIGNAL = 2.7; EXPRESSED IN PLACENTA, SIGNAL = 1.3; EXPRESSED IN BT474, SIGNAL = 2.9; EXPRESSED IN FETAL LIVER, SIGNAL = 1.9
tagctgtgggggtcagaaagtgcatcccgaagacaaaagttgtggaaagcagggagcctgaatgctgagagaaacccaccgtttgggaacagacagagaccccactgtccaggaggaagcaggctcagccagcctatggtagacttgccttgcctgcagagagcagttctctgtggccacagatgcatcctggacttaggggagcagtgaggtaaccctgtaccttctttgtctttagtcatgggacattttttttcgcaacacgaatgccggagccccaccgggcactgcctaccagagtccccttcccctgagccgaggctccctggctgctgtggcccatgcacagtccctggtagaagcacagcccaacgtggacaagctcgtggaggaccacctggcagtgcagtcgctcatcagggcatatcaggtaaggcgggtgctttacccgcacacgggaaagggtgcagtgttc

SEQ ID NO: 2793 - DNA, 476 bp, Homo sapiens
  MAP TO AC007325.11; EXPRESSED IN HELA, SIGNAL = 7.8; EXPRESSED IN ADULT LIVER, SIGNAL = 6.5; EXPRESSED IN BRAIN, SIGNAL = 5.3; EXPRESSED IN BT474, SIGNAL = 6.2; EXPRESSED IN BONE MARROW, SIGNAL =  15; EXPRESSED IN FETAL LIVER, SIGNAL = 8.5; EXPRESSED IN HEART, SIGNAL = 4.2; EXPRESSED IN PLACENTA, SIGNAL = 4.2; EXPRESSED IN HBL100, SIGNAL =  10; EXPRESSED IN LUNG, SIGNAL = 7.2
ccatctccagctcctacagctccacgggaggcttgccggggctaaagcggaggagggggccagcctcatcccactgccagctgaccctcagttcctcaaagacagtgagtgaggacaggcctcaggctgtctcttcaggtcacacccagtgtgaaaaggcagcagatatagcaccagggcagacactcaccctcaggaatgactcctccacatccgaggcctctaggcccagtacacacaagtttcccctgctgccacgcaggcgaggggagcctttgatgctgccacctcccgtagagctggggtaccgggtcactgttgaagaccttgaccgggagaaggaggcggcattccagcgcatcaacagtgcactgcaggttgaggacaaggccatctcggactgcagaccctcacggccttcccacactttgtcctcacttgcaacagggacttctggtctgcctgccgtttctaaa

SEQ ID NO: 2794 - DNA, 462 bp, Homo sapiens
  MAP TO AL050336.7; EXPRESSED IN PLACENTA, SIGNAL = 1.5; EXPRESSED IN HBL100, SIGNAL =   2; EXPRESSED IN HEART, SIGNAL = 0.88; EXPRESSED IN BONE MARROW, SIGNAL = 2.3; EXPRESSED IN BRAIN, SIGNAL = 3.4; EXPRESSED IN BT474, SIGNAL = 2.2; EXPRESSED IN FETAL LIVER, SIGNAL = 1.4; EXPRESSED IN ADULT LIVER, SIGNAL = 2.2; EXPRESSED IN HELA, SIGNAL =   2
gaaagactaacaaattgcaagaccaataacattgcatttgtagtattccatttttctgatttatccactacaactgccacaactgctacaactgctatttataattttagctttttttaaaaaaaccacaatactatcaccattgccccctgcaccacagccactactatcaccatctccttcatcaacacaagaaacaccaacaccattactattatcagctaccgtcgacatcaacatcactaccaacaacatcgtcatccaccaccaccatcatcaacttcacgaacaccaccaccaccccaccatcagcatcattatcacctttatcaatgcaacctctaccacatcaccatcatcattcaccaccatcatcatcatcaagcccactaccaacaatgccagcgccattactttcaccaccaccactattactgtgttccgctaccattaccaccacct

SEQ ID NO: 2795 - DNA, 462 bp, Homo sapiens
  MAP TO Z84718.2; EXPRESSED IN FETAL LIVER, SIGNAL = 1.5; EXPRESSED IN ADULT LIVER, SIGNAL = 3.4; EXPRESSED IN PLACENTA, SIGNAL = 1.8; EXPRESSED IN HELA, SIGNAL = 2.4; EXPRESSED IN HEART, SIGNAL =   3; EXPRESSED IN BT474, SIGNAL = 2.6; EXPRESSED IN HBL100, SIGNAL = 7.2; EXPRESSED IN BRAIN, SIGNAL = 1.9; EXPRESSED IN LUNG, SIGNAL = 2.1; EXPRESSED IN BONE MARROW, SIGNAL = 1.1
gttgctcgaggacaagttcctccagaacaaggccttccttactggtcctcacatctccttagctgacctcgtagccatcacggagctgatgcatgtgagtgctgtgggcaggtgaacccactaggcagggggccctggctagttgctgaagtcctgcttatgctgccacaccgggctatggcactgtgcttaagtgtgtgtgcaaacacctcctggagatctgtggtccccaaatcagatgctgcccatccctgccctcacaaccatccatccccagtctgtacccttttccccacagcccgtgggtgctggctgccaagtcttcgaaggccgacccaagctggccacatggcggcagcgcgtggaggcagcagtgggggaggacctcttccaggaggcccatgaggtcattctgaaggccaaggacttcccacctgcagaccccaccataaagcagaagct

SEQ ID NO: 2796 - DNA, 489 bp, Homo sapiens
  MAP TO AC005488.2; EXPRESSED IN BT474, SIGNAL = 5.4; EXPRESSED IN HELA, SIGNAL = 5.4; EXPRESSED IN PLACENTA, SIGNAL = 4.4; EXPRESSED IN HBL100, SIGNAL = 4.2; EXPRESSED IN HEART, SIGNAL = 2.7; EXPRESSED IN LUNG, SIGNAL = 1.9; EXPRESSED IN BONE MARROW, SIGNAL = 3.5; EXPRESSED IN ADULT LIVER, SIGNAL = 3.7; EXPRESSED IN FETAL LIVER, SIGNAL = 3.5; EXPRESSED IN BRAIN, SIGNAL = 4.8
gagagcaggcatggtgtttcactcatctcatatccccaaaacacagttcagttgcaaaataggagctcagttgtgttttgggtttttatttttgtatatatataaaggaccccaaaggatatgtgtttccaatatgatttcccttccataatctgtaacataaaataaggtatacaatgttcatggttaacttcaccagtgagctttgtaaaatgttatccccctatcccttttccatatctcccaattctgatcatgttgccattacaggggccagtgtcattcaaagatgtggctgtggatttcacccaggaggagtggtggcaactggaccctgatgagaagataacatacggggatgtgatgttggagaactacagccatctagtttccctgggtgaggatagcttgctttctgaatgctctcagttgaatggggttttatgcttgagtttgaagaaataagtgacaacaccatttaattccttg

SEQ ID NO: 2797 - DNA, 455 bp, Homo sapiens
  MAP TO AL117186.1; EXPRESSED IN BT474, SIGNAL = 2.7; EXPRESSED IN FETAL LIVER, SIGNAL = 2.9; EXPRESSED IN PLACENTA, SIGNAL = 2.1; EXPRESSED IN HBL100, SIGNAL = 2.1; EXPRESSED IN HELA, SIGNAL = 1.7; EXPRESSED IN HEART, SIGNAL = 1.8; EXPRESSED IN BONE MARROW, SIGNAL = 2.9; EXPRESSED IN LUNG, SIGNAL = 2.8; EXPRESSED IN BRAIN, SIGNAL = 2.5; EXPRESSED IN ADULT LIVER, SIGNAL = 2.4
ctgtgcaggtgggtgaggcccaccctgctcttgagggttcccagcctcatggagacacgtatgcaaacaatcagggcaactgcacaagcatgtatgaggcacacccctaacgtgggtcccatgatgttattctcttcctctaaaaccttccgtggctctcactgtccaccaaaggaaaagcaaacttcacctggcttcaaaagtcccccactatctgcaccactctcttttccagccttagctctccatgctgtcacacctcccaagatcacaccagccttagctccagccactgtcatacctcgcaagctcataccagccttagttccagccactgtcacacctcacaagctcacaccagccttagctccagccactgtcacacctcgcaagctcacaccagccttagttccagccactgtcatacctcccaagctcacactggccttagctcc

SEQ ID NO: 2798 - DNA, 500 bp, Homo sapiens
  MAP TO AC009473.2; EXPRESSED IN PLACENTA, SIGNAL =  12; EXPRESSED IN HBL100, SIGNAL =  17; EXPRESSED IN HELA, SIGNAL =  18; EXPRESSED IN HEART, SIGNAL = 5.3; EXPRESSED IN BT474, SIGNAL =  13; EXPRESSED IN LUNG, SIGNAL = 8.3; EXPRESSED IN BONE MARROW, SIGNAL =   8; EXPRESSED IN BRAIN, SIGNAL = 4.6; EXPRESSED IN ADULT LIVER, SIGNAL = 5.5; EXPRESSED IN FETAL LIVER, SIGNAL =  11
catacagcactttgatggggttagtttaaagcaagtctattatgacagaaagaatagtaaatattctatcacagtgccattttatacaaaataaagcatcaatatcagaaactggaaaaattaaaatgtcaagcaatagtaactttctcatcaatcaagctgattttagagaaataaatacagaatttcaaatgtttgattattcatatttattttattcttagttggcaatcatgaagaatcacttgaaaattatggttcttttcggcttattactaaacagcattcatcctttaatccttctagaaattgtcctgacccttttcacaagatggcgccgaaagcgaagaaggaagctcctgcccctcctacagctgaagccaaagtgaaggcttcgaaggccaagaaggcagtgttgaaaggtgtccacaaccacaaaaaaagaaaaagaaaaaaagaaagatctgcccgtcacccaccttccagcagcccaagacact

SEQ ID NO: 2799 - DNA, 461 bp, Homo sapiens
  MAP TO AC009808.2; EXPRESSED IN BT474, SIGNAL = 1.2; EXPRESSED IN FETAL LIVER, SIGNAL = 1.6; EXPRESSED IN HEART, SIGNAL = 1.6; EXPRESSED IN HELA, SIGNAL = 1.3; EXPRESSED IN BONE MARROW, SIGNAL = 1.5; EXPRESSED IN LUNG, SIGNAL = 1.1; EXPRESSED IN BRAIN, SIGNAL = 1.5; EXPRESSED IN PLACENTA, SIGNAL = 1.4; EXPRESSED IN ADULT LIVER, SIGNAL = 1.2
ggagcttaaagcagacttcacctgtgttattcaatattgcctgtatgttgctaaagtcatgcagcaaagcattgcttgttttgaggaaaaatagactgcttcagaacacgtacaaaaaatatctatcactagcaaagggcagccaaaataaatagaactctcttaatttctttactaaaactccaacttcaattttacaagttcaaattatcgatacaattttaaaccattttccctgagaaagaaaagtctaacttaggatgacattcagtgtggctcctagtgtttaaaaataacgaacgttttagaaaaggagagcgtatgtgatgagtttgtagatgcaaaggaccaacgaaagctgatcccaaaacgagatggagatacaaagtagaaggacattcttggagatctggaaactaattttagggaagtctaaatacctgctgatgctattaggtcag

SEQ ID NO: 2800 - DNA, 481 bp, Homo sapiens
  MAP TO AC007425.16; EXPRESSED IN HBL100, SIGNAL =   1; EXPRESSED IN HEART, SIGNAL = 1.8; EXPRESSED IN BONE MARROW, SIGNAL = 1.6
gcagttccttaaacaactccagtcactttgttcttgttcaagatcatagctgcaggaatgggacatgcttgcctagtgagcaacaaccatcactttcaatttcattttttcatttcctggtcagtcactctacgtggcctcttactggtaacattagctgtcgattttgtgcacttaggggccatgatggacagaacaagagcacaagagaaaatgatgcagccacaagtcttggtaaacacagatgtatgaggctgcttctgggctaacatggcatcctgctttacagcaaacttttctttcattattatagattcagggggcacatgtgcaaagttgtttgccatctcaaccacagctgtgttgatttttgcaacctcctcaaccttggcaaatcctttgacgtcatagataaatctctcgagtgtcttcttgcagatgccatttatatactccttggtgacatcaccccaagcctaag

SEQ ID NO: 2801 - DNA, 473 bp, Homo sapiens
  MAP TO AC010684.1; EXPRESSED IN BT474, SIGNAL = 8.6; EXPRESSED IN FETAL LIVER, SIGNAL = 3.8; EXPRESSED IN HEART, SIGNAL = 4.3; EXPRESSED IN LUNG, SIGNAL =  13; EXPRESSED IN BRAIN, SIGNAL = 3.7; EXPRESSED IN ADULT LIVER, SIGNAL = 3.2; EXPRESSED IN PLACENTA, SIGNAL = 3.7; EXPRESSED IN HELA, SIGNAL = 6.4; EXPRESSED IN HBL100, SIGNAL = 9.4; EXPRESSED IN BONE MARROW, SIGNAL = 3.4
agcttacctgggcaggagactttagaaggccagttgccttgcttccagctgaaggagtagaacaccagcagctctcagaccatacaaattgctagacaccttttcctgttgtggcatggtgcaatgaggagctcttacctatgcctggagacatgccatctaaggactcgttggctgcagtctgtgcagatcttcacatacaaggagatggccatagctgtggtgctctgcagatgtggcagtggcttcatcaggatgaacgaggggcccctggagatgatcaggctgctcacactgcaatacaagctactggaattaggtctgcttctggacaaggaacagcttgctggaatggacatccatgttcgtgtgaagggtagtggtcatgtggttcagatttatgctgtccttcagtacatctccaaagccctggtaccctgttacccaaaatatgtagatgaggcttccgagga

SEQ ID NO: 2802 - DNA, 493 bp, Homo sapiens
  MAP TO AL121758.5; EXPRESSED IN HEART, SIGNAL = 1.8; EXPRESSED IN BT474, SIGNAL = 2.9; EXPRESSED IN HBL100, SIGNAL = 2.2; EXPRESSED IN HELA, SIGNAL = 2.4; EXPRESSED IN PLACENTA, SIGNAL = 2.3; EXPRESSED IN ADULT LIVER, SIGNAL = 1.9; EXPRESSED IN FETAL LIVER, SIGNAL = 2.1; EXPRESSED IN BRAIN, SIGNAL =   3; EXPRESSED IN LUNG, SIGNAL = 2.3; EXPRESSED IN BONE MARROW, SIGNAL = 2.5
gctcttcaagcccatctctgttctccttctcggtaatgcttcaagggtaaggccatgatcctattgtcacagaggtgggaactggggctcccacactgtacagtgagtccaaggccttgtagctggtgagaggggtgcccagagtcagaccctctcgccaggtgcaaagagaatgcacccctgctatcccttctgcatggcccagcctgctggaggccaggtgtgtcttctgggctcttgaaggtggcagcaggtgccaaggaggctgctactgcaagtctggtgtggatgctcccaggtacacccttaggtctgagagagtggactggacaagcttggcggggatggtctctcgctgcagttgctggtaggccgcgtagcggtggcagcccccaaaggagtagaagtagtcacctccctgggcccctttgatccagaggacatcgatggggggcacgctgtctgggtcctcctggggagaagaggcacagag

SEQ ID NO: 2803 - DNA, 419 bp, Homo sapiens
  MAP TO AJ009615.1; EXPRESSED IN LUNG, SIGNAL = 5.7; EXPRESSED IN BONE MARROW, SIGNAL = 6.6; EXPRESSED IN BRAIN, SIGNAL = 4.4; EXPRESSED IN HBL100, SIGNAL = 7.3; EXPRESSED IN HELA, SIGNAL = 7.7; EXPRESSED IN PLACENTA, SIGNAL = 3.7; EXPRESSED IN ADULT LIVER, SIGNAL = 5.3; EXPRESSED IN HEART, SIGNAL =   6; EXPRESSED IN BT474, SIGNAL = 5.9; EXPRESSED IN FETAL LIVER, SIGNAL = 6.9
agctttaggatgcacagtggttgttattgttgctagacaagtccttgaagattatcctctgactcaaagctttaaagaaaaatcttactggaaaggaattctttggtgagatgtagatcagcatggcacgctgtaggcaacatttaggaaagaaggctgatttcttctctctcattccaaatgcctttgtgatacctgcttgggcattgcccagggattccagcggtcagaggttctgtaggatggtttttctttttttttaaatcctgcctcaggtttatttgtacaaatagcacaggaggacaccacccccacgcatatagcagcccaggggtcacaccagtccttctgttctcagattgacagagacctctactctgaaggcttcgtgggggcctggacacctttggaagcctgag

SEQ ID NO: 2804 - DNA, 430 bp, Homo sapiens; identical to SEQ ID NO: 283
  MAP TO AP000010.2; EXPRESSED IN HBL100, SIGNAL = 2.4; EXPRESSED IN HELA, SIGNAL = 1.1; EXPRESSED IN PLACENTA, SIGNAL = 0.98; EXPRESSED IN HEART, SIGNAL = 1.7; EXPRESSED IN BT474, SIGNAL = 1.6; EXPRESSED IN BONE MARROW, SIGNAL = 1.6; EXPRESSED IN BRAIN, SIGNAL = 1.5

SEQ ID NO: 2805 - DNA, 1954 bp, Homo sapiens
  MAP TO AC004950.2; EXPRESSED IN BONE MARROW, SIGNAL = 2.3; EXPRESSED IN LUNG, SIGNAL = 3.3; EXPRESSED IN BRAIN, SIGNAL = 3.5; EXPRESSED IN HELA, SIGNAL = 4.2; EXPRESSED IN HBL100, SIGNAL = 5.2; EXPRESSED IN PLACENTA, SIGNAL = 3.7; EXPRESSED IN ADULT LIVER, SIGNAL = 3.8; EXPRESSED IN HEART, SIGNAL = 2.4; EXPRESSED IN BT474, SIGNAL = 2.9; EXPRESSED IN FETAL LIVER, SIGNAL = 4.7
agctgatcagtgcaggaaccagctgctcctcctaaaacctggactatgccccgctgcagaaaaactgcagatgagaatggggtgtatctcatggtggacatggcacatatcagcaggctggtggcagctggcgtggtgccctccccatttgaacactgccaccaccactcacaagaacctgagaggctgccaagtccgcacgatcttctacaggaaaggagggcaaagtatggatcccaagactggcaaagagattctgtacaacctggagtctctcatcaactctgctgtgttccctggccttcagggaggtccccacaaccacaccattgctggggttgctgtggccctgaagcaagctatgactctggaatttgaagtttatcagcaccatgtggtggccaactgcagagctctgtctgaggcactgacggagctgggctaccaaacagtcacaggttgttctgataaacatttgatcctcgtggatctccattcaatcaaaggcacagatggcagaagggctgagaaggtcctagaagcctgttctattgcctgcaacaagaacacctgcccagatgatagaaacactctacggcccagtggactgcggctggggaacccagcactgacatctcttggacttttggaaaaaggcttccaaaaggtagcccactttatccacagagggatagagctaaccctgcagatccagagcaacgctggcatcagagccaccctgaaagagttcaaggagagactagcagggcataaataccaggggtgtgtgcaggctctccaggaggaggttgagagcttcactctcttccctctgcctggcctgcctgacttctaaaggagccggcccaccctggatgcacctggtgccacagaggaagctacctgctggaggatccccttgagagatgtacaagctgccccacaagggacccactgacacttgtttcctttgaggggttttcttttggacttttttcatgttttcttcacaaatcaaaatttgtttaagtttcattgttattaattctgggacaggttattacaggtttttaatttgaacctggctttctcacagctggatataattattctagaaaaataaaaatactgtgtagccacttggccataatcatttagaccatggggtagggcagagctattagaaagattctagtgttttactctccctaggctttcctttgccttgctgcagcagagaggaaatgctcctgtccacagcttgtacacactgccactcttactatcttgttacccagcagcatgccaaaggggagctgaattcgcctctgaagcttctgctgtgtgctgtaaatcagaagtgtacattagccaagtgtacacaaggtgcactcagtatggtgggagggttttgctgtcagtagttcaaagtatggtgtagaaagggtctcctccctccatcctgggaaatcccagtcccatactggtgtgagaatcaaccaggctttcctgctccacctgagataaccaactccctcccataatcaggaaaccaaatgtcaccttcccaaagaaactttattttcacatagctgaagtgcaaaacatatacgaccatttttaataagcacaatcaaatttttaactactgaatgtctataagaattatagctttaaaaatacaatttttatatttcaaaaatatttgaactgaaactaatttcttaaaaagttaaaaaaggtaagatttaatagtttttgtagatcatctcaaaattaacacatcaaaaagagctttatcaagtccttttctgtcaaaatattgatgctgcagaaatcaaaaccttgaatttacttaagtattttgtgatcaaaataccaagaaatactagctacccatatgaaaaaaaaaaaagaaccctagatctcaacctcattcctaacacacaaaacc

SEQ ID NO: 2806 - DNA, 434 bp, Homo sapiens
  MAP TO AL020991.1; EXPRESSED IN BONE MARROW, SIGNAL =   3; EXPRESSED IN BRAIN, SIGNAL = 1.3; EXPRESSED IN PLACENTA, SIGNAL = 1.3; EXPRESSED IN HBL100, SIGNAL = 1.3; EXPRESSED IN HELA, SIGNAL = 1.3; EXPRESSED IN HEART, SIGNAL = 1.3; EXPRESSED IN ADULT LIVER, SIGNAL = 1.7; EXPRESSED IN BT474, SIGNAL = 1.4; EXPRESSED IN FETAL LIVER, SIGNAL = 2.3; EXPRESSED IN LUNG, SIGNAL = 1.4
tgacttgttcaaggccacacagctaggaagtggcaaagagatcgctagaaacaagatctgttgatactccttccagtgagactgaaagcagtgattctagtaaggaggctgccacaccaacccgggaagagagatgaggccataagaaagtctaaatgaatgtgtgaatgaactactgagtgaatgagtgaatgagtaagcaaaaggatggctgaatgaagtagtagagagttaatgtggtccataagtcaatgactgagcaaataaatgaatatgtggaaaaagagttggagaactcaaaatcagcaacatgggtaaaatacagactagccagggagagacttaaaacgaattcttttcatcctcatatctgctcctgcaggaaactatgtcttcagttatgaccagtttttcagggacaagatcatggagaa

SEQ ID NO: 2807 - DNA, 401 bp, Homo sapiens
  MAP TO AL121763.5; EXPRESSED IN PLACENTA, SIGNAL = 0.95; EXPRESSED IN HEART, SIGNAL = 1.1; EXPRESSED IN BT474, SIGNAL = 1.5; EXPRESSED IN BONE MARROW, SIGNAL = 1.5; EXPRESSED IN BRAIN, SIGNAL = 1.1; EXPRESSED IN HBL100, SIGNAL = 2.1
tttcagtgtagcagggagaccttaatagactgaagaagaaaatagtaagaaatccactgagaggcagagtaaaatctgctgccccgtctccacctcccacaattgataaggcatcaaggtccagggatgcctcctccttttgtttctctgaccatcttcttcctttccactcccttggcactggcctaattcaggtccatggcatttgtgtcagaaactgtttattttgcaacgacttcctaagcagtctagtccttgattctctcaccatccaataaaacagtactcagcaccatctttctgagatacaaagccaaccgtgacatgttctcgacttccattgaggtcttcctttataggaaattccccacttcctataaagcccaaggtctttcatgaga

SEQ ID NO: 2808 - DNA, 1990 bp, Homo sapiens
  MAP TO AC004049.1; EXPRESSED IN HEART, SIGNAL = 1.1; EXPRESSED IN PLACENTA, SIGNAL = 1.9; EXPRESSED IN ADULT LIVER, SIGNAL = 1.5; EXPRESSED IN BT474, SIGNAL = 1.3; EXPRESSED IN FETAL LIVER, SIGNAL = 1.6; EXPRESSED IN BRAIN, SIGNAL = 1.2; EXPRESSED IN BONE MARROW, SIGNAL = 1.9; EXPRESSED IN LUNG, SIGNAL = 1.7; EXPRESSED IN HBL100, SIGNAL = 1.3; EXPRESSED IN HELA, SIGNAL = 1.4
attcaccaaaaaggcctcgggtccttaactcaatgtttgcctgtatattttccttagaatgtatgtggcatgtgttcatttttctataatatttcaaatgactgtcctccagaaatgaaaagtttgtcctgattcacttgcagttttcaattcaatatctgatttggtatttggtatttttcccagaatatccgtggcacgtgtttattgtcctacagtagttcaaatgactgtcctccagaattgaaaaacttacatctgtgtgaagccaaagaggcctttgagattggcctcctcaccaagagagatgatgagcctgttactggaaaacaggagcttcacagctttgtcaaagctgctttcggtctcaccacagtgcacagaaggctccatggggagacagggacggtccatgcagcaagtcagctctgtaaggaagcaatggggaagctgtacaatttcagcacttcctccagaagtcaggacagagaagctctgtctcaagaagttatgtctgtgattgcccaggtgaaggaacatttacaagttcaaagcttctcaaatgtagatgacagatcttatgttcccgagagtttcgagtgcaggttggataaacttatcttgcatgggcaaggggatttccaaaaaatccttgacacctattcacagcaccatacttcggtgtgtgaagtatttgaaagtgattgtggaaacaacaaaaatgaacagaaagatgcaaaaacaggagtctgcatcactgctctaaaaacagaaataaaaaacatagatactgtgagtactactcaagaaaagccacattgtcaaagagacacaggaatatcttcctccctaatgggtaagaatgttcagagggaactcagaaggggaggaaggagaaactggacccattctgatgcatttcgagtctccttggatcaagatgtggagactgagactgagccatcggactacagcaatggtgagggagctgttttcaacaagtctctgagtggcagccagacttccagtgcttggagcaacttatcagggtttagttcctctgcaagctgggaggaagtgaattatcacgttgacgacaggtcagccagaaaagagcctggcaaagaacatctggtggacactcagtgttccactgccttgtctgaggagctagagaatgacagggaaggcagagctatgcattcattgcattcacagcttcatgatctctctcttcaggaacccaacaatgacaatttggagccttctcaaaatcagccacagcaacagatgcccttgacacccttctcgcctcataataccccaggcattttcttggcccctggtgcagggcttctagaaggagctccagaaggtatccaggaagtcagaaatatgggacccagaaatacttctgctcactccagaccctcatatcgttctgcttcttggtcttctgattctggtaggcccaagaatatgggcacacatccttcagtccaaaaagaagaagcctttgaaataattgttgagtttccagaaaccaactgcgatgtcaaagacaggcaggggaaagagcagggagaagaaattagtgaaagaggcgcaggccctacatttaaagctagtccctcctgggttgacccagaaggagaaacagcagaaagcactgaagatgcacccttagactttcacagggtcctgcacaattctctgggaaacatttccatgctgccatgtagctccttcacccctaattggcctgttcaaaatcctgactccagaaaaagtggtggcccagtcgcagagcagggcatcgaccctgatgcctccacagtggatgaggaggggcaactgctcgacagcatggatgttccctgcacaaatgggcacggctctcatagactgtgcattctgagacagccgcctggtcagagggcggagacccccaattcctctgtaagcggtaacatcctcttccctgtcctca

SEQ ID NO: 2809 - DNA, 468 bp, Homo sapiens; identical to SEQ ID NO: 127
  MAP TO AC007733.1; EXPRESSED IN FETAL LIVER, SIGNAL = 0.59; EXPRESSED IN ADULT LIVER, SIGNAL =   1; EXPRESSED IN HEART, SIGNAL = 1.2; EXPRESSED IN PLACENTA, SIGNAL = 0.87; EXPRESSED IN BT474, SIGNAL = 0.63

SEQ ID NO: 2810 - DNA, 486 bp, Homo sapiens
  MAP TO AC006328.3; EXPRESSED IN PLACENTA, SIGNAL = 7.2; EXPRESSED IN LUNG, SIGNAL = 1.2; EXPRESSED IN HELA, SIGNAL = 0.97; EXPRESSED IN BRAIN, SIGNAL =   1; EXPRESSED IN HEART, SIGNAL =   1; EXPRESSED IN BT474, SIGNAL = 0.88; EXPRESSED IN HBL100, SIGNAL =   2; EXPRESSED IN FETAL LIVER, SIGNAL = 0.95; EXPRESSED IN BONE MARROW, SIGNAL =   1; EXPRESSED IN ADULT LIVER, SIGNAL = 0.84
ccccacacgtactttgaaccgaggagtcctcagctgcctggagccatgtgacagtctccttcttggggagctggttgcagaggcctctcatcccctccaggaacaccactgaggcctgacaccaggggccgccaatgcctccctgctgggctggctgtatggaagacctcagtgtcaatggccagaggtgggggcttcgggaagccttgctgacacacaacatggcggcaggctgcagactggaggaggtggaggagtatgaggacaatacctatggccattatgaagctttctccaccctggcccccagggcttggctgtccatggatctagctgagccatgcatgcttgagccagggctgcctcctgtctttaccaatttcacccagctgctgactatcagcccagtggtggtgaccgagggtggcacagccgagtggtggcatgtgcagcccatgctggccctgatggaggctgaactgcata

SEQ ID NO: 2811 - DNA, 1984 bp, Homo sapiens
  MAP TO AC006313.1; EXPRESSED IN LUNG, SIGNAL = 2.9; EXPRESSED IN BRAIN, SIGNAL = 3.3; EXPRESSED IN HBL100, SIGNAL = 3.4; EXPRESSED IN HELA, SIGNAL = 3.2; EXPRESSED IN HEART, SIGNAL = 2.8; EXPRESSED IN PLACENTA, SIGNAL = 2.1; EXPRESSED IN BT474, SIGNAL = 1.9; EXPRESSED IN ADULT LIVER, SIGNAL = 4.4; EXPRESSED IN FETAL LIVER, SIGNAL = 2.6; EXPRESSED IN BONE MARROW, SIGNAL = 3.7
caacctgaactgattaagacaggtatctacctcaaagatcttttaaaaagtgaaaacacactttcagttctgattctccatgctcaggaagaaaaataaactacagagtaaatgctctattaataactactcagtgtaagaacaacgtggaaagatgcatgttgtagatgacataagaattatgtcattaattgacagtgttgcttatctttaggtgagtacaagtccatgggaatgtccaacctgacaagactctctgaatttattctcttgggactctcctctcggtctgaagaccagaggccactctttgccctctttcttatcatatacctggtcactttgatgggaaatctgctcatcatcttggctatccactctgatcctcgacttcaaaaccctatgtattttttcctaagcatcttgtcctttgctgatatttgctacacaacagtcatagtcccaaagatgctcgtgaacttcttatcagagaaaaagaccatttcctatgctgaatgtctggcacagatgtatttcttcctggtttttggaaacatagatagttatctcctggcggctatggccatcaaccgctgtgtagccatttgtaacccattccattatgtcactgttatgaaccgcagatgctgtgtgttgctactagcattccccatcactttctcctatttccactctctcctacatgtcctcctggtgaatcggctcaccttttgtacatcaaatgttatccatcattttttttgtgatgtcaaccctgtgctgaaactgtcctgctcctccacctttgtcaatgaaattgtggccatgacagaagggctggcctctgtgatggctccatttgtctgtatcatcatctcttatctaagaattctcatcgctgttctcaagattccctcagcagctggaaaacacaaagccttctccacctgcagctcccatctcactgtggtgattctgttttatgggagtattagctatgtctatttgcagcctttgtccagctatactgtcaaggaccgaatagcaacaatcaactacactgtgttgacatcagtgttgaacccatttatctacagtttaagaaacaaagacatgaaacggggcttacagaaattgataaacaagattaagtctcaaatgagtaggttctctacaaagaccaataaaatctgtggaccctgattacaaggtgtgtgtgtgtgtgtgtgtgtgtgtgttagcacctgatgccactcttttcttgaaaaaacgttccttcatcttcaccatttgtagcttcacctcgtggttttccaccctgtggtctctgtcatcgtatgattgaacaattaggatgtcttggtatcaatgccccaatcacagactcacctcataatatatcttaattccagaaaatcacattccctttactctttgcatatttatttggagcctctcatatttctttgtgtttataaattcatccaagtttggtctttcaattatcagagaattttcctatatacctatgtagaaatttaaatatgtgcaatgatattatgcacacatagtcactctcttctatttaaagctgtcaggaattttttgcaggcatgtgtgtatgtatgtacaagtctcacctgcccatgagactacaggctatggtccccctctccacctttttagagacagggtcgtacccccctgtcacccaggttagagtgcagtggcactatcatagctcactataacctcaaactcctgggctcaagcaatcctcctccctcagccgctcaagtagctagtactacaggtgtgtaccaccacccctagataattgttttaattttttgtagagacaaggtcttgctatgttacccaggctggtctcagactcctggcctcaagtgatcctcctgcttcagcctctcaaagcactgggattataggcgtgagctaccatgcccagctttatggtcccttt

SEQ ID NO: 2812 - DNA, 366 bp, Homo sapiens
  MAP TO AL033530.1; EXPRESSED IN PLACENTA, SIGNAL = 1.2; EXPRESSED IN ADULT LIVER, SIGNAL = 1.2; EXPRESSED IN BT474, SIGNAL = 1.4; EXPRESSED IN HBL100, SIGNAL = 1.4; EXPRESSED IN HELA, SIGNAL = 1.4; EXPRESSED IN HEART, SIGNAL = 1.5; EXPRESSED IN FETAL LIVER, SIGNAL = 1.2; EXPRESSED IN BRAIN, SIGNAL = 1.3; EXPRESSED IN LUNG, SIGNAL = 1.5; EXPRESSED IN BONE MARROW, SIGNAL = 1.4
accatggaagacctggagagaactacttcaggcaatatgtgttaagaagctgaccatagaaccatggtctagacaaaggagtaccctgacatctagatcttttagtcttctccaaaagcacttcctctagaattcattctttgaatccccctcttttccctagttggatatatatgtctacctacaaatagcttctaaattttttctccctcttttttaaatcatatttatacagaagatgctttttcttcctttttagggcttctgaagatctcttccaggaagcagatgaggagtttccattgcatagctcctctgccagctcatttcagtttgaattcctcctcctcatacggcagcattttt

SEQ ID NO: 2813 - DNA, 347 bp, Homo sapiens
  MAP TO AL031595.4; EXPRESSED IN HBL100, SIGNAL = 3.4; EXPRESSED IN HELA, SIGNAL = 3.6; EXPRESSED IN PLACENTA, SIGNAL = 4.1; EXPRESSED IN HEART, SIGNAL = 2.7; EXPRESSED IN FETAL LIVER, SIGNAL = 2.9; EXPRESSED IN ADULT LIVER, SIGNAL = 3.2; EXPRESSED IN BT474, SIGNAL = 3.4; EXPRESSED IN BRAIN, SIGNAL = 3.2; EXPRESSED IN BONE MARROW, SIGNAL = 3.8; EXPRESSED IN LUNG, SIGNAL =   3
tgctctgacagcacactcgtgggcaggtcatttctccatgtgagtcttggtcctctttgtaaaacgagagggaaggaaaggaggctgtgcaggctctgatgagggtgtgtgagtcgagaaactccatgcccagtgacaaggacagttgctgattcttagcatccaccccacctgctctctcagtaaccgatgtcgtttcttactcttgtgatcaggactaaagcacagggtcatcccatggctgcttttggatcacagggagtcaggactccaagggcctcgagcgttacctggtccaggcccattttacagatgaaggcactgagccccaaatcacggaagtcact

SEQ ID NO: 2814 - DNA, 398 bp, Homo sapiens
  MAP TO AL022326.1; EXPRESSED IN BONE MARROW, SIGNAL = 0.98; EXPRESSED IN LUNG, SIGNAL = 1.2; EXPRESSED IN HBL100, SIGNAL = 1.2; EXPRESSED IN HELA, SIGNAL = 1.2; EXPRESSED IN HEART, SIGNAL = 1.1; EXPRESSED IN FETAL LIVER, SIGNAL = 1.1; EXPRESSED IN BT474, SIGNAL = 1.1
tcaagctggataggctctgggggtgtcaccctgaactcaattctgaatgggtgctttttaaggcatccattagtttaagctcccccattcacagggactgactaacataattccaagctcccctttgcagttatcagtaggctacaaagagcaaagggtccaggaacgtgttaagaagttgtcccctggccctccgctatcccagccacttctgaccacaaggctgttctcagaaggaaggcagtagagaatggttctacactgtccgattcgggcgctgtacccagcgctcactctgagcctcatcaacgaacagctgggcctgaaaccacttctcccccaggtttgcacagcaactcaagccaccgcaaagctcacctttgtagcctttgcccttg

SEQ ID NO: 2815 - DNA, 1971 bp, Homo sapiens
  MAP TO AC006475.3; EXPRESSED IN BONE MARROW, SIGNAL = 3.2; EXPRESSED IN HELA, SIGNAL = 2.3; EXPRESSED IN PLACENTA, SIGNAL = 4.2; EXPRESSED IN BT474, SIGNAL = 2.4; EXPRESSED IN BRAIN, SIGNAL = 2.6; EXPRESSED IN HEART, SIGNAL = 2.2; EXPRESSED IN HBL100, SIGNAL = 2.3; EXPRESSED IN ADULT LIVER, SIGNAL = 3.5; EXPRESSED IN FETAL LIVER, SIGNAL = 2.4; EXPRESSED IN LUNG, SIGNAL = 3.3
ttgcatctttatgacccagctgagttgaaattccaaataagatcccttcaaatttaataaatggcattcttcattaacagcatttaaaaaataatggctgaaacatataatcaacattacactgaagttctatctgaagacagaaaaagttgccatccacaccaaagctacacatataccttctgattttatagaattgttccaatatcttttcagtcaatatcattaaaatcaccctacctgtttggaccgaggtctactaggagaaaattttctcttagtaatagctggtttacccatgccaatttttggagtgactgagatgtaagttgttggcatgatgtttccagcagaggaactaagagctgaagggtaattatgcagcatgtcatgtgaaggcaagtctgaagaaggtgttggtgaggaagacacatctgccttgcttatgtctgctgataatgaaaatgatgactctgtctcagatgataactttatagatttgcctccttggtatgaaacatctttcacacaaccctcaattgtaggagtcatttcagagtccatcaatccagtagaaagttcagaatcttctttctgttccttttctccttgtagcctttctataaccaactgttcctcaggacataatgaagtgctttcctcatgtggggacactaaggtttctagtggaagagtgacagattcaatgacaaattttggaggccttgattcttctttggataccactgttttaggttcctctaacaactgcagttgctcttgctgcacagtgatctggtgtgtaacgacttcaatgttttctgtcacttccattttatcttcaatttgatcttcgccacaaatatgcttcacttcagaagacattttcatttcttcactatcagtctcattagaaatctgtttttccaattcggtattcactgtatgttgggatgatattacaaaattcagaacatttgttatggtaatgtacaaacaaattttaaattttctaactatagatatataaaacatttggctacactagaacttaaatcagaaggtattcatcaaagcagacaattattaagtgaatgaaagccaaagtacacaaggatttatggattagaatcagccacacaccagaaaacctaatgaaaacatgttttacaacacaagtacttccaaatggattgaaaattacgcaggaaaagttctcatactcattttttagttaagaaaatgaggatcaatcatgttatgtgaggtacctaagttaaaaagtaaagactgatctagaatgtgtaggcattttctaatagtagatacccagatgcgacaaagttactatagactcaaaagcacagacagaaaagatttgctaaccaccaatatttattttgcttaaccatacctgccaacctagccaaaatattctttggatataatcgttgttcttcatcattgtctgtaaattaaaagactaatctcaggaaatctataaacttagatatcagaaacatagtcaccggtaaattttaaatcaggataccagtatgttaaacatttaactcaatctcatcaaggtaatttttaagttatagtaaaaagacactgctagcctcatttacaaatcagtgactaaaatttatctatttatctatgttcttttttttttgaaacaggatctcactctgtgacccaagctggagtgcagtagcacaaacatggctcactgcagcctcaacctcctgggctcaagtggtcctcccacctcagcctcccaaactgctgggactgcaggcatgtgtcaccatgcccagatactttttttgtttctgtagagatagggtctcactatattgcccaggcctatacatgttctgataccaaactgataccaaactgaaatctcatcttctttcccactttattgaaagactacaggtaaggataaaagaaaactaccaa

SEQ ID NO: 2816 - DNA, 395 bp, Homo sapiens
  MAP TO AL033539.17; EXPRESSED IN BONE MARROW, SIGNAL = 1.6; EXPRESSED IN HEART, SIGNAL = 1.4; EXPRESSED IN FETAL LIVER, SIGNAL = 1.2; EXPRESSED IN ADULT LIVER, SIGNAL = 1.9; EXPRESSED IN BT474, SIGNAL = 1.8; EXPRESSED IN LUNG, SIGNAL = 1.5; EXPRESSED IN PLACENTA, SIGNAL = 1.6; EXPRESSED IN HELA, SIGNAL = 1.5; EXPRESSED IN HBL100, SIGNAL = 1.6; EXPRESSED IN BRAIN, SIGNAL = 1.5
tgttcggttgcttagcattgagttcagctttcatttctctttacctgtgatttacgttgtatacaattttgaattccaggtggctttcttctcattacgtcatatgttttgcttcaatcaataaaagtttaggaataaaatatttaccataaatcagtctaacacaatcaaattttcacaaaaaagtatttagaaaatatcaaatatatctcaaagcaacaaataaccttttgattttcgagtagttttatttattattgctatttcttctgtaggtaagtgactcccatgcagtgattgccaaatgggctttcttcccaggtcctctgaaagaatctggaggaaatgatgatgctcaggagacaattcatgatcactcggaatttctgacaacc

SEQ ID NO: 2817 - DNA, 442 bp, Homo sapiens
  MAP TO AL109809.14; EXPRESSED IN PLACENTA, SIGNAL = 6.7; EXPRESSED IN ADULT LIVER, SIGNAL =   7; EXPRESSED IN BT474, SIGNAL = 5.5; EXPRESSED IN FETAL LIVER, SIGNAL =   6; EXPRESSED IN BRAIN, SIGNAL =   5; EXPRESSED IN LUNG, SIGNAL = 6.4; EXPRESSED IN BONE MARROW, SIGNAL = 4.3; EXPRESSED IN HEART, SIGNAL =   5; EXPRESSED IN HELA, SIGNAL = 6.2; EXPRESSED IN HBL100, SIGNAL = 5.4
tgagctcaaggcccactcctggtgtatactcagtcaatgaaagtcattgataaacactttagaaaacataagcatcacataaggatgattaaatgactgttttgtgttttcctccaggagcggcaggtgaggaggagctgcgggtgattcagcctgagaagtcagtgtcagtcacagctggaggtttgaccactctgtgacctccctttgcccttggggcccatcaggtggttcaaaggaactgaaacagggcaggaactaatctacagttcaaaaggaggccactttcccaagatagcttgcatttcagacatcacaaagagaaacaatacagacttttccatgtgcatcactagcatcacaagagccaacactggcacctacaactgtgtgaagttctggaaagggggccctgacatggagcttaaatctggaccaggca

SEQ ID NO: 2818 - DNA, 406 bp, Homo sapiens
  MAP TO AL118499.5; EXPRESSED IN HBL100, SIGNAL = 5.2; EXPRESSED IN HELA, SIGNAL = 5.3; EXPRESSED IN FETAL LIVER, SIGNAL = 5.4; EXPRESSED IN HEART, SIGNAL = 4.6; EXPRESSED IN PLACENTA, SIGNAL = 5.6; EXPRESSED IN ADULT LIVER, SIGNAL = 5.5; EXPRESSED IN BT474, SIGNAL = 5.5; EXPRESSED IN BRAIN, SIGNAL = 4.9; EXPRESSED IN LUNG, SIGNAL = 5.7; EXPRESSED IN BONE MARROW, SIGNAL = 4.5
gtaagatccaggaagcctgccctgaccctcccctacagtacataatatggaacaattttaaaactctgtcacattctttacatctcataagatgctttcccaactgcactagcccacttaaccttcacattaacgcgatgaaatatgaattcttaaccccattttacagatgaagatgggaagctcagacaagctaagtattggccccaaaattacgttttacagggccagccatctaagctcccacccagcggtgccacgttacctcttcctcttcctcttccccatctctgtcaataatctgcagcagcctttttttgtcatcatccgcttcctccaccacagtcattttttcttcccgatagcggccgcgttctcgagtaccagtttgtttccgacgcatctt

SEQ ID NO: 2819 - DNA, 1959 bp, Homo sapiens
  MAP TO AC004230.1; EXPRESSED IN HEART, SIGNAL = 5.9; EXPRESSED IN ADULT LIVER, SIGNAL = 1.8; EXPRESSED IN BT474, SIGNAL = 5.3; EXPRESSED IN BRAIN, SIGNAL = 1.9; EXPRESSED IN HBL100, SIGNAL = 1.6; EXPRESSED IN HELA, SIGNAL = 2.2; EXPRESSED IN PLACENTA, SIGNAL = 6.5; EXPRESSED IN FETAL LIVER, SIGNAL = 1.6; EXPRESSED IN LUNG, SIGNAL = 6.3; EXPRESSED IN BONE MARROW, SIGNAL = 1.6
agcccaccagtagcaatctcaggcaggctgacatccccagagaccccaggaacagtcacttcacctgtaggcagtgtcacatcaatcccagtttcctctccctttgcacctgatacagagaacttggggactttcatcttgggcacattcagtttgctcccaggcccctgaacatcaatgtcaggggcctgaacttccacactggggccagtgatgctacccccaatttggggagcagaggcatccaccccaatgtgcccctgtggcttggcacctttcaggcctaggtcaccctcaagtgatggcccagtgatttgggggcccttcagcttcccctcaaggccctcaatattggcagagggcacactgacttccagctgaggggcttggatagtcaagcctggcttgccgcccttgtgccccacagagacttcaggtgcagaaaccctcagccctgcctttggtgtctggccctcacgccctgttgagacaccaaatttcggcactttcatggtgggaaatttaattttgccatgatcaccactctccagagatgggccctgtacctctactgccctacccccaagagaagatgaaatgtccactgctggaacttggacccctcctctgccacccaagtccaagccctttgcattgacattgacacctgagcctcccacctttatcccaggcatggtgacctggagcttcgagtggccagcaccttggagctctggtcctgaagcagaaatggcccctgctcggatatccacagcagagcctgtcggagaggctgcccccgagcccgagggcagtctgatcacggtcttcccagactgggtctccacatccacattggagatttcagtcagttcatgtcttggaatcttgatcttgaattcagggctactgatgtctatgtccttggctccttcccggccagtcacatccacagtgtaggccgtgacccttctggtcactgtgatggtacggctctgggtctccccgaggtctccttccactccatcttccgacttcagccgtggcttgatcttcgtggtgtagatgcgctggtactcctcatcatccccgctctgcagaaagacacgccgggcagaggttgcagcagagtctgcctgagttagcagatgcccggccacagcccagccgacaacacgttgcctgtttcccagagaagctgggaccaaaacagaggtccatggagcctcctggggcacagcacaggggagtgaagaaaggggctgacagccacatcacaggaggaaatcagaaattctctggaggtcataccgctaagcaaaaaccgtggggagggagtgggaggtatactcttggactgggaggatttccattcagttagagattcaaatcagcctgtgccagggacacctcccaagagaccaggcccttcagctcccaactctcaagccactggcttgtttgtttaatcaggaggggaatcttctcagaggcccttggaccctgaaagcactcgttgagcctaagagactggttgtgcttgggttaacagtctcactttgaggacccattatttgttaaataaacaagccatcagaaggaccaatgtccccacaggcactttgctgcccagcgtctgacccacagaatgtatcaggcctctgcagagagaaaaatggtgtctgtgaggtggagctgggcacctgtgaagtcatttcaaagattcttgcaaagcagctgaccttcctcctagcatctagggccgggctgcacaagtcagttcccatactgtggccgctctgaagagactgattgaagacatttagagggagcacagccacatgtcacacgaaagcggaaagaaacagggtggccaagggctcaagagagtgaagacaggtgagaggagaagaaggagcaaaaagagagggtccggaggcacatggaaggctcaggagt

SEQ ID NO: 2820 - DNA, 363 bp, Homo sapiens
  MAP TO AP000020.2; EXPRESSED IN HBL100, SIGNAL = 2.2; EXPRESSED IN HEART, SIGNAL = 1.8; EXPRESSED IN PLACENTA, SIGNAL =   1; EXPRESSED IN BT474, SIGNAL = 1.8; EXPRESSED IN BONE MARROW, SIGNAL = 1.7; EXPRESSED IN LUNG, SIGNAL = 1.1; EXPRESSED IN BRAIN, SIGNAL = 1.4
gggatggccacaagttctacacggccctgcaggacctgagtctttagtcagttgggaagctctaccttctgccccagcccaagagggttggggcagtcacggatgtagcagttttcgtaattcacagggatccatgatgagcattgagcaggcttgattctcacacacatacgcagtggcctggtcttcctgccttcggagggtactcaggaaaggcagccagtgggacaggaaactcgaggggtccccatcagccagaatcagcaccatgttaggaatgtagacagggtggacgcactgcaccagaactttggtgtccttggcctggcggtctccacagatggtgatctgcctgagggtctg

SEQ ID NO: 2821 - DNA, 392 bp, Homo sapiens
  MAP TO AL021026.1; EXPRESSED IN BT474, SIGNAL = 1.3; EXPRESSED IN FETAL LIVER, SIGNAL = 1.1; EXPRESSED IN BONE MARROW, SIGNAL = 1.4; EXPRESSED IN LUNG, SIGNAL = 1.4; EXPRESSED IN BRAIN, SIGNAL = 1.1; EXPRESSED IN HBL100, SIGNAL = 2.7; EXPRESSED IN PLACENTA, SIGNAL = 1.3; EXPRESSED IN HELA, SIGNAL = 1.2; EXPRESSED IN ADULT LIVER, SIGNAL = 1.4; EXPRESSED IN HEART, SIGNAL = 1.1
ttatgaacctgggccatctgcttccagagttggcgttcttaaccactttagtatgtctataaattagttttagtctcatttaggaaaggaattgccatgagagaagagagtcagtggcactcatgctgatgtttaactgcttgatgttatttcaatgttatgggctgttgcaggtatttcttggaaatgagctatttacagcaagggtgtttgcctctcattgctgtagttccctgagaaaagagcctgtgttcaatgatgagctcccatcccgcatcctgtgtggcactctgtccatcaagcccagtgtgaaggagttcacggaaacctcagctgtgtttgaggatgggaccatgtttgaggctatcgactctgtcatctttgcaacaggc

SEQ ID NO: 2822 - DNA, 1960 bp, Homo sapiens
  MAP TO AC004505.1; EXPRESSED IN BRAIN, SIGNAL = 1.3; EXPRESSED IN BONE MARROW, SIGNAL = 0.96; EXPRESSED IN HELA, SIGNAL = 1.4; EXPRESSED IN PLACENTA, SIGNAL = 0.93; EXPRESSED IN HEART, SIGNAL = 1.6; EXPRESSED IN BT474, SIGNAL =   1; EXPRESSED IN FETAL LIVER, SIGNAL = 1.3
cacatgaatttagcaactatcccatcacaggaatattagaaagatattccttaaacctgaaaattattaacttgggatcctaggcatttataaagaattatgactcctgccaattgaaaaaaaaaaaaaaaaaaacactagatggcacgaaagacaccatttggcttttcctgtgtccactgctcacagtgcataaaaatgtagattaaatcaccgttcagttcggcatgggaagcacttagtctatgtgaggaaattggaatggaatatggagcctgttactgtcgtttcatctcttcttcttctcttgcaggctacgcccaggaggaacagctgaaagaagaggaggaaataaaagaagaggaggaggaggaggacagcggttcagtagctcaactgcagggtggcaatgacacagggacggacgaggagctagaaacgggcccagagcaaaaaggctgcttcagctaccagaactctccaggaagtcatttgtccaatcaggatgccgagaacgagtctctgctgagtgacgccagtgatcaggtgtcggacatcaagagtgtctgcggcagagatgcctcagacaagaaagcacacactcacgtcaggcttccaaacgaagcacacaattgcatggataaaatgaccgctgtctacgccaacatcctgtcggattcctactggtcaggcctgggccttggcttcaagctgtccaatagtgagaggaggaactgtgacacccgaaacggcagcaacaagagtgattttgattggcaccaagacgctctgtccaaaagcctgcagcagaacttgccttctcggtccgtctcgaaacccagcctgttcagctcggtgcagttgtaccgacagagcagcaagatgtgcgggactgtgttcacaggggccagcagattccgatgccgacagtgcagcgcggcctatgacaccctagtcgagctgactgtgcacatgaatgaaacgggccactatcaagatgacaaccgcaaaaaggacaagctcagacccacgagctattcaaagcccaggaaaagggctttccaggatatggacaaagaggatgctcaaaaggttctgaaatgtatgttttgtggcgactccttcgattccctccaagatttgagcgtccacatgattaaaacaaaacattaccaaaaagtgcctttgaaggagccagtcccaaccatttcctcgaaaatggtcaccccggctaagaaacgcgtttttgatgtcaatcggccgtgttcccccgattcaaccacaggatcttttgcagattctttttcttctcagaagaacgccaacttgcagttgtcctccaacaaccgctatggctaccaaaatggagccagctacacctggcagtttgaggcctgcaagtcccagatcttaaagtgcatggagtgtgggagctcccatgacaccttgcagcagctcaccacccacatgatggtcacaggtcactttctcaaggtcaccagctctgcctccaagaaagggaagcagctggtattagacccgttagcagtggagaaaatgcagtcgttgtctgaggccccaaacagtgattctctggctcccaagccatccagtaactcagcatcagattgtacagcctctacaactgagttaaagaaagagagtaaaaaagaaaggccagaggaaaccagcaaggatgagaaagtcgtgaaaagcgaggactatgaagatcctctacaaaaacctttagaccctacaatcaaatatcaatacctaagggaggaagacttggaagatggctcaaagggtggaggggacattttgaaatctttggaaaatactgtcaccacagccatcaacaaagcccaaaacggggcccccagctggagtgcctaccccagcatccacgcagcctaccagctgtctgagggcaccaagccgcctttgcctatgggatccc

SEQ ID NO: 2823 - DNA, 462 bp, Homo sapiens
  MAP TO AP000065.1; EXPRESSED IN LUNG, SIGNAL = 6.3; EXPRESSED IN BONE MARROW, SIGNAL = 7.8; EXPRESSED IN BRAIN, SIGNAL = 6.5; EXPRESSED IN HELA, SIGNAL = 6.8; EXPRESSED IN PLACENTA, SIGNAL = 6.5; EXPRESSED IN HBL100, SIGNAL = 9.3; EXPRESSED IN HEART, SIGNAL = 8.4; EXPRESSED IN BT474, SIGNAL = 6.7; EXPRESSED IN FETAL LIVER, SIGNAL = 7.6; EXPRESSED IN ADULT LIVER, SIGNAL =   9
agaggtcaaaggtcaagcccatgatttacaaatcttattggaagtcatataaactgcttacctgaaataaaaccccccatcatcagtccccaccctcctttccctagaaagggagtggatttaagttcatttcttctttttcaccacagtaactggaagacagtcagagaaggtagtcggggagggaggaacattctgattcatcttaaaaaataaagatctgcttaagtatcatttgcagtcatatcaagtttttttcaattctccttagtggccgtctccaagggttcatcttctaagccaaagcttagcttgtcagctagcccctcaaactgcttgctcacactgcccgcagagtccatgaacatgttaggaatgtctttgccaaagtaaatcttgctgttggaagcaatggccttgtacttcatcagctgcagatattcaggggttagcttcagctgt

SEQ ID NO: 2824 - DNA, 358 bp, Homo sapiens
  MAP TO AL021154.1; EXPRESSED IN HELA, SIGNAL = 1.6; EXPRESSED IN HEART, SIGNAL = 1.4; EXPRESSED IN FETAL LIVER, SIGNAL =   1; EXPRESSED IN ADULT LIVER, SIGNAL = 1.3; EXPRESSED IN BT474, SIGNAL = 1.9; EXPRESSED IN LUNG, SIGNAL = 2.2; EXPRESSED IN BRAIN, SIGNAL = 1.2; EXPRESSED IN PLACENTA, SIGNAL = 2.1; EXPRESSED IN HBL100, SIGNAL = 1.4; EXPRESSED IN BONE MARROW, SIGNAL = 1.5
ctctgccattcatttgatgcaaccatgggcaagtcacttgtccctctctggcctcagtttccctaaaccgagtgagtggcaatttttcaaaacgtctgccaactccaggacttgccgtttaaacctccctctccaagagaggagatactcacctggaggtgtcaggacacggccgagtcagtggcaaaagctccttttgtcgttggagatgacaagttccggagtgagctcggctgtctgattagaggaaaagagggaagagttacgcgaggcaatcgggagctccgagggtcccgcagcatccttgcctgggtgttcagccctgtcccgacttcgaggcttacctggatgggaaggt

SEQ ID NO: 2825 - DNA, 1944 bp, Homo sapiens
  MAP TO AL008720.1; EXPRESSED IN BT474, SIGNAL = 1.1; EXPRESSED IN PLACENTA, SIGNAL = 0.89; EXPRESSED IN HBL100, SIGNAL = 1.1; EXPRESSED IN HELA, SIGNAL =   1; EXPRESSED IN HEART, SIGNAL = 1.8; EXPRESSED IN FETAL LIVER, SIGNAL = 1.2
aggtgagaccctcttcatgtgagaattcagtgcagtatgacctcaaaactgcaggttgtcagtactgtgtgcaggaccatctgcttagtgctgggtggcgtgtcagaaagccagtaataacacccatctcacggcagtgttgtgagaatgaagccagttaatacaggagttgcacttagaatattagcaccttcattaggcatcagtaaaatctagctgtcatcatcatcgtcatcttcatcctcctccttttcatcaccatcatcatcatcaccaacctcctcatcatcaccatcatcaccatcctcttcctcgttatcatcattaccatcactaccatcgccattatcaccatcatcaccatcgccaacctcctcttcatcatcgtcatcttcatcgccaacatcatcatcttcatcaccatcactaccatcaccattaacaccatcatcaccatcaccaacctcctcttcatcatcgtcatcttcatcgccaacatcatcatcttcatcaccatcatcgccatcctcctcctcatcaccatcattaccattgtcaccatatcatcctcattctcctcatcctcctcatcatcattatcataatcatcatcattgtcatcatcattatcatcctctccatcatcaccgtcatcatcattttcatcaccatcatcatcatcaccatcattaccatcaccatcctcatcatgatcatcaccgtcattaccattaccaccatatcatcctcattctcctcattatcattttcatcatcaccactatcaccatcattctcctcgtcctcctccccatcattatcataatcatcatcatcgtcatcattattatcatcctctccatcaccaccatcatcttcatcttcatcaccatcatcatcctcatggttgtcctcaagtgtggaagaccctctccaaggctgtctgtcctctcttcctcccctgcctgctgacatgttcccagtcacatcaagggatagaatctgattccctctccttgaagctgggctggccttaatggctcagctgaacaacagggtttagaggaaggtaccttctggggatcctgtgcctaggtctcttgggatgccccctggaggacctcagctgccccagcaggagaagccttggctacagagccccaagtgaccatgtgaggctactgctccagctgagttcccagctgacagcatccacccccagccacgtgaggagccaccttggatggccagcccagggctcttcagccatcttcatccccaatcttttggctgcacctgcatgggagtcactggggcagcccggaggactgtgagcagtaaggatttaaccaagctcttgggtggttttagctgctgagagctatgaatgtgagctcatgccagagctggattcaaggctgttcctgtcactccctggctgtgtcacttctacttcttggacctccatttcctcgcctatgaaacagagctgttcagggtctcaggctgaagtagctgctgtgaagctttcctgtaagcgtgtggatggaacaaatgcatgcatgcagctattgccatggttatcatgtttcaggaatcaggcgtgagggtaaaggcagacacagccacatcatactcttggaggatggaaggtggccttttcccagcatggggctgggagaggtggtcagagagatttgccagagggcctggcattacccatcctgggcatttcagcctctacagctaacacaggatgcagatttttcaaatagggatggatacataacaagtagtgattgcctaaaatgtgagaggctccacacaaacacatcagcgcagccacacagtcactccttcagtccctgttggttttgttccattgaggctgaatggcctcagggccccacagctccaccgtggaggagctgagattccaaccct

SEQ ID NO: 2826 - DNA, 436 bp, Homo sapiens
  MAP TO AJ229041.1; EXPRESSED IN BONE MARROW, SIGNAL = 3.6; EXPRESSED IN HELA, SIGNAL = 2.8; EXPRESSED IN HEART, SIGNAL = 2.8; EXPRESSED IN FETAL LIVER, SIGNAL = 2.8; EXPRESSED IN ADULT LIVER, SIGNAL = 3.3; EXPRESSED IN LUNG, SIGNAL = 2.9; EXPRESSED IN BRAIN, SIGNAL = 2.6; EXPRESSED IN PLACENTA, SIGNAL = 2.6; EXPRESSED IN HBL100, SIGNAL = 2.8; EXPRESSED IN BT474, SIGNAL = 2.6
ctgaaaggagatggtggctgattagatacaggaataaagaagagttaaagatggctatgagatttcaaacccaaatgaatgggataatatggtaacattaattgaaagaacttggcaaagggatcaattttttttctttttagtggaatcaggatggaaattaatgtctttaaatttttaaaatgcaagatggagaagatacaattagaaactgaaaattttgtcctggaactctatagagaattcagttggagtcatcatcacgtggctaaggtttggccctatgaaagatggaatttcgcctggaaaagctgtcaagaaagtcagggaaagcactgtggtgaagagcagcatttggtgatgggaagaacagagaatggtcttagaaagagttctcctagaagccagaagaggagggcgcaatttcagaagaaaa

SEQ ID NO: 2827 - DNA, 417 bp, Homo sapiens
  MAP TO AL021327.1; EXPRESSED IN HELA, SIGNAL = 1.1; EXPRESSED IN HEART, SIGNAL =   1; EXPRESSED IN FETAL LIVER, SIGNAL = 1.3; EXPRESSED IN LUNG, SIGNAL = 1.3; EXPRESSED IN BONE MARROW, SIGNAL = 1.6; EXPRESSED IN BRAIN, SIGNAL = 1.3; EXPRESSED IN PLACENTA, SIGNAL = 1.3; EXPRESSED IN HBL100, SIGNAL = 1.3; EXPRESSED IN ADULT LIVER, SIGNAL = 1.3; EXPRESSED IN BT474, SIGNAL = 1.1
gaagcccacaaatatccagccacataaaacttttaatgcagacatttcaaacaccaccagatttttgtcacttctttaaaggagggaaatttttgtgttgaacaataggaaaccatgaacagctggtttcgactgaagcctagttttcatattttaaacatgatcatttaaggtcagagaaaccaaaacttgataaattagtgttaatttttgaaaagaagaaagacagcttgttttgagaacttaccatgagccaatacctctattaagtactttccatgaacattcacaatgtcctgtgagatgtgccctctgattatgcccaagcagaggagaaactggcctgccaattggtggagtgcctgctgggtcacagtaaaggatgatgctggtgttagaatctcacccacctgcttc

SEQ ID NO: 2828 - DNA, 459 bp, Homo sapiens; identical to SEQ ID NO: 1527
  MAP TO AL109823.11; EXPRESSED IN PLACENTA, SIGNAL =  16; EXPRESSED IN HEART, SIGNAL = 2.6; EXPRESSED IN HBL100, SIGNAL = 0.96; EXPRESSED IN HELA, SIGNAL =   1; EXPRESSED IN ADULT LIVER, SIGNAL = 1.2; EXPRESSED IN FETAL LIVER, SIGNAL = 2.4; EXPRESSED IN LUNG, SIGNAL =  12; EXPRESSED IN BONE MARROW, SIGNAL =   1

SEQ ID NO: 2829 - DNA, 432 bp, Homo sapiens
  MAP TO AL031662.24; EXPRESSED IN PLACENTA, SIGNAL = 2.1; EXPRESSED IN ADULT LIVER, SIGNAL = 2.1; EXPRESSED IN BT474, SIGNAL = 2.4; EXPRESSED IN HELA, SIGNAL = 1.9; EXPRESSED IN HBL100, SIGNAL = 2.1; EXPRESSED IN HEART, SIGNAL = 1.9; EXPRESSED IN FETAL LIVER, SIGNAL =   2; EXPRESSED IN BRAIN, SIGNAL = 2.3; EXPRESSED IN LUNG, SIGNAL = 1.7; EXPRESSED IN BONE MARROW, SIGNAL = 2.3
ttcttcccaaagcaatttcctaaccagaaacttgagctcaagaggtccatgaactcaccctaaatcatacagtgactgtctcccaaaagttagcccagaaagacctttgactacatctgtctccatgaaaccaatagcttggggctcattcctatcactctttggtaaccatgccccctcctgccaactgcagagggctgtcagggtgagggctgttggggagaagtagggtggagtcagtcatgtcagggatggaggtctcttcctcagagctggcggatgacatctgctgcctactcaaggagccctgtgtcctgcagagggctggcccgctccctggcaaggatatacccctacctgtgactgtgcagaggacaccactcaactggaaagagctggacaggtaaagttggggactcctggaaacatgaa

SEQ ID NO: 2830 - DNA, 431 bp, Homo sapiens
  MAP TO AL034377.1; EXPRESSED IN BONE MARROW, SIGNAL = 0.99; EXPRESSED IN HBL100, SIGNAL = 0.94; EXPRESSED IN HEART, SIGNAL = 1.1; EXPRESSED IN FETAL LIVER, SIGNAL = 0.98; EXPRESSED IN BRAIN, SIGNAL = 0.96
atggtgttcctttaaaatgaggtatattaacccacattgattaaaacaatcttttactcctggacagaaaagtctgccatggaggcagagaggagagccagtggggcccattgtttacaggtgtttaccttgtcaggtcattatattcttccagttccatttccttctcatgtctcgcttttcacttcccttcaattctcatgtctttccactcagtgaacatataaacagttggacaatctttagcaaaataacacttaaaacatgtgaaaactattttattacctcttctttgttgatcaagttgaatacatcagctcctttaaactttttgcttggccagttttccaaacctttaatcatcactattttagaacctacgagagttttatcatatgccatttaagtgtggagcccaaggaagacattca

SEQ ID NO: 2831 - DNA, 492 bp, Homo sapiens
  MAP TO AC007912.2; EXPRESSED IN HBL100, SIGNAL = 0.67; EXPRESSED IN PLACENTA, SIGNAL = 0.64; EXPRESSED IN ADULT LIVER, SIGNAL = 0.97; EXPRESSED IN HEART, SIGNAL = 0.88
tcacggaggtgagaaaacagctggagctttgtgaatagcaagtgactgacaaccagtgctcaaaggatgggtaagggaatgaatctggaaagataatttgaaggtaataggtagctatgaaagaatgtcatgaaatgtcatagtcttgttctcgaaagaccactgtggggttgaatggaggatgactggggctggtaaacaaatccttctctgacccccttggtgaactttgtggagaatctcagagccagaagctcttcagtgggccagcaaatcagctttctgaacaaaacttacctgttgtgtactgtttggcagttcccatggtgtaactattcccagcatggctgtcttcaagctaccaacacgatgtccctgaatgcagaggtaaaatgaaatggcttgcctggcatcactcctgttagggaaagagatgtgcatgcacttagtaagtgtggtggaaaatattagagccaaaaagccttcattctg

SEQ ID NO: 2832 - DNA, 427 bp, Homo sapiens
  MAP TO AC007095.2; EXPRESSED IN LUNG, SIGNAL =  32; EXPRESSED IN BONE MARROW, SIGNAL =  28; EXPRESSED IN HELA, SIGNAL =  27; EXPRESSED IN PLACENTA, SIGNAL =  30; EXPRESSED IN BT474, SIGNAL =  33; EXPRESSED IN BRAIN, SIGNAL =  15; EXPRESSED IN HEART, SIGNAL =  12; EXPRESSED IN HBL100, SIGNAL =  39; EXPRESSED IN ADULT LIVER, SIGNAL =   7; EXPRESSED IN FETAL LIVER, SIGNAL =  28
ccagcagccctcttgtctactgctttgatgacacccacagcaattgtctgtttcatatgacaaacagcaaaatgacccaaagaaggacagtcagagaagctctcgacccacctgggcttgacagaaacaatttcagtgacaacagcttcaccctatttcaagaatgtagggccatcttccagcttcttaccagaatggtgatcaatctttcccctcaactcagcaaaactgcaagcaatgtgaactgtgtgacaatccagaatagcggcatagccaccattgatttggtctggatggtggaggataataacctgaccagtgaagctagttgctcccactgatgggtcatttttgctgtcaccagcaacgttgccatgacagacatttttgacagatatgttcttggcgttgagtcccacattgtccc

SEQ ID NO: 2833 - DNA, 388 bp, Homo sapiens
  MAP TO AL031665.18; EXPRESSED IN BRAIN, SIGNAL =  18; EXPRESSED IN BONE MARROW, SIGNAL =  26; EXPRESSED IN HEART, SIGNAL =  43; EXPRESSED IN FETAL LIVER, SIGNAL =  16; EXPRESSED IN ADULT LIVER, SIGNAL = 5.7; EXPRESSED IN BT474, SIGNAL =  45; EXPRESSED IN LUNG, SIGNAL =  35; EXPRESSED IN PLACENTA, SIGNAL =  30; EXPRESSED IN HELA, SIGNAL =  25; EXPRESSED IN HBL100, SIGNAL =  36
tgactccgtctccagaatccatgacaatgccagtggtgcgcccagaggcatagaagtatggcctggactgccacgtacatgtccagggtattgaaggtctcaaacatgatctgagccatcttctttctgttggccttggggttcagggggccctcagtcagcagcaccaggtgctcctccaggaacacatgcagcttgttgtagggtgtggtgccagatcttctccatgccttcccagctggtgaaaatcctgtgctcgatggggtacttcatcgtcaggatgccgtgcttgctctgggccttgtcgcccaggtagaagaccttctggcccatccccaccatcatgccctggtgttgggggcacctgacagtggagggaaacatggtt

SEQ ID NO: 2834 - DNA, 414 bp, Homo sapiens
  MAP TO AL049553.15; EXPRESSED IN BONE MARROW, SIGNAL = 1.1; EXPRESSED IN HELA, SIGNAL =   1; EXPRESSED IN HEART, SIGNAL = 1.4; EXPRESSED IN PLACENTA, SIGNAL = 0.97; EXPRESSED IN HBL100, SIGNAL = 0.97; EXPRESSED IN ADULT LIVER, SIGNAL = 1.1; EXPRESSED IN BT474, SIGNAL = 1.2; EXPRESSED IN FETAL LIVER, SIGNAL = 1.2; EXPRESSED IN BRAIN, SIGNAL = 1.3
gaattgaacaaccggcattccatttttcccctcagccgtccatgttttcaggtgaatgagcccatagcctccagcccttccccacagagttaattttcctgctatttccccagcccccatctcctgttctctgcctccatgctgcggtgcatcgtgagtcctcatctcctgctgcctcttcttaagtgctgagcctaggcaaggtgagggtaggaggggcctgagcaaggctgggctgggggcttacctggggtcgagggtgccctgttacaaggcactgcagcatgagggtgtccccctcccggatggtgtagacacgctcgctgatattgtcctctttcaccacacatgcctggcccgcatgcacgatctgcgcctgggctggagctggcaggagaggatggaggaggaggt

SEQ ID NO: 2835 - DNA, 408 bp, Homo sapiens
  MAP TO AL109897.9; EXPRESSED IN HEART, SIGNAL = 0.99; EXPRESSED IN BT474, SIGNAL = 1.1; EXPRESSED IN ADULT LIVER, SIGNAL = 0.96; EXPRESSED IN LUNG, SIGNAL = 0.96
ttcctggtattttgatgctggattatttttactagtctcatattcacattttattttcctttttatcttttccccctattttctattgttacaggaaaggggtcctgatccagaccccaagagagagggttcttggatctcacacaagaaagaatttcagacgagtccataaagtgaaaggaagtttatttagaaagtaaaggaataaagaatagctcctccacagacagagcagccccaaaggctgctggctgcccatttttatgtttatttcttgattatactaccagagatctctcttgttgccatcttggttttgatgggttttagccagcttctttactgcagcccgttttatcagcagggtctttatgacctgtgtcttctgctgacctcctctctcatcct

SEQ ID NO: 2836 - DNA, 448 bp, Homo sapiens
  MAP TO AL031675.1; EXPRESSED IN PLACENTA, SIGNAL = 1.6; EXPRESSED IN HBL100, SIGNAL = 1.6; EXPRESSED IN ADULT LIVER, SIGNAL = 1.5; EXPRESSED IN BT474, SIGNAL = 1.6; EXPRESSED IN BRAIN, SIGNAL = 1.9; EXPRESSED IN HELA, SIGNAL = 1.5; EXPRESSED IN HEART, SIGNAL = 1.6; EXPRESSED IN FETAL LIVER, SIGNAL = 1.8; EXPRESSED IN LUNG, SIGNAL = 1.3; EXPRESSED IN BONE MARROW, SIGNAL = 1.9
tcttttaaatgttgcaaatatcaggtaataaaatttccacataagaaaatattatcatgattgtttattatcatcaatgttttttaacctcgtgatagcaacccaacctccagacagagcctgggggaaagggtcaaatttcatctttagaggtgtacttttgcatttctaagccaattaggtatcagcaaatgtctcagcaagtcttatcagggggacagtgtggtggttggaatgactcgtgtatggaaatggcactccttggtgccattgtcatgatagcgagtgagttctcatgtgatatggttgtttaaaagtgtgttttagcacctccccccttgctctttctcttgctcctgctcctgatttggaagatgcctgctccccctttgccttccgccatgattggaagcttccagaggcctccccggaagcagaaaccactatg

SEQ ID NO: 2837 - DNA, 1965 bp, Homo sapiens
  MAP TO AL021579.1; EXPRESSED IN HBL100, SIGNAL = 4.9; EXPRESSED IN HEART, SIGNAL = 1.3; EXPRESSED IN BT474, SIGNAL = 3.2; EXPRESSED IN BRAIN, SIGNAL = 1.7; EXPRESSED IN BONE MARROW, SIGNAL = 2.3; EXPRESSED IN PLACENTA, SIGNAL = 3.4; EXPRESSED IN HELA, SIGNAL = 3.9; EXPRESSED IN ADULT LIVER, SIGNAL = 2.2; EXPRESSED IN FETAL LIVER, SIGNAL = 1.9; EXPRESSED IN LUNG, SIGNAL = 4.3
gttccaccaccaattcaaccagaagcagagaaatttccttcaacagaaactgcaactttggctcaaaaaccatctcaggatactgagaagcctctggaacctgtgagtactgttcaggtagagcctgcagttaagactgtaaaccaacagactatggcagcaccagtagtcaaagaagaaaaacaacctgagaaagtcatcagcaaagaccttgttatagagaggcctcgaccagattcaagaccagcagttaaaaaagaatcaactttgcctcccaggacctattggaaagaagctagagagagagattggtttccagatcaaggatacagaggtcgaggccgaggtgaatattactccagaggtcgaagctatagaggttcttatggagggcgtggcaggggtggtaggggacacactcgagattatcctcagtatagagacaataagccaagagcagagcatataccctcagggcctctcagacagcgagaagaaagtgaaacacggagtgagagctctgattttgaagttgtccccaaaagaagacgacagcggggttcagagactgacacagacagtgaaattcatgaaagtgcaagtgacaaggacagtttaagtaaaggcaaacttcccaaaagagaggaacggcctgaaaacaaaaaacctgtaaagcctcattcttctttcaagcctgataatcatgttcgaatagataatagactgctagaaaagccttatgtaagggatgacgataaagctaaaccaggctttcttcctaaaggagagcctacaaggagaggcagagggggaacattcaggcgtggtggaagggatcctggaggccgtccatcacgcccttccactttacgaagaccagcttatcgggacaatcagtggaacccaaggcagtcagaagttcctaaaccagaagatggagagccgccaagaagacatgagcagtttattcctatagcagcagataaacgacctccaaaatttgagcgaaaatttgacccagctagagaaaggcctcgaaggcagcgtcctactcgaccaccaaggcaagacaagccacctcgatttagacggctaagagagagggaggctgcttcaaaatcaaatgaggtggtagcagtgcccacaaatggcacagttaataatgtggctcaagaaccagttaatactcttggggatatttccgggaataagacaccagatttatctaatcagaactcttcagatcaggcaaatgaagaatgggaaacagcttctgaaagcagtgatttcaatgagaggcgagagagggatgaaaaaaaaaatgctgacttgaatgcacaaacagttgtaaaggttggagagaatgttctacctccaaagagggaaattgcaaagagaagtttttctagtcagagaccagtagatcgtcagaatcgacgtggcaacaatggtccacccaaatcaggaaggaatttctcaggtcctagaaatgaaaggagaagtggcccaccatcaaaaagtgggaagagagggtgagtactttgttttaaatatagttgcttttgcacctttaaagaagctaaaagtagagttcttggttgaattatgcaaagagccagtctagataaaggaccaaaaaacattgttcttcccaaatgctttattctctgttctcaaagtgtaagggtgcttaaggaagagaggttaaggtgtcttaggagtctttgcctgctacgttacattttccagaagagttctcttggaaacttgtagctttgggaaaatgttcacatctaaggagggacatgtactgtgtccttatttggtaagttatctgatgagtagccctcccttctttctcagtttctcctaataaacctctaatgctacacaggtgtcctctgagatttaaattaatgttataaccatatactttgtcactctagagagaggcccagaaaacaa

SEQ ID NO: 2838 - DNA, 1982 bp, Homo sapiens
  MAP TO AC001226.1; EXPRESSED IN BT474, SIGNAL = 5.7; EXPRESSED IN ADULT LIVER, SIGNAL = 5.2; EXPRESSED IN BONE MARROW, SIGNAL = 5.2; EXPRESSED IN LUNG, SIGNAL = 7.1; EXPRESSED IN HELA, SIGNAL =  11; EXPRESSED IN BRAIN, SIGNAL = 7.2; EXPRESSED IN PLACENTA, SIGNAL = 6.1; EXPRESSED IN HBL100, SIGNAL = 6.1; EXPRESSED IN HEART, SIGNAL = 4.6; EXPRESSED IN FETAL LIVER, SIGNAL = 7.4
tggtggtgaggatgatgatgcaaattgcaacttgatctgtggtgatgaatatggtccagaaacaaggatgagcatgtctcaattgaatgaaaaagaaactccttttgaactcgtcgaagctctctttaagtacattgaaacccttaatattcccagagctgtgttggtatttttgcctggctggaatttgatttatactatgcagaagcatttggaaatgaatccacattttggaagccatcagtatcagattctacctctgcattctcagattccttgacaggaacagcgcaaagtgtttgatccagtaccagttggagtaaccaaggttattttgtccacaaatattgctgaaacaagcattatcataaatgatgtttatgtcgttgactcctgcaagcagaaagtgaaactctttgctactcacaacaatatgaccaactatgctacagtatggggatcaaaaacaaaccttgaacagtggaaagggcaacctggccgaatacggcctggattctgctttcacctctgcagccgagctcgttttgagagacttgaaacccacatgacaccagagatgttccaaacaccattgcatgaagttgctcttagcataaaacttccatgtctagttggaattggccagtttctggccaaagcaattgaaactctccctttggatgctgtgattgaagcagaacacactcttagagagcttgatgcattagatgccaatgatgatttgactccattgggacgaatcctggctaacctcctcattgagcctcgttttggcaaaatgatgataatggtgtgtattttctatgtgggagatgctatctgtaccattcctgctgctacctgctttccagagccttttataaatgaaggaaagtggctgggctacaaccattgaaattttgctggaaacggattttctcatcatgtagcccttttatcagtattccaagccggagatgatactagaatgggtggagaagaagcagaaatacgtttttgtgcgcacaaaagacttcatatggctacactaagaatgacttgggaagtcaaagttcagctcaaagagattctgattaattctgggtttccagaagattgtttggtgacacaagtgtttactaacactggaccagataataatttggatgttgttatctctcttcctggcctttggtgtgtaccccaatgtatgctatcataaggaaaagacaaagattctcaccactgaagggtgtaatgcacttatccacaaatcatctgttaattgtccttttagtagccaagacatgaagtacccatctcccttctttgcatttggtgaaaagattcgaactcgagccatctctgctaaaggcatgactttagtcaccccactacagttgcttctctttgcctccaagaaagtccaatctgatgggcagattgtgcttgcagatgactggattaaactgcaaatatctcatgaagctgctgcctgcatcaccgctctccaggcagccactgaggctctggttgttgaagtaaccaaacaacctgctatcatcagccagttggaccccgtaaatgaaagtatactgaacatgatccgtcaaatctctagaccctcagctgctgatatcaaccttatgattggcagtacatggtatggagatggtccaggtcctcctaagatggcccaatatgacaatggaagcggatatagaaggggaggttctagttatggcagtgaaggctatggcagtggctatagcagtggaggctatcgtagcggaggctatggtggcagctccagctcctgtcgggcaggatatggtgcaggtgttggtggaggctatagagaagtttcctgaggtggctatagaggcaactctggaggagattacagagggcctagtagaggctacagatgatctgggggattccagcgaggaggtggtaggggggcctatggaactggctac

SEQ ID NO: 2839 - DNA, 1966 bp, Homo sapiens
  MAP TO AC004776.1; EXPRESSED IN BT474, SIGNAL = 1.1; EXPRESSED IN FETAL LIVER, SIGNAL = 1.2; EXPRESSED IN BONE MARROW, SIGNAL = 1.2; EXPRESSED IN LUNG, SIGNAL =   1; EXPRESSED IN BRAIN, SIGNAL = 1.4; EXPRESSED IN HELA, SIGNAL =   1; EXPRESSED IN HBL100, SIGNAL = 1.1; EXPRESSED IN PLACENTA, SIGNAL = 1.1; EXPRESSED IN ADULT LIVER, SIGNAL = 1.2; EXPRESSED IN HEART, SIGNAL = 0.96
gaaccaagtcccagagaggcccgatagagataagtctgagaaagtctctcaactgtagtgacatctatggtggctgatgtcatgcaaggatttgaaaccatcttacttccatacctcagatcctctgtagagcgacagcagctctgagcgcaacagcctgggctctggtgcaacttggtacacacgaagaaaagtaagcaccccagaaataaaaaggaaatacaagccaaggcaattactaaatacaagttctgggcagaaagctgccctcctggttcccagacatcttcaaagtctggaagtaactgagggacagagttgctcaacagcacacccagagtgacagaggaggaaagtggtgggtctccatggtcccgaaccactaccaccaccctctgcttaactgcatcagtgggaagaactaagcgagcagtacggagctcacctatattggctgaaattctaaagagactagagtcagacgcccgggagatgtggtaggaaagccaggcattagaaccactgtcagcatcctctgctaccacttttgtgaccaagtgtccagtcctggcagagcggggcacaatttccactgggacagaaccatttctgggcaagggaaacaagataaccggataattgtcattcctatctaccacaaacaagtttatagtcactgttgcacttctgggaggaatgccaccatcccggccttctacttggaaatgaaaccccctgagctgctcaaagtcaaaggaagttttggcagtgatggccccactggatgattccactgccaccaagctagaggctgatggcccttcagagataacatccaacagctcataagagacaaggccattcttccccaggtcggggtcctgggcaaacactcggcctagagaggccccagggccattgttttcagcaacgaaaagttcctgctggggttgaggaaagtttggtgtattgtcattcacatcagcaactgacacagtgattgtccttcgggtgctaagtggcggtgagccactatctgaggccgtgatcaggacttggtattcactgatctgctcccggtccaggggcccatcaatcagcaggctgtagtagttgtcaaaggaagccgtcagctgaaaagggcctgcactagacatgccacaaatgaccctaccattagaatcgaggtcttcatcctttacactaaagagagcaatcactgtgccaggggcagcgtcctcaggtactgggttcgaaagagtcaggaagtccagttcgggggcatgatcgttcacgtcagtcacctccaccagcagtttagcggtgctagctaaaccaaagacaccttcgtccctcgcctcaatgtatgcctccaagagcgtttcaggcggacctagtgaagcagctacttgcacctccccacttttagggtgcacgtgaaagcggtgtcgcagctctgcttgcgtgctgttgcttagggagtattggacttccccattggacccttcatctggatccaaggcttgaactcggaataacacagtcccattgggtgcagtctctggaaccttggtgcggtatacggagcgctcaaatacaggcgcgttgtcatttgtgtccaccacaatgatggtgacttgtgcgtctcctgagcgggcaggtagcccgccgtcccgagctgtaagcaccagcaggtgggtggcgcgctgttcgcgatccagtgctttctccaacaccaactccgggtattcgctgccgtcaacccgcgatcccatgtccaggcgaaagtgctgactggggcttaggctgtagcttagtatcccattgcttccctcgtcgtcatcttgggcattcgggagagtaaagcgggctccgggcgtcaggaactcggggatgtgcagctgcacgtcgccggcaggaaagagaggtgagttgtcattggtgtccaggacgtgaatccgaatct

SEQ ID NO: 2840 - DNA, 1950 bp, Homo sapiens
  MAP TO AC005079.1; EXPRESSED IN BT474, SIGNAL =  90; EXPRESSED IN BONE MARROW, SIGNAL =  62; EXPRESSED IN BRAIN, SIGNAL =  48; EXPRESSED IN HEART, SIGNAL =  25; EXPRESSED IN ADULT LIVER, SIGNAL = 8.4; EXPRESSED IN FETAL LIVER, SIGNAL = 1.1e+02; EXPRESSED IN LUNG, SIGNAL = 1.4e+02; EXPRESSED IN HELA, SIGNAL = 1.3e+02; EXPRESSED IN PLACENTA, SIGNAL =  75; EXPRESSED IN HBL100, SIGNAL =  72
tggccaattgaaacaaacagttctgagaccattcttccaccactgattaagagtggggtggcaggtattagggataatattcatttagccttctgagctttctgggcagacttggtgaccttgccagctccagcagccttcttgtccactgctttgatgacacccaccgcaactgtctgtctcatatcacgaacagcaaagcgacccaaaggtggatagtctgagaagctctcaacacacatgggcttgccaggaaccatatcaacaatggcagcatcaccagacttcaagaatttagggccatcttccagctttttaccagaacggcgatcaatcttttccttcagctcagcaaacttgcatgcaatgtgagccgtgtggcaatccaatacaggggcatagccggtgcttatttggcctggatggttcaggataatcacctgagcagtgaagcccgctgcttccattggtgggtcatttttgctgtcaccagcgacgttgccacgacgaacatccttgacagacacattcttgacattgaagcccacattgtccccaggaagagcttcactcaaagcttcatggtgcatttcgacagattttacttccgttgtaacgttgactggagcaaaggtgaccaccataccgggtttgagaacaccagtctccactcggccaacaggaacagtaccaataccaccaattttgtagacatcctggagaggcaggcgcaagggcttgtcagttggatgagttggtggtaggatgcagtccagagcctcaagcagcgtggttccactggcattgccatccttacgggtgactttccatcccttgaaccaaggcatgttagcacttggctccagcatgttgtcaccattccaaccagaaattggcacaaatgctactgtgtcggggttgtagccaattttcttaatgtaagtgctgacttccttaacgatttcctcatatctcttctggctgtagggtggctcagtggaatccattttgttaacaccgacaattagttgtttcacacccagtgtgtaagccagaagggcatgctctcgggtctgcccattcttggagataccagcttcaaattcaccaacaccagcagcaacaatcaggacagcacagtcagcctgagatgtccctgtaatcatgtttttgatgaagtccctgtgtcctggggcatcaatgatagtcacatagtacttgctggtctcaaatttccacaaggagatatcaatggtgataccacgttcacgctcagctttcagtttatccaagacccaggcatacttgaaggagccctttcccatctcagcagcctccttctcaaatttttcaatggttcttttgtcgatgccaccgcatttatagatcagatggccagtagtggtggacttgcctgaatctacgtgtccaatgacgacaatgttgatatgagtcttttcctttcccattttggcttttaggggtagttttcacgacacctgtgttctggcggcaaacccgttgcgaaaaaggtcaaaattttgattcttttaaaaatttccttgtgtttttattgttgcatttttgagatctttttatattctggatacaagtcttttgtcatatatgtaattcacagatggttttttcctagtttgtggcttttctttgcattattttgacgatgtcatttgcaaagcaaattcttcatttttaatgaattctaatttaccaatttttttccttgaaagtattgttttggtgttattaatataagaatttttgcctaatttagggatgtaataattttctcctatattttcctttaaaagtttatagttttacattttatacttagctctatgattcattttgagttaattttgttaaaaagactatcctttctccgctgaattaccttttgtatgtttttagaaattcagttgacca

SEQ ID NO: 2841 - DNA, 394 bp, Homo sapiens
  MAP TO AL118522.7; EXPRESSED IN BRAIN, SIGNAL = 4.5; EXPRESSED IN PLACENTA, SIGNAL = 4.8; EXPRESSED IN HEART, SIGNAL = 4.9; EXPRESSED IN HBL100, SIGNAL = 4.5; EXPRESSED IN HELA, SIGNAL = 5.6; EXPRESSED IN BT474, SIGNAL = 4.7; EXPRESSED IN FETAL LIVER, SIGNAL = 4.8; EXPRESSED IN ADULT LIVER, SIGNAL =   6; EXPRESSED IN BONE MARROW, SIGNAL = 5.4; EXPRESSED IN LUNG, SIGNAL = 5.6
tattgcagtggcaacagggaactaatacagtgggtgtgaggattaaatgaaccagtagatgtggagccggagagctgagcttggccctgaggatttgtttagaagtgtgagccactgttacagatatcacaagtgagcagacgcccgggcctgtagggatgtccaacccagtgcctgtccgactcagttcccaggcagaattgggccccagtacctggtagagagggcctggaccccttcttctcccgagaagcaggatgaagctcagtgggctggaagcagcgtgctggtgccactacctcagcctgatttttagcaacagcatcagtaagtttaatattccgatttctgctcagacttcagaggagcagaaacctgggctgaagtctcagag

SEQ ID NO: 2842 - DNA, 417 bp, Homo sapiens
  MAP TO AL049629.14; EXPRESSED IN BT474, SIGNAL = 7.4; EXPRESSED IN BRAIN, SIGNAL = 7.4; EXPRESSED IN BONE MARROW, SIGNAL = 7.2; EXPRESSED IN HEART, SIGNAL = 7.6; EXPRESSED IN PLACENTA, SIGNAL =  18; EXPRESSED IN ADULT LIVER, SIGNAL =  12; EXPRESSED IN FETAL LIVER, SIGNAL = 8.2; EXPRESSED IN LUNG, SIGNAL =  10; EXPRESSED IN HELA, SIGNAL =  13; EXPRESSED IN HBL100, SIGNAL = 6.9
agatagaggggctctgggagactttgaagaccagtcctgtttgcagggaagccccacttgaaggaagaagtctaagagtgaagtaggtgtgacttgaactagattgcatgcttcctcctttgctcttgggaagaccagctttgcagtgacagcttgagtgggttctctgcagccctcagattatttttcctctggctccttggatgtagtcagttagcatcattagtacatctttggagggtggggcaggagtatatgagcatcctctctcacatggaacgctttcataaacttcagggatcccgtgttgccatggaggcatgccaaatgttccatatgtgggtgtcagtcagggacaacaagatccttaatgcagagctagaggacttctggcagggaagtggggaagtgttccag

SEQ ID NO: 2843 - DNA, 439 bp, Homo sapiens
  MAP TO AL034412.1; EXPRESSED IN PLACENTA, SIGNAL = 1.3; EXPRESSED IN ADULT LIVER, SIGNAL =   1; EXPRESSED IN BT474, SIGNAL = 1.9; EXPRESSED IN HELA, SIGNAL =   1; EXPRESSED IN HBL100, SIGNAL = 1.3; EXPRESSED IN HEART, SIGNAL = 0.96; EXPRESSED IN BRAIN, SIGNAL = 1.6; EXPRESSED IN LUNG, SIGNAL = 1.3; EXPRESSED IN BONE MARROW, SIGNAL = 1.8
ccaagagggtgtccattcacagcctccattgaagtagtttactccctaagaggcccaggctttggaaataagtagatttgtgctttaagctccctttgccccttgctagctgagtaagctactccgctatttccctgagccccagagtgtagagcatcagaagtagtgcacaggtttgttgtgtgagataacacatgtaaagcacatgctgtgggacctggagtaatggtgcttaacacacttgcattcccttccaaaatccctttaggaacagacttcttcagtttagtcctaaagcctgtagatccatgctaagtgatatgactttttttcacatcagattaagcaaaacactgatgatggtgactgtcgcttattgtgcagttaccatgttctggacaggcactgttgtaagggctctacctgcatcgacccattt

SEQ ID NO: 2844 - DNA, 414 bp, Homo sapiens
  MAP TO AC007255.2; EXPRESSED IN PLACENTA, SIGNAL =  11; EXPRESSED IN HBL100, SIGNAL =   7; EXPRESSED IN HEART, SIGNAL = 6.7; EXPRESSED IN BT474, SIGNAL = 6.1; EXPRESSED IN BRAIN, SIGNAL = 5.9; EXPRESSED IN ADULT LIVER, SIGNAL =  15; EXPRESSED IN FETAL LIVER, SIGNAL = 7.9; EXPRESSED IN LUNG, SIGNAL = 8.1; EXPRESSED IN BONE MARROW, SIGNAL = 7.9; EXPRESSED IN HELA, SIGNAL =   5
cacacctccaatctcagtgctttaggaggaggccaaggcaggaggatcgcttgagcccaggagttagagaccagcctgggcaacagcaagaccccatctctaccaaaaaaaaaaaaaaaaaaaaaaaaaaaagaagtcaggcatggtagtgcacacctgtagtcccagctactcagggggctgaggtgggaggatcacttgagtccaggagtttgatgatgcagtgagctatgattatgccactgcactctagcctcaatgtggcactgattatcacaggtgagttgatcgctggggtcatgagccatgatccaagaagcatggcgtcgccaaaggtcagccttagggtcatgagtgcttcctcatggagccaacctgaatcccgaccagagatgggttctctaggagggatgc

SEQ ID NO: 2845 - DNA, 433 bp, Homo sapiens
  MAP TO AC007066.4; EXPRESSED IN HELA, SIGNAL = 5.9; EXPRESSED IN PLACENTA, SIGNAL = 5.3; EXPRESSED IN HBL100, SIGNAL = 5.9; EXPRESSED IN HEART, SIGNAL = 4.6; EXPRESSED IN ADULT LIVER, SIGNAL = 5.9; EXPRESSED IN BT474, SIGNAL =  13; EXPRESSED IN BONE MARROW, SIGNAL = 5.4; EXPRESSED IN BRAIN, SIGNAL =   5; EXPRESSED IN FETAL LIVER, SIGNAL = 5.7; EXPRESSED IN LUNG, SIGNAL = 5.7
aataagattctcctgcccccatgtttgctgggcttttgtaattgtctctgtgctggggatcaggatcagcctcgggtgaaagcttaaggttttctcaggtcttttcttagcctgtgtctttccctggttatatgcagtagctttctactttcccctgcctaagtgattgcttttgaatatcctaatccttcaatatctgactcataaatggagtaaaagggaagcaaacaaacaaaacaggtgctattcttttaaaacccttggaaagaggttcagctggtggggggtcaaaacagtggcaacctgcctctgcacctgcacttcagtcatcaacaaccagagtgtcgacagccagtatttggaggacaaagttcgtatcgcccacccagcctccagcaagccgcaccaggaatgtggatacagctgcgtgcta

SEQ ID NO: 2846 - DNA, 421 bp, Homo sapiens
  MAP TO AC007114.7; EXPRESSED IN FETAL LIVER, SIGNAL = 4.5; EXPRESSED IN LUNG, SIGNAL = 4.4; EXPRESSED IN HELA, SIGNAL = 4.6; EXPRESSED IN PLACENTA, SIGNAL = 4.5; EXPRESSED IN BT474, SIGNAL = 3.8; EXPRESSED IN ADULT LIVER, SIGNAL = 4.6; EXPRESSED IN BONE MARROW, SIGNAL = 4.4; EXPRESSED IN BRAIN, SIGNAL = 3.8; EXPRESSED IN HEART, SIGNAL = 3.5; EXPRESSED IN HBL100, SIGNAL =   4
gaaagagagagagcatgggctctagccacagactacatggttcaaatctcatgagtgccaccttgtaactgtgtcatattgggaaagttatttaaaccttctttgcttcatgttctccatctgtaaaatgggtagaataacagtcccagctcagaggtatatgattaagtgaacaaacagctataaaacacttagagcaagtgcctggcatttagcaagcactcaataagcacagctgttactattcctaccgcagcagcatgcctattgtcttccccactgcttagacctttctgtggtagtggaatttgcaggaatcctcatctgcactatctttcattgcatctcctcctggccactgttgctcatatctgccatatggatgagaaaggagtgtgatggtgaccagcgttttctggag

SEQ ID NO: 2847 - DNA, 1961 bp, Homo sapiens
  MAP TO AC003002.1; EXPRESSED IN PLACENTA, SIGNAL = 1.6; EXPRESSED IN HBL100, SIGNAL = 0.95; EXPRESSED IN BT474, SIGNAL = 1.6; EXPRESSED IN BONE MARROW, SIGNAL = 1.1; EXPRESSED IN HEART, SIGNAL = 1.6; EXPRESSED IN FETAL LIVER, SIGNAL = 2.2; EXPRESSED IN BRAIN, SIGNAL = 1.5; EXPRESSED IN LUNG, SIGNAL = 1.8; EXPRESSED IN HELA, SIGNAL = 2.1
ctcagtcagtgctgaaaccgttgtcatggaagcctgcctgctcagctgttagtgagacctggcctgccacagtaccagggttcatgcctgtcaccaattccatgatcattttcatggggtgtctgactgacatttgtgatggggttgcctccgctcatcacagtcaacatgcacctcaccagcatttttattcttacaggttgttgccatggagctgaggatgaggaggcacctttagagccaggtgtttctgtaggagtgtcacaggtcatggctccaaagccctgtctatctacccagaatacccagccctgtgagacatgtagctcacttctgaaggacattctgcgtctggctgagcatgacggaacacaccccgagcagggactgtacacgtgtccagcacatcttcaccagcaccaaaaggagcagattagagagaaactttctagaggggatggaggaagaccgacatttgtgaagaaccacagagttcacatggcagggaagaccttcttgtgcagtgaatgtgggaaagcctttagccacaaacataaactttctgaccatcagaaaatccacactggagaaagaacttataagtgcagcaaatgtgggatattgtttatggaaaggtccacactcaatagacatcagagaactcacactggagaaaggccttatgagtgcaatgaatgtgggaaagcctttctttgtaagtctcaccttgttcgtcaccagacaatccactctggagaaaggccttatgagtgcagtgaatgtgggaaattgtttatgtggagttccacactcattacacatcagagggttcacactggaaagaggccttatggttgcagtgaatgtgggaagttctttaagtgcaactcaaacctctttaggcattacagaattcatacaggaaaaaggtcttatggttgcagtgaatgtgggaaattctttatggaaaggtctacactcagtagacatcagagagttcacactggagaaaggccttatgagtgcaatgaatgtgggaaattcttcagcttgaaatccgtcctcattcaacaccaaagagttcacactggagaacggccttatgaatgcagtgagtgtgggaaggccttccttacaaagtcccacctcatttgtcatcagacagttcacactgcagcaaagcagtgcagtgaatgtgggaaattctttaggtataactctacacttctcagacatcagaaagtccacactggataaggcccttatgaatgcagtggatatgggaaagccttcagtcaccaacatattgtggctggacagcaggcagtacacactggagaaagactgaatgccgtgaacgtgggtaattatgtaggtacagctctccagtcgctatgtatcagagaattcacactgcagaaatgtgtgttcagcaaactcgggacattattttggtttgactctcatctcattagacattggagagtttacactgaagaagagtcttttcaataaagtagaaagtggtaaagattcaacatgcaagattgtacttattgggcttcagaatatccacactagtgaaagtcttctgagtacagcaaatgtgtgacattattttgctactactccacactacttagacatcatgtagttcacactggaaaaaggccacgtatgtgccttgaatgtagccaaaatgacgaacaacacccagaaatctgtgatttagcactgagaactagtattatatggtttttaaaaaacaatggtgaagtacatgccacataaaatttgccatcttaactattgtaatgtcttgtttaatacttgaagtacattaacattgttgagcaaagaatatcctgaactctttatcttgtaaaatgaaactctataaccaccattaaaaaaacaactcattcccacattcttcagtccctggcgaccaccatattttt

SEQ ID NO: 2848 - DNA, 412 bp, Homo sapiens
  MAP TO AL035252.5; EXPRESSED IN BT474, SIGNAL = 3.8; EXPRESSED IN BRAIN, SIGNAL =   4; EXPRESSED IN BONE MARROW, SIGNAL = 3.9; EXPRESSED IN HEART, SIGNAL = 3.5; EXPRESSED IN PLACENTA, SIGNAL = 5.3; EXPRESSED IN ADULT LIVER, SIGNAL = 4.6; EXPRESSED IN FETAL LIVER, SIGNAL = 4.2; EXPRESSED IN LUNG, SIGNAL = 3.6; EXPRESSED IN HELA, SIGNAL = 4.2; EXPRESSED IN HBL100, SIGNAL = 4.1
agagccacctggcagagacaaatatattgtggccagaagaaagagactattctgagacacacatagctctttgacttctttgatccctagggaatacttcaaaatttgcagaaatgaaaagcagcagacgtcttctggaggagaatcaatctgattttcaaatttaatggccaaaaagatggcattcgtacttggcctcacatctaaattagttagaacttcaaaaatgctaactttcctagttccaagaagcaagcattcattttcctctttgactgtctcatactggttaaaattcagtgtttctagagacttcaatcatcagttctgctaaacaaggtaacgttatcattgtatccagggctgaacactccaagttctctagtaaaacaggactgctctcattgccatt

SEQ ID NO: 2849 - DNA, 390 bp, Homo sapiens
  MAP TO AC007336.2; EXPRESSED IN BT474, SIGNAL = 1.3; EXPRESSED IN FETAL LIVER, SIGNAL = 1.2; EXPRESSED IN BONE MARROW, SIGNAL = 1.3; EXPRESSED IN HEART, SIGNAL = 1.1; EXPRESSED IN BRAIN, SIGNAL = 1.2; EXPRESSED IN LUNG, SIGNAL = 1.4; EXPRESSED IN PLACENTA, SIGNAL = 1.4; EXPRESSED IN HELA, SIGNAL = 1.3; EXPRESSED IN HBL100, SIGNAL = 1.2; EXPRESSED IN ADULT LIVER, SIGNAL = 1.4
aggacctcatggaactcaggtatcttcagtaggatgtgaaacatcacatcatggggcgtggtgcagtgtaagcaggtaaagaaaagccagttcttccacatgtaaactacttgaactccatttcatcttttttcataccatctctaagattgctgccgcatttgcttgttaaactgaaagcatgtttcttgcaaaggctctattggaaggagcagatcgaggtcttggagaagctcttggaggcctctttggaggaggtggtcagagaagagaaggaggaggaagaaatattggagggatagttggaggaattgtgaattttatcagtgaggctgcagcagctcagtatactccagaaccgcctcccactcagcagcatttcaccagtgt

SEQ ID NO: 2850 - DNA, 478 bp, Homo sapiens
  MAP TO AL035416.7; EXPRESSED IN BT474, SIGNAL =   1; EXPRESSED IN HEART, SIGNAL = 0.88
acggctccattctctaaggcattaaccctgcttaccagaaatgctaataaacaataaaatctcaaaagaaaaaataatttcaggaggcagtaaaaaggtaaaagacccagataactcaaactcaattatcaatccttgaattaaaattaaagaaagaaattcatcagaataagttcatagcttattacatgcaacgcttctcaatttctttaccattcttaagacatcaaaaggaataacaaagttaaactcttacaattttatcaattaaaaattaagatgtttcttacctgccttttgtatgtttctaattgtgtacgtgctgcatttgctttttttaattcttcttctaagctgactgtattatgcatatacatcatgttggtttcctgtaaagttttcacctgcttgcgaaggtcattcagatcttgtagcttctgacgatatatctcaactgttgactccagtttatttgctt

SEQ ID NO: 2851 - DNA, 469 bp, Homo sapiens
  MAP TO AL109798.13; EXPRESSED IN FETAL LIVER, SIGNAL = 2.7; EXPRESSED IN BONE MARROW, SIGNAL = 2.5; EXPRESSED IN HELA, SIGNAL = 2.7; EXPRESSED IN HBL100, SIGNAL = 2.5; EXPRESSED IN BT474, SIGNAL = 2.4; EXPRESSED IN ADULT LIVER, SIGNAL = 2.6; EXPRESSED IN BRAIN, SIGNAL = 2.3; EXPRESSED IN LUNG, SIGNAL = 3.3; EXPRESSED IN PLACENTA, SIGNAL = 2.5; EXPRESSED IN HEART, SIGNAL = 2.4
gtgtcactgtgtctggtgggggttgggctggtgggagaattcaagtctaagcagctagatgggaagtacctactggtactgggctccgcaatttgggccctggcttcagaaaggttgctcacagacttggagtcactcagtgccccatggcttttggccttggtcctgtaggagggactcctagaggactggggaattgtgtcaatatagctatgccgactctgcttttcattgggctgcagtgtcccagctttgctttgagagctttccatgaatgagtggcggttctgctgagatctgctgtttgacttgaggtactttgtccctgggccttctgaaggctttgggtcaatattaaaatcaaactctgtttttgacttggcttcttttgggctaagaaggtgtggtatgttgttgttggtgagatctttgctggtagacccaggctggctgcttgcttggtaggttt

SEQ ID NO: 2852 - DNA, 425 bp, Homo sapiens
  MAP TO AC008018.18; EXPRESSED IN ADULT LIVER, SIGNAL = 1.9; EXPRESSED IN BT474, SIGNAL = 1.5; EXPRESSED IN FETAL LIVER, SIGNAL = 1.8; EXPRESSED IN BRAIN, SIGNAL = 1.5; EXPRESSED IN BONE MARROW, SIGNAL = 1.7; EXPRESSED IN HBL100, SIGNAL = 1.4; EXPRESSED IN HEART, SIGNAL =   2; EXPRESSED IN LUNG, SIGNAL = 1.8; EXPRESSED IN PLACENTA, SIGNAL = 1.5; EXPRESSED IN HELA, SIGNAL = 1.6
tggctctagagacccacaccctgctctcggagtcaccatccccttcccaaaggctactgagagagtccaagcgaagcttgcatgtggggaaactgagtctcagaggggtgaaggtattgctcaggtccacttgcccagttttcagggcccatgtcccatgccctgccccgctcacctcccaatctccgagcactgcttggcatccgcggccacggtagccctggtgtacacatggttgtcaggttccttggaggccgagggcagccagagacagaggccgacaatgaccagcaccaggaccacggccagcaggcccagcaccactaacttcttcttcatggctctgctgcacccacggggtaaggagcagggtcaggcccagcctcagacattccctggcccctccccaacagggcacagtctaa

SEQ ID NO: 2853 - DNA, 428 bp, Homo sapiens
  MAP TO AC007350.1; EXPRESSED IN PLACENTA, SIGNAL = 4.9; EXPRESSED IN HELA, SIGNAL = 5.3; EXPRESSED IN ADULT LIVER, SIGNAL = 5.6; EXPRESSED IN BT474, SIGNAL = 4.8; EXPRESSED IN BRAIN, SIGNAL = 4.4; EXPRESSED IN BONE MARROW, SIGNAL = 4.9; EXPRESSED IN HEART, SIGNAL =   4; EXPRESSED IN HBL100, SIGNAL = 5.5; EXPRESSED IN FETAL LIVER, SIGNAL = 4.3; EXPRESSED IN LUNG, SIGNAL = 3.9
gactgtgagctccatgaggggagctcatgtcttagtgattttggttcactgtgatgaacacattatagatttgttgaacttacaagcttcattgtggaatcaaactcttttttaacaaactttatcccaactaatgactcctggggatcctttaggcatgtctgacccaagactctatttttgtgctccagacttacgtggtcttataagaatgtataatggacctatgatggaatcaccgatgacaaaatgggacatccccgattctgtcttacttacactgtgcttctgtttctctctaggtcagaggaaagtgtttgacctcccttttgggagctgcctctttcgaagtgatgtttatgacaatggatcctcatttctgtacgataactgcacagcttgtacctgcagggtaaggcagctctgag

SEQ ID NO: 2854 - DNA, 1960 bp, Homo sapiens
  MAP TO AL035414.23; EXPRESSED IN FETAL LIVER, SIGNAL =   1; EXPRESSED IN ADULT LIVER, SIGNAL = 1.1; EXPRESSED IN BRAIN, SIGNAL = 1.1; EXPRESSED IN PLACENTA, SIGNAL = 1.2; EXPRESSED IN HELA, SIGNAL = 1.4; EXPRESSED IN BT474, SIGNAL = 1.2; EXPRESSED IN LUNG, SIGNAL = 1.6; EXPRESSED IN BONE MARROW, SIGNAL = 0.91; EXPRESSED IN HEART, SIGNAL = 1.4; EXPRESSED IN HBL100, SIGNAL =   1
gtgagtcaggaagtgggtgggtgctccagccaagtgaggaaagggaatatcagcagaatgggggacagcctctctaaattaaccctgcggaacaagaccacaacatgcccagacccagacagtgccaagaaagaagtatgctatgatgatgttttcatatagtccattttctaagctttctctcttcctttttctgtttgtttttttcttttttttttttttggtttgtagaccatctcaatttttgaggaacgagcccacatcctttatatgtccttagaaaagctaaagtttatcgatgatcctgaagtgtacctccgaagatctgtccttataaacaatttgatgaaaaggatccatggagaaattatcatgcagaataactggtgcttccctgcctgctctttcaatggcacctctgcccaagagtggtttatggctcaagactgcccttaccgaaaacgaccacggatggccaaagaggaatgtgaaaagtttcatgcctgctgcttttaccaagaatgtggtggccactacctaaatttacccctttctgtcaatgctaatgttggaagtgcctccactgctgcctcctctccctccgcctcttcttcctcctcatcttcctcttcctctccccctttgcctttaccgagttgttcccgccaggtggattttgatgtaggtagtgcatctatttacaagagtgatggccagatacctgccaatgaaatctttgtcactaatgtcagatcacttggtgttcaggaaaaggccaaattaaatgatgagaaagcaaatgatgacaccaacagagatggtggccccctcagccacgaacctgtgggaaatgaccttgcttttgagtgcaaaggccaattttatgattattttgagaccggatataatgaaagaaacaatgtaaatgaatcttggaaaaagtccttacggaaaaaggaggcttcaccaccaagtaacaaactgtgctgcagcaaaggaagtaaaatatgagccatcttctcaccgaactttgaagcatgcacagcatgatcagttagctctcgtaaattttattttgaatggattttgtagttttgtacaacagataaaattatgccatgaacatgccatgtcgttttaatgcctggagagcagattgcgtaaaacatctgtatagcaggcatcagcgagcttcttataaatgtggtgatttttaccaaggaaacgattgacttaatgcttaaaagtatatcatagttttcttacggaaaagatcagtagatgagattgggggacaatgtgcccttgcaatatttccattgccccccaaggagcctgtcactagctaagaaatttctacatgtttgccagttaattagggagttatttggtaagcaaatcaatataaccagcaaagatacctgcttcttctatatgatacaatattttttttaaataaaagactaaagacagggagctagatgaaatggcttaatggtgctgttaagtatttgtacctaacagtcttgtgtgacagatgaaaataggatgtaacataatgaaacacacctgtctaggggcggcaatcaacagtcttacacagagagggtattccctgcaagtttctggcttgcctgtgatgggtgatgaggcttttagagaggtgttatacagggcgatttttggtgccttacttttatcttaatttttgccaatgtgaaaattaaggataaatcagagttacagcagggatttaacaaacaggacaaaaaaaaaaaaaaaaaaaaaaccacagggtggatcaatatggtttggaaactgttaactttgaactattgtgttcagcttttgattcgacatctctattctttatttttgatgcccaattgcttttggattcgccgttttttcaatagggatggaggaaatgagagagagagctgttagaaagcagcacggg

SEQ ID NO: 2855 - DNA, 1982 bp, Homo sapiens
  MAP TO AC005544.1; EXPRESSED IN HELA, SIGNAL = 1.1; EXPRESSED IN HEART, SIGNAL = 1.3; EXPRESSED IN FETAL LIVER, SIGNAL = 1.6; EXPRESSED IN BT474, SIGNAL = 0.93; EXPRESSED IN BRAIN, SIGNAL = 0.97; EXPRESSED IN LUNG, SIGNAL = 1.4; EXPRESSED IN BONE MARROW, SIGNAL = 1.1; EXPRESSED IN PLACENTA, SIGNAL = 0.96
aaataaatggccatctttctaaggaagaaagtgtgaaattaaaaataatgccctgaaaggaattaaagtagatatgctaataaaatggcagtatcttttcttatgactcacatttaatatgctgttttttttctgtcatctttttaaattaaaaaaaaatttcctttatttgattgtgagaaagtaaataattgagcactcagctctcctgctggaagatatcaatgtatcatatcctttagatgtgttagggttgggaaaaggtggagagcaactgaatttgaatcttctgcagttaaaaaaggcttcttctttttttctaggttgatttggaatcaaatccacagaacagaagtcctgaatcacgtcctagtgttgtttatcccagtaccaaatttcctcgcaaagataatctcaacccaagacacataaatcttccccttcctgctccccacgcacagtatgcaatccctaatcgccactttcatccccttccccagctaccaagaccaccctttccaattccacagcagcacaccttgttaaatcagcagcagaataatttgcctgaacaaccaaatcagataccacctcagccaaatcaggtagtccagcagcaaagtcagttgaatcagcagcctcagcagccacctcctcagctttctcctgcatatcaggcgggacccaacaatgctttttttaatagtgcagttgctcatcggccacagtctcctcctgcagaagctgtaattccggagcagcagccccctcccatgctgcaagaaggccacagtcctctgagagccattgcacaacccggccccattcttccttcacatctgaatagcttcattgatgagaacccctcgggattacctataggggaggctttaggtaagttctattactgccagatgtgaaaattcagagattacttaacatgacttggactgtataatatcattttgggttaagattgaattgtttcttcaaataatgctagcaaaacccccccatttagtgtgataatcagaaactagttctaaatgctgtatgatagtatccagtggatgtcaggatcatcattatgtaagtgaggaagagttgtcatcatcatcaccataactgatttctggcaaatttagaaaacatttacttcttaccaaaaccaaatttgtagctacgtcctttgtctttgtggagaaaatatgttagtaaaaaactttaaataatgaacttgaaaccccaaattcataaaaaatttttcacaaatatttttgcagatcgtatacatgggagtgtcgctctggaaacattaaggcagcagcaggcacggttccagcagtggagcgagcatcatgcctttctcagtcagggcagcgctccatacccacaccatcaccatcctcacctccagcatcttcctcagccgcccctgggattacatcagccgccagtgagggcagactggaagctcaccagcagtgccgaagatgaagtggagaccacatactcaaggtattccagcggactgaaaatagcccctggaatgcgaccccctcactgttctcttttttgactgtagtccttttagcttcaagctggaatattgcctcagagaaattggatgctggccttccaagcacacgctacacagttctcttgttgactctaaaatacagaaaactcatttagaagtaactcttctacaaatttaggcatggatgatctactatgggttggaaattaacttgttcccttactttgtggtcttttctgcgagagaaacataccatcactgtgagcagctttttttatttagtagtaatacttgcaaagaatgaataaagacaggagtaaattcgtggttaaaagctaaaaattatatcattaattatttttatggtggcacagaattctacattcctataattccagctacatatgagtatttggtcctaactctaagcttgtttttgtgg

SEQ ID NO: 2856 - DNA, 1947 bp, Homo sapiens
  MAP TO AC005630.1; EXPRESSED IN PLACENTA, SIGNAL = 2.4; EXPRESSED IN HBL100, SIGNAL = 2.1; EXPRESSED IN BT474, SIGNAL = 1.6; EXPRESSED IN BONE MARROW, SIGNAL = 2.1; EXPRESSED IN HEART, SIGNAL = 3.4; EXPRESSED IN ADULT LIVER, SIGNAL = 1.3; EXPRESSED IN FETAL LIVER, SIGNAL = 2.8; EXPRESSED IN BRAIN, SIGNAL =   3; EXPRESSED IN LUNG, SIGNAL = 2.8; EXPRESSED IN HELA, SIGNAL = 1.9
gcccagagtttcctttggtgagtgtttggaggatgaataaagagatggcaggaaggcaagaggagtggcaccagaggcccttgtcctaggttttctgctctggggccccctgtggggaacccactgtgcttttataagggaaatgatggattcaaagtgctgccccccatctcccattccccgtctctcctcaggtcaggcttgtcctgggccaggaggagctgaggctgcagaccccagcagaaattctactgagtgactccgtcccccacaccacagttctgactgtctcagaggactggcccacattgtcagtcaatgggtttctgaatgcctcctctgtagtcctgggagcccccctagaagtcccctatgggctctttgttgggagcactgggagacttggcctgccctacctgaggggaaccagccatcccctgaggggttgcctccatgcagccgctctcaatggccgcagactcctccagcctctgacccccaataagcatgagggctgtgctgaagagttttctgccaatgacgatgtggccctgggcttctctgggtcccactctctggctgccttgcctgcctggggcactcaggatgaaggaaccctggagtttacactcaccacacagagctggcaggcacccttggccttccaggcagcaggctggcatggggacttcatccatgtggacatatttgagggccacctgtggtccatggttgagaagggccagggtactgtattgctcctcaacagtgtgcctgtgactgatgcacagccccacaaggtcagcatccacatcaacattcaccagctagaaatctccatggaccagtaccccacatgtactttgaaccgaggagtcctcagctacctggagccacgtgacagtctccttcttggggagctggtgcagaggcctctcgtcacctccaggaacaccgctcaggcctgacaccaggggctgccaatgcctccctgctgggctggctgcatggaagacctcagtgtcaatggctagaggcaggggctgtgggaagccttgctgacgcacaacatggtggctggctgcagactggaggaggtggaggagtatgaggacaatgcctatggccattatgaagctttctccaccctggctcccgaggcttggctgtccgtggagctagctgagccatgcgtgcctgagccagggctacctcctgtctttgccaatttcatccagctgctatcagtgcagtggtggtgaccgagggtggcacagcctggcttgagtggtggcatgtgcagcccatgctggcactgatggaggctgaactgcgtaaatcccaggtgctgttcagcgtgacctgaggggcacactacagcgagctcgagctggatgtcctgggtgcccaggcatgaaaaatgttcacccttctggacgtggtgaactgcaaggcccgcttcattcacgatggccctgaggacacctctgaccagctggtgctggaggtgtcagtgatggcttgggtgcctatgccctcatgcctgcggaggggccaaacagacctcctgcccatccaggtcaaccctgtcaatgacccaccccacatcatcttcccacatggcagccttatggtgatcctggaacacacacacaagcctctggggcctgaggttctccaggcctatgacctggactctacctgtgagggcctcaccttccagctccttggcaccccctctggcctccccgtggagcaccgagaccagcctggggagccggtgactgagttctcctgctgggagttggaggccggcagcctagtctatgtccactgcggtggccctacacaggacttgacattccgggtcagcaatggactgcaggccagccccccggccatgctgaaggtggtggctgtccagctggccatacaaatccaccgcag

SEQ ID NO: 2857 - DNA, 391 bp, Homo sapiens
  MAP TO AL109933.8; EXPRESSED IN BT474, SIGNAL =   2; EXPRESSED IN BRAIN, SIGNAL =   2; EXPRESSED IN HBL100, SIGNAL = 1.8; EXPRESSED IN HELA, SIGNAL = 1.6; EXPRESSED IN PLACENTA, SIGNAL = 1.7; EXPRESSED IN FETAL LIVER, SIGNAL = 3.3; EXPRESSED IN LUNG, SIGNAL = 1.6; EXPRESSED IN BONE MARROW, SIGNAL = 1.9; EXPRESSED IN HEART, SIGNAL = 1.6; EXPRESSED IN ADULT LIVER, SIGNAL = 2.5
tgatgatgttgaaaactggagctcagaacaataactgctaatgtttgtgtccggtgtaaaaacaaataacttcctttgagggtatttttctaacaaagactccaataaaccttaacaagaagctgttagtatggcttcacatactgtgagcaaatatagttccaaactctggctccataaatttctctttcctcttaaatcattaataaatttgtgagtaaattacttgccatctgaattacagattcctgcgtaggtgcaacgacaatggaaatacctgcaggtgaattcttcgtcctcctcacattttgctgcacattcttctatacttcctgctcccagctgcttcttagtgacactgaacagtgaagccccctgggtattcacatag

SEQ ID NO: 2858 - DNA, 412 bp, Homo sapiens
  MAP TO AC008925.2; EXPRESSED IN BRAIN, SIGNAL = 5.5; EXPRESSED IN LUNG, SIGNAL = 6.1; EXPRESSED IN HELA, SIGNAL = 6.1; EXPRESSED IN PLACENTA, SIGNAL = 5.2; EXPRESSED IN ADULT LIVER, SIGNAL = 6.4; EXPRESSED IN FETAL LIVER, SIGNAL =   6; EXPRESSED IN BT474, SIGNAL = 5.7; EXPRESSED IN BONE MARROW, SIGNAL = 5.4; EXPRESSED IN HEART, SIGNAL =   5; EXPRESSED IN HBL100, SIGNAL = 5.9
gtaaagaccagggatgctgccaaatatcctacaacgcatgggacagtcccccacaacaaagaattaactggctcaaatgtcaatagtgctgaggttgacaaaccctagcttaaagaaaacaaagttctcattattttgaaaaatcaggtatccaaagttatatcacactacaaatctaataattcagtagcaaacaaaaaactaaaaataaaggtagtctaccttatcacaatgtagatctagcatttcaggcttggggaaatcctgttctatgttttcagcaatgttctgtattgctagcaactgctcgtcaattttctgaagcttagcactgagatgctctagttggtgagctgcagagcttggtgcagggcaagctgcagagacaccttgcagccgtttccacaataga

SEQ ID NO: 2859 - DNA, 397 bp, Homo sapiens
  MAP TO AC007361.1; EXPRESSED IN ADULT LIVER, SIGNAL = 5.4; EXPRESSED IN BRAIN, SIGNAL = 3.6; EXPRESSED IN LUNG, SIGNAL = 3.8; EXPRESSED IN BONE MARROW, SIGNAL = 3.6; EXPRESSED IN PLACENTA, SIGNAL =   5; EXPRESSED IN HEART, SIGNAL =   3; EXPRESSED IN HELA, SIGNAL = 4.4; EXPRESSED IN HBL100, SIGNAL = 3.9; EXPRESSED IN BT474, SIGNAL = 3.4; EXPRESSED IN FETAL LIVER, SIGNAL = 3.7
aaacaagacaagtcccttctgtctataagcctataacatcaaaagcaagttagttacttcctagatacagtgggggtgcaggcattgggtaaattcagccattccaaatgggagaaattggacaaaacaaaggggctacagaccccatgcaagtccaaattccagcagggtagtcaaatcttaaagctccaaaatgatttcctttgactccatgtctcacattccaggtcatgctgatacaagaggtgggttcccacggtcttgggcagctccacccctatggctttgcagggtacagcctccctcctggctgctttaatgggctggtgttgagtgtctgcaacttttccaggcacacggtgcaagttttcatgaatctaccattctggggtctgga

SEQ ID NO: 2860 - DNA, 441 bp, Homo sapiens
  MAP TO AL118501.4; EXPRESSED IN BONE MARROW, SIGNAL = 1.8; EXPRESSED IN LUNG, SIGNAL = 2.2; EXPRESSED IN BRAIN, SIGNAL = 1.6; EXPRESSED IN PLACENTA, SIGNAL =   2; EXPRESSED IN HELA, SIGNAL = 1.6; EXPRESSED IN HEART, SIGNAL = 1.5; EXPRESSED IN HBL100, SIGNAL = 1.7; EXPRESSED IN BT474, SIGNAL = 1.7; EXPRESSED IN FETAL LIVER, SIGNAL = 1.7; EXPRESSED IN ADULT LIVER, SIGNAL = 1.7
ttgcatttaccttctccaaatagttatattctgaattatatatatttttctgactaaaaatacttgaaattttatcagaaaacttttgcatttcaaaagacacaaatcaagaaagagaaaaaccccacagactgtgagaaaatattttctaatcaatatctaagggatgtgtatacagaatacagaaagaaatcttacagctcaataatgagaaagcaagcaatccacttcaaaaataggcaacggatttttgaatggctatttccctaatgaagatataatagacgaatgaccagtatttacatgaaaagatgctcaacgtcattggtgataaagaaaatgcaaatcaaaagcacaatgagatactacttcacacctattagaatagctgtaatcaaaagacagacaataacaagatttggtgaggatgtggggaaattg

SEQ ID NO: 2861 - DNA, 427 bp, Homo sapiens
  MAP TO AC007642.4; EXPRESSED IN FETAL LIVER, SIGNAL = 0.66; EXPRESSED IN ADULT LIVER, SIGNAL =   1; EXPRESSED IN HEART, SIGNAL = 0.95; EXPRESSED IN PLACENTA, SIGNAL = 0.79
tgataaaactaaattgttatggaattgataaaactaaagttaccttttgtttcaagttccactctttctggtttaaatgtttttaaaaattttatggtgaaatgtgttttacatgaagaaatgaattgaacatatatgtgcagtaaagtaagccacatcatctaattaaagaaataaaatattacctgcactcgaagaaaaaaaaaatcacccatacctcttctgtgatagcttcacctgtttgaggtgatttctatattgactttgatgataatcagcctctttgaggtaactgctatcctgactttgatgagaatcattttctttttttcctctattgttttatctatttacctttcagaaattgagttcaattttatctgtctttagactttatacaaatggagtcctattctgcacatccttt

SEQ ID NO: 2862 - DNA, 396 bp, Homo sapiens
  MAP TO AC007444.1; EXPRESSED IN PLACENTA, SIGNAL = 3.3; EXPRESSED IN HELA, SIGNAL = 4.8; EXPRESSED IN HEART, SIGNAL = 3.1; EXPRESSED IN ADULT LIVER, SIGNAL = 4.4; EXPRESSED IN BT474, SIGNAL = 1.7; EXPRESSED IN FETAL LIVER, SIGNAL = 3.5; EXPRESSED IN BRAIN, SIGNAL = 3.4; EXPRESSED IN BONE MARROW, SIGNAL = 4.8; EXPRESSED IN HBL100, SIGNAL = 4.2; EXPRESSED IN LUNG, SIGNAL = 3.1
ttcatgatatcccagctcctcatcattaaaatttgattctttaaggtgaggcacaaaggtgcctcatgaaagaaacacccaggaagatgctagggatctaggccaatagattctaagccccctggattccccagtgtacctccctctctgatggacatcctcttctctttgcctggcctccttaacacttccgctcatctctctcattccattcacccacctgctacctcctggtcccagccttggctctgtttctctgggctggacaactccacaactttacccctggtgtgataccccaggttcaatgaagctctaagaccacctccaagtgtcactaagggaatatcctccctgaaaatgttctgaaaccaagcagagtccatgaccgttcaa

SEQ ID NO: 2863 - DNA, 463 bp, Homo sapiens
  MAP TO AL118511.6; EXPRESSED IN PLACENTA, SIGNAL =  14; EXPRESSED IN HEART, SIGNAL = 8.9; EXPRESSED IN FETAL LIVER, SIGNAL =  12; EXPRESSED IN BONE MARROW, SIGNAL =  10; EXPRESSED IN HELA, SIGNAL =  11; EXPRESSED IN HBL100, SIGNAL =  11; EXPRESSED IN BT474, SIGNAL =  34; EXPRESSED IN ADULT LIVER, SIGNAL =  16; EXPRESSED IN BRAIN, SIGNAL =  10; EXPRESSED IN LUNG, SIGNAL =  14
catagcatgtaaggcagggcaggaggtaaagtaggggagctcaggcatgaggctggcaggcaggtggctttttggggttaatggggagaagccatcctcatggatgggagagagaagctgaagaggctgcatggaggaccagatttgaacagatagcactgtgtccaaaggtggccccaataaagcagctgttgttcttggagccaggcctttctcctgcttcctgtgtgaccctcccaagagcccaagagtcggaagcatcatcacacccacgttgcagatgaagaaagtgtaccatgagaagcaaggcagcttgcccaagtcacccagtgcaggcatgacagagagcaccagagcaggagaggagggcccaggccggtctggagcatccatttctagaggaaaggtgagaggaaagtcctagagaggggatgctgagggtggtatgggggcttaggaagga

SEQ ID NO: 2864 - DNA, 442 bp, Homo sapiens
  MAP TO AL050344.11; EXPRESSED IN HBL100, SIGNAL = 1.5; EXPRESSED IN BRAIN, SIGNAL = 1.4; EXPRESSED IN LUNG, SIGNAL = 1.8; EXPRESSED IN BONE MARROW, SIGNAL = 1.6; EXPRESSED IN PLACENTA, SIGNAL = 1.5; EXPRESSED IN HEART, SIGNAL = 1.4; EXPRESSED IN HELA, SIGNAL = 1.6; EXPRESSED IN BT474, SIGNAL = 1.5; EXPRESSED IN ADULT LIVER, SIGNAL = 1.6; EXPRESSED IN FETAL LIVER, SIGNAL = 1.7
agagggcagaggatttttcccaggccttgaaacctgatggagtttgtctgattggattttgaaattgcttgggactggtgactccttttttccttccattttctccctatttgaatggaaatgtctataactgttgtcttatgctgtcccaccactgtattttgggagcagaaagcttgttttctagtttcacaaatctgcacatccagaggaattttgcccagaactgattatatcctcagccccacccatacctgagactttgcagatgtgatgaaggatcttgagatagggagaatatcctggattatccttttcagatggatgcaggaggagtcggagctggaggaaaaggcgatgtgatgacagaagcagaaattggagcgatgcactttgagatggaggaagaggccacaagccaaggaatgcaggtgcctctaga

SEQ ID NO: 2865 - DNA, 363 bp, Homo sapiens
  MAP TO AL096708.14; EXPRESSED IN BT474, SIGNAL = 1.2; EXPRESSED IN FETAL LIVER, SIGNAL = 1.3; EXPRESSED IN BONE MARROW, SIGNAL = 1.4; EXPRESSED IN LUNG, SIGNAL = 1.4; EXPRESSED IN BRAIN, SIGNAL = 1.5; EXPRESSED IN PLACENTA, SIGNAL =   2; EXPRESSED IN HELA, SIGNAL = 1.4; EXPRESSED IN HEART, SIGNAL = 1.7; EXPRESSED IN HBL100, SIGNAL = 1.5; EXPRESSED IN ADULT LIVER, SIGNAL = 1.9
ctgagtccttgcaggaaacgcagcctggcgtggcccttccttgagtgtccacctcctttgataatccttggttaggctgtggctagagtcatgatatctttgctattaaaatattacattaacaaaaacctttaaaaccaaaaaaagaacgctcttgaataaatgtctaatagacccccccaccttcacaccaaaaaagaaaaaaaaaaaaacaaaaacgttgttcataaggacacctattctttcacaaaagtcttcatgaagtacaaatcccaggactctttcttcgtctctgggagagtttcaccctgttccagaatcatacactcttcttctgcggagggctcagtttcctcatgcctc

SEQ ID NO: 2866 - DNA, 1898 bp, Homo sapiens
  MAP TO AF130358.1; EXPRESSED IN LUNG, SIGNAL = 2.4; EXPRESSED IN HELA, SIGNAL = 2.9; EXPRESSED IN PLACENTA, SIGNAL = 2.3; EXPRESSED IN HEART, SIGNAL = 1.6; EXPRESSED IN FETAL LIVER, SIGNAL = 2.3; EXPRESSED IN ADULT LIVER, SIGNAL = 2.1; EXPRESSED IN BT474, SIGNAL =   2; EXPRESSED IN BONE MARROW, SIGNAL = 2.5; EXPRESSED IN HBL100, SIGNAL = 3.1; EXPRESSED IN BRAIN, SIGNAL = 2.1
ggatctctccaaaatcaaacaggatcaatctggtcacgtctaatcctaagacaaaacactatgtaaaattttcctgtatctaaatgttgccctctaggtaaatctgtgatattttagagactttcttttgtggaaaaggtaatctgataaatgggaagagatcatcagacaagttcacaaataaccattatttctgcagaattcagttgaagttggttttttgtaaatgcttattgggaatttctaaagcactgacttggagaggccaagagcctccatcaatccctgcttggatagccactcccgttactactgctaggtcagggtctacagatgtgttgggatcttttccaaagaactcttgaatgacttgacggatccgaggaatacgagtggagcccccaactaaaaccacctcatcaatctcagtcttttccaggtggccttctttcaatacttgctgaatgggtaccagtattttctgaaagaggtcttcattaagggtatcaaagagtttccgtgatatttctgtttcaaataaaacctgactttctccacttttcttatcagaaaggccacgtccaaacccactgttcacgcgatggtcatctgctgaggaaagtttgtcttttggcagttcagtgtcactactgtgaggttccttcctgtcctgctcctccaccgttagtaatactgacaactgagcagattgatgaagagtcagatttaatttgaccatttccacagcttgtctcaatctgtggatttcctctttcctagagggcacgaagccatatgtttgatagatctgtttatataagtactgaagcaatctctgattgaagtcctgtcctccaagtttattgtttcctgagtgaaaaataaaagtttaatatagttatgcatatatgtgtgtatgtatacacgtatgttattatgtatacgtaaaaattatattctgggaataacaaatccctgtttcatgtatcattacaattttattcatacagagactggttaaaaataactgtgttgctgggcatggtgtctcacacctgtaatcctagaactttggaaggctgaggtgggagggttgcttgaggccaggagttggagaccagactgggtaacatagcaagaccctgcctctataaaataaatcaataaataaaaatttaaaaaataatgactgggttaaagctatcttaacccaaataagtactatttaaaaactagtgcacatcagggtcaaaattttaaattatataaaaggaagtatctcttcacaatatcaaataatttttcagtaaatagagattaagaatacagattggcttataagtagctatttaaaaacactgaatgtcattctcaacagaagaaagtgcttcttataatgaaaaagtaggtatttaatctctttttttcctttcattttttcttgcctgattaggacctgaaaaggtctttctacttttctacctgaaaactagataaataatttcaaaggaaaagagtagtgtaatataatttcctggtatttaacttgattagaaaaagagaaaaaaaaatgcagaggttagaatacctgtaacttacaactcaacgtgtcaaacaggttgaatcccttaagctaaattcgacaaaataaaaacgtttaaaaaagggtttagaatgcataatcctatcatttcctagggaaaaatacaattagactttctaaagacatctactttataaaacatattaaatgaaatatactgatcacccttcattttaaagaaatttttcttccctctgttccctttcttcaccatcaccatgaaaagtcctactggctatgtgagccgtaattgggtaactggcaatgtatttatgcgacttataggatgcccagc

SEQ ID NO: 2867 - DNA, 1948 bp, Homo sapiens
  MAP TO AC000119.1; EXPRESSED IN FETAL LIVER, SIGNAL = 1.3; EXPRESSED IN ADULT LIVER, SIGNAL = 1.2; EXPRESSED IN BONE MARROW, SIGNAL = 0.94; EXPRESSED IN LUNG, SIGNAL = 1.9; EXPRESSED IN HELA, SIGNAL = 1.1; EXPRESSED IN PLACENTA, SIGNAL = 1.3; EXPRESSED IN HBL100, SIGNAL =   1; EXPRESSED IN HEART, SIGNAL = 1.1
tcatttctgggatcaggaggaatggtccactttcctgataaaaattgcaccatatgttttttggataattcattttctttgtggaaaaagggagtgagctgaagaatctggatagtgtaaagaccaacttctatttcacccaagaaacaagctgtgttatacatgtcatatcgtctctgggacttctgtggtgaccagttctcggtttcatagtttttactatcagtttgcctttgggattctttgaaagctcttgaggctttttccgcagcttctaggagatgtgttaggtcattaacagtaatgctcctacagtttttgttcccatccaaccaccatttgatttcacttttgtagacttgacctagtgtatctgaaatataggaatttttaggtgctttcattttggcctgacgtgcccagtccagagctgtgttaaagtccttctctttaatgtagaaatgtcttgctaaggcttgacaaatgaatgcattttgtgggaatcgtctacttcctgcactcaagaccttttcaatgtctttattctgtaaagcttccattaatggggaaaacagagtgtctgtttcatctccatacaccttgcgctgtcttgtaagcagaagagtttgaacatcatgttgaaatttgtctcttcctattccagaatcatagaataaattctcttctaatatattcaatgcaatttgacatttatccaagtgatagcttctttccagttcttttagacagtacagggcaatcagagggtgaatgatacgcacacctgtgtatctcccatattctgcaacttctgtttttattagaagtgtagaataagttcccatcttgtcttctaagctttcaggttcccagggtgtactagtgtatatgattcccaaaaatatttcacactgtgaaactgaaattgtagagtcagtaacataagagctgagtaaagccaggaaggaaatgagttgtgcttccttgctgtcaacatcctgtccttttaggatattcctgactacattttctatatatgtttcatcaaaattgcttttcatgatcatgaaggaataaaagttttcacagttcttgtgctgcttttcaatttccttcagtttggcaccaaaagctctttgttccttggaagaaagttggtaatttagtgcaatactgtctgccaattttgcactttcatctggattccgggatctcatgcagtttaagataattaccaatgttttttcatatcgcaaatccttttctgctaaaacggaatggatggcattttgtagaaagtagacattttcttgttcttcaaaatcatccacaaggagaagcacaggaatgtaatcctgatggctctttgccctataggtgaccagattgatcacttgctctgcaatttctgcaaaatcagttgtcttgttttttaacacagcacatctgaagtttttctttaagtcccagagaacatgcatagccagtgtggtacctccacagcctggatgatgataaagattgatgatttttgcaaatattggtttaggagactctgcccagcagtgtattaaatctttaagcttttcataactgtcccttttaacaaaatctgaagaatagttttcagaagaaaaatagaagttccaccaggatactttgccacctcgataaaagtgttcttcttttgatttcttaaactccaggaatttagatttgtctttctcgatgtctgtctctgtacactcattttcacagaggatttccagtgcagtcaagacatcctctttctttttctctaggataactgaagaagatccacgggcgggcaaaaaccttcttgatgaccgagtcaccgattttagtttaaggatagtgctgtttaccagttctatatttaaagtggaaatactgtggtttgttagttcatcttccatcttcattcttg

SEQ ID NO: 2868 - DNA, 408 bp, Homo sapiens
  MAP TO AL121593.3; EXPRESSED IN ADULT LIVER, SIGNAL = 1.9; EXPRESSED IN BT474, SIGNAL = 1.8; EXPRESSED IN BRAIN, SIGNAL = 1.9; EXPRESSED IN HBL100, SIGNAL = 1.6; EXPRESSED IN HELA, SIGNAL = 1.8; EXPRESSED IN PLACENTA, SIGNAL = 2.3; EXPRESSED IN FETAL LIVER, SIGNAL = 2.4; EXPRESSED IN LUNG, SIGNAL = 1.6; EXPRESSED IN BONE MARROW, SIGNAL = 1.9; EXPRESSED IN HEART, SIGNAL = 1.6
gttgttgctgttggtgttggttttgcttctgtttattagtttttctttttatcaggcaggcccttcttccatagggctgctgcagtttgctgggggaccgctacagaaaaaattccccagggtccctcccgcacgtggaggtatcactggtggagtctgcagaacagcaaagatggccgcctgttccttcctctgggagctctgtcccagaggggtaccaatctgatgccagccagaatgctcctgtattaagtgtctggcaactcctgttgaaagatctcacccagtcaggaggcacaggttcagggacctgcttaaagaagaagtctgactgcaccttggtggagcccatattgcactggggagaatcatcctcctcctctggacggccagcagacaggaaagact

SEQ ID NO: 2869 - DNA, 380 bp, Homo sapiens
  MAP TO AC007450.1; EXPRESSED IN HELA, SIGNAL = 9.2; EXPRESSED IN ADULT LIVER, SIGNAL =  11; EXPRESSED IN BT474, SIGNAL = 6.6; EXPRESSED IN BRAIN, SIGNAL = 7.2; EXPRESSED IN LUNG, SIGNAL = 9.6; EXPRESSED IN BONE MARROW, SIGNAL = 5.9; EXPRESSED IN PLACENTA, SIGNAL = 8.5; EXPRESSED IN HEART, SIGNAL = 8.9; EXPRESSED IN HBL100, SIGNAL = 7.9; EXPRESSED IN FETAL LIVER, SIGNAL =  10
tggcagtggaagggaatatcccacagaggtgctgaagtcagtttgcaaagagtttcgaaatattcagcaggaaacttaactggtaaaagaaaaggattattcagggagcacccagcatgccactcattctatgtgtgacttgtatacacttattgaagaatcagttatactgcagggtttgatgtgttcaataaatgttaacataatttgttaacatataaaaatggcacaaagcgatcgtttttctacctacttaccgcttgagaggttttttccttctcatccattttgaccaatttcatagaaattttattttcaaattctaaaaagctatttctctccatatccttgaatgcctctgacagaagcgactggaatcc

SEQ ID NO: 2870 - DNA, 421 bp, Homo sapiens
  MAP TO AC007563.1; EXPRESSED IN PLACENTA, SIGNAL = 1.1; EXPRESSED IN HELA, SIGNAL = 0.59; EXPRESSED IN HEART, SIGNAL =   1; EXPRESSED IN BRAIN, SIGNAL = 1.4; EXPRESSED IN ADULT LIVER, SIGNAL = 0.79; EXPRESSED IN HBL100, SIGNAL = 0.67; EXPRESSED IN BONE MARROW, SIGNAL = 0.76; EXPRESSED IN BT474, SIGNAL = 0.87; EXPRESSED IN LUNG, SIGNAL = 0.73; EXPRESSED IN FETAL LIVER, SIGNAL = 0.64
agctccaagaaacaaatacattgtacaaagatagttactagttctatgtttttcattacaacaaccacacacctgtactggccctgtttcccatctaagcagctccttgttgcccagagctgtgctgtcccatacagtaactgctagtcacatgtggctattaaaacttaaatatcgatttcagtgaaaattcagctcctcagccacatgagccacattttaggtgctcagtagccacacgcggctgttggctaccatattggacagtgcagatataggcatgtccatcaccacagacagtttcattgggcagtgctgctggaagatggtagcaactcacatgagccacaaggtaattcacagttgggtcccagccacacttgttcagcctcattgactgccacacccagaccatgtgttc

SEQ ID NO: 2871 - DNA, 421 bp, Homo sapiens
  MAP TO AC007963.1; EXPRESSED IN ADULT LIVER, SIGNAL = 1.3; EXPRESSED IN BRAIN, SIGNAL = 1.2; EXPRESSED IN HEART, SIGNAL = 1.2; EXPRESSED IN BONE MARROW, SIGNAL = 1.6; EXPRESSED IN HBL100, SIGNAL = 0.94; EXPRESSED IN LUNG, SIGNAL = 1.3; EXPRESSED IN HELA, SIGNAL = 1.1; EXPRESSED IN PLACENTA, SIGNAL =   1; EXPRESSED IN BT474, SIGNAL = 0.96; EXPRESSED IN FETAL LIVER, SIGNAL = 1.3
ctacaactggattgtggggggctgcaaagatcgtgcatgacctcgacccctatccagggccgtgcttggggcaaaactgccgggatgtccatgcaacccagggcagaggaccttaattactgtgttaaacactttgcagacctcctttctggaccccagagggcccccactcccacccgctagctctattccttcatgtccaggcatgctggtcctcctgcgacccctccttgggagcctccttccctgccccgagaggccactggtttgcttactgccctcttcaatcctcccaacccagggtatccaggcgctctgcctggccctgtgcattttgatccataccctgctgagtcgggactcaaaagccaaggaagttgaagacttagaactcttcatgccggaagaggctgcaggcaga

SEQ ID NO: 2872 - DNA, 450 bp, Homo sapiens
  MAP TO AL109919.6; EXPRESSED IN BT474, SIGNAL =   2; EXPRESSED IN FETAL LIVER, SIGNAL = 2.4; EXPRESSED IN ADULT LIVER, SIGNAL = 5.3; EXPRESSED IN BONE MARROW, SIGNAL =   2; EXPRESSED IN LUNG, SIGNAL = 1.8; EXPRESSED IN BRAIN, SIGNAL = 2.5; EXPRESSED IN PLACENTA, SIGNAL = 1.9; EXPRESSED IN HELA, SIGNAL = 2.4; EXPRESSED IN HEART, SIGNAL =   2; EXPRESSED IN HBL100, SIGNAL = 2.3
ttgttcaggatccacacagctctttctcaactttttgctccaaaagccctaagagctggagttggtgcatcttcctgactttatgacaccttcattaacgtggcttaggtatccattaagtgtcagcttctctcagtgtcttttttgactaattatccctccaccagccgactcccctttattggctgtattatcttctcacctcaatcagtcttttctcaaacatccactaaacatttgcttaatcacagcttctctatacttgaaaatagctgtaacttctgcttccactgctccctcatggcctttctctgcctcctggcctttctctgttatgcctcccttggccttgcctgattgtctccttatttcattgttcaattttccaggagacaaaacctcattcatctgagtaatctgtactgtttgagagaacagggctttccacaa

SEQ ID NO: 2873 - DNA, 475 bp, Homo sapiens
  MAP TO AC006390.8; EXPRESSED IN FETAL LIVER, SIGNAL = 1.2; EXPRESSED IN LUNG, SIGNAL = 0.85; EXPRESSED IN HELA, SIGNAL = 1.1; EXPRESSED IN PLACENTA, SIGNAL = 1.2; EXPRESSED IN BT474, SIGNAL = 1.5; EXPRESSED IN HEART, SIGNAL = 1.1; EXPRESSED IN BRAIN, SIGNAL = 1.3; EXPRESSED IN ADULT LIVER, SIGNAL = 1.2; EXPRESSED IN HBL100, SIGNAL = 1.3; EXPRESSED IN BONE MARROW, SIGNAL = 0.85
ataaggattccccaccttcccaaaccccagtgcttcttgtgtggcaaagttaatgtttgtccatcctgacattgaacaatgcagacattttttcatgagaaagcttaattttaaaagcctggacctgtatttaaacttgtatttgtctcaatacaaaatcctttgattgaaacatcttacacagttatttctttacccttcaaataaaatcagccatatacagttgaagagatttggggaaatccttgttctatggagctgacgtagcttatttgggaattgaggtagataaagaaaatggaagcaacagttctgtcagatggaaccggccgtctggaattatcactatttcttttaacgtgatggcctatgaagatgtgttgcttggggttgctgcagcttcttgtgaccgtgaaggggacatgaagagaattacagagaagcttgctcagaactttgatgttgttgagctgct

SEQ ID NO: 2874 - DNA, 378 bp, Homo sapiens
  MAP TO AC007101.1; EXPRESSED IN BONE MARROW, SIGNAL = 4.1; EXPRESSED IN LUNG, SIGNAL = 4.6; EXPRESSED IN BRAIN, SIGNAL = 4.2; EXPRESSED IN HELA, SIGNAL = 4.3; EXPRESSED IN PLACENTA, SIGNAL =   4; EXPRESSED IN HBL100, SIGNAL = 4.1; EXPRESSED IN HEART, SIGNAL = 3.1; EXPRESSED IN FETAL LIVER, SIGNAL = 4.1; EXPRESSED IN BT474, SIGNAL = 3.7; EXPRESSED IN ADULT LIVER, SIGNAL = 4.1
tgatggaaactgacccttccacctgtatgggtctgcacgtcattccctctgctgcctcaaaccggcagccatcctgtctcctcagcagactgggacctccccaagggaggacagggctggaggcttctctgggccgtctcaggcctcacccaccttgtcgatgaaggccgcgaacctgctgttgagggacttgatctgctccttctcctcctgcttcacgcactgtgcgttggggtcgatctccaggttgaggggcgtgaggaggctctcgttgaccgacacggtagtgatgcatggggggctgggtccgcacacgcccccggagcggtagccgaagctgcgtccgcaggagccggctcggaagccacctacagctat

SEQ ID NO: 2875 - DNA, 385 bp, Homo sapiens
  MAP TO AL118523.9; EXPRESSED IN FETAL LIVER, SIGNAL = 8.7; EXPRESSED IN ADULT LIVER, SIGNAL =  11; EXPRESSED IN HELA, SIGNAL = 8.5; EXPRESSED IN HBL100, SIGNAL = 7.8; EXPRESSED IN BT474, SIGNAL = 7.5; EXPRESSED IN BRAIN, SIGNAL = 7.5; EXPRESSED IN LUNG, SIGNAL =  10; EXPRESSED IN BONE MARROW, SIGNAL = 8.5; EXPRESSED IN PLACENTA, SIGNAL = 9.1; EXPRESSED IN HEART, SIGNAL = 7.1
ggcaaaacatgtgtgtgtgtgtacatgcacacatttctatacatatttttatgtgttttcctagtggttttttgcagaatattaaaatagttgaaaaaatattgaaaaatgaaatgtaagtattaaaataaacattattctcagcttaagtatagtatatatacccaaatatatttatgatcattttaatttagcttcagttaatgaaaatgtattcaaaattgtcactgggtgaagagaaattgtcagtatgacaattctcttctttgaaaatgaaactagcaatgaagtagattttgaaaatattgttgatgtgtttacttccattatagccagagtatacatttttccttctgcctcaggcaccaataaggcttggcacagc

SEQ ID NO: 2876 - DNA, 454 bp, Homo sapiens
  MAP TO AC007632.4; EXPRESSED IN FETAL LIVER, SIGNAL = 0.61; EXPRESSED IN LUNG, SIGNAL = 0.73; EXPRESSED IN HELA, SIGNAL = 0.68; EXPRESSED IN BONE MARROW, SIGNAL = 0.69; EXPRESSED IN ADULT LIVER, SIGNAL = 1.1; EXPRESSED IN HEART, SIGNAL = 0.83; EXPRESSED IN PLACENTA, SIGNAL = 0.81; EXPRESSED IN BT474, SIGNAL = 0.8
gtttcagacttccagcgtccagaatagtgagagaaaaaatctccattgttttaagccatctacattgtggtactttgttatggcagccatgggaaacgaatgcagtaagttatgggcctttgtgccatttggtctcagtcataactactcagtgctaactgtgtggctgtaaagcaaccttagacaatgtgaaaagaaaacagctctgttccaataaaactttatttacagaaacaatcagaccgactttggctccatggctgtaggtacaccatatgccattcctcttcctcccttttcctccatgtcactctcctcctttttcatctcctcctcagatgtctccttgttcctctttccgttatcatcccccaccttcctgttcttgttattcttattagtatcatggtcagaataactattctggctctgtacctcccctaacaggattttg

SEQ ID NO: 2877 - DNA, 348 bp, Homo sapiens
  MAP TO AC010899.2; EXPRESSED IN BT474, SIGNAL =   1; EXPRESSED IN ADULT LIVER, SIGNAL = 1.3; EXPRESSED IN BRAIN, SIGNAL = 1.3; EXPRESSED IN LUNG, SIGNAL = 1.3; EXPRESSED IN BONE MARROW, SIGNAL = 1.2; EXPRESSED IN PLACENTA, SIGNAL =   1; EXPRESSED IN HEART, SIGNAL = 1.2; EXPRESSED IN HELA, SIGNAL = 1.1; EXPRESSED IN HBL100, SIGNAL = 1.1; EXPRESSED IN FETAL LIVER, SIGNAL = 1.2
tttatgctggcttgatttgctttttgctttctttgccaagtgggtttgccttgctttggagagctgcagaaaataatacaaactctgagagattccaaaagggtatttcggttcttggtgtgatgatgtggttttctttctccaggtccaccatctgctcccctgaacttgatttcaaatgtcaacgagacatctgtgaacttggaatggagtagccctcagaatacaggtggccgccaggacatttcctataatgtggtatgcaagaaatgtggagctggtgaccccagcaagtgccgaccctgtggaagtggggtccactacaccccacagcagaatggcttgaag

SEQ ID NO: 2878 - DNA, 397 bp, Homo sapiens
  MAP TO AC010491.2; EXPRESSED IN FETAL LIVER, SIGNAL =  42; EXPRESSED IN BT474, SIGNAL =  43; EXPRESSED IN ADULT LIVER, SIGNAL = 4.3; EXPRESSED IN BRAIN, SIGNAL =  21; EXPRESSED IN PLACENTA, SIGNAL =  26; EXPRESSED IN LUNG, SIGNAL =  67; EXPRESSED IN BONE MARROW, SIGNAL =  23; EXPRESSED IN HEART, SIGNAL =  19; EXPRESSED IN HELA, SIGNAL =  48; EXPRESSED IN HBL100, SIGNAL =  50
aatggattccactgagccaccctacagccagaagagatatgaggaaatgtggttaagggaagtcagcacttacattaagaaaattggctacaaccccgacacagtagcatttgtgccaatttctggttggaatggtaacaacatgctggagccaagtgctaacatgccttggttcaagggatggaaagtcacccgtaaggatggcaatgccagtggaaccatgctgcttgaggctctggactgcatcctaccaccaactcgtccaactgacaagcccttgcgcctgcctctccaggatgtctacaaaattggtggtattggtagtgttcctgttggccgagtggagactggtattctcaaacccggtatggtggtcacctttgctccagtcaacgtt

SEQ ID NO: 2879 - DNA, 433 bp, Homo sapiens
  MAP TO AC007111.1; EXPRESSED IN HBL100, SIGNAL = 2.6; EXPRESSED IN HEART, SIGNAL = 1.2; EXPRESSED IN BT474, SIGNAL = 0.98; EXPRESSED IN BONE MARROW, SIGNAL = 0.92; EXPRESSED IN BRAIN, SIGNAL = 1.9; EXPRESSED IN HELA, SIGNAL = 2.2; EXPRESSED IN PLACENTA, SIGNAL = 1.2
tgtaaacaaaatcgtcccccaaacgtgtacttacaaggttaacaatgaatgcctttgcttaactccaattacactctttgaagccacttagccgagcagatgcttaagccccacctattaatttgggtaactggttttcaatttctttttttttattctgcagattaaagacactcaatctttaaccttgaagggcaggcaaaaggtcggctatgctgtcaacatagaagtcagggaccattttcttcttagacacgcagtcactttcctgattattcttcacatcccctagagtggagactccggtgagggtcaggatggtcttcaggccacaggtggcgcctaggaggatgtctgtgtccaggcggtctcccaccatgacggtgcgctcggggttgatgccgtattcctgggacacgcagtcgaaaatgaa

SEQ ID NO: 2880 - DNA, 390 bp, Homo sapiens
  MAP TO AL121575.6; EXPRESSED IN LUNG, SIGNAL = 1.4; EXPRESSED IN HELA, SIGNAL = 1.5; EXPRESSED IN PLACENTA, SIGNAL = 0.95; EXPRESSED IN HBL100, SIGNAL = 1.2; EXPRESSED IN HEART, SIGNAL = 1.1; EXPRESSED IN ADULT LIVER, SIGNAL = 0.99; EXPRESSED IN FETAL LIVER, SIGNAL = 1.3; EXPRESSED IN BONE MARROW, SIGNAL = 1.3; EXPRESSED IN BRAIN, SIGNAL =   1
tgcatttattgagttgctgaccccctgctgatgtagaaaactcatataccaggaaatctgcaaatgtcctcacatgggctaccaaggccctggctccaattctctctaatactctggaaggcagagagtaaaacataaactccattgttgtatggatacaacaatttgccaaatggaatgcaaattaggtttttgacttacctatagccaatctgattaatatgatctgtttccaagagcattttccagagaagacaaagaaagagaggaggggagccctgcatagagaagtgggtaataatgtcgttttcgttgctcattgacttccacttcctatactcctcctccacattttttttcagattaaaacggctttcctgaggcacatta

SEQ ID NO: 2881 - DNA, 1966 bp, Homo sapiens
  MAP TO AC005261.1; EXPRESSED IN HEART, SIGNAL = 1.9; EXPRESSED IN FETAL LIVER, SIGNAL = 1.7; EXPRESSED IN BT474, SIGNAL = 1.5; EXPRESSED IN LUNG, SIGNAL = 1.2; EXPRESSED IN BRAIN, SIGNAL = 1.6; EXPRESSED IN HELA, SIGNAL = 1.5; EXPRESSED IN PLACENTA, SIGNAL = 1.2; EXPRESSED IN HBL100, SIGNAL = 1.2
gttcctccattctgtgaggccctatactgacaaccagcccttctttacactgatcctggccctcttgtcctgccaacaagccagtggactcgcactggtgttagacacacatttgtgatggggctgctgcctcccaccaaagtcagcatgcacttcaccagctcttttttgctttcaggtttttggtgtgaagcagaacatgaggcaccttctgagcagagcgtttctgtagaaggagtgtcacaggtcaggactgctgagtcaggtcttttccagaaagcacacccatgtgagatgtgtgacccactcttgaaagacattttgcacctggctgaacaccagggatcacaccttacacagaaactgtgcacacgtgggctgtgtaggagaagattctcgttcagtgcaaacttttaccagcaccagaagcaacataatggagagaattgcttcagaggggatgatggaggggcctcatttgtgaagagctgtacagtccacatgttagggagatcctttacgtgcagggaggaagggatggacttaccagatagctctggccttttccagcaccagaccacttacaatagggtgagtccatgcagaaggactgaatgcatggagtctttcccacacagctccagtctcaggcaacaccaaggagactatgatggacagatgcttttcagttgcggtgatgaagggaaagccttcctggacacctttactcttcttgacagccagatgactcatgctgaggtgagacccttcagatgcctaccatgtggaaatgtgttcaaggagaaatcagctcttattaatcacagaaaaatccacagtggagaaatatctcatgtgtgtaaggagtgtggaaaagccttcattcacttgcaccacctaaaaatgcaccagaaatttcacactggaaaaagacactatacatgcagtgaatgtgggaaggccttcagccgcaaggacacacttgttcagcatcagagagttcacactggagaaagatcttatgactgcagtgaatgtggaaaagcctacagcagaagctcccaccttgttcagcaccagagaattcacacaggagaaaggccttataagtgcaacaaatgtgggaaagcctttagccgtaaagacacacttgttcagcaccagagatttcatactggagaaaggccttatgagtgcagtgaatgtggaaaattctttagccaaagctcccaccttattgagcactggagaattcataccggggcaaggccctatgaatgcatagaatgtggaaaattctttagccataactctagcctcattaaacatcggagagtccacacaggagcaagatcctacgtgtgcagcaaatgtgggaaggcctttggctgcaaagacacacttgttcagcaccagataattcacactggagcaaggccttatgagtgcagtgaatgtgggaaggccttcagccgtaaagacacacttgtgcaacaccaaaaaatccacactggagaaaggccttatgagtgtggtgaatgtggtaaattcttcagccatagctccaaccttattgtacaccagagaattcacactggagcaaagccttatgagtgcaatgaatgtgggaaatgctttagccacaactccagcctcattttgcaccagagagttcacacaggagcaaggccttatgtgtgcagtgaatgtgggaaggcttacattagtagctcccaccttgttcaacacaagaaagttcacactggagcaagaccttatgagtgcagtgaatgtgggaaattctttagccgcaactctggcctcattctgcaccagagggttcacactggagaaaagccttacgtatgcagcgaatgtgggaaagcctatagcagaagctcccatcttgttcgtcaccagaaagctcacactggagaaagagctcacgagtgcaacagttttggtg

SEQ ID NO: 2882 - DNA, 1955 bp, Homo sapiens
  MAP TO AC005366.1; EXPRESSED IN LUNG, SIGNAL = 1.4; EXPRESSED IN BRAIN, SIGNAL =   2; EXPRESSED IN HELA, SIGNAL = 1.3; EXPRESSED IN PLACENTA, SIGNAL =   1; EXPRESSED IN HBL100, SIGNAL = 1.1; EXPRESSED IN BT474, SIGNAL = 0.95; EXPRESSED IN BONE MARROW, SIGNAL = 0.97; EXPRESSED IN HEART, SIGNAL = 1.5; EXPRESSED IN ADULT LIVER, SIGNAL = 1.1; EXPRESSED IN FETAL LIVER, SIGNAL = 1.2
aatctgatcccctctttcaggaagagtagagaaaacagccacctttgtccaagtgactgcctggtgcactgtaccctgtgcactgtagcctcctgtgctcccacattccatcatcatgcttccacaacagcctggctcttgatcaccaattactttcatttcttactcagatataggcatgacccgcccccaatgctaaactgtgacaactctggttaattcacgaaacagttacaaagcacagcgtctaccacatagttacctcttacaaaaatggtgacatcactatgggcacttactgagaggccagtactctctaggacatggcctagccatatgcctggatcagaataaccctcaagcatttgttgagcctgcaaaggtctcacctctagcccatagagaagatcagagggtgggcagcttgggcgaacaggctcccctgccataggtgcactgggtgacttcaccatcatgaagctatcactccgagtgggtgcagaagccaagggtgtacagccatgagagtggcctcccacatcaacaaacttgatagggtcatctgaccctagctggattcggaggatcccattggaagggggaagcccctccctccttcgagatctggtgagacaggcacaggtgccagcaggaaagcatgtgactccacaggctgccccacgaagacacttagagagtagtgccacgaatgagccaaaggagacaaagcaaattgccactagggacacagccaagtagagggttagacgagattctccttcccttggagctgaagattctcgaagatctgggacaactggatgagtgtcttcctctaaggacactaagagagtaacagaggtagagagtggtggactaccactatcctttaccacaatgaccagcttctgtggtgggaggtcagctgggataggaacagccgtccgcacctccccagcatatcgagagactgcaaacaggctgggatctggggcctccaggagctgataggaaacccaagcattgtaacctgaatccaagtccacagcagtcacctttgtgattaggtggccagcaccaactgatggaggcagtgcttggggacataaggaaccaggccgggcccgaggacggagcacagctggagcattgtcattgaggtccagcacaaatagacgaactgttacagtgctgctaaggggtgggttgccccgatcccgggcctgcacctcaaactgcagtgtctgggtttgctcatagtcaaaggatcgagtagcatgaacagctcctgtctgggggttcagagagatgaaagaggaagctgatacatctcgattcctgggctccaggagtgagtaggagataagcgcattcaagccagagtctgggtcagaggctgcaagggagcaaagcaggtcccctgggcgattgttctcaggaacaaacacctcatgtgacctctgaaagaaagagggtggattatcattcacatctgaaatattgaggaaaatagttctgtgggtactgagaggagggttcccagcatcagaagcagtgaccatgatgtcatagctagatttggcctctcgatccaagggtccagcagtcaccagggagaactggttcctgaaggcagacttgagggcaaatggcaagtggtcaggaatgcggaggctcacatctccgtttgaccctgagtctggatcctgcacactgataagtgccaccacagtgccaggttctgcactctcggggagggttccaagctctgaggtcactgtgatgtaaggggcattgtcatttacgtccagcagatccactcgaaggctgcaatgttgctccatggctggagaacccccatcgcgagcccgcacatcaaattcatagtaattctcactctcaaagtctaggggccccaaaagagtaagctttccagtagtggggtgcaggctaaa

SEQ ID NO: 2883 - DNA, 375 bp, Homo sapiens
  MAP TO AP000014.2; EXPRESSED IN BONE MARROW, SIGNAL =   1; EXPRESSED IN LUNG, SIGNAL =   1; EXPRESSED IN PLACENTA, SIGNAL = 1.2; EXPRESSED IN ADULT LIVER, SIGNAL = 1.3; EXPRESSED IN BT474, SIGNAL = 0.97; EXPRESSED IN HEART, SIGNAL = 1.1; EXPRESSED IN HBL100, SIGNAL = 1.2; EXPRESSED IN BRAIN, SIGNAL = 0.98
cccagaggcatctttgtgtctccatctttcaccccactgccaacagatgccaagtcctgtggcttccttttcctaaaagcctttcctcatggtccctctttgctgtccccaaagcaccagaactctttgggttgtggaaataagtgaaaatcaaccaagtgaggaaaacagaggctatttattcacacgtgctgtagtaagggaccatcacgtgcatttggtaacggcccaaaggcaggcaggggagtgagaaagcttcatgttggaaaagggggaaggcctcaggcatgccctgatggaaactgtcatcatggggaagctgcaggtgagctacctagaaatggacatcctgtgtgattggtgagggggcatatt

SEQ ID NO: 2884 - DNA, 429 bp, Homo sapiens
  MAP TO AL121763.5; EXPRESSED IN BT474, SIGNAL = 0.98; EXPRESSED IN BRAIN, SIGNAL = 0.99; EXPRESSED IN BONE MARROW, SIGNAL = 1.5; EXPRESSED IN PLACENTA, SIGNAL = 1.2; EXPRESSED IN HBL100, SIGNAL = 1.2; EXPRESSED IN HELA, SIGNAL = 0.94; EXPRESSED IN HEART, SIGNAL = 1.1; EXPRESSED IN FETAL LIVER, SIGNAL = 1.2; EXPRESSED IN ADULT LIVER, SIGNAL = 1.2
ttttctccactggctcatcctagagatacagccttcattcatggattctgttccccaccaagcccagcctagatacctcctctatttcacaaaccctctcatctgacctatcaacatgccttctagttagtgaggcttgtactaattttacagtgcttgggtgcagaagagaacagactgagaggtaggtggggctgcagaaacccactgggaaacctagacctccctagagagtgaacacaagttcactcagagtggccaagagaatatgacaaatgcaggttccacccaggttgctagcatacttgaggagtcaaagatggtggtggagctgcccagcaaagatgttcaagtgaaggcatcaggagatggggatgctgagagtcagaagctagatgatgaagcaacagctttgctgcatttcaggat

SEQ ID NO: 2885 - DNA, 436 bp, Homo sapiens
  MAP TO AP000018.2; EXPRESSED IN BT474, SIGNAL = 1.3; EXPRESSED IN BRAIN, SIGNAL = 1.9; EXPRESSED IN BONE MARROW, SIGNAL = 1.5; EXPRESSED IN HELA, SIGNAL = 1.2; EXPRESSED IN ADULT LIVER, SIGNAL = 1.3; EXPRESSED IN FETAL LIVER, SIGNAL = 1.2; EXPRESSED IN LUNG, SIGNAL = 1.1; EXPRESSED IN PLACENTA, SIGNAL = 2.1; EXPRESSED IN HEART, SIGNAL = 1.5; EXPRESSED IN HBL100, SIGNAL = 1.4
gctgctatcactactgctgccactactatcaaaactactaccattactactactaataacataactactattgtcactactattaccactaccattagtactaccaccactatcatcactaccatcactactaatactatcattaccactactattaccattaccacgactatcattactactactaccacctccaccattactactactaatgctatcattactactactgcttctataattactactcctactcctaccattactactactagtagtatcaccattactactactactatcattactattaccaccaccattactactatcattactactactaccaccaccattactactactgctgtcattactactactgctactatttactcctaccgttactactactaccaccaccaccattactact

SEQ ID NO: 2886 - DNA, 408 bp, Homo sapiens
  MAP TO AP000351.3; EXPRESSED IN PLACENTA, SIGNAL = 2.1; EXPRESSED IN HEART, SIGNAL = 2.8; EXPRESSED IN ADULT LIVER, SIGNAL = 2.9; EXPRESSED IN BT474, SIGNAL = 2.5; EXPRESSED IN LUNG, SIGNAL = 2.2; EXPRESSED IN BRAIN, SIGNAL = 2.7; EXPRESSED IN HELA, SIGNAL = 2.3; EXPRESSED IN HBL100, SIGNAL = 2.6; EXPRESSED IN FETAL LIVER, SIGNAL = 3.2; EXPRESSED IN BONE MARROW, SIGNAL = 2.8
gtcttttctggctgtgggaccctgtgtgagtcacttctccttctgagcctcagtgtcctcatctataaaatggggctttacaaacccctcaccgcagctatattaagaggcttccaagtgtccccagggagggggacatcctagcccatcacacacatggtggaggagggaaaatccaatcagagaacccctaaagcaggtcatgctgccttacacttggctatgcccagcccctccgctgactctgtcttcccctagcccatcagtgctggctgctgagtctttgaaagcggacccacggtggcagcatggtgcccaacacgtggaggctgcagtgcgggaggacctcttccaggaggccctcccagctgtcctgaaggccaaggacctgcctccagtagaacctgc

SEQ ID NO: 2887 - DNA, 437 bp, Homo sapiens
  MAP TO AC007126.5; EXPRESSED IN BONE MARROW, SIGNAL = 1.3; EXPRESSED IN LUNG, SIGNAL = 1.3; EXPRESSED IN BRAIN, SIGNAL = 1.3; EXPRESSED IN HELA, SIGNAL = 1.5; EXPRESSED IN PLACENTA, SIGNAL = 1.2; EXPRESSED IN HBL100, SIGNAL = 1.2; EXPRESSED IN HEART, SIGNAL = 1.1; EXPRESSED IN FETAL LIVER, SIGNAL = 1.3; EXPRESSED IN BT474, SIGNAL =   1; EXPRESSED IN ADULT LIVER, SIGNAL = 1.6
tgctaacgttggtgggattgcacctccctggactagctaattcctagtggttactaaaaactggttctgagcatgtctttcatatgcaaaccaacaaatccagagcccatacccctagcacctcctttacagagattttatacttcaggccactatttcccttatcgccttagggccaggtaccagtaagataggggcaccctccatgccctagaacctgctaaaattatgcacactagccagtcctaatgcttaccctgtctcacccatttctctggaaaccacaacaaaggctcttgcccccagttccccttctcccctctgcccaggggtcagaccctgctgcttccctgcatggccttgcatagagtggcatgagaactgtgagaggacttcttccttcatgacagtcatttctctgcctgtgtgtcttacca

SEQ ID NO: 2888 - DNA, 478 bp, Homo sapiens
  MAP TO AC007681.2; EXPRESSED IN FETAL LIVER, SIGNAL = 0.69; EXPRESSED IN LUNG, SIGNAL = 0.74; EXPRESSED IN HELA, SIGNAL =   1; EXPRESSED IN BT474, SIGNAL = 0.84; EXPRESSED IN PLACENTA, SIGNAL = 1.2; EXPRESSED IN HEART, SIGNAL = 1.3; EXPRESSED IN BRAIN, SIGNAL =   1; EXPRESSED IN ADULT LIVER, SIGNAL = 1.1; EXPRESSED IN HBL100, SIGNAL = 0.79; EXPRESSED IN BONE MARROW, SIGNAL = 0.78
ctaaaaaccagacccgatgcctcaagcagaccgtatagcacacttacgatgctgtgccttgatgcaaaagaaaaactgggccaaatttctccctaccataaaggtttgttacaaaatagaatgcttttgattcagaacccccgttctagaataaccatggtttctaactcacacttacttcttccacactccagttgactgagccccacaggatacctgacccacaccttgccaccctcaacaggtattgtgccccaggaaaagacttccgattggaggaggtgcttatcattaccatcttacctcccgtctacccaagcataccagaaactcagagagatgaaaatgataagcacctcctccatcttatggacccttctctggcctaactgctgtcaaccccctggatttttctctaacaccccccactagcagcaggtgcactctctcctttacttgtccttgctgaggtgaaacc

SEQ ID NO: 2889 - DNA, 460 bp, Homo sapiens
  MAP TO AC007200.1; EXPRESSED IN BRAIN, SIGNAL = 6.4; EXPRESSED IN LUNG, SIGNAL =  12; EXPRESSED IN HEART, SIGNAL = 6.4; EXPRESSED IN FETAL LIVER, SIGNAL = 6.7; EXPRESSED IN BONE MARROW, SIGNAL = 6.1; EXPRESSED IN PLACENTA, SIGNAL = 6.8; EXPRESSED IN HELA, SIGNAL = 8.1; EXPRESSED IN HBL100, SIGNAL = 6.9; EXPRESSED IN BT474, SIGNAL =   7; EXPRESSED IN ADULT LIVER, SIGNAL = 6.5
agattctccaagtccccaccagattaactagatacagagtgccgattggtgcattcataaaccctgagctagacacagggtgctgattggcgtgtttacaaaccttgagctagatacagagtgctgattggtgtatttacaatcccttagctagacataaaggttctccaagtccccaccagactcaggaacccagctggcttcactcagtggatcccgcaccagggccacaggtggagctgcctgccagtcccatgcgccctgcacccgcactcctcagcccttaggcggtcgatgggactgggtgccgtggagcagggagcggtgctcctccaggaggctggggctgcgcaggagcccatggcaggtggggggaggctcatgcatggcaggctgcaggtcccgagccctgccctgcgggggcagctaaggccaggtgagaaatcaagcacagcagctg

SEQ ID NO: 2890 - DNA, 358 bp, Homo sapiens
  MAP TO AC009959.3; EXPRESSED IN PLACENTA, SIGNAL = 2.1; EXPRESSED IN HELA, SIGNAL = 1.7; EXPRESSED IN HEART, SIGNAL = 1.6; EXPRESSED IN ADULT LIVER, SIGNAL = 2.1; EXPRESSED IN BT474, SIGNAL = 1.5; EXPRESSED IN FETAL LIVER, SIGNAL = 1.6; EXPRESSED IN BRAIN, SIGNAL = 1.6; EXPRESSED IN BONE MARROW, SIGNAL = 1.3; EXPRESSED IN HBL100, SIGNAL = 1.4; EXPRESSED IN LUNG, SIGNAL = 1.7
ggattaaatgggcctgttccggctttgtctgcagacttcctttgccaagtagatccagtgccataaggccccagtgtgctagttaggttcagctttacgccatagagtttgtaaggcagccgtgtccccctccctatttctgttgttttgttgatttaatcctaggatgtggtttggttggtttatagctttttaaaggtatattgaatttgcctcctggttcatctctcccagaacgaggcagaagtagccttttgggttaagactctggccccggaagccaaggaacctttgacccctagtcaacctgtggaatctgagctacctctagagagactcacaatgactgagccggtta

SEQ ID NO: 2891 - DNA, 483 bp, Homo sapiens
  MAP TO AC005497.2; EXPRESSED IN ADULT LIVER, SIGNAL = 1.3; EXPRESSED IN BONE MARROW, SIGNAL = 0.95; EXPRESSED IN HELA, SIGNAL =   1; EXPRESSED IN BRAIN, SIGNAL =   1; EXPRESSED IN HEART, SIGNAL = 0.95; EXPRESSED IN PLACENTA, SIGNAL = 0.84; EXPRESSED IN BT474, SIGNAL = 0.94; EXPRESSED IN HBL100, SIGNAL = 1.1; EXPRESSED IN FETAL LIVER, SIGNAL =   1; EXPRESSED IN LUNG, SIGNAL =   1
tccacctgctgagagctacctccaccattcaatgaaaccttggacttattctccaagcccgcgtataaacagatttttccagtacactagggcaaccccgggatacagaaagccctctgtccttgcagtaagacagagggtctaattgagctgattaacacaagacgagtgcagatggctaagttgaaagaggacactgtaacacatgcccactggtgcttcaggagctgtaaacactcagccctagatgatgccgtgaggttggagcccacgttccccacgacctgcctatctgcattctccccctagggggttgaactgcagggcgctgaagaagccagccagtccccatgtcacacaccctgtgaggggaataaggaaactcttcctgtttcaactggggccttgcctgagatcccggaaggtgagtgcaaaagtgaaactgttggatctgcctcttttccaaaatcctgccacctgtct

SEQ ID NO: 2892 - DNA, 426 bp, Homo sapiens
  MAP TO AC007221.1; EXPRESSED IN HBL100, SIGNAL = 3.9; EXPRESSED IN HELA, SIGNAL = 4.1; EXPRESSED IN HEART, SIGNAL = 3.9; EXPRESSED IN FETAL LIVER, SIGNAL = 4.1; EXPRESSED IN BT474, SIGNAL = 4.4; EXPRESSED IN ADULT LIVER, SIGNAL = 4.6; EXPRESSED IN BRAIN, SIGNAL = 3.4; EXPRESSED IN PLACENTA, SIGNAL = 3.8; EXPRESSED IN LUNG, SIGNAL = 3.9; EXPRESSED IN BONE MARROW, SIGNAL = 3.5
tgtaggcctgaataatgggctgtgatagcctaggctggtgaaagggaacaaaatttctatgagaagtgcaagacgacgatgtttctctgagatggcctttgttgcataagccgtcactgaaatatggggaggagaaacatgataagcaaatggtttctggggacagttatgtgaagtgaagataaagagggaagctttctgagcagcctcctggcagtggctatgaggatttttagaatgttgtacaaaaaaggatagagatggagtggcgaaaatgtgccttctacccagtatccttcctcactctaaaactttctaagcaacatcattaaaaccttcagcatttccttctcctcaacattgtcatcatcaccatggtcatggataccattcgaagcaattgtcatgtgctgggacttccaatcc

SEQ ID NO: 2893 - DNA, 377 bp, Homo sapiens
  MAP TO AC010947.2; EXPRESSED IN HBL100, SIGNAL =   3; EXPRESSED IN HELA, SIGNAL = 3.1; EXPRESSED IN HEART, SIGNAL = 5.9; EXPRESSED IN FETAL LIVER, SIGNAL = 3.2; EXPRESSED IN BT474, SIGNAL = 2.9; EXPRESSED IN ADULT LIVER, SIGNAL =   4; EXPRESSED IN BRAIN, SIGNAL = 2.9; EXPRESSED IN PLACENTA, SIGNAL = 3.1; EXPRESSED IN LUNG, SIGNAL = 3.3; EXPRESSED IN BONE MARROW, SIGNAL = 3.2
gctgtgggaacatgggtatcagaaactctagtatgttaggaatatttcatgtttaacaaaaagaatggctaacaccagaacaattataccctatcaatgaccagctgactttgtcttatagctacataaactacacctgtccataggtgcattaattgtaatgctttttctattgaggtaggaggaggaggaaaaaaggaagagaaggggagaggaggaccaagaagaggagaagagagggtgggagcaagaggaggaggggggagaggaggaagaggaggaggaagaaggggaggagcaagagaaggaccaagaggagatggaggaaaaggaggaggagagggaggagcaagagaaggatggagaggagaaggagg

SEQ ID NO: 2894 - DNA, 408 bp, Homo sapiens
  MAP TO AC008872.2; EXPRESSED IN ADULT LIVER, SIGNAL = 2.3; EXPRESSED IN FETAL LIVER, SIGNAL = 2.5; EXPRESSED IN LUNG, SIGNAL =   2; EXPRESSED IN BRAIN, SIGNAL = 2.3; EXPRESSED IN HBL100, SIGNAL = 2.2; EXPRESSED IN HELA, SIGNAL = 2.1; EXPRESSED IN PLACENTA, SIGNAL = 2.5; EXPRESSED IN HEART, SIGNAL = 1.7; EXPRESSED IN BT474, SIGNAL = 1.9; EXPRESSED IN BONE MARROW, SIGNAL =   2
cagaggagctgtgtgtgtggaaggtcaggcagaaggtgactgagaaggaaataagtcagaggaaggaatatttggttttatttttctttaactctttttgttgctttggtctctatttttatatctcagtttcatgctttgtgacttagatgaaattattgaacttctttatagctcttacgaacaagatattgatgtttgcctaaatttagacctttcctaattctaaattttagtttcttttcatttaccgcctcaggtaaaataaataaataaatgaattctattcccttttgatcttcatttcaggttattcaaaatgtattgctgacagccttcaaaggaatgatacaggcattggatgttttattcagtatattgctgctctgcccttttgtgcagctattc

SEQ ID NO: 2895 - DNA, 376 bp, Homo sapiens
  MAP TO AC007159.4; EXPRESSED IN BRAIN, SIGNAL = 3.3; EXPRESSED IN HELA, SIGNAL =  13; EXPRESSED IN HBL100, SIGNAL =  17; EXPRESSED IN HEART, SIGNAL = 3.2; EXPRESSED IN FETAL LIVER, SIGNAL =   4; EXPRESSED IN BONE MARROW, SIGNAL = 4.1; EXPRESSED IN LUNG, SIGNAL = 3.6; EXPRESSED IN PLACENTA, SIGNAL = 6.2; EXPRESSED IN ADULT LIVER, SIGNAL =   2; EXPRESSED IN BT474, SIGNAL = 6.8
ttgttgaagcagaggcaatgaattatgaaggcagtccatttaagttaacactagcaactttgaaaacgtccgtacagccacagtttcccctgagagctttgaaataccaccacccatactcttacagttgaagtgtggttcaggaacatgatattagtgggcagcacttagttgctggggagaaagaagcagagtcagaagatgaagaggaggaggacatgaaactcttaggtacccctgaagggggtagcaagtttacacagaaaaaagtaaaacttgctgctgatgaagatgatgatatgatgatgcagatgatgatgatgatgatgatgatgatgatgattttgatgatgaggaaactgaagaaaaagctcca

SEQ ID NO: 2896 - DNA, 394 bp, Homo sapiens
  MAP TO AC007228.1; EXPRESSED IN BONE MARROW, SIGNAL = 1.7; EXPRESSED IN BRAIN, SIGNAL = 1.6; EXPRESSED IN LUNG, SIGNAL = 1.8; EXPRESSED IN PLACENTA, SIGNAL = 1.5; EXPRESSED IN HELA, SIGNAL = 1.7; EXPRESSED IN HBL100, SIGNAL = 1.5; EXPRESSED IN HEART, SIGNAL = 1.7; EXPRESSED IN BT474, SIGNAL = 1.4; EXPRESSED IN FETAL LIVER, SIGNAL = 1.5; EXPRESSED IN ADULT LIVER, SIGNAL = 1.8
tgctttatttgttccctgcctgtctctttgtctccctactagaatgtaagccccaggagggcaggaatctccacttgattactgctgtatttctaatgcttacagtcgtgcctagcccctgctggccctctgtaatgattcactgaatgatgaaatgtccatcagtcctcaggttctgaatcttgtgcctggagaaccagagaggaccctggagcaggaggagaaagagaagcttgtctcagaagctccacctcctcctggggcaatgcagagtctcaggcctgagcagacacgggggctgctggagcctgagaggaccaagactctgctgcctcgggagagccgggcctgggagaagcctcctcatcccgcctgcaccaaagactgggaggct

SEQ ID NO: 2897 - DNA, 1963 bp, Homo sapiens
  MAP TO AC005829.1; EXPRESSED IN HEART, SIGNAL = 1.3; EXPRESSED IN FETAL LIVER, SIGNAL = 1.8; EXPRESSED IN ADULT LIVER, SIGNAL = 2.1; EXPRESSED IN BT474, SIGNAL = 1.7; EXPRESSED IN BRAIN, SIGNAL = 1.9; EXPRESSED IN BONE MARROW, SIGNAL = 2.9; EXPRESSED IN LUNG, SIGNAL = 3.1; EXPRESSED IN HELA, SIGNAL = 2.8; EXPRESSED IN PLACENTA, SIGNAL = 3.4; EXPRESSED IN HBL100, SIGNAL = 2.2
tgttttctttctggaggcagtttagacaacagcctcaagtagtgcttttgttaaaaatatacatgtttttaaaagtgcttgtatttctaatattcttttctcctttctcttctagtctgttctctggggaggcagtaaggggccgtggagctggcctcggcctcggcatcgggagaggctggacttcctgtctctctgtgctgaatggctgcgatggcgcccgctctcactgacgcagcagctgaagcacaccatatccggttcaaactggctcccccatcctctaccttgtcccctggcagtgccgaaaataacggcaacgccaacatccttattgctgccaacggaaccaaaagaaaagccattgctgcagaggatcccagcctagatttccgaaataatcctaccaaggaagacttgggaaagctgcaaccactggtggcatcttatctctgctctgatgtaacatctgttccctcaaaggagtctttgaagttgcaaggggtcttcagcaagcagacagtccttaaatctcatcctctcttatctcagtcctatgaactccgagctgagctgttggggagacagccagttttggagttttccttagaaaatcttagaaccatgaatacgagtggtcagacagctctgccacaagcacctgtaaatgggttggctaagaaattgactaaaagttcaacacattctgatcatgacaattccacttccctcaatgggggaaaacgggctctcacttcatctgctcttcatgggggtgaaatgggaggatctgaatctggggacttgaaggggggtatgaccaattgcactcttccacatagaagccttgatgtagaacacacaactttgtatagcaataatagcactgcaaacaaatcctctgtcaattccatggaacagccggcacttcaaggaagcagtagattatcacctggtacagactccagctctaacttggggggtgtcaaattggagggtaaaaagtctcccctgtcttccattcttttcagtgctttagattctgacacaaggataacagctttactgcggcgacaggctgacattgagagccgtgcccgcagattacaaaagcgcttacaggttgtgcaagccaagcaggttgagaggcatatacaacatcagctgggtggatttttggagaagactttgagcaaactgccaaacttggaatccttgagaccacggagccagttgatgctgactcgaaaggctgaagctgccttgagaaaagctgccagtgagaccaccacttcagagggacttagcaactttctgaaaagcaattcaatttcagaagaattggagagatttacagctagtggcatagccaacttgaggtgcagtgaacaggcatttgattcagatgtcactgacagtagttcaggaggggagtctgatattgaagaggaagaactgaccagagctgatcccgagcagcgtcatgtacccctgtgagtagacctcatgcatgatagcattcttgagaaatgttggcacaaggaagaatgaatgaatcgccattatggagagaatgtgattctttgtacataggtgtctaggttctgtttgttttttccctgatgttgggtagatgagtgcatatacatgctagtgaagaaggggaagatacttttgctgtagggttgtattgttgtagtctaaatggtggtaatttccttttgaagtctaagaaaaataactaggagacatcttatgtgtaaaattgtactagtacctctttaagagtgaatttagatttcttttgaaactatatataggacatgataagttaatggcctgattgttgagattttgttgtttccagtaagcagggacaaatgctgagttgacctagttacctttgtaggaaattacagttgcttttgattgaactttcagcagagagcacacccagtcttca

SEQ ID NO: 2898 - DNA, 1964 bp, Homo sapiens
  MAP TO AC003682.1; EXPRESSED IN PLACENTA, SIGNAL = 6.2; EXPRESSED IN ADULT LIVER, SIGNAL = 5.8; EXPRESSED IN HBL100, SIGNAL = 5.4; EXPRESSED IN HELA, SIGNAL = 5.7; EXPRESSED IN HEART, SIGNAL =   5; EXPRESSED IN FETAL LIVER, SIGNAL = 6.8; EXPRESSED IN BT474, SIGNAL = 5.8; EXPRESSED IN LUNG, SIGNAL = 6.2; EXPRESSED IN BRAIN, SIGNAL = 4.6; EXPRESSED IN BONE MARROW, SIGNAL = 4.9
attcagttcccatgggtgtctactgggcctggacaccaataatcttctgtgcagtgtaccgaagtcctctcttctcatcaggggaggaagtcctgataaaagcttttggcagaatagtgagtcagagaccctacctgttctctctgagttgtgccccatctttgtgtctttcatctcataaggcctcccttgttctgtgacttgtagaggcttttttccacaaatttccaccagctctcatatcctaaaaacattttcttagactcattctttgacacacatttttgatgtaacttctcacaccatagtaaatctgtgttttctcagcatttctcttctttcaggttgctggtgtggagcagtagatgaggggacgccttctgcagagagcgtttctgtggaagaactgtcacagggcaggactccaaaggcagatacatccactgataagagtcacccctgtgagatttgtaccccagtcctgagagacattttacaaatgattgagctccatgcctcaccctgtggacagaaattgtacttgggtggagcatcaagagatttctggatgagttcaaaccttcaccagctccagaagcttgataatggagagaagctctttaaagtggatggggaccaggcctcatttatgatgaactgcaggttccatgtgtcaggaaaacccttcacgtttggggaagtcgggagggacttttcagccacctcaggacttctccagcatcaggtgactcccaccattgagagaccacacagcaggattagacacttgagagttcccactggacgaaagcctctcaaatacactgaatccaggaaatcttttagagagaaatctgtattcattcaacaccaaagagctgactctggagaaaggccttacaagtgcagtgaatgtgggaaatcctttagtcaaagttctggctttcttcgacacaggaaagcacacggtagaacaaggactcatgaatgtagtgaatgtgggaaatcatttagtcgcaaaactcacctaactcaacaccaaagagttcacactggagaaaggccttatgactgcagtgaatgtggcaaatcctttcgccaggtatctgtcctcattcaacatcaacgagttcacactggagaaaggccttatgagtgcagtgaatgtgggaaatcttttagccacagcactaacctctatcgtcacaggagtgcccacactagcacaaggccttatgagtgcagtgaatgtggaaaatcctttagccatagcactaacctctttcgacactggagagttcacactggagtaaggccttatgagtgtagtgaatgtgggaaagcatttagttgcaatatctaccttattcaccaccaaagatttcacactggagaaagaccttatgtgtgcagtgaatgtgggaaatcatttggccagaaatctgtcctcattcaacaccaaagagttcacactggagaaaggccttatgagtgcagtgaatgtgggaaagtttttagccaaagctctggcctctttcgacacagaagagctcacactaaaacaaagccttatgagtgcagtgaatgtgaaaaatcatttagttgcaaaactgacctcattcgacaccagacagttcacactggagaaaggccttatgagtgcagtgtatgtgggaaatcttttatccgaaaaacccacctcattcgacaccagactgttcacactaatgaaaggccttatgagtgcgatgaatgtgggaaatcctatagccaaagctctgccctccttcagcataggagagttcacactggagaaaggccttatgagtgcagagaatgtgggaaatcttttacccgcaaaaatcacctcattcaacacaagacagttcacactggagaaaggccttatgaatgcagtgaatgtggaaaatcctttagccaaagctctggcctcttaagacaca

SEQ ID NO: 2899 - DNA, 1987 bp, Homo sapiens
  MAP TO AC005866.3; EXPRESSED IN LUNG, SIGNAL = 7.4; EXPRESSED IN HELA, SIGNAL = 6.9; EXPRESSED IN PLACENTA, SIGNAL =   7; EXPRESSED IN HBL100, SIGNAL = 6.4; EXPRESSED IN ADULT LIVER, SIGNAL = 8.4; EXPRESSED IN BT474, SIGNAL = 6.1; EXPRESSED IN BONE MARROW, SIGNAL = 6.2; EXPRESSED IN BRAIN, SIGNAL = 6.6; EXPRESSED IN HEART, SIGNAL = 5.6; EXPRESSED IN FETAL LIVER, SIGNAL = 8.1
caattccttttgcaccaacctaacttgtgattgtgccttacttgcctctcattcccagcaccctgcatagtgacctcgcagaggcacagctcatgccagttctttcagatgaaatgggaaaactctatctgaacagttagctaaagcacttgacatccagaactccaagtccatacataacttcccgttccccatgcaatgattagtgtcttcatgctctccagtgcagtggctggtgtcttcacatgcttccatgtagtagctggaatcttcacattctcccgtgcagtggctggtgtcttcacactcttccgtgcagtagctggtatcttcacactcttctgtgcagtggctggtgtcttcctgctctcccatgcagtggcttgtgtcttcacactcttccgtgcagtggctggtgtcttcacactcttccatgcagtggctggtgtcttcacacactcctgtgcagttgctggtgtcttcacactattctgtgcagttgctggtgtcttcatactattctgtgcagtagctggtgtcttcacactattctgtgtagtagctggtgtcttcacactattccctgcagtagctggtgtcttcacactattccgtgcagtagctggtgtcttcacactctcctgtgcagttgctggtgtcttcacactattccctgcagtagctgatgtcttcacactattctgtgcagttgctggtgtcttcacactattccctgcagtagctgatgtcttcacacttttctgtgcagtggctggtgtcttcacactcttccgtgcagtagctggggtcttcacattcttccatgcagtggcaggtgtcttcgtgctctcccgtgcagtggctggtgtcttcacgccctcccatgcagtgggtagtgtcttcacactcttctggagcactctcctcttcagctgtagccgagacccagcagagctcacagaattcttcttccttatttacaaacttcctcaaatgaccacccattgacaggcaatttaacaacttattggcccatttaaactgattaaaagcagacacatatatgttttggatgtgagccctaggcctttgatgggtctttgctgaatagaattgaattattgaactgaacaaggagcaagtaggtcgaccagtgggttgtttttctacctgcaggtgactccatccaggtgcaaatagcaaggaagcccttgaatccactacaggtgaaagttttgcattgtggtcccatgtgagggaggagacaagtcacctggctattgggtagggatgaaggggataccagggctacagttagactttagcagtgaccccgcttgagcctgcaaagggcgacagctccctatggaaacaacagggatgagtggcagccccctccttggaagccttctcaaagtcactcattagatatgccagatagcctctctctcctggagtaattccttctctccagggtccatcatttgttttgtgatgttaattcatgtgagttgggagtttggttctattgtgttatgttttcctgtatgttttgatttattgaattttttttgtttattttctgtgataaaaatggatgttctatgtgaaagctgagttccttgtttctttctcttgcccgtggctgactgcgtgtgctctattgatgtcttgttcctggttcttgacactgaccatcttgtctgtgaaaggaggcactccggcgggcatgcttgatcagaagaaagggaagtttgcttggtttagtcactccacagaaacccatggtaatgttcccctgtgctctgtgtgtgtaaatgcgtgtgggtgcataccagactgaatgggaaggtgtctctcttgatggcttgtgccgcagtagttctgtgtgtgtgcatatatgtgtatgtatatatgttgtgtgtgtgtgtgtgtttgtgaagggatggcaacctgtccccctcaaagccactgccttatcattgct

SEQ ID NO: 2900 - DNA, 447 bp, Homo sapiens
  MAP TO AL121879.4; EXPRESSED IN BONE MARROW, SIGNAL = 1.7; EXPRESSED IN PLACENTA, SIGNAL = 1.5; EXPRESSED IN FETAL LIVER, SIGNAL = 1.2; EXPRESSED IN ADULT LIVER, SIGNAL = 2.1; EXPRESSED IN BT474, SIGNAL = 1.5; EXPRESSED IN HEART, SIGNAL = 0.94; EXPRESSED IN HELA, SIGNAL = 1.8; EXPRESSED IN HBL100, SIGNAL = 2.3; EXPRESSED IN BRAIN, SIGNAL = 1.1
agatgctgcctggcatttacaggaaaaggcttctgaaatcagacaatgcttttcaaactcttataccaactactggagttgggtgacatggcttctcccctttctaggtcctgtgacagccatcttgctattactcaccttcgggccctgtatttttaacctcctttaggattgaggccatcaagctacagatggtcttacaaatggaaccccaaatgacctcaactaacaacttctaccaaggacccctggactgacccactggccctttcactggcctaaagagttcccctctggaggacactacaactgcaggccccttcttcacccctatccaggaggaagtagctagagtggtcatcatccaattcccaacagcaattggggtgtcctgtttagaggggggattgacaggtgaagccaaccgggcttctgagtcaggtggag

SEQ ID NO: 2901 - DNA, 1952 bp, Homo sapiens
  MAP TO AC005726.1; EXPRESSED IN FETAL LIVER, SIGNAL = 3.1; EXPRESSED IN LUNG, SIGNAL = 3.4; EXPRESSED IN HBL100, SIGNAL = 2.8; EXPRESSED IN HELA, SIGNAL = 6.6; EXPRESSED IN PLACENTA, SIGNAL = 3.3; EXPRESSED IN BT474, SIGNAL = 3.5; EXPRESSED IN ADULT LIVER, SIGNAL = 2.2; EXPRESSED IN BRAIN, SIGNAL = 3.6; EXPRESSED IN BONE MARROW, SIGNAL = 2.6; EXPRESSED IN HEART, SIGNAL = 2.7
cacatggcccctattttcagacaatttagaatccagttgaagagaacttaaaaagtataagtgctcttaaatgtcagacactatcaactgtcagctcagcacattagtgctaacaggaacaaagcaaggcagtaattaatgtgattactcaggaacaacttctgggtggagatggttcttgagccaggtgtgcatgtgtcataatccttgccatctctactgttttgtgacatggtaattgacagatccttttcttctgctccctaaaggttcagtgtggtgcagggctgaccttactttggagccccccagatcacatgtacctgtaccagcatgtcctggccactctacagtgccgagacctactaagagccactgtgtttcctgagactgtaccatcccttgcactagagacttcaggaactacttctgagctagaaggccgtgcccctgagccattacccccaaagcggctgctaaacctaaccctggaggtgagcacagccaagctcacagcttttgtagctgaggacaagttcattaccctggctgcagagagtgtgtcactgagccggcatggaggttccctgcaggcatactgtccagagctggctgctggctttgatggcaatagtatcttcaacttcaaggaggtggaggtgcagctgctacctgagctggaagagatgatcctccaccggaaccccttccctgcgctgcagaccctccggaaccgtgtttggctcctctctttcggctcagtctcggtggagtttccttatcagtatgacttttctcgaactctagatgaggctgtgggagttcagaagtggctgaagggactacatcaagggactcgtgcttgggcctctccaagccctgtcccactcccacctgatctactcttaaaggttgagcacttctcatgggttttcttggatgatgtttttgaggtgaaacttcatgataactacgagctgatgaaggatgaaagtaaggagagtgccaaaagactacagctactggatgctaaagtggccgcccttcggaagcagcatggggagttgttgcctgcccgcaaaattgaggagctctatgcctctttggaacgcaaaaacattgaaatctacatccagcgttcccgtcgtctctatggcaacacacccatgcgccgggcactgcttacttggagcttagcagggctagaactggtagctctggcagatgcctccttccatggtcctgagcatgtggtagaacaggttcaagagcttgatccaggcagcccttttccccctgagggattagatcttgtcattcagtggtgtcgaatgctcaagtgcaatgtcaagagctttctgggtaagtagtgtttcctttatttgcagaccccgtgtttgcccgctgagctctggggagctctcagtgatttcagaggaactaggttatattgggaactgtgccgttttgggtgggtggagtgggatgggtgggcttcccttccctttctttgttcctgaatttcaccgtgaaattgcttggctaacataaagggaaagctaacacagtcatctttaaggttattgtgtctcttggatctcagtgctatgcccttaaccacctgctccagggtcactgtcatttttcagcttgctgtgtcaactgcctgcccttgttctctcaattgactttgtaaatatagatgggtaaaatagtggtgaggaaaaagataggcccgagagtgctcagactgcccctgagtagccagtgtgtacccttcctctggtaacagttcggatcagggactatccacggtacctgtttgagatccgtgactggcggctaatgggtcgacttgtgggcaccgagcagagtggtcagccttgctcccgtcggcgtcagatcttgcacttggggcttccgtggggtaacgtggcagtggagaggaacat

SEQ ID NO: 2902 - DNA, 1888 bp, Homo sapiens
  MAP TO AB011399.1; EXPRESSED IN BT474, SIGNAL = 3.8; EXPRESSED IN BRAIN, SIGNAL = 3.2; EXPRESSED IN BONE MARROW, SIGNAL = 2.7; EXPRESSED IN HELA, SIGNAL = 3.3; EXPRESSED IN ADULT LIVER, SIGNAL = 3.3; EXPRESSED IN FETAL LIVER, SIGNAL = 3.5; EXPRESSED IN LUNG, SIGNAL = 5.8; EXPRESSED IN PLACENTA, SIGNAL = 4.9; EXPRESSED IN HEART, SIGNAL = 3.2; EXPRESSED IN HBL100, SIGNAL = 3.2
ctttttctttttgcagcgtgttacacgttcccaagaagaacttcgagaagataaagcttaccaacttgagcggcatcgaatagaggcagctatggaccgaaagtctgatagtgatatgtggataaatcagagctcctcactggactccagtacctctagccaggagcatctgaaccattcctctaagtcggtcacccctgcttccacactgaccaaaagtggccctggccgttggaaaacaccagcagccataccggccacccctgtggccgtctcccagccaatccgaacagacctgcctccgccacccccgccacctccagtccactatgccggtgatttcgatggaatgtccatggatttgcctctcccaccacccccttccgccaaccagatagggctgccgtctgcgcaggtggctgctgctgaacggagaaagagagaagaacatcagcgttggtatgagaaggagaaggcccgcctggaggaggagcgggagaggaagcggagagagcaggagaggaagttgggccagatgcgcactcagtccttaaaccctgctccgttttctcccctgactgcacagcagatgaagcccgaaaagccttccacactccagcggccacaggaaacagtcattcgggagctgcagcctcagcagcagccccgcacgatcgagcgcagagacttgcagtacattacagtcagcaaagaggagctttcctcgggggacagtctgtcccccgacccgtggaagcgggacgccaaggagaagctggagaagcagcagcagatgcacatcgtggacatgctgagcaaggagatccaggagctccagagcaaaccggaccgcagcgccgaggagagcgaccggctgcgcaagctcatgctggagtggcagttccagaagagactccaggagtcgaagcagaaggacgaagatgacgaggaggaggaggacgatgatgtggacaccatgctgatcatgcagcgcctggaggctgaacgaagagcgagggtaaaggggggagtgctttggctgtgcccatctgtggtccctattttagcttctgcgtgtttcccatggggatagctaggcccctgatcgtgataaggattaaaagggcccctaggcttatactgttttattgtatgtgttactcttggctgatgtcgtagagaaatgagtcaggcctataaggctaaattttttaagacatgctttgacaagtattaaatacaattcaaatggaacttgattgttttcattagcaaactcataattatccttttccttaacacttccagttgagaaaacaagtatttgttaatgaccagtaataatcttgatccagggtaggcaaaatttttcttccagggccagattgatactttaggctttgcaggccacggggtctctggcaacccccagctctgctgttgtagcacaaaagcagccacaggcacaagtaaacacatgggtgtgtctctgtaccaataaaactttatttacagaaacacagggcagatgactgtctggcccctggtcttgtcagcattttgtggtggtgaacaaaagaaactgttcagatcattacatttacagtcattaccaaaaatagaatcttcacagtagttgtactgttgatgaagcaagcatttgttaaggtaataaacaattatattccaattgtagcataaagatattgagaactgattttattcttatttctccacagtatgaaaatgatttttgttttaaataaactaacaaaagtataaattcgtttaacacaataaattgtgatgcagaaattttagataaaagcaagactttgttactctataaagagaactgttaagaggcatttactgctattaatttggg

SEQ ID NO: 2903 - DNA, 447 bp, Homo sapiens
  MAP TO D87675.1; EXPRESSED IN BONE MARROW, SIGNAL = 2.2; EXPRESSED IN HELA, SIGNAL = 3.7; EXPRESSED IN HEART, SIGNAL = 4.3; EXPRESSED IN ADULT LIVER, SIGNAL = 1.2; EXPRESSED IN BRAIN, SIGNAL = 7.5; EXPRESSED IN LUNG, SIGNAL = 4.4; EXPRESSED IN PLACENTA, SIGNAL = 5.9; EXPRESSED IN HBL100, SIGNAL = 3.3; EXPRESSED IN BT474, SIGNAL = 3.7; EXPRESSED IN FETAL LIVER, SIGNAL =   2
aggtttgatgagggttggagagtgcaagaaagtgaagtaagctataaaacgtagaattagtcaatgttggaatgactatgcagtctttaggatactttttagcactagaagaaaatggaataggatgtcttttttagaagacttgaaattgctgcttcatcctacttattcagtccccatggacatatgtgtttatgatggcagcatttccaggagaaagtggaatctttggaacaggaagcagccaacgagagacagcagctggtggagacacacatggccagagtggaagccatgctcaatgaccgccgccgcctggccctggagaactacatcaccgctctgcaggctgttcctcctcgggtaggtctcgctgcagccgagttcacacttcaggtcacagcacagacagtaagggtggggcactgggaactggaagccatacaa

SEQ ID NO: 2904 - DNA, 428 bp, Homo sapiens
  MAP TO AC010807.2; EXPRESSED IN BT474, SIGNAL = 3.3; EXPRESSED IN FETAL LIVER, SIGNAL = 3.3; EXPRESSED IN PLACENTA, SIGNAL = 3.4; EXPRESSED IN ADULT LIVER, SIGNAL = 5.1; EXPRESSED IN BRAIN, SIGNAL = 2.9; EXPRESSED IN LUNG, SIGNAL = 3.4; EXPRESSED IN BONE MARROW, SIGNAL = 2.5; EXPRESSED IN HEART, SIGNAL = 2.9; EXPRESSED IN HELA, SIGNAL = 3.5; EXPRESSED IN HBL100, SIGNAL = 3.3
ttttggtatagaccctgctcaagtcagtaaaataatattgaactgtgagctcagtgtggccagagcagtggcctctatttatgtcccatgagacaaactgctggaaccggacaagggtaaaataccattgtttctattgtgggctgccttctccacacttgccatttcagtgatatgctgggtatgagatctgtcaacagatgctggtagcacatgatgacgtccgtggcgttataatggatgtgatgcctaattatatctacagttcagagagtctcatgggctatggtaatccttgctctgtggtgtggaaggaaagccttgctgtagaaggactttataaaagtgtaatgagttttataagagaagggaatgcagaagatagtgggtttagcatgagtgcgaataggcgtttcaacgtgtctacc

SEQ ID NO: 2905 - DNA, 468 bp, Homo sapiens
  MAP TO AP000168.1; EXPRESSED IN LUNG, SIGNAL = 0.69; EXPRESSED IN BRAIN, SIGNAL = 0.88; EXPRESSED IN HEART, SIGNAL = 0.95; EXPRESSED IN BONE MARROW, SIGNAL = 3.7; EXPRESSED IN BT474, SIGNAL = 0.75; EXPRESSED IN ADULT LIVER, SIGNAL = 0.79; EXPRESSED IN HELA, SIGNAL = 0.79; EXPRESSED IN FETAL LIVER, SIGNAL = 0.66; EXPRESSED IN HBL100, SIGNAL = 0.69
atgtaagctattgcgggcagggatctttgcatgggttgttcttcattgcatcccaggccactagaacagtgtgtggcatatggcaggagtgcaataaacattcagcgaatgcaggcaggcatgcgtgaacgcatgaataataagtgttcctttcaactaccagaaagagcgaaaccacacaggagctgtctcaccctcagagatttaagacgacagcaatgagtccctctgatgtcttctaagtgagctttattttcaaaacaaatcattttccaataacctatcaaaagcaggtcctacctgaatatccttggctatttcctctggatacagataatgccttcctccaatggatcctcggctcacctgatgattgtgtgaaactggccagagaaagcagagggatttttcctggtgattggaaatcagagtcacggctgaatttaagcaactgtgtgaactcagcaa

SEQ ID NO: 2906 - DNA, 475 bp, Homo sapiens
  MAP TO AC007002.2; EXPRESSED IN FETAL LIVER, SIGNAL = 1.1; EXPRESSED IN LUNG, SIGNAL = 1.1; EXPRESSED IN HELA, SIGNAL = 0.97; EXPRESSED IN ADULT LIVER, SIGNAL = 1.1; EXPRESSED IN PLACENTA, SIGNAL = 1.5; EXPRESSED IN BT474, SIGNAL = 1.1; EXPRESSED IN BONE MARROW, SIGNAL = 1.5; EXPRESSED IN HBL100, SIGNAL = 0.91; EXPRESSED IN BRAIN, SIGNAL = 0.9; EXPRESSED IN HEART, SIGNAL = 1.2
aggagacaacacatccctggatgcgccccagtctgagagtgaaatgtgcgtgtgttcaagttgagctgatccatgaagcagaccctggaattcattgcactcatctgctgaatcccaaatggaaacaaatacaaatacactttataaacaaagagagagtcttaaaacgagaacaaaccaatgagccggtctgaactggaaccaaagctctgggttgtctgatgattttctttcaatctaaacagagccccgccaccccattccctctgagacctgactttcctccaggctcggatgccggtggctgctgcaccccattccctgcagcccagccacgtgccgggtgctctccagctttcttccagctgccagcggctcctcttacaatgccaaccagcagtgaggggagacagtgtgtcccttgccttttgtgggggatgacatttagcagacatgttcctctcggatctgggac

SEQ ID NO: 2907 - DNA, 389 bp, Homo sapiens
  MAP TO AC011281.2; EXPRESSED IN BT474, SIGNAL = 1.2; EXPRESSED IN BRAIN, SIGNAL = 1.2; EXPRESSED IN LUNG, SIGNAL = 1.8; EXPRESSED IN PLACENTA, SIGNAL = 1.3; EXPRESSED IN HBL100, SIGNAL = 0.99; EXPRESSED IN HELA, SIGNAL = 1.3; EXPRESSED IN HEART, SIGNAL = 1.3; EXPRESSED IN FETAL LIVER, SIGNAL = 1.1
acctgcagccaaaattaacccttctggatcaaaagaacaaactggcttcccctgtagactcatgaggccctggcagttaggagcccggagatcccagagtcgaatggtcttatcaagagacccagaaatgaaaatgtcatccacaggtgacatggacaaggccaccactcttttgctatgtccaggaaagtatctgatgtatttgttgtcatgcaaggacaagtaacgaatagtatcgtctattttgttagagctgtaaacagctgtgtttgcctcatgagtgtatctgatgaggtccacgccatatttcttactgtacagggttctctttggtttgccctcctggcagtcatatagcacgatggagtcgtcgttgctgcttgagatga

SEQ ID NO: 2908 - DNA, 380 bp, Homo sapiens
  MAP TO AC009972.3; EXPRESSED IN HBL100, SIGNAL = 5.5; EXPRESSED IN HELA, SIGNAL =   7; EXPRESSED IN HEART, SIGNAL = 5.5; EXPRESSED IN ADULT LIVER, SIGNAL = 8.2; EXPRESSED IN BT474, SIGNAL = 5.6; EXPRESSED IN FETAL LIVER, SIGNAL = 6.6; EXPRESSED IN BONE MARROW, SIGNAL = 4.9; EXPRESSED IN PLACENTA, SIGNAL = 7.5; EXPRESSED IN BRAIN, SIGNAL = 5.7; EXPRESSED IN LUNG, SIGNAL = 7.5
atgttagggttggggagaggtgatgatcaacagcagagttttctgcaccatcctcccagcgtatatattctttctatgtgtgccaaggcagtggatatatgccaaggcatgggccctgcccccccaaaataatttaagctacacaaactttagacatgaagcatgtcaaataggaaggtacttaatttttaaggcataaatatgtttaacggatttttagggtcttttaactttttggattatggatttctctgacactgttgaaagctgcagaccttcttaccagaaaaaaaaagtgcacaataaaaatttcatctgcaagctcagaggcaccaaggaccaccctgtggtctactatggctcctcctggattctgtgga

SEQ ID NO: 2909 - DNA, 467 bp, Homo sapiens
  MAP TO AC007743.2; EXPRESSED IN FETAL LIVER, SIGNAL = 0.66; EXPRESSED IN LUNG, SIGNAL = 5.9; EXPRESSED IN HELA, SIGNAL = 0.62; EXPRESSED IN ADULT LIVER, SIGNAL = 0.94; EXPRESSED IN BRAIN, SIGNAL = 0.73; EXPRESSED IN PLACENTA, SIGNAL = 0.86; EXPRESSED IN BT474, SIGNAL = 0.74; EXPRESSED IN BONE MARROW, SIGNAL = 0.67; EXPRESSED IN HEART, SIGNAL = 1.1
tgagaaatgatgaggatctgaacaaggagaggccctctctgaacctgacatggaggagaagatataaaagatgttgtagatgccaaatctttgaatattagcaactgatggagggggagagaaaggtaatgaagatggtggtaagatgttgacatcattttcaccaacagaaataaaaaatcatcagtaagggctgttctttaatcagctattataatgggtttggatttatactttcttaaatcatagccatgttaggatttatcagagatgttctcctttgaggtgttgacttggtaactgtacatgatattgaaggagtgaattggcttccgagtagggagtgtgagaatgcaggggatggagaacagggtcccacagcaaacctgcaggtaagaggtgggggaggccatggaagcatggctgtgggagaagatgaagaagaatgaagctggtgctgtggtaca

SEQ ID NO: 2910 - DNA, 417 bp, Homo sapiens
  MAP TO AC007496.2; EXPRESSED IN LUNG, SIGNAL = 2.3; EXPRESSED IN BONE MARROW, SIGNAL = 2.1; EXPRESSED IN HELA, SIGNAL = 2.3; EXPRESSED IN HEART, SIGNAL = 1.8; EXPRESSED IN PLACENTA, SIGNAL = 2.1; EXPRESSED IN BT474, SIGNAL =   2; EXPRESSED IN ADULT LIVER, SIGNAL = 2.8; EXPRESSED IN BRAIN, SIGNAL = 2.2; EXPRESSED IN HBL100, SIGNAL = 2.5; EXPRESSED IN FETAL LIVER, SIGNAL = 2.1
tgctcagcatacacaaaatgcttgataaatgttagaaattggtattaggactattggcagcagcattatgtgtatgaagtcttgggggaaatatcacagaagaaaagatatggatattgatttacaaaacccaaaatcctaaaatatcacagccatgactatgaatgactacttatttttgttttttccccaaagcacttacaccatatctcccatctctctccttctacgagtagagaaatcactctgcctcctctgtttgacaaaaagccatggagccacagcagcctgcctgccactgcagaaactctcggggacagtcatgtgggcgaccgctggaatgttcaggctgctgtgggaaaagatggcctgccccatacgtttaagctcggatgctggggcaatgtacgaaagcta

SEQ ID NO: 2911 - DNA, 399 bp, Homo sapiens
  MAP TO AC012067.1; EXPRESSED IN FETAL LIVER, SIGNAL = 6.4; EXPRESSED IN BT474, SIGNAL = 4.8; EXPRESSED IN ADULT LIVER, SIGNAL = 7.1; EXPRESSED IN BRAIN, SIGNAL = 5.2; EXPRESSED IN LUNG, SIGNAL =   6; EXPRESSED IN BONE MARROW, SIGNAL = 4.4; EXPRESSED IN PLACENTA, SIGNAL = 5.7; EXPRESSED IN HEART, SIGNAL =   5; EXPRESSED IN HELA, SIGNAL = 6.3; EXPRESSED IN HBL100, SIGNAL = 4.5
tggaaaattctatctatgccttaacaaagtcactataataaatttcattcagcgtagttatgatcatacatttaaaatattataaactgccttatacttgccatccatctaattctgtatgtttacctttcaaaaatgtgtcactattcacaataacataataaattagcccatgttattatggctatgatagcttgagttgcaaacacagtaagcccgtttatattgaggaaccagagaggtatcacttactagattcaggatcggagttgccatccccttcagtgcgattgctgggtgtagcacgatcaaagtactcctcctgaggatagccaaggggcaggccatgggatgtgctggtaaggctgcctgcatcatggtctcccagtccaccatcac

SEQ ID NO: 2912 - DNA, 478 bp, Homo sapiens
  MAP TO AC007652.1; EXPRESSED IN HBL100, SIGNAL = 0.82; EXPRESSED IN HELA, SIGNAL = 0.92; EXPRESSED IN ADULT LIVER, SIGNAL = 0.88; EXPRESSED IN HEART, SIGNAL = 3.9; EXPRESSED IN PLACENTA, SIGNAL = 0.97; EXPRESSED IN BRAIN, SIGNAL = 0.95; EXPRESSED IN LUNG, SIGNAL = 0.98; EXPRESSED IN FETAL LIVER, SIGNAL = 0.88; EXPRESSED IN BONE MARROW, SIGNAL = 0.95; EXPRESSED IN BT474, SIGNAL = 0.7
aaccaccttgtgagccaatccatggcaacatctgaggatgacacactgcaaggccaggccgctcagcacctagagcgcctgaagaggacacattcatcaggaagaaaataggattaaaataaaaggaattgctactgccagaacttccctcaggagtcctggttgagtccccactctttaacttaaagcctcaaatatcagtttgaggaaatatcagcttgtttggaaactcatctgttctagctttggatttatgaacagggcatttttttttttttttttttttttttgcttttgagaacatggatggctgtgtcttcacagaacagagaccgccacaccctcttgcgctgtggggactgaaggagccggggggagtcctgactcctcatgccattctggagagccacacagactttggtgtttgcgaggtgattttctcaggccttggggcctaggacctagcgttatctagccc

SEQ ID NO: 2913 - DNA, 399 bp, Homo sapiens
  MAP TO AC011301.3; EXPRESSED IN HBL100, SIGNAL = 8.9; EXPRESSED IN HELA, SIGNAL =  10; EXPRESSED IN HEART, SIGNAL = 9.5; EXPRESSED IN FETAL LIVER, SIGNAL =  12; EXPRESSED IN BT474, SIGNAL = 9.3; EXPRESSED IN ADULT LIVER, SIGNAL =  11; EXPRESSED IN BRAIN, SIGNAL = 9.3; EXPRESSED IN PLACENTA, SIGNAL = 9.2; EXPRESSED IN LUNG, SIGNAL =  11; EXPRESSED IN BONE MARROW, SIGNAL =   8
tctgaagtgtaacagagaatctgaagaattctttaacagaagtgttcagttcatataagaggttaattttctcagtattgaccaagaagaacaatttctttatatgccagtcattcgtagtaacagccggcaattcaccttgaacagtggacccaaatcacgacttgttactttgctaatattttaaagattaccgttttcttcttcctcttcctcctcctcctcctcctcctcttcctcttcttcatcctccacatcttctccatcctcgtcatcgtcctcatcctcctcctcgatctcctcctcctcctcccggtccccctcctcgtcctcctcgtcctcatcccctggctcatcattgtcctcggagtactcctccccctcatcctcctccttctc

SEQ ID NO: 2914 - DNA, 1971 bp, Homo sapiens
  MAP TO AL008628.1; EXPRESSED IN BONE MARROW, SIGNAL =   1; EXPRESSED IN BRAIN, SIGNAL = 1.8; EXPRESSED IN LUNG, SIGNAL = 1.1; EXPRESSED IN HELA, SIGNAL = 1.1; EXPRESSED IN PLACENTA, SIGNAL = 1.4; EXPRESSED IN HBL100, SIGNAL = 1.2; EXPRESSED IN BT474, SIGNAL = 1.1; EXPRESSED IN ADULT LIVER, SIGNAL = 1.6; EXPRESSED IN HEART, SIGNAL = 1.4; EXPRESSED IN FETAL LIVER, SIGNAL = 1.5
agaagggcagccttgatttcccactcagcaggcaggaagccaccttctagatcagcagaggtcctccctggaaactccataggcctgtgggacaccagcttctgtggcttcctgtgggacaccagcttctgtggcttgcttggaagactggaggggagctggacaagcttgatgcctgctgtttggtgacctaggactcattccaactccccttcccaggtggctgcaggacttgcatttaatttccttctccagacagctgcaggatgtacccttcattcccttcccctgatggctgcaggatgtgacccacattcccttccccagaaggctgcaggacatgcccctcattcccttcccctgatgggtgtggaacataccactcattccctttccttaatgggggcagaatgtgcccatcattcccttttcctgatgggtgcaagacataccagtcagtcccttctcctgatggctgcaggatgggcccatcgttcccttttcctgatgggtgtggaacataccactcattccctttccttaatgggggcagaatgtgcccatcattcccttttcctgatgggtgcaagacataccggtcagtcccttctcctgatggctgcaggatgggcccatcgttcctttcccctagtggaggcaggacatgccactcattcccttgccttaatgagggcagaatgtgcccaccattcccttcccctgatgggtgcaggacatgcccatcagtcccttctcatgatagatgcaggacatgcccatcattcccttcccctgatgggtgcaggacatgcccatcattcccttcccctgatggctgcaggacatgcccatcattcccttcccctgatggctgcaggatgtgcccatcattcccttcccctgatggctgcaggatgtgcccatcattcccttcccctagtgggagcaggacatgccactgattctcttcccttaatgggtgcaggacatgccccctcatttctatgccccaatggctgcaggatgtacccctcattgctgcagggcatgcccttcattccctttcccagatggcttcaggatgtgaccttcattcccttccccgatggctgcaggatatactcctcattcccatcccaagttggttgcaggacatgcctcttattccttttcccagatggctgcaggacatatcctatccctttcccccagatggctgccagatgtgacccttattattttacccagatagctgcagtacattcccctcatttcctttctctcatggctgcagaacatgcccctcattcccttctcctgatggctgcagaacatgtctctcatttcctttccctgatggctacagaacatgcccttcctttccttcccctgatggctgtgggacatgcccctcatttccttcccctgatggctgcaggacatgttcctcatttccttcccctgatggctgcagaacatgcccctcactcccttcccctgatggctgcagaacatgtcccttatttcctttccttgatggctgcgggacatgcccctactttccttcccctgatggctgcaggacatgttcctcatttccttcccctgatggctgcagaacatgcccctcattcccttctcctgatggctgcacaacatgtccctcatttcctccccctgatggctgcagaacatgcccctcattcccttctcctgatggctgcacaacatgtccctcatttcctccccctgatggctgcaggacatgcccctcctttccttcccctgatggctgcaggacatgttcctcatttccttcccttgatggctgcagaacatgtccctcatttccttcccctgatggctgcagaacgtgtccctcattttcatcccctgatggctgcagaacatgtccctcctttccttcccctgatggctgcaggacatgcccctcctttccttcccctgatg

SEQ ID NO: 2915 - DNA, 1981 bp, Homo sapiens
  MAP TO AC005185.1; EXPRESSED IN PLACENTA, SIGNAL = 3.9; EXPRESSED IN HBL100, SIGNAL = 2.2; EXPRESSED IN HEART, SIGNAL =   2; EXPRESSED IN BT474, SIGNAL = 2.6; EXPRESSED IN BRAIN, SIGNAL = 2.2; EXPRESSED IN BONE MARROW, SIGNAL = 2.4; EXPRESSED IN HELA, SIGNAL = 2.6; EXPRESSED IN ADULT LIVER, SIGNAL = 5.5; EXPRESSED IN FETAL LIVER, SIGNAL =   3; EXPRESSED IN LUNG, SIGNAL = 3.6
tcagacccaggatctcaaggttggtcagcctactgcagcagagaaagaagagtctccttcctcttcctcatctgttttgagggatactgcctccagctcccttgcttttggcattccccaggagcctcagagagagccacccaccacctctgctgctgcagctatgtcatgcactggatctgataaaggcgacgagagccaagatgaggaaaatgcaagttcctcccaggcctcaacatccactgagagatcactcaaagattctctaaccaggaagacgaagatgttagtgcagttcctgctgtacaagtataaaatgaaagagcccactacaaaggcagaaatgctgaagatcatcagcaaaaagtacaaggagcacttccctgagatcttcaggaaagtctctcagcgcacggagctggtctttggccttgccttgaaggaggtcaaccccaccactcactcctacatcctcgtcagcatgctaggccccaacgatggaaaccagagcagtgcctggacccttccaaggaatgggcttctgatgcctctactgagtgtgatcttcttaaatggcaactgtgcccgtgaagaggaaatctgggaattcctgaatatgctggggatctatgatggaaagaggcaccttatctttggggaaccccgaaagctcatcacccaagatctggtacaggaaaaatatctggaataccagcaggtgcccaacagtgatcccccacgctatcaattcctgtggggtccaagagctcatgcagaaaccagcaagatgaaagtcctggagtttttggccaaggtgaatgacaccacccccaataacttcccactgctttatgaagaggctttgagagatgaagaagagagagctggagcccggcccagagttgcagccaggcgtggcactacagccatgactagtgcgtattccagggccacatccagtagctcttcccaacccatgtgagatctaaggcaaattgttcactttgtggttgaaagacctgctgctttctctgttcctgtgatgcatgaataactcattgatttatctctttgttgtattttccatgatgtttcttaaaatagaaagtttatttagattcagaatataaatttagaaatggcatgcatcacacatttattgctgtttatcaggttggtttagtgataataattttgtttttgaaatacaaatagaaaatcctgaaataatttttgtgatacagagcaaaataacacggcatgggagtaaggttatccttagaaatttaaaataactccacagtaaaataggtagaatctgaagatagaaagggaagaaaagtaaaagttgctttattcgtggtttgtcttactcagttcagtctttttttgctcataaatttaaaagttacatacctggtttgcttagattattcaagaatgtggaggcctgggccaaggtcaatgacagtgtctccattgtcttccctccattaagagaagactttaagagatgagggagagagagccagagacagtgttgcaactgggcctggcatgtttcagtgtggtgtccagcagtgtctcccactccttgtgaagtctgaggtatattctttacttttgattaagaaaacacttaaccttctaattaatggagagccaaaggggagttggtgggaacaccatgtataacatatttgtatgtaaaatgatttatcttttctttttcctgtttttcagtgttctttttttaaattgtagatttatttagtttcagaatctaagtttatgaatggcatgaatcactcatttattaaaatatatcaggttggagagtgagaatttttgcattatgtaaaacaatttaaaaatcttttaagtctttttctgtgatctagaacaagataatatggcattggaatatggaatttgtgaaaaggaaattaccttgcaataaagttggtgggaccaggaagta

SEQ ID NO: 2916 - DNA, 417 bp, Homo sapiens
  MAP TO L47234.1; EXPRESSED IN HEART, SIGNAL = 3.2; EXPRESSED IN FETAL LIVER, SIGNAL = 3.2; EXPRESSED IN ADULT LIVER, SIGNAL = 2.2; EXPRESSED IN BT474, SIGNAL = 3.8; EXPRESSED IN BRAIN, SIGNAL = 3.3; EXPRESSED IN LUNG, SIGNAL = 2.2; EXPRESSED IN BONE MARROW, SIGNAL = 3.4; EXPRESSED IN PLACENTA, SIGNAL =   3; EXPRESSED IN HELA, SIGNAL = 3.3; EXPRESSED IN HBL100, SIGNAL = 3.4
accagccacacttgtaacccccctcgccccctctcctctgcccaccagtgcaccactacgggcgggccgtcatcatgtttggcgtcccctacgtctacacacagagccgcattctcaaggtgagtagctctgtctcccagggagtcccacagtgttaggatcaagggaggagtggctcccccacctccccagcttctcatcctccgtatctgcaggcgcggctggaatacctgcgggaccagttccagattcgtgagaatgactttcttaccttcgatgccatgcgccacgcggcccagtgtgtgggtcgggccatcaggggcaagacggactacggcctcatggtctttgccgacaaggtgcagcttcaggggtgcccctgtgctcccatcccaggctccaagaaccaggctgttt

SEQ ID NO: 2917 - DNA, 416 bp, Homo sapiens
  MAP TO AC012069.2; EXPRESSED IN HELA, SIGNAL = 1.3; EXPRESSED IN HEART, SIGNAL = 0.94
tcatgaaaacaaatctgtgggtttttttgttctagacaaagaagctaaccattatgtataaccttggtctgattaatattttccagaaactagaggttagctgatatttttttattcctttagaatacctgaatccagtggaggagaacccttttgtttctcggagaaaaaatggagaccttcaagcattggataatcccgaatatcacaatgcatccaatggtccacccaaggccgaggatgagtatgtgaatgagccactgtacctcaacacctttgccaacaccttgggaaaagctgagtacctgaagaacaacatactgtcaatgccagagaaggccaagaaagcgtttgacaaccctgactactggaaccacagcctgccacctcggagcacccttcagcacccagactac

SEQ ID NO: 2918 - DNA, 421 bp, Homo sapiens
  MAP TO AC010825.2; EXPRESSED IN PLACENTA, SIGNAL = 6.1; EXPRESSED IN HELA, SIGNAL = 6.1; EXPRESSED IN ADULT LIVER, SIGNAL = 6.3; EXPRESSED IN FETAL LIVER, SIGNAL = 4.8; EXPRESSED IN BT474, SIGNAL = 4.8; EXPRESSED IN BRAIN, SIGNAL = 4.1; EXPRESSED IN LUNG, SIGNAL =   8; EXPRESSED IN BONE MARROW, SIGNAL = 2.5; EXPRESSED IN HEART, SIGNAL = 4.3; EXPRESSED IN HBL100, SIGNAL = 4.8
  unsure 89
ccaaatagccagaaaatggcactttgatttttccatcctcaaaatttaaataattcttgtcgtaaaataggcaaacggtctgaggtgcntgacgtccaggcattcttttacacatcagtcccttcctagtctctgtgtgcagtgcaactcgtcccaaatcttccttctttccctcctgcctgtcccctcagtaccaaccccaagcatcactgagtctttctaatcttccttttctacagacccatctgacctctcccttcctccccaggctgctccttgccaggccgagctaggtcccaattcttcctcagcctctgctcctccaccctataatctttttatcacctcccctcctcacacctggtctggcttacaatttcgttccctgactagccctccccctcctgcccagcaatttact

SEQ ID NO: 2919 - DNA, 373 bp, Homo sapiens
  MAP TO AC011330.4; EXPRESSED IN BONE MARROW, SIGNAL = 1.8; EXPRESSED IN BRAIN, SIGNAL = 1.9; EXPRESSED IN LUNG, SIGNAL = 1.8; EXPRESSED IN PLACENTA, SIGNAL = 1.6; EXPRESSED IN HELA, SIGNAL =   2; EXPRESSED IN HBL100, SIGNAL = 1.8; EXPRESSED IN HEART, SIGNAL =   2; EXPRESSED IN FETAL LIVER, SIGNAL = 2.1; EXPRESSED IN BT474, SIGNAL = 2.4; EXPRESSED IN ADULT LIVER, SIGNAL =   2
atatgcccccagaaaacctccagcagctggtgctttcagcagagagggaggctgcacagggcttcctgacactcatgctgcaggggaagctgcaggggaagctgcaggtgagcactgagaaaggggagcaagggcacctggagcctagtgttcagagggcttgctttagtgggaggaggaactccagagaggaaatggcagggatactgagcatctccagaggcagaatccattcctgtgcccctacaggtaccaccatccgaggagcaggccctgggtcgcctgacagccctgctgctccagcggtacccacgcctcacctcccagctcttcattgacctgtcaccactcatccctttcttggctgtctctg

(The sequence listing continues in the following parts.)

What is claimed is:

1. A nucleic acid probe for measuring human gene expression, comprising:
a nucleotide sequence as set forth in any one of SEQ ID NOs: 16,835-33,299, the complement thereof, or a fragment of said SEQ ID NO: or said complement,
wherein said probe is a single exon probe that hybridizes under high stringency conditions to a nucleic acid molecule expressed in human cells or tissues.

2. A single exon nucleic acid probe according to claim 1, wherein:
said nucleotide sequence is selected from the exon SEQ ID NOs: set forth in Table 4, the complement thereof, or a fragment of said SEQ ID NO: or said complement,
and wherein said probe hybridizes under high stringency conditions to a nucleic acid molecule expressed in human brain.

3. A single exon nucleic acid probe according to claim 1, wherein:
said nucleotide sequence is selected from the exon SEQ ID NOs: set forth in Table 5, the complement thereof, or a fragment of said SEQ ID NO: or said complement,
and wherein said probe hybridizes under high stringency conditions to a nucleic acid molecule expressed in human heart.

4. A single exon nucleic acid probe according to claim 1, wherein:
said nucleotide sequence is selected from the exon SEQ ID NOs: set forth in Table 6, the complement thereof, or a fragment of said SEQ ID NO: or said complement,
and wherein said probe hybridizes under high stringency conditions to a nucleic acid molecule expressed in human liver.

5. A single exon nucleic acid probe according to claim 1, wherein:
said nucleotide sequence is selected from the exon SEQ ID NOs: set forth in Table 7, the complement thereof, or a fragment of said SEQ ID NO: or said complement,
and wherein said probe hybridizes under high stringency conditions to a nucleic acid molecule expressed in human fetal liver.

6. A single exon nucleic acid probe according to claim 1, wherein:
said nucleotide sequence is selected from the exon SEQ ID NOs: set forth in Table 8, the complement thereof, or a fragment of said SEQ ID NO: or said complement,
and wherein said probe hybridizes under high stringency conditions to a nucleic acid molecule expressed in human placenta.

7. A single exon nucleic acid probe according to claim 1, wherein:
said nucleotide sequence is selected from the exon SEQ ID NOs: set forth in Table 9, the complement thereof, or a fragment of said SEQ ID NO: or said complement,
and wherein said probe hybridizes under high stringency conditions to a nucleic acid molecule expressed in human lung.

8. A single exon nucleic acid probe according to claim 1, wherein:
said nucleotide sequence is selected from the exon SEQ ID NOs: set forth in Table 10, the complement thereof, or a fragment of said SEQ ID NO: or said complement,
and wherein said probe hybridizes under high stringency conditions to a nucleic acid molecule expressed in human bone marrow.

9. A single exon nucleic acid probe according to claim 1, wherein:
said nucleotide sequence is selected from the exon SEQ ID NOs: set forth in Table 11, the complement thereof, or a fragment of said SEQ ID NO: or said complement,
and wherein said probe hybridizes under high stringency conditions to a nucleic acid molecule expressed in HeLa cells.

10. A single exon nucleic acid probe according to claim 1, wherein:
said nucleotide sequence is selected from the exon SEQ ID NOs: set forth in Table 12, the complement thereof, or a fragment of said SEQ ID NO: or said complement,
and wherein said probe hybridizes under high stringency conditions to a nucleic acid molecule expressed in BT 474 cells.

11. A single exon nucleic acid probe according to claim 1, wherein:
said nucleotide sequence is selected from the exon SEQ ID NOs: set forth in Table 13, the complement thereof, or a fragment of said SEQ ID NO: or said complement,
and wherein said probe hybridizes under high stringency conditions to a nucleic acid molecule expressed in HBL 100 cells.

12. The single exon nucleic acid probe of claim 1, wherein said fragment includes at least 20 contiguous nucleotides of said SEQ ID NO: or the complement thereof.

13. The single exon nucleic acid probe of claim 1, wherein said fragment includes at least 25 contiguous nucleotides of said SEQ ID NO: or the complement thereof.

14. The single exon nucleic acid probe of claim 1, wherein said fragment includes at least 50 contiguous nucleotides of said SEQ ID NO: or the complement thereof.

15. The single exon nucleic acid probe of claim 1, wherein said probe further comprises, contiguous to a first end of said fragment, a first intronic and/or intergenic sequence that is identically contiguous to said fragment in the human genome.

16. The single exon nucleic acid probe of claim 15, wherein said probe further comprises, contiguous to a second end of said fragment, a second intronic and/or intergenLc sequence that is identically contiguous to said fragment in the human genome.

17. The single exon nucleic acid probe of claim 16, wherein said probe comprises a nucleotide sequence selected from any one of SEQ ID NOs: 1-16,834, or the complement thereof.

18. The single exon nucleic acid probe of claim 17, wherein:
said probe comprises a nucleotide sequence selected from the probe SEQ ID NOs: set forth in Table 4, or the complement thereof,
and wherein said probe hybridizes under high stringency conditions to a nucleic acid molecule expressed in human brain.

19. The single exon nucleic acid probe of claim 17, wherein:
said probe comprises a nucleotide sequence selected from the probe SEQ ID NOs: set forth in Table 5, or the complement thereof,
and wherein said probe hybridizes under high stringency conditions to a nucleic acid molecule expressed in human heart.

20. The single exon nucleic acid probe of claim 17, wherein:
said probe comprises a nucleotide sequence selected from the probe SEQ ID NOs: set forth in Table 6, or the complement thereof,
and wherein said probe hybridizes under high stringency conditions to a nucleic acid molecule expressed in human liver.

21. The single exon nucleic acid probe of claim 17, wherein:
said probe comprises a nucleotide sequence selected from the probe SEQ ID NOs: set forth in Table 7, or the complement thereof,
and wherein said probe hybridizes under high stringency conditions to a nucleic acid molecule expressed in human fetal liver.

22. The single exon nucleic acid probe of claim 17, wherein:
said probe comprises a nucleotide sequence selected from the probe SEQ ID NOs: set forth in Table 8, or the complement thereof,
and wherein said probe hybridizes under high stringency conditions to a nucleic acid molecule expressed in human placenta.

23. The single exon nucleic acid probe of claim 17, wherein said probe comprises a nucleotide sequence selected from the probe SEQ ID NOs: set forth in Table 9, or the complement thereof,
and wherein said probe hybridizes under high stringency conditions to a nucleic acid molecule expressed in human lung.

24. The single exon nucleic acid probe of claim 17, wherein:
said probe comprises a nucleotide sequence selected from the probe SEQ ID NOs: set forth in Table 10, or the complement thereof,
and wherein said probe hybridizes under high stringency conditions to a nucleic acid molecule expressed in human bone marrow.

25. The single exon nucleic acid probe of claim 17, wherein:
said probe comprises a nucleotide sequence selected from the probe SEQ ID NOs: set forth in Table 11, the complement thereof, or a fragment of said SEQ ID NO: or said complement,
and wherein said probe hybridizes under high stringency conditions to a nucleic acid molecule expressed in HeLa cells.

26. The single exon nucleic acid probe of claim 17, wherein:
said probe comprises a nucleotide sequence selected from the probe SEQ ID NOs: set forth in Table 12, the complement thereof, or a fragment of said SEQ ID NO: or said complement,
and wherein said probe hybridizes under high stringency conditions to a nucleic acid molecule expressed in BT 474 cells.

27. The single exon nucleic acid probe of claim 17, wherein:
said probe comprises a nucleotide sequence selected from the probe SEQ ID NOs: set forth in Table 13, the complement thereof, or a fragment of said SEQ ID NO: or said complement,
and wherein said probe hybridizes under high stringency conditions to a nucleic acid molecule expressed in HBL 100 cells.

28. The single exon nucleic acid probe of claim 1, wherein said probe is no more than 25 kb in length.

29. The single exon nucleic acid probe of claim 1, wherein said probe is no more than 5 kb in length.

30. The single exon nucleic acid probe of claim 1, wherein said probe lacks prokaryotic and bacteriophage vector sequence.

31. The single exon nucleic acid probe of claim 1, wherein said probe lacks homopolymeric stretches of A or T.

32. A nucleic acid probe for measuring human gene expression, comprising:
a nucleotide sequence that encodes, or the complement of which encodes, at least 8 amino acids of any one of SEQ ID NOs:33,300-49,117, wherein said probe is a single exon probe that hybridizes under high stringency conditions to a nucleic acid molecule expressed in human cells or tissues.

33. A spatially-addressable set of single exon nucleic acid probes for measuring human gene expression, comprising:
a plurality of single exon nucleic acid probes according to claim 1, wherein each of said plurality of probes is separately and addressably isolatable or amplifiable from said plurality.

34. The spatially-addressable set of single exon nucleic acid probes of claim 33, wherein each of said plurality of probes is amplifiable using at least one common primer.

35. The spatially-addressable set of single exon nucleic acid probes of claim 33, wherein said set comprises between 50-20,000 single exon nucleic acid probes.

36. The spatially-addressable set of single exon nucleic acid probes of claim 33, wherein the average length of the single exon nucleic acid probes is between 50 bp and 750 bp.

37. The spatially-addressable set of single exon nucleic acid probes of claim 33, wherein at least 50% of said single exon nucleic acid probes lack prokaryotic and bacteriophage vector sequence.

38. The spatially-addressable set of single exon nucleic acid probes of claim 33, wherein at least 50% of said single exon nucleic acid probes lack homopolymeric stretches of A or T.

39. The spatially-addressable set of single exon nucleic acid probes of claim 33, wherein said probes are addressably disposed upon a substrate.

40. A single exon microarray for measuring human gene expression, comprising:
a spatially-addressable plurality of single exon nucleic acid probes according claim 1.

41. A single exon microarray for measuring human gene expression, comprising:
a spatially-addressable plurality of single exon nucleic acid probes according to any one of claims 2-32.

42. The single exon microarray of claim 40, wherein said plurality of single exon nucleic acid probes averages at least 50 bp in length.

43. The single exon microarray of claim 40, wherein said plurality of single exon nucleic acid probes averages at least 75 bp in length.

44. The single exon nucleic acid microarray of claim 40, wherein said single exon nucleic acid probes are noncovalently bound to the substrate of said microarray.

45. A method of measuring human gene expression, comprising:
contacting the microarray of claim 40 with a first plurality of detectably labeled nucleic acids, said first plurality of nucleic acids being derived from human gene transcripts; and then
measuring the Label detectably bound to each probe of said microarray, said measures of detected label providing a measure of human gene expression.

46. The method of claim 45, further comprising:
contacting said microarray with a second plurality of detectably Labeled nucleic acids;
measuring the label detectably bound to each probe of said microarray; and
comparing said first and second measurements,
said comparative measures of detected label providing a measure of human gene expression.

47. The method of claim 46, wherein said first and second pluralities are distinguishably labeled and simultaneously contacted to said microarray.

48. A vector, comprising: the single exon probe of claim 1.

49. An ORF-encoded peptide, comprising: at least 8 contiguous amino acids of any one of SEQ ID NOs:33,300-49,117 or at least 8 contiguous amino acids of any one of SEQ ID NOs:33,300-49,117 with conservative amino acid substitutions.

50. The ORF-encoded peptide of claim 49, wherein said peptide comprises at least 15 contiguous amino acids of any one of SEQ ID Nos:33,300-49,117 or at least 15 contiguous amino acids of any one of SEQ ID NOs:33,300-49,117 with conservative amino acid substitutions.

51. An isolated antibody, wherein said antibody binds specifically to a peptide according to claim 49.

52. A method of selling and/or licensing single exon probes to a customer desiring to measure gene expression, comprising:
making available for computerized query a database having a plurality of records, each record corresponding to a single exon probe according to claim 1,
wherein said database responds to a customer query by returning to the customer at least one record, or an identifier of said record, that satisfies the customer query criteria, the probes to which said records correspond being available for sale and/or licensing.

53. A method of selling and/or licensing single-exon microarrays to a customer desiring to measure gene expression, comprising:
making available for computerized query a database having a plurality of records, each record corresponding to a microarray according to claim 40,
wherein said database responds to a customer query by returning to the customer at least one record, or an identifier of said record, that satisfies the customer query criteria, the microarrays to which said records correspond being available for sale and/or licensing.

54. A method of providing human gene expression data by subscription, comprising:
making available for computerized query a database having a plurality of records, each record including data on the expression of a single exon probe according to claim 1,
wherein said database responds to a query by a customer having a subscription, but not to a query by a customer lacking such subscription, by returning at least one record, or identifier of said at least one record, that satisfies the customer query criteria.

55. A computer readable storage medium storing instructions that, when executed by a computer, causes the computer to perform the method of any one of claims 52 to 55.

56. A computer system, comprising a processor programmed to perform the method of any one of claims 52 to 55.

57. A computer readable storage medium containing a database having a plurality of records, each record including data on the expression of a single exon probe according to claim 1.

58. A method of financing a company that makes and sells single exon probes, single exon microarrays, or expression data obtained therefrom, comprising:
making known the availability for distribution, sale, and/or license of single exon probes, single exon microarrays, and/or data therefrom; and then
selling stock in said company.
